United States Patent Application Publication US 2018/0126003 A1 - sequence listing, part 135

SEQ ID NO: 235942 - DNA, 2249 bp, Artificial Sequence
  derived and/or modified sequence
atggctgtgtttctgcagctgctaccgctgctgctctcgagggcccaagggaaccctggggcttctctggacggccgccctggggaccgggtgaatctctcctgcggaggagtctctcatcccatccgctgggtctgggcacccagcttcccggcctgcaagggcctgtccaaaggacgccgaccgatcctgtgggcctcttcgagcgggacccccaccgtgcctcccctccagcctttcgtcggccgcctacgctccctggactctggtatccggcggctggagctcctcttgagcgcgggagactcgggcacttttttctgcaagggccgccacgaggacgagagccgtacagtgcttcacgtgctgggggacaggacctattgcaaggcccccgggcctacccatgctctgtcccccccacatagctccacttgtgaaaaccgagccccagaggccagtaaaggaggaagagcccaagattccaggggacctggaccaggaaccgagcctgctctatgcggatctggaccatctagccctcagcaggccccgccggctgtccacagcggaccctgctgatgcctccaccatctatgcagttgtagtttgaagggaagcccttactccaaacctcccaagctaggggatcccagctccccataatccctctcccctccttggttcctcacctggaagaggaaggcaccatggtatagaaataagtgctagactgggagttgggagacctgggttccaggctgtctctgccactggtcttacttctaaacttactcccatctctcctataacctccatgtctccctcaccaccagtgtcctctctatacccaatcaagccctagctccttttttttttttttttgagacggagtctcgctctgttgcccaggctggagtgcagtgacaccatctccctcactgcaagctccgcctgccgggttcacaccattctcctgcctcaggctcctgagtagctgggactacaggcgcccgccaccacgcccagctaattttttgtatttttagtagagacggggtttcactgtgttagccaggatggtcttgatctgctaacctcgtgatccacccgccccggcctcccaaagtgctaggattacaggtgtgagccaccgcgcccggcctgattctttaagctgtttttctttgttgctggtgttttctttttggactcctcttccttgctccatatccctacagtatttcccaccattctaggtttgtccctttctcttcttctgggacactctcatcaacagtcagtcctcagccccctcctctgcaaatgacactcagaactctctctggctcagatctcagatttgggattaacaaacttccacttagacattctgcctgactgacctcaggcatttcgcactctgaatgtcaaacccaactcattgtcatctctgaagctgctcacttaattctcctctgtattctctttaacaacccagttgcccaacccagaaactgggagtcacgcagacctcctttctctcttactcccacacaatgagccatgaagtccagtctttctatcttaacatcactgtcaaacccacactgtattccatgcccagcgctgccacgtgaatgtactctgctcacttccttcctggattacccatagccccacctcatcctcctacccttgctttcctccctgaagtcagagagatcctactcaagagataactgctcctgacagcccttattacagaactgaagtactctccttagcttcagctctgtgcccacgtgccttggctttggatacaaggtactacagcactttgtccactctccaggcttacctgtgtcattccacatgcacatcttagaaaatgccagccttagagaattctccctagccccaaaatgtctttgcccagtgcaattccttcttcctgtattacccctttccctccttcacactatctgcctggctaattcttatttatccttagttcaagtatggccttttctgggaaggtgaccctccttggccaccccttgcatatactttgatgccctagggcacaccccctttatttccctcatagaaacagccttctgtaaattgttccatgacaacctgtatttcaatttgtaagaaatttgcatgtactgtgagctccccaacgtcaggagactgacccttttgatatcattgctaagcctcattaaatgaatgaatgaaaa

SEQ ID NO: 235943 - DNA, 2249 bp, Artificial Sequence
  derived and/or modified sequence
atggctgtgtttctgcagctgctaccgctgctgctctcgagggcccaagggaaccctggggcttctctggacggccgccctggggaccgggtgaatctctcctgcggaggagtctctcatcccatccgctgggtctgggcacccagcttcccggcctgcaagggcctgtccaaaggacgccgaccgatcctgtgggcctcttcgagcgggacccccaccgtgcctcccctccagcctttcgtcggccgcctacgctccctggactctggtatccggcggctggagctcctcttgagcgcgggggactcgggcacttttttctgcaagggccgccacgaggacgagagccgtacagtgcttcacgtgctgggggacaggacctattgcaaggcccccgggcctacccatgctctgtcccccccacatagctccacttgtgaaaaccgagccccagaggccagtaaaggaggaagagcccaagattccaggggacctggaccaggaaccgagcctgctctatgcggatctggaccatctagccctcagcaggccccgccggctgtccacagcggaccctgctgatgcctccaccatctatgcagttgtagtttgaagggaagcccttactccaaacctcccaagctaggggatcccagctccccataatccctctcccctccttggttcctcacctggaagaggaaggcaccatggtatagaaataagtgctagactgggagttgggagacctgggttccaggctgtctctgccactggtcttacttctaaacttactcccatctctcctataacctccatgtctccctcaccaccagtgtcctctctatacccaatcaagccctagctccttttttttttttttttgagacggagtctcgctctgttgcccaggctggagtgcagtgacaccatctccctcactgcaagctccgcctgccgggttcacaccattctcctgcctcaggctcctgagtagctgggactacaggcgcccgccaccacgcccagctaattttttgtatttttagtagagacggggtttcactgtgttagccaggatggtcttgatctgctaacctcgtgatccacccgccccggcctcccaaagtgctaggattacaggtgtgagccaccgcgcccggcctgattctttaagctgtttttctttgttgctggtgttttctttttggactcctcttccttgctccatatccctacagtatttcccaccattctaggtttgtccctttctcttcttctgggacactctcatcaacagtcagtcctcagccccctcctctgcaaatgacactcagaactctctctggctcagatctcagatttgggattaacaaacttccacttagacattctgcctgactgacctcaggcatttcgcactctgaatgtcaaacccaactcattgtcatctctgaagctgctcacttaattctcctctgtattctctttaacaacccagttgcccaacccagaaactgggagtcacgcagacctcctttctctcttactcccacacaatgagccatgaagtccagtctttctatcttaacatcactgtcaaacccacactgtattccatgcccagcgctgccacgtgaatgtactctgctcacttccttcctggattacccatagccccacctcatcctcctacccttgctttcctccctgaagtcagagagatcctactcaagagataactgctcctgacagcccttattacagaactgaagtactctccttagcttcagctctgtgcccacgtgccttggctttggatacaaggtactacagcactttgtccactctccaggcttacctgtgtcattccacatgcacatcttagaaaatgccagccttagagaattctccctagccccaaaatgtctttgcccagtgcaattccttcttcctgtattacccctttccctccttcacactatctgcctggctaattcttatttatccttagttcaagtatggccttttctgggaaggtgaccctccttggccaccccttgcatatactttgatgccctagggcacaccccctttatttccctcatagaaacagccttctgtaaattgttccatgacaacctgtatttcaatttgtaagaaatttgcatgtactgtgagctccccaacgtcaggagactgacccttttgatatcattgctaagcctcattaaatgaatgaatgaaaa

SEQ ID NO: 235944 - DNA, 582 bp, Artificial Sequence
  derived and/or modified sequence
atggccgtgttcctgcagctgctgcccctgctgctgagcagagcccagggcaaccccggcgccagcctggacggcagacccggcgacagagtgaacctgagctgcggcggcgtgagccaccccatcagatgggtgtgggcccccagcttccccgcctgcaagggcctgagcaagggcagaagacccatcctgtgggccagcagcagcggcacccccaccgtgccccccctgcagcccttcgtgggcagactgagaagcctggacagcggcatcagaagactggagctgctgctgagcgccggcgacagcggcaccttcttctgcaagggcagacacgaggacgagagcagaaccgtgctgcacgtgctgggcgacagaacctactgcaaggcccccggccccacccacgccctgagccccccccacagcagcacctgcgagaacagagcccccgaggccagcaagggcggcagagcccaggacagcagaggccccggccccggcaccgagcccgccctgtgcggcagcggccccagcagcccccagcaggccccccccgccgtgcacagcggcccctgctag

SEQ ID NO: 235945 - DNA, 582 bp, Artificial Sequence
  derived and/or modified sequence
atggcagtgttcctgcaactgctgccccttctgctctcacgcgctcaggggaatccaggcgcttccctggacggccgtccaggagaccgggtgaacttaagttgcggcggcgtctcccatccaatcaggtgggtctgggcgccttctttcccagcctgtaagggcctttccaaggggcggcggcctatcttgtgggcttctagctccggcacgccaaccgttcctccactccaacccttcgtgggcaggctgagatctctcgatagcggtatcaggaggctcgagctccttcttagtgctggagactccggcacatttttctgtaaaggccgacacgaggacgaaagccgcactgtgttgcacgtgctgggcgacagaacctactgtaaggcacccggacccacacacgctctgtctcccccccacagctctacctgtgaaaatagagcacctgaagcttctaaggggggacgcgctcaggactctcggggtcccggtcccggcaccgaacccgccctgtgcggctccggcccctcttcacctcaacaggccccgccagcggtacacagtggtccttgctag

SEQ ID NO: 235946 - DNA, 582 bp, Artificial Sequence
  derived and/or modified sequence
atggccgtgttccttcagctgctgccactcttactaagcagagcccaggggaaccctggcgcaagcctcgacgggcggccaggcgatcgcgtgaacttgagctgtggcggggtctcccaccccattcggtgggtttgggcacccagttttcctgcctgtaaggggctctccaaagggcggaggcccatcctgtgggcaagctctagcgggactccaacggttccccctctccagccctttgtcggacggctgcggtctctggactctggcattcgtagattggaactgcttctgtccgcaggggactctggtacattcttctgtaagggccggcatgaagacgaatcaaggacagtcctgcacgtgctgggtgatagaacttattgcaaagctccagggccaactcatgccctatcacctccgcacagttctacgtgcgagaatagagcacctgaagctagcaaaggggggcgtgctcaagactctcgcggtcccgggcccggtacagagccagccctttgtggctccgggccaagtagccctcagcaggcaccccctgcagtccattctggcccatgttag

SEQ ID NO: 235947 - DNA, 582 bp, Artificial Sequence
  derived and/or modified sequence
atggcagtgtttcttcagctcctgcccttattgctatccagagcccaggggaaccctggggcatccctggatggccgacccggcgatagggtcaacctgtcatgtggaggggtatctcaccccattagatgggtttgggccccttcattcccggcgtgtaaaggcctttcgaaaggtcggcgccccatcctgtgggcatcttcctctgggaccccaacagtgccccctctgcagccgttcgttgggcggctaaggagcctcgacagcgggatccggcgtcttgagctcctgttgagtgccggagattccgggacgttcttctgcaagggccgtcatgaggacgagtccagaaccgtactgcacgttctgggggataggacctactgcaaagcacccggacctacacacgcactgtcacctccacattcctctacgtgtgagaatcgcgccccggaggccagcaagggcggtagagcacaggatagcaggggtcccggccccggcaccgaacccgcgctctgtggctccggcccttcctcaccccagcaggccccccccgctgtacacagtgggccgtgctag

SEQ ID NO: 235948 - DNA, 582 bp, Artificial Sequence
  derived and/or modified sequence
atggctgtctttttgcagctgctccctctgctgttgtcaagagcccagggcaaccccggcgcgtcattggacggccgccctggggatcgagtcaatctgtcttgcggtggagtgagtcatcctatccgctgggtgtgggcccctagttttccggcttgcaagggactgtctaagggcaggcgaccaattctttgggcatccagttcaggcacccctacagtgccacctcttcaaccctttgtaggtagactccggagcttggacagcgggatacgcagattagagctgctgctgtcagctggagattcaggtacgtttttctgtaaggggcgccatgaggacgaatccaggacggtcctgcatgtgctcggagacagaacctattgcaaggcaccaggacccacacacgctctatcccccccacactcttccacatgtgaaaatagggcaccggaggcctctaaaggcggtcgggcccaggattcacgtggcccaggcccggggacagaacccgccctttgcggcagtgggcccagctcaccccaacaagcacctcctgcagtgcatagcggcccctgttag

SEQ ID NO: 235949 - DNA, 582 bp, Artificial Sequence
  derived and/or modified sequence
atggctgttttcttgcaactgctgccgctgctgttaagtcgcgcacagggtaatccaggggcttccctggatggacggccaggagaccgtgtcaatttgagctgcggcggcgtcagccatcctatccgatgggtatgggctcctagtttccctgcatgtaagggactgtcaaaaggccgccgacccattctctgggccagctcctccggtactcctaccgtaccacctcttcaaccctttgtgggccgactcagaagcctcgatagcggaatcaggaggctggagcttttgctgagcgctggcgacagtggaaccttcttctgtaaaggccggcacgaagacgagagtcgaaccgtgctgcacgttctgggagaccgaacctactgcaaggcacccggtcccacacatgccttaagccccccacactcctctacatgcgagaatagagccccagaagcttctaagggaggtagagctcaggattcccggggtcctgggcccgggacggagccagctctgtgtgggagtggtccctcctcccctcagcaggccccaccagctgtgcatagtgggccttgctag

SEQ ID NO: 235950 - DNA, 582 bp, Artificial Sequence
  derived and/or modified sequence
atggcagtgttcctccagctgctgcccctcctgctgagccgggcacagggaaaccctggcgcatctctggatgggagacccggcgatcgggttaatttgtcctgtggcggcgtgagccacccgatacggtgggtctgggctccgtcattcccagcctgtaaggggctgtcaaagggaaggcgccccattctttgggcatctagtagtgggacacccaccgtccccccactgcagccattcgtgggacgcctcaggtccctcgattcgggcattagacgcttggagctgctcttaagtgctggcgactcagggacattcttttgcaaaggtagacatgaagatgaaagcaggacagtactccacgtccttggtgacaggacatattgtaaggctccaggcccaacccacgccctgagcccgccgcatagctccacatgtgaaaaccgcgcccccgaggcatccaaaggtggaagagcccaggacagtcgcggcccggggcccggtaccgagcctgcactgtgcggaagcggaccctcctccccacagcaggcccctccggccgtccactcaggaccttgctag

SEQ ID NO: 235951 - DNA, 582 bp, Artificial Sequence
  derived and/or modified sequence
atggctgtgttcctgcagctgctgcccctgctgctgagccgggcccagggcaaccctggggccagcctggatggccggcctggggacagagtgaacctgagctgtggcggcgtgagccaccccatccgctgggtgtgggcccccagcttccctgcctgcaagggcctgagcaagggccggcggcccatcctgtgggccagcagcagcggcacccccaccgtgccccccctgcagccctttgtgggccgcctgcggagcctggacagcggcatccggcggctggagctgctgctgtctgctggggacagcggcaccttcttctgcaagggcagacatgaagatgagagcaggacagtgctgcacgtgctgggggacaggacctactgcaaggcccctggccccacccacgccctgagccccccccacagcagcacctgtgaaaatagagcccctgaggccagcaaaggaggccgggcccaggacagccggggccctggccctggaacagagcccgccctgtgtggcagcggccccagcagcccccagcaggcccctcctgctgtgcacagcggcccctgctag

SEQ ID NO: 235952 - DNA, 582 bp, Artificial Sequence
  derived and/or modified sequence
atggccgtgttcctgcagctgctgcccctgctgctgagccgggcccaaggtaatcccggtgcgtctctagacggccgccctggggaccgcgtgaacttgagttgtggcggcgtttcccatcctattaggtgggtttgggctccttcattcccagcctgtaagggcctgtcgaagggccggcgtcctatattgtgggcttcctcttctgggacccctaccgtgcctcccctacagccctttgtgggccgcctgagaagcctggattccggcataagacgtctggagctgcttctcagcgccggagacagcgggaccttcttttgcaagggtaggcatgaggatgagtcgaggaccgtactgcatgtcctgggagataggacatactgtaaagctcctggcccaacgcacgccctgtcccctccccattcgagcacttgcgaaaatcgcgccccagaagctagcaagggcggaagagcccaggattccaggggaccagggccaggcactgagcccgccctctgtggaagcggcccttccagcccacagcaggctccccctgctgttcacagcggaccatgctag

SEQ ID NO: 235953 - DNA, 582 bp, Artificial Sequence
  derived and/or modified sequence
atggccgtgttcctgcagctgctgcccctgctgctgagccgggcccaggggaatccaggcgctagcttagacggccgacccggtgatcgagtgaacctgagctgcggcggggtatcccaccctattcggtgggtctgggcaccatcgtttcctgcgtgtaaaggcctgtcgaaaggacggcgcccaatcctgtgggcttccagttccgggacaccaacagtgcctcctttgcagcctttcgtgggtcgtctccggtctctggactcggggatacgccggctggagctgctgctatccgcgggtgactctggaacattcttctgtaagggcaggcatgaagatgagagcagaaccgtactccacgtgttgggagatcggacttactgcaaagcccctggccccacacacgctttatcgccgccacactcttcaacctgtgaaaatagagctcccgaggcttccaaaggcggcagggcgcaggattcccgcggcccaggtcctggtacagaacctgccttgtgcgggtccggcccatccagcccccagcaggctcccccggctgttcattctggcccttgttag

SEQ ID NO: 235954 - DNA, 582 bp, Artificial Sequence
  derived and/or modified sequence
atggccgtgttcctgcagctgctgcccctgctgctgagccgggcccagggaaatccaggagccagcctggatggtagacccggcgatcgtgttaacctgagctgtggaggagtttcccaccctatccggtgggtctgggctccttctttccctgcatgtaagggcctgtctaaaggtcggcgcccgattctgtgggctagttcatctgggacccctactgtgccgcccctccagccctttgtgggacgcctgcgatcccttgatagcggcatcagaaggttagagttgctgctgagcgcaggcgatagcgggaccttcttctgtaagggtcgtcacgaggacgagagcaggactgtcctgcacgtgctgggcgacaggacgtattgtaaggctccagggccaacacacgcactcagcccgccccattccagtacctgcgagaatcgagcgccagaagcaagcaaggggggccgcgcgcaggactcccggggccccggtcctggcacagagccagccctctgtggaagcggtccttcttcaccccagcaagcaccacccgcagtccacagcggaccttgctag

SEQ ID NO: 235955 - DNA, 582 bp, Artificial Sequence
  derived and/or modified sequence
atggccgtgttcctgcagctgctgcccctgctgctgagccgggcccaggggaaccccggagccagtttggatggacgccccggagacagggttaacctaagctgtgggggcgtctcacacccaatcagatgggtatgggccccttctttccccgcttgcaagggcctttcgaaagggagacggcctattctttgggcttcttcgtctggaacacctacagtcccaccgctgcagccctttgtgggacgtctccgatccctggatagtggaatacgaagattggagcttttgttgtccgctggcgactctggaacctttttttgtaagggccgacacgaagacgaatctagaacagtcctgcacgtgctgggcgatcgaacttattgcaaggcgcctgggcctacgcacgcgctctctcccccccattcctctacgtgcgaaaatcgtgctcccgaggcatctaaaggaggacgagcacaggacagtaggggaccggggccgggcaccgaacccgctctctgtggctccggtccctctagcccacagcaagcaccccctgccgtgcactctggtccttgctag

SEQ ID NO: 235956 - DNA, 582 bp, Artificial Sequence
  derived and/or modified sequence
atggccgtgttcctgcagctgctgcccctgctgctgagccgggcccagggtaaccctggcgcatccctggacgggcgccccggcgatagagtgaacctaagttgtggcggcgtgtctcaccccatccgttgggtttgggctccttcattcccagcatgtaaaggtctatcaaaaggcaggaggcccatcctctgggcctctagcagtggtacgcctacagtgcctccgttgcagccatttgtcggccgactgagatccctcgattcaggcatacggagactcgagttactactgtccgccggcgacagcggtacattcttttgtaagggacggcacgaggacgaatcccggaccgtgctgcacgtattgggtgacagaacgtactgcaaagcccccggaccaacccacgcactgtcaccacctcactcatctacctgtgagaaccgggcccccgaagccagcaagggaggcagggcccaagactcgcgcggcccaggcccgggtaccgagccagcgctgtgcggtagcggtccttctagtccgcaacaggctccccctgcagtgcactccggaccatgctag

SEQ ID NO: 235957 - DNA, 582 bp, Artificial Sequence
  derived and/or modified sequence
atggccgtgttcctgcagctgctgcccctgctgctgagccgggcccagggaaaccccggggcttcactagatggaaggcccggagatcgcgtcaacctctcttgcggcggcgtgtcccatcccatccggtgggtgtgggctccgtccttccctgcgtgcaaaggtctgagtaaagggcgacgaccaatactctgggcttcttcttctgggactccaactgtaccccccctgcaaccttttgtcggacggctgagatctctggactcagggatcagaagactggaattgctgttgtcggccggcgattcagggaccttcttctgtaagggccgccacgaggacgagagcagaactgttctgcacgtgctgggtgaccgtacctactgtaaggcccccgggcccacacacgctctgtctccaccacattccagtacctgcgaaaatcgagcgccggaggcctccaaagggggcagagcacaggattcaaggggtcccggcccgggtacagagcccgccctctgcggcagcgggccctcgagccctcaacaagccccccccgccgtgcacagcggaccgtgttag

SEQ ID NO: 235958 - DNA, 582 bp, Artificial Sequence
  derived and/or modified sequence
atggccgtcttcctccaactgctccccttgttactgtcacgtgcccagggaaatccgggagccagtctcgacggaagacctggggatagggtcaatctgtcttgcggcggtgtgagccaccccatcagatgggtgtgggctccaagcttcccagcctgtaaggggttgagcaaaggacggcgacctatcctgtgggcaagcagtagcggcacacccactgtcccccctctccagccattcgtgggcaggcttagatcccttgactctggaatccggagactggaactgctgctgtctgcaggcgacagcgggacatttttttgcaagggccgacatgaggatgaaagccgtacagtcctgcatgtcctgggagatcgcacctactgtaaagctccgggaccgacccacgcactgtcccctccccactctagtacctgcgaaaatcgcgctccagaagccagcaagggtggtagggctcaggatagtagaggccctgggccaggcactgaacccgcactgtgcgggtccgggccatctagcccccagcaggctccgccagctgtgcattccggaccctgctag

SEQ ID NO: 235959 - DNA, 582 bp, Artificial Sequence
  derived and/or modified sequence
atggcggtgttcctgcagctactgcccctactgttgagccgggcacagggaaacccaggcgcatctctggatggtaggcccggagacagagtgaacttaagctgtgggggagtttcgcacccaattaggtgggtgtgggccccttccttccccgcatgtaaaggcctgagtaaagggaggcggcctatcctgtgggccagctcttctgggactcccacagtcccccctctgcagcccttcgtgggtaggcttagatcactggattctggaataaggaggctagaacttctactcagtgcgggagacagtgggacctttttctgtaaaggcaggcacgaggacgaaagcagaaccgtcctacacgttctcggagaccggacatattgtaaggctcctggacctacacacgcactaagtccccctcacagctccacctgcgagaatcgagctcccgaagcatcgaaagggggaagggcacaggattctagagggccagggcctgggactgagcctgcattatgtgggagtggaccctcatccccacagcaggcgccacctgctgtacactctgggccttgttag

SEQ ID NO: 235960 - DNA, 582 bp, Artificial Sequence
  derived and/or modified sequence
atggctgtgtttctgcagcttctgccacttctgctctcccgtgcccagggtaatcctggcgcaagtttagacgggaggcctggggatcgagtaaacctgtcatgtggtggcgtgtctcatccaatacggtgggtctgggccccatcatttcccgcttgtaaagggttatctaaaggaaggcggccaatcctatgggccagtagttctgggactcctacagtcccacccctgcagccttttgtggggagactccggtctctggactccggcattcgacgcctggagctgctactgagtgcaggcgactcagggacattcttctgcaagggtcgacacgaggatgagagcagaaccgtccttcatgttttgggagaccggacatattgcaaggcgccaggacccacccacgccctttctcctccacacagttcgacatgcgagaaccgagctcctgaagccagtaaagggggaagagcccaggactcacggggtccaggtccgggaaccgagccagccctttgtgggtccggaccctcatctccacagcaggcacccccagcagtacactctgggccatgctag

SEQ ID NO: 235961 - DNA, 582 bp, Artificial Sequence
  derived and/or modified sequence
atggcagtgtttttgcagcttttgcctctgttgcttagtcgtgcgcagggtaaccctggggcttcattggatggacggccaggggatagagtgaatctttcctgtggcggagttagccatcctatccggtgggtgtgggccccatcgttcccagcttgcaagggcctctctaaaggccgacggccaattctctgggccagtagctctggaaccccgacagtacccccattacagccgtttgtgggacgcttgcggagccttgatagcggtatcagacggctagaactgcttttgtcagcgggagattccggcacattcttttgtaaaggcaggcacgaagacgaaagccggacagtgcttcacgtacttggagaccggacctactgtaaggctcctggcccaacacatgcgctgtcaccaccacattccagcacatgtgagaaccgggctccagaagcaagcaaggggggacgcgctcaggatagtcgcggacccggaccgggaaccgaaccagcgctctgcgggtcgggcccatccagccctcagcaggctccccctgctgtacattccggaccttgttag

SEQ ID NO: 235962 - DNA, 582 bp, Artificial Sequence
  derived and/or modified sequence
atggcagtattcctgcagctccttcccttactcctgtctcgcgcacaggggaaccctggcgcatccctcgacggacgacccggtgacagggtgaacctctcctgtggcggtgttagccatcctatcaggtgggtctgggctccttccttcccggcatgcaaagggctctctaaggggagaagacctatcctttgggcttcaagcagcggcacgccgacagtcccgccactgcagcctttcgttggcagactgcgctcgctggattcgggaattcggagattggaactgctgcttagcgccggtgatagtggcacttttttctgcaagggccgtcatgaagacgagtccagaaccgtattacacgttttaggagaccggacttattgtaaggcccctggaccaacccatgcgctgagtccccctcacagctcaacatgtgaaaacagggcaccagaagctagtaaaggcggacgtgcgcaggacagcagggggcctggtccgggtacagagccggctctgtgcggtagtggcccatctagccctcagcaggccccaccagctgtccactctggcccttgctag

SEQ ID NO: 235963 - DNA, 582 bp, Artificial Sequence
  derived and/or modified sequence
atggctgttttcctccaactcttacctctgctgctaagcagagctcagggcaacccaggtgccagtctcgatggacgtcccggtgatcgcgttaacctgagttgtggtggtgttagccacccgatccgatgggtctgggccccttcatttccggcttgcaaaggcttatcaaagggccgacgccctatcctgtgggctagcagttcgggtacacccacggtcccacctctccaacctttcgtaggtcggctgcgatctttggattcgggtatccggagactcgaactcctcctctcagcaggcgacagcgggacgtttttttgcaaaggcaggcacgaagatgaaagcagaactgtactgcatgttcttggcgaccggacttattgtaaggcgcctgggcctacccatgccttatctccacctcactcatcaacatgcgaaaatcgagctcccgaagcaagcaaaggaggtagggcccaagatagccgcggtcctgggcctgggacagagcccgctctgtgtggcagcggtccctcttcaccccagcaagccccacctgcggtacacagtggtccctgctag

SEQ ID NO: 235964 - DNA, 582 bp, Artificial Sequence
  derived and/or modified sequence
atggcagttttccttcagctgctgccactgctgttaagtcgggcccaaggcaatccgggagcatcattagatgggcgaccaggcgaccgggtcaatctgagctgcggcggggtttcccacccaatccgttgggtttgggctccgtcatttcctgcctgtaaaggactcagtaagggacgacggcccatcctctgggccagtagctccgggacaccaacggtgcccccccttcagccctttgtaggaaggttacgctcacttgattcagggatcaggagactggagttactcctgtcagcaggcgatagcggcactttcttttgcaaggggcgccatgaagacgaatcaagaactgtgcttcacgtgctgggggataggacctattgcaaggcccccggccccacccatgccctgagtccaccccactcaagtacgtgcgagaatcgtgccccagaagcaagcaaaggtggaagagctcaggatagtagggggcctgggccgggtaccgagcccgcactgtgcgggtccggcccatcaagtcctcagcaagcccccccggctgtgcactccgggccatgctag

SEQ ID NO: 235965 - DNA, 582 bp, Artificial Sequence
  derived and/or modified sequence
atggccgtgttcctgcagctgctgcccctgctgctgagccgggcccaagggaaccccggcgcatcattggacggccgccccggcgacagggtgaacctctcatgcggcggcgtttcacaccccatccggtgggtatgggcccccagcttcccagcctgcaaaggactctcgaagggcagacggcctattctatgggcgtcctccagcgggactccaactgttccacccctccagccgttcgtcggtagactgcgaagtctggacagcggaattcgccgattggagcttttattaagtgcaggggattccggaacctttttctgcaaaggtaggcacgaggacgagtcccgcacagtgcttcatgtgctcggagacaggacttattgcaaagcacctggaccaacgcacgccctatcccctccccacagcagcacctgcgaaaatcgagccccagaggctagcaagggagggagggcacaggacagcagagggcctgggccggggaccgagcccgcactgtgcggatctggcccatcctccccacagcaggctcctccagccgtgcattctggtccatgctag

SEQ ID NO: 235966 - DNA, 582 bp, Artificial Sequence
  derived and/or modified sequence
atggccgttttcctgcagttactgcccctgctgttatcaagggcgcaaggaaatccaggggcatcattggatggccgtcctggggaccgggtgaacctctcctgcgggggagtgagccatcccatacgctgggtttgggctccttcgtttcccgcatgtaaaggcctgtccaaaggtcggaggccaatactttgggcgagcagttccggtaccccgaccgtcccccctctgcaaccctttgtcggtagattgcgatctctcgactctgggattaggcgtctggagcttctcctgtctgccggagatagcggcacattcttttgcaaaggcaggcacgaggatgagtcccgtaccgttctccatgttctgggcgacaggacctattgcaaagcgcctgggcctacccacgctctgtcccccccacacagttctacttgtgaaaaccgggctcccgaggccagcaaaggcggacgcgctcaggatagccggggacctggcccaggtacggagcccgcactgtgtggatccggaccttcctccccccaacaagcaccgcctgccgtccacagcggtccctgctag

SEQ ID NO: 235967 - protein, 197 aa, Artificial Sequence
  derived and/or modified sequence
MAVFLQLLPLLLSRAQGNPGASLDGRPGDRVNLSCGGVSHPIRWVWAPSFPACKGLSKGRRPILWASSSGTPTVPPLQPFVGRLRSLDSGIRRLELLLSAGDSGTFFCKGRHEDESRTVLHVLGDRTYCKAPGPTHAPLVKTEPQRPVKEEEPKIPGDLDQEPSLLYADLDHLALSRPRRLSTADPADASTIYAVVV

SEQ ID NO: 235968 - DNA, 594 bp, Artificial Sequence
  derived and/or modified sequence
atggctgtgtttctgcagctgctaccgctgctgctctcgagggcccaagggaaccctggggcttctctggacggccgccctggggaccgggtgaatctctcctgcggaggagtctctcatcccatccgctgggtctgggcacccagcttcccggcctgcaagggcctgtccaaaggacgccgaccgatcctgtgggcctcttcgagcgggacccccaccgtgcctcccctccagcctttcgtcggccgcctacgctccctggactctggtatccggcggctggagctcctcttgagcgcgggggactcgggcacttttttctgcaagggccgccacgaggacgagagccgtacagtgcttcacgtgctgggggacaggacctattgcaaggcccccgggcctacccatgctccacttgtgaaaaccgagccccagaggccagtaaaggaggaagagcccaagattccaggggacctggaccaggaaccgagcctgctctatgcggatctggaccatctagccctcagcaggccccgccggctgtccacagcggaccctgctgatgcctccaccatctatgcagttgtagtttga

SEQ ID NO: 235969 - DNA, 2230 bp, Artificial Sequence
  derived and/or modified sequence
atggctgtgtttctgcagctgctaccgctgctgctctcgagggcccaagggaaccctggggcttctctggacggccgccctggggaccgggtgaatctctcctgcggaggagtctctcatcccatccgctgggtctgggcacccagcttcccggcctgcaagggcctgtccaaaggacgccgaccgatcctgtgggcctcttcgagcgggacccccaccgtgcctcccctccagcctttcgtcggccgcctacgctccctggactctggtatccggcggctggagctcctcttgagcgcgggagactcgggcacttttttctgcaagggccgccacgaggacgagagccgtacagtgcttcacgtgctgggggacaggacctattgcaaggcccccgggcctacccatgctccacttgtgaaaaccgagccccagaggccagtaaaggaggaagagcccaagattccaggggacctggaccaggaaccgagcctgctctatgcggatctggaccatctagccctcagcaggccccgccggctgtccacagcggaccctgctgatgcctccaccatctatgcagttgtagtttgaagggaagcccttactccaaacctcccaagctaggggatcccagctccccataatccctctcccctccttggttcctcacctggaagaggaaggcaccatggtatagaaataagtgctagactgggagttgggagacctgggttccaggctgtctctgccactggtcttacttctaaacttactcccatctctcctataacctccatgtctccctcaccaccagtgtcctctctatacccaatcaagccctagctccttttttttttttttttgagacggagtctcgctctgttgcccaggctggagtgcagtgacaccatctccctcactgcaagctccgcctgccgggttcacaccattctcctgcctcaggctcctgagtagctgggactacaggcgcccgccaccacgcccagctaattttttgtatttttagtagagacggggtttcactgtgttagccaggatggtcttgatctgctaacctcgtgatccacccgccccggcctcccaaagtgctaggattacaggtgtgagccaccgcgcccggcctgattctttaagctgtttttctttgttgctggtgttttctttttggactcctcttccttgctccatatccctacagtatttcccaccattctaggtttgtccctttctcttcttctgggacactctcatcaacagtcagtcctcagccccctcctctgcaaatgacactcagaactctctctggctcagatctcagatttgggattaacaaacttccacttagacattctgcctgactgacctcaggcatttcgcactctgaatgtcaaacccaactcattgtcatctctgaagctgctcacttaattctcctctgtattctctttaacaacccagttgcccaacccagaaactgggagtcacgcagacctcctttctctcttactcccacacaatgagccatgaagtccagtctttctatcttaacatcactgtcaaacccacactgtattccatgcccagcgctgccacgtgaatgtactctgctcacttccttcctggattacccatagccccacctcatcctcctacccttgctttcctccctgaagtcagagagatcctactcaagagataactgctcctgacagcccttattacagaactgaagtactctccttagcttcagctctgtgcccacgtgccttggctttggatacaaggtactacagcactttgtccactctccaggcttacctgtgtcattccacatgcacatcttagaaaatgccagccttagagaattctccctagccccaaaatgtctttgcccagtgcaattccttcttcctgtattacccctttccctccttcacactatctgcctggctaattcttatttatccttagttcaagtatggccttttctgggaaggtgaccctccttggccaccccttgcatatactttgatgccctagggcacaccccctttatttccctcatagaaacagccttctgtaaattgttccatgacaacctgtatttcaatttgtaagaaatttgcatgtactgtgagctccccaacgtcaggagactgacccttttgatatcattgctaagcctcattaaatgaatgaatgaaaa

SEQ ID NO: 235970 - DNA, 2230 bp, Artificial Sequence
  derived and/or modified sequence
atggctgtgtttctgcagctgctaccgctgctgctctcgagggcccaagggaaccctggggcttctctggacggccgccctggggaccgggtgaatctctcctgcggaggagtctctcatcccatccgctgggtctgggcacccagcttcccggcctgcaagggcctgtccaaaggacgccgaccgatcctgtgggcctcttcgagcgggacccccaccgtgcctcccctccagcctttcgtcggccgcctacgctccctggactctggtatccggcggctggagctcctcttgagcgcgggggactcgggcacttttttctgcaagggccgccacgaggacgagagccgtacagtgcttcacgtgctgggggacaggacctattgcaaggcccccgggcctacccatgctccacttgtgaaaaccgagccccagaggccagtaaaggaggaagagcccaagattccaggggacctggaccaggaaccgagcctgctctatgcggatctggaccatctagccctcagcaggccccgccggctgtccacagcggaccctgctgatgcctccaccatctatgcagttgtagtttgaagggaagcccttactccaaacctcccaagctaggggatcccagctccccataatccctctcccctccttggttcctcacctggaagaggaaggcaccatggtatagaaataagtgctagactgggagttgggagacctgggttccaggctgtctctgccactggtcttacttctaaacttactcccatctctcctataacctccatgtctccctcaccaccagtgtcctctctatacccaatcaagccctagctccttttttttttttttttgagacggagtctcgctctgttgcccaggctggagtgcagtgacaccatctccctcactgcaagctccgcctgccgggttcacaccattctcctgcctcaggctcctgagtagctgggactacaggcgcccgccaccacgcccagctaattttttgtatttttagtagagacggggtttcactgtgttagccaggatggtcttgatctgctaacctcgtgatccacccgccccggcctcccaaagtgctaggattacaggtgtgagccaccgcgcccggcctgattctttaagctgtttttctttgttgctggtgttttctttttggactcctcttccttgctccatatccctacagtatttcccaccattctaggtttgtccctttctcttcttctgggacactctcatcaacagtcagtcctcagccccctcctctgcaaatgacactcagaactctctctggctcagatctcagatttgggattaacaaacttccacttagacattctgcctgactgacctcaggcatttcgcactctgaatgtcaaacccaactcattgtcatctctgaagctgctcacttaattctcctctgtattctctttaacaacccagttgcccaacccagaaactgggagtcacgcagacctcctttctctcttactcccacacaatgagccatgaagtccagtctttctatcttaacatcactgtcaaacccacactgtattccatgcccagcgctgccacgtgaatgtactctgctcacttccttcctggattacccatagccccacctcatcctcctacccttgctttcctccctgaagtcagagagatcctactcaagagataactgctcctgacagcccttattacagaactgaagtactctccttagcttcagctctgtgcccacgtgccttggctttggatacaaggtactacagcactttgtccactctccaggcttacctgtgtcattccacatgcacatcttagaaaatgccagccttagagaattctccctagccccaaaatgtctttgcccagtgcaattccttcttcctgtattacccctttccctccttcacactatctgcctggctaattcttatttatccttagttcaagtatggccttttctgggaaggtgaccctccttggccaccccttgcatatactttgatgccctagggcacaccccctttatttccctcatagaaacagccttctgtaaattgttccatgacaacctgtatttcaatttgtaagaaatttgcatgtactgtgagctccccaacgtcaggagactgacccttttgatatcattgctaagcctcattaaatgaatgaatgaaaa

SEQ ID NO: 235971 - DNA, 594 bp, Artificial Sequence
  derived and/or modified sequence
atggccgtgttcctgcagctgctgcccctgctgctgagcagagcccagggcaaccccggcgccagcctggacggcagacccggcgacagagtgaacctgagctgcggcggcgtgagccaccccatcagatgggtgtgggcccccagcttccccgcctgcaagggcctgagcaagggcagaagacccatcctgtgggccagcagcagcggcacccccaccgtgccccccctgcagcccttcgtgggcagactgagaagcctggacagcggcatcagaagactggagctgctgctgagcgccggcgacagcggcaccttcttctgcaagggcagacacgaggacgagagcagaaccgtgctgcacgtgctgggcgacagaacctactgcaaggcccccggccccacccacgcccccctggtgaagaccgagccccagagacccgtgaaggaggaggagcccaagatccccggcgacctggaccaggagcccagcctgctgtacgccgacctggaccacctggccctgagcagacccagaagactgagcaccgccgaccccgccgacgccagcaccatctacgccgtggtggtgtag

SEQ ID NO: 235972 - DNA, 594 bp, Artificial Sequence
  derived and/or modified sequence
atggcagttttcctgcagttactgcctttactgctgtcccgggctcagggcaacccaggagcctccctggatggccgcccgggtgacagggtgaatttgtcatgtggaggagtttcccaccctattaggtgggtttgggcaccatccttcccagcttgtaaaggcttaagcaaggggcggagacccattttatgggccagctcatctgggacacccaccgtgccacctctgcagccttttgtcgggagactgcggtctctagactccggaataagacgattagagttgctcctgtccgcgggagactctggtacgtttttctgcaaaggccggcacgaggatgagagcagaactgtcctgcacgtcctgggcgatcgcacatattgcaaggccccagggcctacacatgctcctcttgtgaagacggaaccacagcgcccggtgaaggaggaagagcccaaaatcccaggggatctggaccaggaaccttctttactttacgccgatctagaccacctagccctgtcaagaccccgtaggcttagtacggccgatccagccgatgcctctacaatctatgccgtggtggtttag

SEQ ID NO: 235973 - DNA, 594 bp, Artificial Sequence
  derived and/or modified sequence
atggcagtatttctccagctgctgcccttgctgctgagccgcgctcagggcaatcctggtgcaagcctggatgggcggccgggcgatagggttaatctaagttgtggaggagtttcccaccccattcgctgggtgtgggcacctagcttcccagcctgcaagggcctgtctaaggggcgccgccctattctctgggcatcctccagtggcaccccgactgtcccacccctgcagccttttgtgggaaggctgcgatcactggactccggaatccgccgtctggaactcttgctatccgcaggagacagtggaacattcttttgtaagggccggcacgaagatgagagccggacagtactgcatgtcttaggagaccggacgtattgtaaggcaccggggccaacacatgctccattggttaagactgagccgcagcggccagtaaaggaggaagagcccaagattccaggcgacctggatcaggaaccaagcttgctttatgcagatctcgatcacctcgccctgtcacgccctaggcgcctgagtacggcggacccagctgatgcatccacaatctacgccgtggtcgtgtag

SEQ ID NO: 235974 - DNA, 594 bp, Artificial Sequence
  derived and/or modified sequence
atggctgtttttctgcagctcttgccgttgttgttgtcgagggcccaaggaaacccaggcgcctctctggatggtagacctggtgaccgcgtgaacttgtcttgtggcggtgtatcacacccaataaggtgggtgtgggcaccctcttttcccgcctgtaagggtctcagcaagggccgccgccctatcttgtgggccagtagcagtggaacccccactgtgccaccgctccagccctttgtcgggagacttagaagcctggacagtggcataaggcggcttgaactactgttaagcgccggggatagtgggacctttttctgtaagggtcgtcacgaagatgagtctcgaactgtcctgcatgtgcttggggaccgaacatactgtaaggcacctggacctacacacgcacctttggttaaaaccgaaccacaaagacctgttaaagaagaggagccaaagatcccaggggacctggaccaggagcctagcctgctgtatgcggacttggaccatctggccctgtctcggccccgcagactgtctaccgcagaccctgctgatgcctctaccatttatgccgttgtggtctag

SEQ ID NO: 235975 - DNA, 594 bp, Artificial Sequence
  derived and/or modified sequence
atggccgtttttctccagttattgccgcttctgttgtcccgtgctcaagggaaccctggcgccagcctcgatggcaggcctggggatagggtgaacctgtcctgcgggggcgtttcccaccccatacggtgggtgtgggctccctcctttccggcctgcaagggcctgagcaagggacgaagacccatcctctgggcctcctcgtccggaacgcccactgtgccccccctccagccctttgtggggcgcctgagaagcctggacagcggaatcagacggttggaattactgcttagtgctggcgactccggcactttcttctgcaaaggcaggcacgaggatgaatcacggacggttctgcatgttctcggagatagaacctattgcaaggccccagggcctactcatgcacccctagtgaagactgagccacagcgaccagtcaaagaggaagagccaaaaatccctggcgaccttgaccaggaaccatcccttctgtacgcagacctggatcacctggcactgagccggcctcgccggttgtcaactgccgacccggccgatgcctcaacgatttacgcagtcgtagtttag

SEQ ID NO: 235976 - DNA, 594 bp, Artificial Sequence
  derived and/or modified sequence
atggccgtctttctacagctgttgcccttgttactctccagagctcagggaaaccctggggcttcccttgatgggaggccaggggaccgcgtgaacctctcatgtggtggagtctcacaccctattagatgggtctgggcaccgagctttccggcctgcaagggattatcaaagggtcgtagacctattctgtgggcctctagcagcggcactcccacagtccccccccttcagccgttcgtgggtaggctcaggtccctcgactctgggatcagaaggctcgagctgttgctaagcgccggagacagcggaacattcttctgtaaagggcggcacgaggacgaatcgaggacagttttgcatgtcttgggagatcgtacatactgtaaggcccccggacctacacatgctcccctcgtcaaaacagagccacagcggcctgtgaaagaagaggaacccaaaattcccggagacttagatcaggagccctccctgctttacgcagatctggatcatttggctctgagccgcccgcggaggctgtctacggcagacccggccgatgcctccaccatatatgcggtcgtggtgtag

SEQ ID NO: 235977 - DNA, 594 bp, Artificial Sequence
  derived and/or modified sequence
atggcggtctttctgcagctgctgcccttgttgctctcccgcgcacaggggaatcccggcgcatcactggacggtcggcctggtgatagagttaaccttagctgtggtggggtatcacatcctattcgctgggtctgggcccccagtttccccgcctgcaaagggttgagtaaaggccggaggcctatcctgtgggcctcctcctctggaacacccacagtgccccctttgcagccattcgtgggcagactgcgcagcttggattctggaatcagacggctggagctgttgctgtctgcgggggactcgggcaccttcttttgtaaagggaggcacgaagatgaatctcgaaccgtgctccatgtgctgggcgaccggacctattgcaaagcccccggcccaacccacgctccacttgtcaagaccgaaccccagagacccgtgaaggaagaggagcccaagataccgggtgacctggatcaggagccctccctgttgtacgccgatctcgaccacctggctttaagccggccacggcgcctttcaacagcagatcctgccgatgcctcaactatttatgccgtggtggtttag

SEQ ID NO: 235978 - DNA, 594 bp, Artificial Sequence
  derived and/or modified sequence
atggctgtgttcctgcagctgctgcccctgctgctgagccgggcccagggcaaccctggggccagcctggatggccggcctggggacagagtgaacctgagctgtggcggcgtgagccaccccatccgctgggtgtgggcccccagcttccctgcctgcaagggcctgagcaagggccggcggcccatcctgtgggccagcagcagcggcacccccaccgtgccccccctgcagccctttgtgggccgcctgcggagcctggacagcggcatccggcggctggagctgctgctgtctgctggggacagcggcaccttcttctgcaagggcagacatgaagatgagagcaggacagtgctgcacgtgctgggggacaggacctactgcaaggcccctggccccacccacgcccccctggtgaagacagagccccagaggcctgtgaaggaggaggagcccaagatccctggggacctggaccaggagcccagcctgctgtatgctgacctggaccacctggccctgagccggccccggcggctgagcacagctgaccctgcagatgccagcaccatctatgctgtggtggtgtag

SEQ ID NO: 235979 - DNA, 594 bp, Artificial Sequence
  derived and/or modified sequence
atggccgtgttcctgcagctgctgcccctgctgctgagccgggcccagggtaatccaggcgcctccctggacggaagaccaggcgacagggtcaatctctcctgtgggggcgtgagccatcctattagatgggtgtgggcacctagctttcccgcttgcaaaggactgagcaagggccgccggccgatcctgtgggcaagctctagtggtacaccaacggtgcctccgctccaaccgttcgtgggccgtctgcgatcactcgactctggtattcggcgcctcgaactcctgcttagcgcaggggatagtgggacgtttttctgcaagggcagacacgaagatgaatcccggaccgtgcttcacgttttgggagatcgtacatactgcaaggctcccggcccaacccacgctcctcttgtgaaaacggagccccagcgccctgtgaaggaagaggagcccaagatacctggcgacctcgatcaagaacccagccttctttacgcagaccttgatcatttggcactgtcacggccccggcggcttagtactgcggaccctgctgacgcttctacaatatacgccgttgtggtttag

SEQ ID NO: 235980 - DNA, 594 bp, Artificial Sequence
  derived and/or modified sequence
atggccgtgttcctgcagctgctgcccctgctgctgagccgggcccaagggaaccctggggcatccttagatggacgacctggagacagagtaaacctttcctgtgggggagtgtctcatcctatacggtgggtttgggctcctagtttcccagcctgcaaaggcctgagcaaagggcggcgccctatactgtgggcgagttcaagcgggacacccacagttccgcccctgcagccgttcgtgggaagactgcgatccctggattcagggattcggcgcttagaacttttgctcagcgctggcgattctggtactttcttctgcaagggacgccacgaggacgaatcccgtaccgtgcttcacgttctaggagacagaacatactgtaaggctcctggacccactcatgcccctctggtgaagaccgaaccccagcggcctgttaaggaagaggagccaaagatcccaggtgacttagaccaggaaccttcactgctttatgcggacttggatcacctggctcttagcaggcccagaaggctctccaccgcagaccccgccgatgctagcacgatttatgccgtcgtcgtgtag

SEQ ID NO: 235981 - DNA, 594 bp, Artificial Sequence
  derived and/or modified sequence
atggccgtgttcctgcagctgctgcccctgctgctgagccgggcccagggaaatcctggtgctagtctggacggaaggcctggagacagagttaacttgtcctgcggaggcgtatcccatcctatcagatgggtctgggcgccaagcttccctgcctgcaagggattgtcgaaaggccgcaggcccattctgtgggccagctccagtggtacccccaccgtgcccccgctccagccgtttgttggccgcctccgctcactggatagcggcataaggcgattggagctgctgctgtctgccggagactccggaaccttcttctgcaagggacgacacgaggacgagagccgcaccgtgttgcatgtactgggcgacagaacatattgcaaggctccaggccctacacatgcccccctggtgaaaacagagccacagagacctgtgaaagaggaagaaccaaaaattccaggcgaccttgaccaagagccctcccttctgtacgctgaccttgaccatctagccctctcacgaccgagacggctctctacagccgaccccgccgacgccagtactatttatgccgtagttgtgtag

SEQ ID NO: 235982 - DNA, 594 bp, Artificial Sequence
  derived and/or modified sequence
atggccgtgttcctgcagctgctgcccctgctgctgagccgggcccagggtaaccccggcgccagcctggacgggaggcccggggatcgagttaacctcagttgtggaggggtatcccatcccatcaggtgggtgtgggctccctctttccccgcctgtaaaggactcagcaaaggacgtcgccccatactgtgggcatcatcctcaggaacacccaccgttcctcccctccagcctttcgtgggtcgtctaagatccctggacagcgggatcaggcgccttgagctgctattgtctgctggcgactctggcacctttttttgcaagggtcgacatgaagatgagtctcggaccgttttacacgtgctgggggatcgtacatattgcaaggcgccgggccctacacatgcccccctcgtaaagactgagccacagagacccgtcaaagaggaagagccgaagatccccggtgacctagaccaggaaccctccctactgtacgcggatctcgaccacctggctttgagccggccacggcgcctgagtacagctgatccagccgacgcatccaccatatatgcagtggtcgtatag

SEQ ID NO: 235983 - DNA, 594 bp, Artificial Sequence
  derived and/or modified sequence
atggccgtgttcctgcagctgctgcccctgctgctgagccgggcccaggggaatcctggggccagccttgacgggcgcccaggggaccgggtgaacttatcatgtggcggcgtctctcacccaatccggtgggtgtgggcgcctagctttccagcttgcaaaggcctctcaaagggtaggcggccaattctttgggccagtagtagtggcacccccaccgtgcccccgctgcagcccttcgtgggcagactgcggtccctggatagcggtattcgccggctggaactgctccttagcgcaggagactcaggcaccttcttctgtaagggccggcatgaagacgaaagcaggacggtgttgcacgtcctcggggaccggacgtattgcaaggcacccggtccgacacacgcacccttagtgaaaactgaacctcagcgccctgtgaaagaggaagagccgaaaatcccaggcgacctggatcaggagccctctctgctctacgccgacctggaccatctagctttgtctaggccccgtcggctgtccaccgccgacccagctgatgcttcgaccatttacgcagtcgttgtttag

SEQ ID NO: 235984 - DNA, 594 bp, Artificial Sequence
  derived and/or modified sequence
atggccgtgttcctgcagctgctgcccctgctgctgagccgggcccaagggaatccgggtgcatctctggacggtagacctggcgaccgtgttaacctgtcctgtggcggcgtttcacaccccattagatgggtgtgggccccatcttttcctgcctgtaagggtctgtccaaagggagaagacctatcctttgggccagtagtagcgggaccccgaccgttcctcctctgcagcccttcgttggaaggctgcgcagcctggactccggcataaggcgcctggaattgttgcttagcgcaggagacagtggcaccttcttttgtaaagggcgccacgaggatgaatcccggaccgtactgcacgtactaggggacagaacctactgcaaggcccccggacctacgcacgcgcccttggtcaaaacagagcctcagcgtcccgtcaaagaagaagaaccaaaaattcctggggatctcgatcaggaaccgtcgctactctatgccgaccttgaccacctcgcattgagccgtccaagaagactgtcaaccgccgatcccgccgatgcaagcacaatttacgccgtcgtggtgtag

SEQ ID NO: 235985 - DNA, 594 bp, Artificial Sequence
  derived and/or modified sequence
atggcggtcttccttcagctccttcccttactcctcagccgcgctcaagggaaccccggtgcctcactggatggcaggccgggagacagggttaacctttcctgcggaggagtatcacacccgatccgttgggtgtgggccccttcgtttcccgcttgcaaggggctgtctaagggccgtcggccaattctgtgggcatcctccagcggtactccaaccgtccctcccctccagccctttgtcgggaggttgcgatctctggactctggcatcaggcgcctggagctgctgcttagtgccggagatagcggaacattcttctgcaaaggcagacacgaggatgagagcaggaccgtgctgcacgtcctcggagaccgcacttattgcaaggctcccggacccacgcacgcacccctggtgaagactgagccccaaagaccagtcaaggaggaggagcccaagattccgggagacttggatcaggagccgtctctgctgtacgcagatttagaccatctcgccctgtctcgcccacgccgtctgtccacggcagaccccgcagacgcctcaactatctacgccgtcgtcgtgtag

SEQ ID NO: 235986 - DNA, 594 bp, Artificial Sequence
  derived and/or modified sequence
atggccgtgtttctccagttgcttcctctccttttgagtagggcacagggaaaccctggcgcatctttggatggaaggccgggtgaccgggtgaatctgtcttgtggtggggtctcgcatcctattcggtgggtgtgggcgccttccttccctgcctgcaagggcctgagtaagggaaggagaccgatattatgggcgtccagctcaggcactccgacggtgccaccattgcagccatttgtggggcgacttcgctcactagattcaggcatccgcagactagagctgctgctgagtgccggagattccggcaccttcttctgcaaagggcgacacgaagatgaatcaaggactgtcctgcatgtcctgggcgaccgaacctactgtaaggcccctggacctactcacgcccctctggttaagacggagcctcagaggccggtgaaagaggaggaaccgaagatccctggtgaccttgaccaggaacctagcctgctctatgccgatctggaccatctcgctctcagccggcctcgtcgactctcaaccgccgatcctgccgatgccagcaccatttacgcggttgttgtatag

SEQ ID NO: 235987 - DNA, 594 bp, Artificial Sequence
  derived and/or modified sequence
atggcagtttttttgcagcttctgcccctgttgttaagcagagctcaaggcaatccaggtgcctcgctagacggacgccctggcgatcgggtgaacctgtcctgcggaggcgtaagccatcctattcggtgggtgtgggctccttcttttcccgcttgtaaggggctatccaagggacgacgccctatcctttgggcatcaagtagcggaacccccaccgtgcctccccttcagccctttgtgggcaggttgcgctctcttgatagtggaatccgaagactggagctcttgttgagcgctggagatagcgggacattcttttgcaagggacggcacgaagatgaaagccgcactgtcctgcacgtgctcggtgaccgcacatattgtaaggccccaggcccaacgcacgcacccctggtgaagaccgaaccccagaggcccgtcaaagaggaagagccaaagatcccgggagacctggaccaggagcccagcctcctctatgccgacctcgatcacctagccctgagcagaccacgacggctttccactgcagacccagctgatgcttctactatctacgctgtcgtagtctag

SEQ ID NO: 235988 - DNA, 594 bp, Artificial Sequence
  derived and/or modified sequence
atggccgtgttcctgcagctgctcccgctcctgctttcgagggcccaaggcaatcccggtgcttccttagacggcaggcccggagatagggtgaacttaagctgcggcggagtgagccatccgattaggtgggtgtgggctcccagcttccctgcatgcaagggcttgtcaaaaggcagaaggccaatcctctgggcttcgtccagcgggactcccaccgttcccccactccaacccttcgtgggccgtctgcgtagccttgacagtggcataaggcgtctggagctcctcttgagtgcgggagattcgggaacgttcttctgtaagggcagacacgaggacgaatctcggactgtcttgcatgtgctgggggatagaacttactgcaaggctcccggacctacccacgcccctctggtgaagacagagcctcagcgacccgttaaagaagaggagccaaagataccgggtgatctggaccaagagcctagcctgctgtatgcagacttggaccacctggccttgagtcggcctaggcggctaagcacagctgaccccgcagatgcatctacgatttacgcagttgttgtgtag

SEQ ID NO: 235989 - DNA, 594 bp, Artificial Sequence
  derived and/or modified sequence
atggccgtctttttacagctgttgcccctgttactatctagagcccagggtaaccctggcgcaagcttagacggtcgcccaggagacagagtcaacctctcctgcgggggtgtttcccaccctataagatgggtttgggcaccttcattccccgcttgcaaggggcttagcaaagggagacgtccaatattgtgggcttcttcatccgggactcccacggtgcccccactccagccgtttgtgggcaggctgcgctcactggactccggaattcgcaggctggagctgctgctgagtgccggtgacagcggcacttttttttgcaaaggaaggcacgaggacgagagtcgtactgtgcttcacgtgctgggagacagaacgtactgcaaggcccctggtcctacccacgctccgctggttaagaccgaaccacaacggcctgttaaagaggaagagccaaagattcctggcgaccttgaccaagaaccttccctcctgtatgccgacttagaccatctggccctgtctagaccacgtcgcctgagtacggccgaccctgccgacgcatccacgatttacgccgtcgtagtctag

SEQ ID NO: 235990 - DNA, 594 bp, Artificial Sequence
  derived and/or modified sequence
atggccgtgttcctccagttattacctctcctgttatcaagagcccagggaaaccccggagcttcgcttgacggaaggccaggagatagagttaatctgagttgcgggggtgtttcccatcctattcgctgggtctgggcgccatcttttcctgcttgcaaaggcctgtctaaaggcaggagaccaattctctgggcttcttcatctggaaccccgaccgttccccctttgcagccatttgtgggaagactgcgctcgcttgactctggcatcaggcgactcgagctcctgctgtcagcgggagactctggtaccttcttctgtaaaggtcggcacgaggacgaaagccgaaccgtactccacgtgcttggggatcgcacttattgcaaagcccctggccctactcacgcacctctggttaaaactgagcctcagcgtcctgtgaaagaggaagaacctaagataccaggggatctggaccaggagccaagcctgctgtatgcagacctggaccatttagcccttagccgcccaaggcggctgtcaaccgctgaccccgcagacgcttccacaatatacgccgtagtcgtttag

SEQ ID NO: 235991 - DNA, 594 bp, Artificial Sequence
  derived and/or modified sequence
atggccgtttttctgcaactcctgccactcttgctttcacgtgcacagggtaaccctggggcttccctggatggtcgcccgggtgatcgggtgaacctctcgtgtggcggtgttagtcatccaatccggtgggtctgggcccccagtttcccggcttgtaaagggttatccaaaggtcgacgccccatcctttgggcctcgtcttccggaactcccacagttcccccactccaaccatttgtaggccgcttgcgttctttagactcaggcatacgccgcttagaactgctgctgagtgcgggagacagtggtacatttttctgtaagggccggcacgaagacgagtcaaggacggtgctgcacgtcttgggcgatcggacatattgcaaagcgccaggtccaacccacgccccccttgtgaaaactgagccacagagacctgtaaaggaggaagagcccaaaatccccggcgacctggatcaagaaccttctctattatacgctgacctggaccatttagccctatcccgtcccaggcgcttgtctaccgctgatccagcagacgcatccacgatctacgccgtcgtggtctag

SEQ ID NO: 235992 - DNA, 594 bp, Artificial Sequence
  derived and/or modified sequence
atggccgtgttcctgcagctgctgcccctgctgctgagccgggcccaagggaatccgggagcctccctcgacggaagacctggagaccgggttaacctctcttgtgggggagttagtcatccaatacgctgggtgtgggcaccttcattccccgcgtgcaaaggactgagcaaggggagaagaccaattctctgggcctcatcctccggtacgcccacggtcccacctcttcaaccttttgtgggacggttaagatctctcgattctggaatcaggagactcgagcttctgctctccgcgggggactccgggacgttcttctgtaagggtcgacatgaagacgagtcacgcacggttctccacgtcctgggtgaccgcacatactgcaaggctcctgggcctactcacgcccctttggtgaaaaccgagcctcagcgccccgtgaaagaagaagagcccaaaatccctggtgacttagaccaggaaccctcattgctgtatgcagatctggaccacctggctctcagtaggccacgcaggctgagtactgctgatccagcagacgcctccacaatctacgcagtcgtagtttag

SEQ ID NO: 235993 - DNA, 594 bp, Artificial Sequence
  derived and/or modified sequence
atggctgtctttctgcaattattgcctctactactgtccagagcccagggtaaccctggcgcttcactggatggcagaccaggcgacagggtgaacctgtcctgcggaggggtgagccatccaattcgctgggtgtgggccccaagcttcccagcctgtaagggactctccaagggcagacgaccaatactctgggccagctctagcggaacccccactgttccacccttacaacctttcgtgggcagactgcggtctctggacagtgggatacggcgactcgagctgctcttatctgcgggagactccggcactttcttctgcaaaggccgtcatgaagatgagagcagaaccgtacttcacgtgctgggggacagaacatactgtaaggctccaggacctacacacgctcctttggttaagacagaaccccaacgcccagtaaaagaagaagagccaaagatacctggcgatctcgaccaggagccttcgcttttatacgcagatctggaccaccttgcactgtctagaccaagaagattgtctactgctgaccccgcagacgcatctactatctacgccgtggtggtatag

SEQ ID NO: 235994 - protein, 222 aa, Artificial Sequence
  derived and/or modified sequence
MAVFLQLLPLLLSRAQGNPGASLDGRPGDRVNLSCGGVSHPIRWVWAPSFPACKGLSKGRRPILWASSSGTPTVPPLQPFVGRLRSLDSGIRRLELLLSAGDSGTFFCKGRHEDESRTVLHVLGDRTYCKAPGPTHGSVYPQLLIPLLGAGLVLGLGALGLVWWLHRRLPPQPIRPLPRFALSPPHSSTCENRAPEASKGGRAQDSRGPGPGTGKGMGMGRG

SEQ ID NO: 235995 - DNA, 910 bp, Artificial Sequence
  derived and/or modified sequence
cgctgattcgctcgcagcttctcctcaccacatcctaaccatggctgtgtttctgcagctgctaccgctgctgctctcgagggcccaagggaaccctggggcttctctggacggccgccctggggaccgggtgaatctctcctgcggaggagtctctcatcccatccgctgggtctgggcacccagcttcccggcctgcaagggcctgtccaaaggacgccgaccgatcctgtgggcctcttcgagcgggacccccaccgtgcctcccctccagcctttcgtcggccgcctacgctccctggactctggtatccggcggctggagctcctcttgagcgcgggggactcgggcacttttttctgcaagggccgccacgaggacgagagccgtacagtgcttcacgtgctgggggacaggacctattgcaaggcccccgggcctacccatgggtccgtgtatccccagctcctgatcccgctgctgggcgctgggttggtgctcggactgggagctttgggcctggtctggtggctgcacaggcgcctgcccccgcaaccgattcgaccactccctagatttgctctgtcccccccacatagctccacttgtgaaaaccgagccccagaggccagtaaaggaggaagagcccaagattccaggggacctggaccaggaaccggtaagggcatggggatgggaaggggatagccagaatctctgaggaaaatggaccaaaaaaaaaaaggcctgaaccccaaggaagactgtggagaccatcttgtcttcctccccttcctcctccagagcctgctctatgcggatctggaccatctagccctcagcaggccccgccggctgtccacagcggaccctgctgatgcctccaccatctatgcagttgtagtttga

SEQ ID NO: 235996 - DNA, 669 bp, Artificial Sequence
  derived and/or modified sequence
atggccgtgttcctgcagctgctgcccctgctgctgagcagagcccagggcaaccccggcgccagcctggacggcagacccggcgacagagtgaacctgagctgcggcggcgtgagccaccccatcagatgggtgtgggcccccagcttccccgcctgcaagggcctgagcaagggcagaagacccatcctgtgggccagcagcagcggcacccccaccgtgccccccctgcagcccttcgtgggcagactgagaagcctggacagcggcatcagaagactggagctgctgctgagcgccggcgacagcggcaccttcttctgcaagggcagacacgaggacgagagcagaaccgtgctgcacgtgctgggcgacagaacctactgcaaggcccccggccccacccacggcagcgtgtacccccagctgctgatccccctgctgggcgccggcctggtgctgggcctgggcgccctgggcctggtgtggtggctgcacagaagactgcccccccagcccatcagacccctgcccagattcgccctgagccccccccacagcagcacctgcgagaacagagcccccgaggccagcaagggcggcagagcccaggacagcagaggccccggccccggcaccggcaagggcatgggcatgggcagaggctag

SEQ ID NO: 235997 - DNA, 669 bp, Artificial Sequence
  derived and/or modified sequence
atggccgtgttccttcagctgttgcccttactattgagtcgggctcagggtaacccaggtgcctccctcgatggacgcccaggagaccgtgtgaacctgtcttgcggcggggtctctcatcctattcgttgggtttgggcaccttccttccccgcatgcaaagggctttccaaaggcaggcgcccgattctatgggcatcttcaagtggcactccaacagtgccccctctgcagcccttcgtcggcagactccgcagcctggactccggtattcggagactggagctcctgctgtcagctggagattccggcacgtttttttgcaaagggcgacatgaagacgaaagccgaactgtgttgcatgttctgggcgatcgtacctactgtaaagcgccaggacccacccatggcagcgtttatccacaactcctcattccgcttctgggggcagggctagtgctgggccttggagcgctcggcctcgtgtggtggctgcatcggcgtcttcccccccagcccatccggcccctgccacgatttgctttgtcccctccccatagctccacgtgcgaaaacagggcccctgaagctagcaagggtggccgcgcacaagatagtagaggcccagggcctggcaccgggaaaggcatggggatgggcagagggtag

SEQ ID NO: 235998 - DNA, 669 bp, Artificial Sequence
  derived and/or modified sequence
atggctgtgttcctgcagctgctgcccctgctgctgagccgggcccagggcaaccctggggccagcctggatggccggcctggggacagagtgaacctgagctgtggcggcgtgagccaccccatccgctgggtgtgggcccccagcttccctgcctgcaagggcctgagcaagggccggcggcccatcctgtgggccagcagcagcggcacccccaccgtgccccccctgcagccctttgtgggccgcctgcggagcctggacagcggcatccggcggctggagctgctgctgtctgctggggacagcggcaccttcttctgcaagggcagacatgaagatgagagcaggacagtgctgcacgtgctgggggacaggacctactgcaaggcccctggccccacccacggctctgtgtacccccagctgctgatccccctgctgggcgccggcctggtgctgggcctgggcgccctgggcctggtgtggtggctgcaccggcggctgcccccccagcccatccggcccctgcccaggtttgccctgagccccccccacagcagcacctgtgaaaatagagcccctgaggccagcaaaggaggccgggcccaggacagccggggccctggccctggcaccgggaagggcatgggcatgggccggggctag

SEQ ID NO: 235999 - DNA, 669 bp, Artificial Sequence
  derived and/or modified sequence
atggccgtgttcctgcagctgctgcccctgctgctgagccgggcccaagggaaccctggggcatccctggatggccgtcccggagaccgggtgaacctgtcctgtggcggtgtgtctcatcccatccgctgggtctgggctccatctttccccgcctgtaaagggctgtccaaagggcgccgtcctatactttgggcctctagctccgggactccaactgtgccaccccttcaaccttttgtcgggaggcttagatccctggacagcggaatccgccgacttgaattgctgctttccgcgggcgactctgggacattcttttgcaaggggcggcatgaagatgagtccagaacggtcctgcatgtactcggagataggacatactgcaaagcaccaggacccacgcatggaagcgtgtatcctcagctgttgatccccctgctgggagcaggactggtactaggtttgggagcactcggtctcgtgtggtggctccatcgaaggctgcctcctcagccgattagacccctgcccaggttcgccctctcacctccccactcctccacttgtgagaatcgggcccccgaagcatctaaaggggggagggcccaagattcccggggtccaggtcctggtaccggtaagggtatggggatggggcgcggctag

SEQ ID NO: 236000 - DNA, 669 bp, Artificial Sequence
  derived and/or modified sequence
atggcggtgttcctccagttactcccgctgctgctttccagggcacaggggaacccgggagcttccttagatgggagacccggagacagagtgaatctctcgtgtggtggagttagtcacccgatacggtgggtgtgggcgccaagctttcctgcatgcaaggggcttagcaagggacggaggcccatattgtgggcatcttcatccggaactcctaccgttccacctttgcagcctttcgtcggacggctcagaagcctggacagcggaatcaggcgactcgagctgctgctgtcagccggtgactcaggaactttcttttgtaagggccgacacgaggatgagagtaggaccgtccttcacgtgttgggggatcggacctactgcaaggcaccaggacccactcacgggagcgtgtaccctcaactgctgattccacttcttggagctggcctcgttttgggtttaggtgcactcggactggtgtggtggctgcataggagactcccaccccagccaattagacctcttcctaggttcgcgctgtcccctccgcactccagtacatgtgagaaccgggctcccgaggcgtcaaaggggggtcgcgcacaggactctcgtgggcctggtcctggcaccggaaaggggatgggaatgggcagaggctag

SEQ ID NO: 236001 - protein, 240 aa, Artificial Sequence
  derived and/or modified sequence
MTSLPCPLPGRDASKAVFPDLAPVPSVAAAYPLGLSPTTAASPNLSYSRPYGHLLSYPYTEPANPGDSYLSCQQPAALSQPLCGPAEHPQELEADSEKPRLSPEPSERRPQAPAKKLRKPRTIYSSLQLQHLNQRFQHTQYLALPERAQLAAQLGLTQTQVKIWFQNKRSKYKKLLKQNSGGQEGDFPGRTFSVSPCSPPLPSLWDLPKAGTLPTSGYGNSFGAWYQHHSSDVLASPQMM

SEQ ID NO: 236002 - DNA, 723 bp, Artificial Sequence
  derived and/or modified sequence
atgaccagcctaccttgtcctcttccgggacgggacgctagtaaggccgtcttcccagacctggctccagtgccaagcgtggccgcggcatacccccttggcctttctccaacaactgcagcatctcctaacctgtcctattcgcgtccatacggccacctgctgagttacccatacaccgagcccgctaaccccggagactcctacctttcctgccagcagcctgccgccctgtctcagccgctgtgtggccctgctgaacaccctcaagaacttgaggcggactctgaaaaaccccggctttcgcctgaaccctcagaacgtcggcctcaggccccggccaaaaaacttcgaaaaccaagaaccatttatagttcgcttcaactgcagcacctcaatcagagatttcagcatacgcagtatcttgccttgcccgaacgagcacagctggcagcacagctgggactcacacagacccaggtcaagatctggtttcagaacaagagatccaaatataaaaaacttctgaaacagaatagcggagggcaagagggtgatttccctggacggacattttctgtgtccccatgtagcccccctctgcccagtctctgggacctgcctaaagcaggaaccctgccaacttccggatacgggaatagttttggtgcatggtatcagcatcactcatcagatgtcctggccagcccccagatgatgtag

SEQ ID NO: 236003 - DNA, 723 bp, Artificial Sequence
  derived and/or modified sequence
atgaccagcctgccctgccccctgcccggcagagatgccagcaaggctgtgtttcctgacctggcccctgtgcccagcgtggccgccgcctaccccctgggcctgagccccaccacagctgccagccccaacctgagctacagccggccctacggccacctgctgagctacccctacacagagcccgccaaccctggggacagctacctgagctgccagcagcctgctgccctgagccagcccctgtgtggccctgctgagcacccccaggagctggaggccgacagcgagaagccccggctgagccctgagcccagcgagcggcggccccaggccccagccaagaagctgaggaagcccaggaccatctacagcagcctgcagctgcagcacctgaaccagcgcttccagcacacccagtacctggccctgcctgagcgggcccagctggccgcccagctgggcctgacccagacccaggtgaagatctggttccagaacaagaggagcaagtacaagaagctgctgaagcagaacagcggcggccaggagggggacttccctggccgcaccttctctgtgagcccctgcagcccccccctgcccagcctgtgggacctgcccaaggccggcaccctgcccaccagcggctacggcaacagctttggagcctggtaccagcaccacagcagtgatgtgctggccagcccccagatgatgtag

SEQ ID NO: 236004 - DNA, 723 bp, Artificial Sequence
  derived and/or modified sequence
atgaccagcctgccctgccccctgcccggccgggacgccagcaaggcggtctttcccgacctggctccagttccatccgtggcagcagcctatcccctgggactgtctccaacgacagcggccagccctaatctctcctacagccggccatatggacacctgctgagttacccctacacagagcctgccaatcctggcgattcatacttgagctgccagcagccagcagccctgtctcaaccactctgtggtcccgcggagcacccacaggagcttgaggccgatagcgagaaaccaagactctccccagaacctagtgaaaggaggccccaggcaccagccaaaaagttacgaaagccacgaaccatatattcaagtctccagttgcaacacctgaaccaacggttccagcacacccagtatcttgccctgccagaacgggctcagctcgcagcccaattagggctcacccaaacccaggtgaagatctggttccagaacaagaggagtaaatataagaagctcctgaaacagaatagcggggggcaagaaggtgatttccctggccggactttttctgtgtcaccatgctccccacccctgccatctctgtgggatcttcccaaggccggcaccctgcctacaagcgggtatggtaactctttcggggcctggtatcaacatcactcaagtgatgtactggcttctccccagatgatgtag

SEQ ID NO: 236005 - DNA, 723 bp, Artificial Sequence
  derived and/or modified sequence
atgactagtctgccatgcccccttcctgggcgagacgcctccaaggctgtcttccctgatctggcacctgtacctagcgtcgcagctgcctacccactaggtttatcacccaccactgcagcaagccccaacctgagttatagccgcccttacggccatctactgtcctacccctacaccgagcccgcaaatcctggggattcctatctgtcttgtcagcaaccagccgctctatcccagcccctgtgtggtcctgctgaacatccacaggagctggaagcagactctgagaagccacggttgtccccagagccttccgagcggcgaccccaggctcctgccaaaaagctgaggaagcctcggacgatttacagcagcctacagctccaacacttgaaccagcgttttcagcacacccagtacttggcactgcctgaaagggcgcagctcgccgctcagctgggcctgacccaaactcaagtcaagatctggtttcagaacaagcgcagtaagtataagaagttactgaaacagaatagcgggggtcaggagggggacttccctggcagaacattttctgttagtccttgttctccacccctgccctctctgtgggatctccccaaagcaggtactttaccaacgtctggctacggaaattcttttggtgcatggtatcaacaccactcaagcgatgtgctggcctctccacagatgatgtag

SEQ ID NO: 236006 - DNA, 723 bp, Artificial Sequence
  derived and/or modified sequence
atgaccagcctgccctgccccctgcccggcagagacgccagcaaggccgtgttccccgacctggcccccgtgcccagcgtggccgccgcctaccccctgggcctgagccccaccaccgccgccagccccaacctgagctacagcagaccctacggccacctgctgagctacccctacaccgagcccgccaaccccggcgacagctacctgagctgccagcagcccgccgccctgagccagcccctgtgcggccccgccgagcacccccaggagctggaggccgacagcgagaagcccagactgagccccgagcccagcgagagaagaccccaggcccccgccaagaagctgagaaagcccagaaccatctacagcagcctgcagctgcagcacctgaaccagagattccagcacacccagtacctggccctgcccgagagagcccagctggccgcccagctgggcctgacccagacccaggtgaagatctggttccagaacaagagaagcaagtacaagaagctgctgaagcagaacagcggcggccaggagggcgacttccccggcagaaccttcagcgtgagcccctgcagcccccccctgcccagcctgtgggacctgcccaaggccggcaccctgcccaccagcggctacggcaacagcttcggcgcctggtaccagcaccacagcagcgacgtgctggccagcccccagatgatgtag

SEQ ID NO: 236007 - DNA, 2032 bp, Artificial Sequence
  derived and/or modified sequence
agagggcggggcccccgtcgggtcccgggaaccgaacccgatggagaggagggggcccccatggatttagggggggaggggaaagtcatggggggcacccccccggaacccctttcccaggcgcgcgttctccgctgaaagaggctcagagagacactttctccgggatcttaagtgtgggggctgctggctggggggcccgtccggcccaacgccggaggcttggaaaagagagttggcagcgggagcggactacgtgccgggccatggcccttctgcccgggccctggccacaatgacctctttgccctgccccctccccggccgggacgcctccaaagctgtcttcccagacctcgcccctgtcccgtcggtagcggctgcctacccgcttggcttgtcccctacaaccgcagcctcccccaatttgtcctactccaggccgtatggccacctcctgtcttacccctacaccgagccagcgaaccccggagactcctacctgtcctgccagcaacccgcggcgctctctcagcccctctgcggacctgcagagcaccctcaggaactcgaggcagactcggagaagccgcggctgtccccggaaccctccgagcggcgccctcaggcccccgccaaaaagctccgcaagccgaggaccatctactccagcctgcagctgcagcacctaaaccagcgtttccagcacacgcagtacctggcgctgcccgagagggcccagctggcagcgcagctcggcctcacccagacccaggtaaagatctggtttcagaacaaacgctccaagtataagaagctcctgaagcagaattctggggggcaggaaggggacttccctgggaggaccttctctgtgtctccctgctccccacccctcccctccctctgggatctacccaaggcagggaccctgcccaccagtggctatggcaacagctttggagcctggtatcagcatcactcctcagatgtcctggcttcgcctcagatgatgtgaatctggggaagggcgggtcaggcccacagccttcctgcaaagcccaggacccaggcagtccacctgcaccccttctgggctgggaggaaaccagctccagatgggttttctctggaggacaagcagttagaggagaaaaaggaatggagcagagcctgtacccctaaccctaacagctaaatcaaggacctcagccttatataatcattgtccccaccactaccatggactggacaccttcactccagctggacaaagactctggagagagagccattggctggagttgagactgtccccagaacccttggtcttgccactcccccactccttcttccctctctccctttctcctctccctgctttcttgaaaaggactgaatcgccactacagcctgggtgcaaaatcagcaagaaacattgagtatttttttttctttgtatgcctttggccttgcacaacccatttgtgagcaaaagcagaagtggaccaccatcagctcccacccacccagcgatttttccttggaggtcagcccgttacccccataactgatttacctacttaccatactgggaggtagaagagatgcagagaaatgtggaatttgtggacctatgggtaatttatgctttcctcctaaaaaaaaaaaaaaagccctctttcccaccccctccccatctcccctttttgaatagataatggatccaattatccatataattcaataggtatttattgagaggctcccttctattccccatccctaatccctaacgaacccacgggcacacacttttggaaacctggtaaagtaacacttagggggaaatggggacaaactggctctctggattagtgcgggtatagacacccccaaataggtgggtaggcccattgattcagctccttgcagctgtctctgttcaaaggaactgtgcagatttagaacgaattggagcttgagcttcacaccaccagcttccagagattaaagtttgtacaaaacattg

SEQ ID NO: 236008 - DNA, 234 bp, Artificial Sequence
  derived and/or modified sequence
atggaggtggaacaataccggagggagcgggagcatgagttccaaagcaagcagcaggcggctatgggaagccagggaaacctgtcagctgaagtggagcaagcaactcgcagacaggtgcagggtatgcaaagcagccagcagcggaatcgggaacgggtgctcgcccagctgctgggaatggtttgcgatgtaagaccacaggtgcacccaaattacaggatctcggcttag

SEQ ID NO: 236009 - DNA, 234 bp, Artificial Sequence
  derived and/or modified sequence
atggaggtggagcagtacagaagagagcgggagcacgagttccagagcaagcagcaggccgccatgggcagccagggcaacctgtctgctgaggtggagcaggccacccggcggcaggtgcagggcatgcagagcagccagcagaggaaccgggagcgggtgctggcccagctgctgggcatggtgtgtgatgtgcggccccaggtgcaccccaactaccgcatcagcgcctag

SEQ ID NO: 236010 - DNA, 234 bp, Artificial Sequence
  derived and/or modified sequence
atggaggtggagcagtaccggcgggagcgggagcacgagttccagtctaaacaacaagccgcaatggggtctcaaggcaatttgagcgccgaagtcgaacaggccactagacggcaagtccaaggcatgcagagtagtcagcaacgcaaccgggagagagtgcttgctcaacttttaggtatggtgtgcgacgtgagacctcaggtgcatcccaactatagaatctctgcctag

SEQ ID NO: 236011 - DNA, 234 bp, Artificial Sequence
  derived and/or modified sequence
atggaggtcgaacagtatcgccgtgagagggaacatgaatttcagagtaaacagcaagctgctatgggaagtcagggcaatctatctgccgaggtcgagcaggctaccaggaggcaagttcagggaatgcaatcttctcaacagaggaatcgcgagagggttctcgcccaacttctggggatggtttgcgacgtaagaccccaggtccaccccaattataggatctcagcttag

SEQ ID NO: 236012 - DNA, 234 bp, Artificial Sequence
  derived and/or modified sequence
atggaggtggagcagtacagaagagagagagagcacgagttccagagcaagcagcaggccgccatgggcagccagggcaacctgagcgccgaggtggagcaggccaccagaagacaggtgcagggcatgcagagcagccagcagagaaacagagagagagtgctggcccagctgctgggcatggtgtgcgacgtgagaccccaggtgcaccccaactacagaatcagcgcctag

SEQ ID NO: 236013 - protein, 145 aa, Artificial Sequence
  derived and/or modified sequence
MGIGCWRNPLLLLIALVLSAKLGHFQRWEGFQQKLMSKKNMNSTLNFFIQSYNNASNDTYLYRVQRLIRSQMQLTTGVEYIVTVKIGWTKCKRNDTSNSSCPLQSKKLRKSLICESLIYTMPWINYFQLWNNSCLEAEHVGRNLR

SEQ ID NO: 236014 - protein, 37 aa, Artificial Sequence
  derived and/or modified sequence
MNSTLNFFIQSYNNASNDTYLYRVQRLIRSQMQQVHC

SEQ ID NO: 236015 - DNA, 114 bp, Artificial Sequence
  derived and/or modified sequence
atgaacagcaccctgaacttcttcatccagagctacaacaacgccagcaatgatacttatttgtaccgtgtacagaggcttatacgcagccaaatgcagcaggttcactgttag

SEQ ID NO: 236016 - DNA, 438 bp, Artificial Sequence
  derived and/or modified sequence
atgggtatcggatgctggcgtaacccactgctactgctgatcgcactagtcctcagcgccaagcttggccattttcagagatgggaaggattccagcaaaaactaatgtccaagaagaacatgaattctaccctgaattttttcatccaatcttataataacgcatccaacgacacgtatctctaccgcgtccagcggctgattaggtcacagatgcagctgacaacaggcgtcgaatatatcgtgaccgtgaagattggctggactaaatgcaaacgcaatgacacttctaactctagctgcccactgcagtctaaaaaattgcggaagtctctgatctgtgagtcactgatctacaccatgccttggatcaactattttcaactgtggaataactcctgcctggaggccgaacatgttgggagaaacctgaggtag

SEQ ID NO: 236017 - DNA, 438 bp, Artificial Sequence
  derived and/or modified sequence
atgggaattggctgttggagaaacccactgctccttttgatcgccctggtgctgagtgccaagctggggcactttcagagatgggaggggttccagcagaagcttatgtccaagaaaaatatgaactccacactgaatttcttcatccagtcctacaataacgccagcaatgatacttatttgtacagggtgcaacgactgatcaggagccagatgcaattgaccacaggtgtcgagtatattgtgacagtcaagattggatggactaagtgcaagcggaacgatacatctaatagttcatgccctctgcagagtaagaagctgcgtaagtcactgatctgcgagagcctgatatacacaatgccttggattaactatttccagctgtggaataactcctgtctggaggcggagcacgtgggcaggaatctgcgatag

SEQ ID NO: 236018 - DNA, 114 bp, Artificial Sequence
  derived and/or modified sequence
atgaactctaccctgaacttttttatccagtcgtataataacgctagcaatgatacctacctctaccgcgtccagagactgattcgctcccagatgcagcaagtccactgctag

SEQ ID NO: 236019 - DNA, 438 bp, Artificial Sequence
  derived and/or modified sequence
atggggattggatgttggcgaaatcctctgttgttactgatcgctctggtgttaagcgccaagctcggtcatttccagcgatgggaaggtttccagcagaaacttatgagtaaaaaaaacatgaattccacacttaatttttttatacagagctacaacaacgcctctaatgatacgtacttgtaccgagtgcagcgcctcatacggtctcagatgcagctcacaaccggagtggaatacattgtaacggttaagatcggatggacgaaatgcaaacgcaacgatacatctaatagctcctgccccttacaaagcaagaaactgcggaaatccctcatttgtgagtcgctcatttatacaatgccatggattaattattttcagttgtggaacaatagttgtctcgaagcagaacacgtcggaagaaacctgaggtag

SEQ ID NO: 236020 - DNA, 438 bp, Artificial Sequence
  derived and/or modified sequence
atgggaatcggttgttggcgcaatcctttacttttacttatcgcactcgtcctgtcagccaagttaggccacttccaaaggtgggagggcttccagcagaagttaatgagcaaaaagaatatgaattcaacccttaactttttcatacaatcgtataacaatgcctccaatgacacttacttgtacagagtgcagagactgattcgatcccagatgcaactcacaaccggcgtagaatacatagttacggtgaaaatcgggtggacaaaatgtaaacggaatgatacctcgaattcatcctgccctctgcaatctaagaaactcaggaagagccttatctgcgaatcgctgatctacactatgccttggattaactactttcagctctggaacaactcctgcctggaggctgagcacgtgggaaggaacctgagatag

SEQ ID NO: 236021 - DNA, 114 bp, Artificial Sequence
  derived and/or modified sequence
atgaactccacgctgaatttcttcatccagtcctacaataatgcaagcaatgatacatacctataccgcgttcaacgacttatcagatcacaaatgcagcaggtacactgctag

SEQ ID NO: 236022 - DNA, 438 bp, Artificial Sequence
  derived and/or modified sequence
atgggtatcggctgctggcgaaaccctttgttgctgcttatcgccctcgtcctctctgctaagttaggccattttcaacggtgggagggctttcaacaaaagctaatgagcaagaaaaacatgaatagtacactcaatttttttattcagagctataataacgcatccaatgatacatacctgtaccgtgtgcagcgccttatccgcagccagatgcagttaactactggagtagaatatattgtaacggtcaaaattggatggactaagtgcaaacgaaatgatacttctaattcctcatgtccactgcaatcgaagaagcttagaaagtccctgatctgcgaaagcctcatctacaccatgccatggatcaattattttcaactctggaataacagctgcttggaagccgaacatgttggtagaaatctccggtag

SEQ ID NO: 236023 - DNA, 438 bp, Artificial Sequence
  derived and/or modified sequence
atgggaatcggttgttggcgcaatcctttacttttacttatcgcactcgtcctgtcagccaagttaggccacttccaaaggtgggagggcttccagcagaagttaatgagcaaaaagaatatgaattcaacccttaactttttcatacaatcgtataacaatgcctccaatgacacttacttgtacagagtgcagagactgattcgatcccagatgcaactcacaaccggcgtagaatacatagttacggtgaaaatcgggtggacaaaatgtaaacggaatgatacctcgaattcatcctgccccctccaaagcaaaaaactacggaaatccctcatctgcgagtctctcatttatacaatgccgtggatcaactattttcagctgtggaataattcttgtcttgaagcagagcacgtcggcaggaacctgagatag

SEQ ID NO: 236024 - DNA, 277 bp, Artificial Sequence
  derived and/or modified sequence
caccctggaaggtgcagttgggaagaaagtttctgaggctgtagacatggggatcggatgctggagaaaccccctgctgctgctgattgccctggtcctgtcagccaagctgggtcacttccaaaggtgggagggcttccagcagaagctcatgagcaagaagaacatgaattcaacactcaacttcttcattcaatcctacaacaatgccagcaacgacacctacttatatcgagtccagaggctaattcgaagtcagatgcagcaggtacattgt

SEQ ID NO: 236025 - DNA, 510 bp, Artificial Sequence
  derived and/or modified sequence
aagtttctgaggctgtagacatggggatcggatgctggagaaaccccctgctgctgctgattgccctggtcctgtcagccaagctgggtcacttccaaaggtgggagggcttccagcagaagctcatgagcaagaagaacatgaattcaacactcaacttcttcattcaatcctacaacaatgccagcaacgacacctacttatatcgagtccagaggctaattcgaagtcagatgcagctgacgacgggagtggagtatatagtcactgtgaagattggctggaccaaatgcaagaggaatgacacgagcaattcttcctgccccctgcaaagcaagaagctgagaaagagtttaatttgcgagtctttgatatacaccatgccctggataaactatttccagctctggaacaattcctgtctggaggccgagcatgtgggcagaaacctcagatgagggctcatatgattgagttgtgcactggctgttattaaactgtaaaggatca

SEQ ID NO: 236026 - DNA, 438 bp, Artificial Sequence
  derived and/or modified sequence
atgggcatcggctgctggagaaaccccctgctgctgctgatcgccctggtgctgagcgccaagctgggccacttccagagatgggagggcttccagcagaagctgatgagcaagaagaacatgaacagcaccctgaacttcttcatccagagctacaacaacgccagcaacgacacctacctgtacagagtgcagagactgatcagaagccagatgcagctgaccaccggcgtggagtacatcgtgaccgtgaagatcggctggaccaagtgcaagagaaacgacaccagcaacagcagctgccccctgcagagcaagaagctgagaaagagcctgatctgcgagagcctgatctacaccatgccctggatcaactacttccagctgtggaacaacagctgcctggaggccgagcacgtgggcagaaacctgagatag

SEQ ID NO: 236027 - DNA, 114 bp, Artificial Sequence
  derived and/or modified sequence
atgaacagcaccctgaacttcttcatccagagctacaacaacgccagcaacgacacctacctgtacagagtgcagagactgatcagaagccagatgcagcaggtgcactgctag

SEQ ID NO: 236028 - DNA, 438 bp, Artificial Sequence
  derived and/or modified sequence
atgggaataggatgttggcggaacccgctgctactgctgattgccctggtcctgtctgccaagttgggccattttcagcgctgggagggcttccaacaaaaacttatgagtaagaagaacatgaactccacattaaacttctttatccagtcgtacaacaacgcaagcaacgatacatacctctaccgcgtccagaggttgataagaagccagatgcaactcaccactggagtggaatacattgttacagtgaaaatagggtggacaaagtgcaagagaaacgacacatccaattcttcctgtcccctgcaatcaaagaagttgaggaagtccctgatttgtgagtctttaatctacaccatgccatggataaactattttcagctgtggaacaattcctgtctcgaagccgaacatgtcggcaggaacctgagatag

SEQ ID NO: 236029 - DNA, 438 bp, Artificial Sequence
  derived and/or modified sequence
atgggcattggttgttggagaaatcctttgctgttgttgatcgccttggttctctctgccaaactcggccattttcagcgctgggagggcttccagcaaaaactgatgagcaaaaaaaacatgaacagcacgctcaattttttcattcagtcatacaataatgccagtaacgacacttatctgtatcgggttcagcgccttatccgaagccagatgcaactgacgaccggcgtggagtacatcgtgaccgtgaagataggctggacaaagtgtaagcgcaatgatacctcaaatagctcctgtccactgcagtccaaaaaattaagaaagtcattgatatgtgaatccttaatctacaccatgccctggattaactattttcagctctggaacaacagttgcctggaagcggagcacgtcggtcggaacctgaggtag

SEQ ID NO: 236030 - DNA, 736 bp, Artificial Sequence
  derived and/or modified sequence
agggggatcctgcaagcagaaatctgtggtgggcgggcggcaggtgagcaaggagaacgtgtctgtaaaggaagcacagggaacaggtggtggctttgtaagacagttggaacccaaggaaggcaggccatcccccaggaaagcctatgttggtgagggttatgatgggagaatgagtgaactgcagcctggcaccaccacaccctggaaggtgcagttgggaagaaagtttctgaggctgtagacatggggatcggatgctggagaaaccccctgctgctgctgattgccctggtcctgtcagccaagctgggtcacttccaaaggtgggagggcttccagcagaagctcatgagcaagaagaacatgaattcaacactcaacttcttcattcaatcctacaacaatgccagcaacgacacctacttatatcgagtccagaggctaattcgaagtcagatgcagctgacgacgggagtggagtatatagtcactgtgaagattggctggaccaaatgcaagaggaatgacacgagcaattcttcctgccccctgcaaagcaagaagctgagaaagagtttaatttgcgagtctttgatatacaccatgccctggataaactatttccagctctggaacaattcctgtctggaggccgagcatgtgggcagaaacctcagatgagggctcatatgattgagttgtgcactggctgttattaaactgtaaaggatca

SEQ ID NO: 236031 - DNA, 114 bp, Artificial Sequence
  derived and/or modified sequence
atgaacagcactctgaatttttttatccagtcttacaataacgcctcaaatgacacctacctgtacagggtgcaacggctcattaggagtcagatgcagcaggtccactgctag

SEQ ID NO: 236032 - DNA, 438 bp, Artificial Sequence
  derived and/or modified sequence
atgggcatcggctgctggaggaaccccctgctgctgctgattgccctggtgctgagcgccaagctgggccacttccagcgctgggagggcttccagcagaagctgatgagcaagaagaacatgaacagcaccctgaacttcttcatccagagctacaacaatgccagcaatgacacctacctgtacagagtgcagaggctcatccgcagccagatgcagctgaccaccggggtggagtacatcgtgacagtgaagattggctggaccaagtgcaagagaaatgacaccagcaacagcagctgccccctgcagagcaagaagctgaggaagagcctcatctgtgagagcctcatctacaccatgccctggatcaactacttccagctgtggaacaacagctgcctggaggccgagcacgtgggcaggaacctgaggtag

SEQ ID NO: 236033 - DNA, 114 bp, Artificial Sequence
  derived and/or modified sequence
atgaacagcaccctgaacttcttcatccagagctacaacaatgccagcaatgacacctacctgtacagagtgcagaggctcatccgcagccagatgcagcaggtgcactgctag

SEQ ID NO: 236034 - DNA, 438 bp, Artificial Sequence
  derived and/or modified sequence
atgggcatcggctgctggcggaaccccctgctgctgctgatcgccttggtgttgtccgcaaaattaggccactttcaaagatgggaaggctttcagcagaagttgatgagtaagaagaacatgaacagcacactgaatttctttatccagagctataacaacgcctcaaacgatacatatctctaccgcgtgcagaggctcatccgctcccaaatgcagctcacaacgggagttgagtacatcgtgaccgtgaaaatcggatggaccaaatgtaagcggaatgatactagcaattcatcttgtccactgcagagtaaaaagctgcggaaaagcctgatctgtgagagtctgatctacacaatgccatggataaattatttccagctgtggaataattcctgcctcgaagccgaacatgttgggcgcaatctccgatag

SEQ ID NO: 236035 - DNA, 438 bp, Artificial Sequence
  derived and/or modified sequence
atgggcatcggctgctggcggaaccccctgctgctgctgatcgccctggtattgagcgctaaactgggccactttcagcgttgggagggatttcaacaaaagctgatgagtaagaagaacatgaactcaacacttaacttttttatacagtcctataataacgcctcaaacgatacctacctttacagggtacagaggctgattcgatctcagatgcaattgacgactggggttgagtatatagtgacagtcaaaatcgggtggactaaatgtaagcgcaatgacactagcaactcctcatgcccacttcagagtaagaagctgaggaaaagtctcatctgtgaaagccttatctacacaatgccctggatcaactatttccagctgtggaataactcttgcctcgaggctgagcacgtcggccgaaacctcagatag

SEQ ID NO: 236036 - RNA, 438 nt, Artificial Sequence
  derived and/or modified sequence
auggggauuggauguuggcgaaauccucuguuguuacugaucgcucugguguuaagcgccaagcucggucauuuccagcgaugggaagguuuccagcagaaacuuaugaguaaaaaaaacaugaauuccacacuuaauuuuuuuauacagagcuacaacaacgccucuaaugauacguacuuguaccgagugcagcgccucauacggucucagaugcagcucacaaccggaguggaauacauuguaacgguuaagaucggauggacgaaaugcaaacgcaacgauacaucuaauagcuccugccccuuacaaagcaagaaacugcggaaaucccucauuugugagucgcucauuuauacaaugccauggauuaauuauuuucaguuguggaacaauaguugucucgaagcagaacacgucggaagaaaccugagguag

SEQ ID NO: 236037 - RNA, 438 nt, Artificial Sequence
  derived and/or modified sequence
augggaaucgguuguuggcgcaauccuuuacuuuuacuuaucgcacucguccugucagccaaguuaggccacuuccaaaggugggagggcuuccagcagaaguuaaugagcaaaaagaauaugaauucaacccuuaacuuuuucauacaaucguauaacaaugccuccaaugacacuuacuuguacagagugcagagacugauucgaucccagaugcaacucacaaccggcguagaauacauaguuacggugaaaaucggguggacaaaauguaaacggaaugauaccucgaauucauccugcccucugcaaucuaagaaacucaggaagagccuuaucugcgaaucgcugaucuacacuaugccuuggauuaacuacuuucagcucuggaacaacuccugccuggaggcugagcacgugggaaggaaccugagauag

SEQ ID NO: 236038 - RNA, 114 nt, Artificial Sequence
  derived and/or modified sequence
augaacuccacgcugaauuucuucauccaguccuacaauaaugcaagcaaugauacauaccuauaccgcguucaacgacuuaucagaucacaaaugcagcagguacacugcuag

SEQ ID NO: 236039 - RNA, 438 nt, Artificial Sequence
  derived and/or modified sequence
auggguaucggcugcuggcgaaacccuuuguugcugcuuaucgcccucguccucucugcuaaguuaggccauuuucaacggugggagggcuuucaacaaaagcuaaugagcaagaaaaacaugaauaguacacucaauuuuuuuauucagagcuauaauaacgcauccaaugauacauaccuguaccgugugcagcgccuuauccgcagccagaugcaguuaacuacuggaguagaauauauuguaacggucaaaauuggauggacuaagugcaaacgaaaugauacuucuaauuccucauguccacugcaaucgaagaagcuuagaaagucccugaucugcgaaagccucaucuacaccaugccauggaucaauuauuuucaacucuggaauaacagcugcuuggaagccgaacauguugguagaaaucuccgguag

SEQ ID NO: 236040 - RNA, 438 nt, Artificial Sequence
  derived and/or modified sequence
augggaaucgguuguuggcgcaauccuuuacuuuuacuuaucgcacucguccugucagccaaguuaggccacuuccaaaggugggagggcuuccagcagaaguuaaugagcaaaaagaauaugaauucaacccuuaacuuuuucauacaaucguauaacaaugccuccaaugacacuuacuuguacagagugcagagacugauucgaucccagaugcaacucacaaccggcguagaauacauaguuacggugaaaaucggguggacaaaauguaaacggaaugauaccucgaauucauccugcccccuccaaagcaaaaaacuacggaaaucccucaucugcgagucucucauuuauacaaugccguggaucaacuauuuucagcuguggaauaauucuugucuugaagcagagcacgucggcaggaaccugagauag

SEQ ID NO: 236041 - protein, 202 aa, Artificial Sequence
  derived and/or modified sequence
MLVAGFLLALPPSWAAGAPRAGRRPARPRGCADRPEELLEQLYGRLAAGVLSAFHHTLQLGPREQARNASCPAGGRPADRRFRPPTNLRSVSPWAYRISYDPARYPRYLPEAYCLCRGCLTGLFGEEDVRFRSAPVYMPTVVLRRTPACAGGRSVYTEAYVTIPVGCTCVPEPEKDADSINSSIDKQGAKLLLGPNDAPAGP

SEQ ID NO: 236042 - DNA, 609 bp, Artificial Sequence
  derived and/or modified sequence
atgctggtggccggcttcctgctggccctgccccccagctgggccgccggcgcccccagagccggcagaagacccgccagacccagaggctgcgccgacagacccgaggagctgctggagcagctgtacggcagactggccgccggcgtgctgagcgccttccaccacaccctgcagctgggccccagagagcaggccagaaacgccagctgccccgccggcggcagacccgccgacagaagattcagaccccccaccaacctgagaagcgtgagcccctgggcctacagaatcagctacgaccccgccagataccccagatacctgcccgaggcctactgcctgtgcagaggctgcctgaccggcctgttcggcgaggaggacgtgagattcagaagcgcccccgtgtacatgcccaccgtggtgctgagaagaacccccgcctgcgccggcggcagaagcgtgtacaccgaggcctacgtgaccatccccgtgggctgcacctgcgtgcccgagcccgagaaggacgccgacagcatcaacagcagcatcgacaagcagggcgccaagctgctgctgggccccaacgacgcccccgccggcccctag

SEQ ID NO: 236043 - DNA, 609 bp, Artificial Sequence
  derived and/or modified sequence
atgctggtcgcagggtttctgctggcactgcccccatcgtgggctgccggtgcccccagagcaggccggcgccccgctaggcctagaggttgtgcagacagacctgaagaactcctggaacagttgtacggtaggctggccgctggcgttctgtctgccttccaccatacgctgcagctcggaccaagggaacaggcccggaacgcatcatgtccagcaggggggcgcccagctgaccggagattcaggcccccaactaatttacgtagcgtttccccctgggcctacagaatatcatacgaccccgcccgctatcctagatatctgcctgaggcatattgcttgtgtcgcggctgtttgaccggcctgtttggcgaggaggacgtgaggttccgatcagcccccgtgtacatgcctaccgtggtcttgcgcaggacacccgcctgtgcgggcgggcgatcagtctacactgaggcctacgtcaccatccccgtgggatgtacttgtgtcccagaacccgagaaagacgcagattctataaattcgtcgatcgacaagcagggcgctaaactcctgctgggccccaacgacgccccagcgggcccatag

SEQ ID NO: 236044 - DNA, 609 bp, Artificial Sequence
  derived and/or modified sequence
atgctggtggccggcttcctgctggccctgcccccatcctgggccgccggggcccccagggctggaagaagacctgcccggccccggggctgtgccgacaggcctgaggagctgctggagcagctgtatggccgcctggccgccggcgtgctgagcgccttccaccacaccctgcagctgggcccccgggagcaggccagaaatgccagctgcccagctgggggccggcctgctgaccggcgcttccggccccccaccaacctgcggtctgtgagcccctgggcctaccgcatctcctatgaccctgcccgctacccccgctacctgcctgaggcctactgcctgtgccggggctgcctgaccggcctgtttggagaagaagatgtgcgcttccgcagcgcccctgtgtacatgcccaccgtggtgctgcggaggaccccagcctgtgccggcggccgctctgtgtacacagaggcctacgtgaccatccctgtgggctgcacctgtgtgcctgagcctgagaaggatgctgacagcatcaacagcagcattgacaagcagggcgccaagctgctgctgggccccaatgatgccccagctggcccctag

SEQ ID NO: 236045 - DNA, 609 bp, Artificial Sequence
  derived and/or modified sequence
atgctggtggccggcttcctgctggccctgccccccagctgggccgccggagcacctcgagccgggagacgtccagcacgtccacgcgggtgcgcagatcggccagaggagttactggaacagttgtatggtagactggctgctggcgtccttagtgctttccatcacacgctgcagctgggtccaagggagcaggctcgtaatgcatcctgtcctgccggcggtcgtcctgctgaccgcaggtttcgtcctccaactaacttgagatctgtcagcccgtgggcatacagaatttcctatgaccctgcacgatatccgcggtatttgcccgaggcctactgcctctgccgaggctgtcttaccggcctgtttggggaagaggatgtcagattccggtctgcgcccgtatacatgcccactgtagtactgcgcaggacccccgcttgcgccggaggccggagcgtgtacactgaggcttacgtcactatccctgtggggtgcacatgtgtgccggaacccgagaaagatgctgacagtatcaatagctctattgacaagcagggcgccaagcttcttttgggtccaaatgacgcacccgccgggccctag

SEQ ID NO: 236046 - DNA, 609 bp, Artificial Sequence
  derived and/or modified sequence
atgctggtggccggatttctgttggctcttccgccatcttgggctgcaggcgcaccgagagctggccgtagacccgcaaggccacgcggatgtgccgaccggcctgaagaacttctggagcaactgtacgggagattagccgctggcgtactatcggctttccaccataccctgcagctcggcccaagagaacaagctcgtaacgcctcctgtccagctgggggacgcccagctgaccgcaggtttcggcctcccacaaatctcagatcagtgagtccttgggcctatagaattagttatgacccagccaggtatccacgttatctcccagaagcctactgtctctgccgcggatgcctcacgggcttgtttggggaagaggatgtgagatttcgcagcgctccagtctatatgcccacagttgtgcttagacgaacaccggcttgtgccggaggccgatcagtctatacggaggcctacgtcacaatccctgtgggctgtacttgtgttcccgagcccgaaaaggatgcagactccataaatagcagcattgacaagcagggcgcaaagctcctgcttgggccaaatgacgccccagccggaccttag

SEQ ID NO: 236047 - protein, 326 aa, Artificial Sequence
  derived and/or modified sequence
MAAFAVEPQGPALGSEPMMLGSPTSPKPGVNAQFLPGFLMGDLPAPVTPQPRSISGPSVGVMEMRSPLLAGGSPPQPVVPAHKDKSGAPPVRSIYDDISSPGLGSTPLTSRRQPNISVMQSPLVGVTSTPGTGQSMFSPASIGQPRKTTLSPAQLDPFYTQGDSLTSEDHLDDSWVTVFGFPQASASYILLQFAQYGNILKHVMSNTGNWMHIRYQSKLQARKALSKDGRIFGESIMIGVKPCIDKSVMESSDRCALSSPSLAFTPPIKTLGTPTQPGSTPRISTMRPLATAYKASTSDYQVISDRQTPKKDESLVSKAMEYMFGW

SEQ ID NO: 236048 - protein, 191 aa, Artificial Sequence
  derived and/or modified sequence
MFSPASIGQPRKTTLSPAQLDPFYTQGDSLTSEDHLDDSWVTVFGFPQASASYILLQFAQYGNILKHVMSNTGNWMHIRYQSKLQARKALSKDGRIFGESIMIGVKPCIDKSVMESSDRCALSSPSLAFTPPIKTLGTPTQPGSTPRISTMRPLATAYKASTSDYQVISDRQTPKKDESLVSKAMEYMFGW

SEQ ID NO: 236049 - DNA, 981 bp, Artificial Sequence
  derived and/or modified sequence
atggcggctttcgcagttgagcctcagggacccgctttagggagcgagcctatgatgctcggctctccaaccagtcctaagcccggtgtgaacgcacagttcctgccaggattcctcatgggggacctacccgctcctgtgaccccacagccaagatctatttccggcccatctgtaggcgtcatggagatgcgctccccgcttctggccggtggcagccccccgcagcccgttgtgcctgctcacaaagataagtcaggcgctccccccgttcgctccatctatgacgatatatcctctcctgggctgggatcaactccgctgaccagtcgacgacagccaaacatctctgtgatgcagagccctctggtgggcgtgacatccacccccggaacaggccagagtatgttttctcctgccagcataggtcagcccaggaaaacaactctctctcctgcccagctagaccccttttacactcaaggggattctctgacttcggaagaccacctggatgatagctgggtaaccgtgtttggcttcccgcaggcttcagcatcatacatcttgcttcagttcgcgcagtacggcaatatcctcaaacatgtgatgagcaataccggaaactggatgcacattcgataccaatcaaagcttcaagctagaaaggccctatctaaggatggaaggattttcggggagtctataatgatcggggtgaaaccttgcatagataaatctgtcatggagtccagtgacaggtgtgcactcagttcaccatctctggcattcactccaccgattaagacattgggtacgccaacccagcctgggtctacaccacgcatttctacgatgcgaccgttggccaccgcttacaaagctagtacaagcgattatcaggtaatctccgaccggcaaactcctaaaaaagatgagtccctcgtttcaaaagccatggagtatatgttcggttggtag

SEQ ID NO: 236050 - DNA, 981 bp, Artificial Sequence
  derived and/or modified sequence
atggccgcctttgctgtggagccccagggccctgccctgggcagcgagcccatgatgctgggcagccccaccagccccaagccaggagtgaatgcccagttcctgcccggcttcctgatgggagacctgcctgcccctgtgaccccccagcccaggagcatcagcggccccagcgtgggcgtgatggagatgaggagccccctgctggccggcggcagccccccccagcctgtggtgcctgcccacaaggacaagagcggggcccctcctgtgcgcagcatctatgatgacatcagcagccctggcctgggcagcacccccctgaccagccggcggcagcccaacatctctgtgatgcagagccccctggtgggcgtgaccagcaccccaggcaccggccagagcatgttctccccagccagcatcggccagcccaggaagaccaccctgagccctgcccagctggaccccttctacacccagggcgacagcctgaccagcgaggaccacctggatgacagctgggtgacagtgtttggcttcccccaggccagcgccagctacatcctgctgcagtttgcccagtatggcaacatcctgaagcacgtgatgagcaacacaggcaactggatgcacatccgctaccagagcaagctgcaggccaggaaggccctgagcaaggatggccgcatctttggagagagcatcatgattggagtgaagccctgcatcgacaagtctgtgatggagagcagtgacagatgtgccctgagcagccccagcctggccttcaccccacccatcaagaccctgggcacccccacccagcccggcagcaccccccgcatcagcaccatgaggcccctggccacagcctacaaggccagcaccagtgactaccaggtgatcagtgaccggcagacccccaagaaggatgagagcctggtgtccaaggccatggagtacatgtttggctggtag

SEQ ID NO: 236051 - DNA, 981 bp, Artificial Sequence
  derived and/or modified sequence
atggccgccttcgccgtggagccccagggccccgccctgggcagcgaaccgatgatgctggggtcaccgacctcgccaaaacctggtgtcaatgcccaatttcttcccggattcctgatgggcgatctgcctgcccccgtaaccccccagccgaggagcatttctggaccatccgtgggggttatggaaatgaggtccccactgctggcggggggatcgccacctcagcccgtagtgcctgctcataaagacaaaagtggtgcgccgcccgtaaggagcatttacgacgacataagcagtccaggcctcggctcaacccccctcacctcgcgccggcagcctaacatttcggtcatgcagagccctctcgttggagtgacatcaacgccgggtacagggcagagcatgttcagtcccgcctctatcggacagccccgcaaaactaccctgtcccctgcgcagttggaccctttttatacccagggagactcactcacctccgaagatcatttagatgattcatgggtcaccgtttttggatttcctcaagcttccgctagctacatcctgctacagtttgcccaatacggaaatatattgaaacacgtgatgtcaaatacggggaattggatgcatatccggtaccagtcgaagctacaggcccggaaagccctctccaaagatgggcgcattttcggggagtccatcatgattggggtcaagccctgtatcgataaatcggtgatggagagctccgacaggtgcgccctttcctcgccatcccttgcctttactccccctatcaaaactctgggcaccccaacccaacccggctcgacgcccagaatttcaacaatgagacctttggctaccgcttacaaggcttctactagcgattaccaggttatttccgaccgtcagacccccaagaaagacgagtctttggtgtccaaggcaatggagtatatgtttgggtggtag

SEQ ID NO: 236052 - DNA, 1633 bp, Artificial Sequence
  derived and/or modified sequence
acgcaaccccataaggtagcacgccgttacccgtggggagcgtttccgccatttttgaaaattaattgggaaggtactggttttaagtgtagttgccgacgcaatggcagcctttgcagtggaacctcaggggcccgcgttaggatctgaaccaatgatgctgggttcacccacatctccaaagccaggagttaatgcccagttcttacctggatttttaatgggggatttgccagctccggtgactccacaacctcgatcaattagtggcccttcagtaggagtaatggaaatgagatcacctttacttgcaggtgggtcaccaccacaaccagttgtaccagctcataaagataaaagtggcgctccaccagttagaagtatatatgatgacatttctagcccaggacttggatcaacacctttaacttcaagaagacagccaaacatttcagtaatgcagagtcctcttgttggagttacatctactcctggaacagggcaaagtatgtttagtccagcaagtatcggtcagccacgaaagacgacattatctcctgcccagttggatcctttttatactcaaggagattctttgacttcagaagatcacctcgatgactcttgggtgactgtatttgggtttcctcaagcatctgcttcctacatattactacaatttgcacagtatgggaatatcttaaaacatgtgatgtctaatacaggaaattggatgcatattcgttatcaatctaaactgcaggctcggaaagccttaagcaaagatgggaggatttttggagaatccatcatgattggtgtaaaaccatgtattgacaaaagtgttatggaaagcagtgacagatgtgctttatcatctccatctttagcctttacaccaccaatcaaaactctaggtacaccaacacaacctggaagtactcctaggatttctaccatgagacctcttgctacagcatacaaagcctctactagtgattatcaggttatttctgacagacaaacgccaaaaaaagatgaaagtcttgtatccaaagcaatggagtacatgtttggctggtagtagaacaccaagaaggaggttgctacactaaaacagagttagcagagtgctgctggttccttcggttagttatataactgttcctgcagtattggatagctatctcatacttcttttagaaagaagcctttttcattaaggatacaacctatttgtagctcgcactttaaaagatgcttgagatacattttaaagaaaactaaaaatccctgtaaataggattttgtgctttctgtaacagtgcatgcttcagcacagaaaactcagcattgattattgtaaattaaataactgaaattgtggtgagacgtcatagtcttcatgagaacgtgggggtgaatttcatgaaggggaactatagttatttctaccgacacaaatattataattagcaatttgaattatggtcttttaatttagatagtatttaatattttaattatccttgtttgtatatgtcctgtcacagagtgtcctcttggtgtattctaaaacgagcattcttttaaaaaacctaaagtttcttgataataaacattgtcaatgata

SEQ ID NO: 236053 - DNA, 1470 bp, Artificial Sequence
  derived and/or modified sequence
acaccaggtgctgaaggctgagacggtgagagcatgagtgataagatgctctctccccttgctctctttctgaagatgacaaactccatcttttttctaaagtcttactaaaggtgacaatgtatatagtataatgaaggatgttactaaatgacatgtgctgcacacctgagtcttgtggaggctgaagaaaaggaggcttctgtagaaaataggaactcagatctgaaccaatgatgctgggttcacccacatctccaaagccaggagttaatgcccagttcttacctggatttttaatgggggatttgccagctccggtgactccacaacctcgatcaattagtggcccttcagtaggagtaatggaaatgagatcacctttacttgcaggtgggtcaccaccacaaccagttgtaccagctcataaagataaaagtggcgctccaccagttagaagtatatatgatgacatttctagcccaggacttggatcaacacctttaacttcaagaagacagccaaacatttcagtaatgcagagtcctcttgttggagttacatctactcctggaacagggcaaagtatgtttagtccagcaagtatcggtcagccacgaaagacgacattatctcctgcccagttggatcctttttatactcaaggagattctttgacttcagaagatcacctcgatgactcttgggtgactgtatttgggtttcctcaagcatctgcttcctacatattactacaatttgcacagtatgggaatatcttaaaacatgtgatgtctaatacaggaaattggatgcatattcgttatcaatctaaactgcaggctcggaaagccttaagcaaagatgggaggatttttggagaatccatcatgattggtgtaaaaccatgtattgacaaaagtgttatggaaagcagtgacagatgtgctttatcatctccatctttagcctttacaccaccaatcaaaactctaggtacaccaacacaacctggaagtactcctaggatttctaccatgagacctcttgctacagcatacaaagcctctactagtgattatcaggttatttctgacagacaaacgccaaaaaaagatgaaagtcttgtatccaaagcaatggagtacatgtttggctggtagtagaacaccaagaaggaggttgctacactaaaacagagttagcagagtgctgctggttccttcggttagttatataactgttcctgcagtattggatagctatctcatacttcttttagaaagaagcctttttcattaaggatacaacctatttgtagctcgcactttaaaagatgcttgagatacattttaaagaaaactaaaaatccctgtaaataggattttgtgctttctgtaacagtgcatgcttcagcacagaaaactcagcattgattattgtaaattaaataactgaaattgtggtgag

SEQ ID NO: 236054 - DNA, 1624 bp, Artificial Sequence
  derived and/or modified sequence
agttgccgacgcaatggcagcctttgcagtggaacctcaggggcccgcgttaggatctgaaccaatgatgctgggttcacccacatctccaaagccaggagttaatgcccagttcttacctggatttttaatgggggatttgccagctccggtgactccacaacctcgatcaattagtggcccttcagtaggagtaatggaaatgagatcacctttacttgcaggtgggtcaccaccacaaccagttgtaccagctcataaagataaaagtggcgctccaccagttagaagtatatatgatgacatttctagcccaggacttggatcaacacctttaacttcaagaagacagggtccccaacagggtcctgatcagttgcccaggctagagtgcagcggcacagtcataactctgcagccttgaactcctgggttcaaccaatcctcctgcctcaactgtcctattgggatatagccaaacatttcagtaatgcagagtcctcttgttggagttacatctactcctggaacagggcaaagtatgtttagtccagcaagtatcggtcagccacgaaagacgacattatctcctgcccagttggatcctttttatactcaaggagattctttgacttcagaagatcacctcgatgactcttgggtgactgtatttgggtttcctcaagcatctgcttcctacatattactacaatttgcacagtatgggaatatcttaaaacatgtgatgtctaatacaggaaattggatgcatattcgttatcaatctaaactgcaggctcggaaagccttaagcaaagatgggaggatttttggagaatccatcatgattggtgtaaaaccatgtattgacaaaagtgttatggaaagcagtgacagatgtgctttatcatctccatctttagcctttacaccaccaatcaaaactctaggtacaccaacacaacctggaagtactcctaggatttctaccatgagacctcttgctacagcatacaaagcctctactagtgattatcaggttatttctgacagacaaacgccaaaaaaagatgaaagtcttgtatccaaagcaatggagtacatgtttggctggtagtagaacaccaagaaggaggttgctacactaaaacagagttagcagagtgctgctggttccttcggttagttatataactgttcctgcagtattggatagctatctcatacttcttttagaaagaagcctttttcattaaggatacaacctatttgtagctcgcactttaaaagatgcttgagatacattttaaagaaaactaaaaatccctgtaaataggattttgtgctttctgtaacagtgcatgcttcagcacagaaaactcagcattgattattgtaaattaaataactgaaattgtggtgagacgtcatagtcttcatgagaacgtgggggtgaatttcatgaaggggaactatagttatttctaccgacacaaatattataattagcaatttgaattatggtcttttaatttagatagtatttaatattttaattatccttgtttgtatatgtcctgtcacagagtgtcctcttggtgtattctaaaacgagcattctttt

SEQ ID NO: 236055 - DNA, 981 bp, Artificial Sequence
  derived and/or modified sequence
atggcagctttcgcagtcgaaccccaggggcctgcactgggtagtgagcctatgatgctgggctcacccacaagtcccaaacccggagtaaatgcccagtttctgcctggctttctgatgggtgatctgccagccccagttaccccccagcccaggtccatttccggacccagcgtcggtgtcatggagatgagaagcccattactcgccggaggatcaccccctcagccagtggtgccggctcataaagacaagtctggcgcacccccagtcaggtccatctacgacgatatctcttctcccggactgggctccacgccactgacatcacgtcgccagcccaacattagcgttatgcaaagccccttggtgggggtgaccagtacaccaggaaccggacaaagcatgttcagccctgcctctataggacagccacgcaaaactaccttgtccccagcccagctggacccattttacacacagggagactcgctaacttctgaagatcaccttgacgacagctgggtgaccgtgttcgggttcccacaggcttcagccagctacatcttactgcagttcgcccagtacggtaatattttgaaacatgtgatgtccaacacaggaaattggatgcacatcagataccagagtaagctgcaggcgagaaaggccttgtccaaggacgggcgtatttttggtgagagcattatgatcggtgtgaagccctgcatagataagtctgtgatggaaagttccgaccgttgcgccttgagtagcccctccttagcctttacccctcctatcaagacactgggcacgcccactcagcctgggagcacgcctcgtatcagtacaatgcggcctctcgccaccgcttacaaagctagtacatccgactaccaggttatttccgacaggcagactccaaagaaggacgagtcgctcgtttcgaaagccatggagtacatgtttggttggtag

SEQ ID NO: 236056 - DNA, 981 bp, Artificial Sequence
  derived and/or modified sequence
atggccgccttcgccgtggagccccagggccccgccctgggcagcgagcccatgatgctgggcagccccaccagccccaagcccggcgtgaacgcccagttcctgcccggcttcctgatgggcgacctgcccgcccccgtgaccccccagcccagaagcatcagcggccccagcgtgggcgtgatggagatgagaagccccctgctggccggcggcagccccccccagcccgtggtgcccgcccacaaggacaagagcggcgccccccccgtgagaagcatctacgacgacatcagcagccccggcctgggcagcacccccctgaccagcagaagacagcccaacatcagcgtgatgcagagccccctggtgggcgtgaccagcacccccggcaccggccagagcatgttcagccccgccagcatcggccagcccagaaagaccaccctgagccccgcccagctggaccccttctacacccagggcgacagcctgaccagcgaggaccacctggacgacagctgggtgaccgtgttcggcttcccccaggccagcgccagctacatcctgctgcagttcgcccagtacggcaacatcctgaagcacgtgatgagcaacaccggcaactggatgcacatcagataccagagcaagctgcaggccagaaaggccctgagcaaggacggcagaatcttcggcgagagcatcatgatcggcgtgaagccctgcatcgacaagagcgtgatggagagcagcgacagatgcgccctgagcagccccagcctggccttcaccccccccatcaagaccctgggcacccccacccagcccggcagcacccccagaatcagcaccatgagacccctggccaccgcctacaaggccagcaccagcgactaccaggtgatcagcgacagacagacccccaagaaggacgagagcctggtgagcaaggccatggagtacatgttcggctggtag

SEQ ID NO: 236057 - protein, 376 aa, Artificial Sequence
  derived and/or modified sequence
MFNPHALDVPAVIFDNGSGLCKAGLSGEIGPRHVISSVLGHCKFNVPLARLNQKYFVGQEALYKYEALHLHYPIERGLVTGWDDMEKLWKHLFERELGVKPSQQPVLMTEPSLNPREIREKLAEMMFETFSVPGFYLSNHAVAALYASACVTGLVVDSGDGVTCTVPIFEGYSLPHAVTKLCMAGRDITEHLTRLLFASGFNFPCILNKAVVNNIKEKLCYIALEPEKELRKSRGEVLGAYRLPDGHVIHFGDELYQVPEVLFAPDQLGIHSPGLSKMVSSSIMKCDTDIQNKLYADIVLSGGTTLLPGLEERLMKEVEQLASKGTPIKITASPDRCFSAWIGASIMTSMSSFKQMWVTSADFKEYGTSVVQRRCF

SEQ ID NO: 236058 - DNA, 1131 bp, Artificial Sequence
  derived and/or modified sequence
atgtttaatcctcacgccttagacgtgcctgctgtgatctttgataacggatctgggctgtgtaaagccggtctttctggggagatcggtcctcgacacgtgatctccagtgtgcttggtcattgcaagttcaacgttcccctggcgaggttgaatcaaaagtatttcgtcggacaggaagcattgtacaaatacgaggcactacatcttcactacccaatagaaagaggcctagtgaccggttgggacgatatggagaagctgtggaaacatcttttcgagcgcgaactgggggtcaagccctcccagcagccggtgctcatgaccgagccctctctgaacccgcgcgagattagagagaagctggctgagatgatgtttgagacattcagtgtgccgggcttctacctctcaaaccacgcggttgctgctctgtatgcttcagcgtgcgtaaccggactcgtggtggactccggggacggcgtgacatgcaccgttcccatctttgaaggttattcgctccctcacgctgttacaaaactctgcatggcagggcgcgacatcacggaacacttaaccagactactgttcgcatctggatttaattttccttgcattttgaataaagcggttgtcaacaatataaaggagaagctgtgttatatcgccctggaaccggaaaaagagttacggaagtcgaggggggaagtacttggcgcctacagactgcccgatggccacgtcattcatttcggagacgagctgtaccaagtgcctgaggtgctgttcgctccagaccaacttggaatccactcacctgggctgtctaagatggtgtcatcctccatcatgaagtgcgacaccgacattcagaacaagttgtatgcagacatcgtgctgtctggaggcaccaccctcttaccaggtctggaggagcgcctaatgaaagaggtcgagcagctcgccagcaaggggacaccaattaaaataacagccagccccgacaggtgctttagtgcttggatcggagcctccattatgacatctatgagtagtttcaaacagatgtgggttacgtcagccgacttcaaggagtacggaacatcagtcgtacagagaagatgtttttag

SEQ ID NO: 236059 - DNA, 1131 bp, Artificial Sequence
  derived and/or modified sequence
atgttcaacccccacgccctggatgtgcctgctgtgatctttgacaatggcagcggcctgtgcaaggccggcctgagcggggagatcggccccaggcatgtgatcagctctgtgctgggccactgcaagttcaacgtgcccctggcccggctgaaccagaagtactttgtgggccaggaggccctgtacaagtatgaggccctgcacctgcactaccccatcgagcggggcctggtgacaggctgggatgacatggagaagctgtggaagcacctgtttgagcgggagctgggcgtgaagcccagccagcagcctgtgctgatgacagagcccagcctgaacccccgggagatccgggagaagctggccgagatgatgtttgagaccttctctgtgcccggcttctacctgagcaaccacgctgtggccgccctgtatgccagcgcctgtgtgacaggcctggtggtggacagcggagatggagtgacctgcaccgtgcccatctttgagggctacagcctgccccatgctgtgaccaagctgtgcatggccggccgggacatcacagagcacctgacccggctgctgtttgccagcggcttcaacttcccctgcatcctgaacaaggctgtggtgaacaacatcaaggagaagctgtgctacatcgccctggagcctgagaaggagctgaggaagagcagaggagaggtgctgggcgcctaccgcctgcctgatggccacgtgatccactttggagatgagctgtaccaggtgcctgaggtgctgtttgccccagaccagctgggcatccacagccctggcctgagcaagatggtgagcagcagcatcatgaagtgtgacacagacatccagaacaagctgtatgctgacatcgtgctgagcggcggcaccaccctgctgcccggcctggaggagcggctgatgaaggaggtggagcagctggccagcaagggcacccccatcaagatcacagccagcccagaccgctgcttcagcgcctggattggagccagcatcatgacctccatgagcagcttcaagcagatgtgggtgaccagcgctgacttcaaggagtatggcacctctgtggtgcagaggcgctgcttctag

SEQ ID NO: 236060 - DNA, 1131 bp, Artificial Sequence
  derived and/or modified sequence
atgttcaacccccacgccctggacgtgcccgccgtgatcttcgacaacggctcaggcctttgcaaagcagggctctccggagaaattggtccccggcatgtaataagctctgttttgggtcattgcaaattcaacgtccctctcgcccggctaaatcaaaaatatttcgtgggccaggaagctctctataagtatgaagctttgcatctgcactatcccatcgaaagaggcctggttacaggttgggacgacatggaaaaattgtggaagcacctgttcgaaagagagttgggcgtaaagccgtcgcagcagcccgtccttatgaccgaacctagtctcaatccacgggagatccgcgaaaagctcgctgagatgatgttcgagaccttctctgtaccaggcttctacctaagcaatcacgccgtagcagccttatacgcatcggcttgcgtgacagggctggtagtagacagtggggacggagtcacttgcacagtccccatctttgaaggatactcactgccccacgccgtgacaaaattgtgtatggctggaagagacataaccgagcatcttacaaggctgctgtttgccagcggcttcaacttcccatgcattctcaataaggctgtagttaataatattaaggagaaactgtgctatatagccctggagcccgagaaggagctccgcaaatcacgaggtgaggtgctgggcgcctacagacttcccgacggccatgtcatccacttcggcgatgaactgtaccaggtgccggaggtgctgtttgcaccagaccagctgggaatccacagccctggtctctcgaagatggtatccagttcaatcatgaagtgcgacaccgacattcagaacaagctatacgctgacattgtgctgtcgggcggcacaaccctgctcccggggttggaagaaagactgatgaaggaggtggagcaactggctagcaagggaactccaataaagattaccgcttctcccgatcgatgctttagcgcctggattggcgcatctattatgacgtccatgtcgtctttcaagcagatgtgggtgacaagcgccgattttaaggagtatgggacgtctgtggtgcagaggagatgcttttag

SEQ ID NO: 236061 - DNA, 1131 bp, Artificial Sequence
  derived and/or modified sequence
atgttcaacccccacgccctagacgtccctgccgtgatatttgataatggaagtggactgtgtaaagccggactaagtggggagattggtccccgacacgtgatttcatctgtactcggacattgtaaatttaacgtgccactggctcgattgaaccaaaagtactttgtgggtcaggaggcgctgtacaagtatgaagccctgcatctgcactaccctatagagcgagggttggtgaccggctgggacgatatggaaaagctgtggaaacacctgtttgaacgggagcttggggttaaaccatctcagcagccagtcctcatgactgagccaagtctgaatccccgagagatccgcgaaaaactcgcggaaatgatgtttgagacctttagcgtcccaggattctatcttagcaaccacgccgttgctgctttatatgcctctgcttgcgtgaccggactggtagtagactcaggcgatggagtcacgtgtaccgtgcctatcttcgaaggttacagcttaccccatgcagtcaccaagctgtgcatggcgggtcgcgacatcactgagcacctgacacgcctcctgttcgctagtggctttaactttccttgcatcctgaataaagctgtggtgaataatatcaaggaaaaactctgctacatagctcttgagccagagaaggaactgagaaaaagtcgaggcgaggttctgggtgcatatcgactgccggacgggcacgtcattcacttcggggatgagctgtaccaggttccagaggtactctttgcaccagaccaattaggcatacacagcccaggactttccaagatggtgtccagcagcattatgaagtgcgatacagacattcagaataagctgtacgctgacattgtgctgtcaggaggcaccaccttattacccggacttgaggagaggcttatgaaagaggttgaacaattggcctccaaaggcacccctataaaaatcaccgcttcccccgatcgctgcttcagcgcttggataggagcgagcatcatgacatcaatgagctcctttaaacagatgtgggtgacctccgcagatttcaaggaatacggcacatctgttgtgcagcggaggtgcttttag

SEQ ID NO: 236062 - DNA, 1440 bp, Artificial Sequence
  derived and/or modified sequence
agaatggagataagattcagaggttgaggatggggtgtcctggtggactgaaggtagcctactagctgtacatgggtgacaacttgaaacttcagaaccctgaagtttaaaaaattctaaaggtgcctgtcatctcagagagtgacgtaagtgttctttctttatttgggggaagtccaggagaacatattacagacatgtttaatccacatgcattagatgttcctgctgtaatttttgacaatggttcaggactctgcaaagcaggcctgtctggagagattggaccccgccatgtcatcagctccgtcttgggacattgtaaattcaatgtgcctttagcaagacttaatcagaagtacttcgtggggcaagaagccctgtacaagtatgaggccctacatttgcactaccccattgagcgtggactggtaacaggatgggatgacatggagaaactctggaaacatctctttgagcgggagcttggagtaaaacccagccaacagcctgtacttatgaccgagccctctttgaatcctagggaaattcgagaaaagctagcagaaatgatgtttgagaccttcagtgtgcctggtttctacctgtctaatcatgcggtggcagcgctctatgcctctgcctgtgtcacaggcctggtggtggacagtggagatggggtcacttgcactgtccccatctttgagggttactccctgcctcacgcagtcaccaaactctgtatggcagggagggacatcacagagcacctcacccggctcctctttgctagcgggtttaacttcccttgcatactcaacaaggccgtggtaaataacatcaaagagaagttgtgctacatcgccttggagccagagaaagagctacgcaagagccggggagaggtcctgggagcatacagactgccagatggacatgtcatccactttggggatgagctgtaccaagtgcccgaggttctttttgcacctgaccagctgggcatccacagcccaggactctcaaaaatggtctccagcagcatcatgaagtgtgacactgacatccagaataaactttatgcagacattgtactctccgggggcaccactctcctccctgggctggaggaaaggctcatgaaggaagtggaacagctggcttccaaaggtactcccatcaagatcacagcttctcctgatagatgcttctctgcatggattggtgcatccatcatgacctctatgagcagtttcaagcagatgtgggtcacctcggcagacttcaaggagtatgggacatctgtggttcaaagaaggtgcttttaaagatccttgagcagaggagacatcttgaagtgtcagattacaggagtaccagtgggagatggcattttcttctgggcttcagcatgatgttcaataaaagttttgccatttc

SEQ ID NO: 236063 - DNA, 1131 bp, Artificial Sequence
  derived and/or modified sequence
atgttcaacccccacgccctggacgtgcccgccgtgatcttcgacaacggcagcggcctgtgcaaggccggcctgagcggcgagatcggccccagacacgtgatcagcagcgtgctgggccactgcaagttcaacgtgcccctggccagactgaaccagaagtacttcgtgggccaggaggccctgtacaagtacgaggccctgcacctgcactaccccatcgagagaggcctggtgaccggctgggacgacatggagaagctgtggaagcacctgttcgagagagagctgggcgtgaagcccagccagcagcccgtgctgatgaccgagcccagcctgaaccccagagagatcagagagaagctggccgagatgatgttcgagaccttcagcgtgcccggcttctacctgagcaaccacgccgtggccgccctgtacgccagcgcctgcgtgaccggcctggtggtggacagcggcgacggcgtgacctgcaccgtgcccatcttcgagggctacagcctgccccacgccgtgaccaagctgtgcatggccggcagagacatcaccgagcacctgaccagactgctgttcgccagcggcttcaacttcccctgcatcctgaacaaggccgtggtgaacaacatcaaggagaagctgtgctacatcgccctggagcccgagaaggagctgagaaagagcagaggcgaggtgctgggcgcctacagactgcccgacggccacgtgatccacttcggcgacgagctgtaccaggtgcccgaggtgctgttcgcccccgaccagctgggcatccacagccccggcctgagcaagatggtgagcagcagcatcatgaagtgcgacaccgacatccagaacaagctgtacgccgacatcgtgctgagcggcggcaccaccctgctgcccggcctggaggagagactgatgaaggaggtggagcagctggccagcaagggcacccccatcaagatcaccgccagccccgacagatgcttcagcgcctggatcggcgccagcatcatgaccagcatgagcagcttcaagcagatgtgggtgaccagcgccgacttcaaggagtacggcaccagcgtggtgcagagaagatgcttctag

SEQ ID NO: 236064 - protein, 473 aa, Artificial Sequence
  derived and/or modified sequence
MASRSLGGLSGIRGGGGGGGKKSLSARNAAVERRNLITVCRFSVKTLIDRSCFETIDDSSPEFNNFAAILEQILSHRLKEISQSCRWLAHLQIPLQGQVTWFGYESPRSFWDYIRVACRKVSQNCICSIENMENVSSSRAKGRAWIRVALMEKHLSEYISTALRDFKTTRRFYEDGAIVLGEEANMLAGMLLGLNAIDFSFCLKGEGLDGSFPAVIDYTPYLKYIQSSDSISSDEEELRTLGSSGSESSTPENVGPPFLMDENSWFNKCKRVKQKYQLTLEQKGYLEELLRLRENQLSESVSQNKILLQRIEDSDLAHKLEKEQLEYIIVELQDQLTVLKNNDLRSRQELTAHLTNQWPSPGALDVNAVALDTLLYRKHNKQWYEKSYQSLDQLSAEVSLSQTSLDPGQSQEGDGKQDTLNVMSEGKEDTPSLLGLCGSLTSVASYKSLTSLKSNDYLASPTTEMTSPGLTPS

SEQ ID NO: 236065 - DNA, 1422 bp, Artificial Sequence
  derived and/or modified sequence
atggccagcagaagcctgggcggcctgagcggcatcagaggcggcggcggcggcggcggcaagaagagcctgagcgccagaaacgccgccgtggagagaagaaacctgatcaccgtgtgcagattcagcgtgaagaccctgatcgacagaagctgcttcgagaccatcgacgacagcagccccgagttcaacaacttcgccgccatcctggagcagatcctgagccacagactgaaggagatcagccagagctgcagatggctggcccacctgcagatccccctgcagggccaggtgacctggttcggctacgagagccccagaagcttctgggactacatcagagtggcctgcagaaaggtgagccagaactgcatctgcagcatcgagaacatggagaacgtgagcagcagcagagccaagggcagagcctggatcagagtggccctgatggagaagcacctgagcgagtacatcagcaccgccctgagagacttcaagaccaccagaagattctacgaggacggcgccatcgtgctgggcgaggaggccaacatgctggccggcatgctgctgggcctgaacgccatcgacttcagcttctgcctgaagggcgagggcctggacggcagcttccccgccgtgatcgactacaccccctacctgaagtacatccagagcagcgacagcatcagcagcgacgaggaggagctgagaaccctgggcagcagcggcagcgagagcagcacccccgagaacgtgggcccccccttcctgatggacgagaacagctggttcaacaagtgcaagagagtgaagcagaagtaccagctgaccctggagcagaagggctacctggaggagctgctgagactgagagagaaccagctgagcgagagcgtgagccagaacaagatcctgctgcagagaatcgaggacagcgacctggcccacaagctggagaaggagcagctggagtacatcatcgtggagctgcaggaccagctgaccgtgctgaagaacaacgacctgagaagcagacaggagctgaccgcccacctgaccaaccagtggcccagccccggcgccctggacgtgaacgccgtggccctggacaccctgctgtacagaaagcacaacaagcagtggtacgagaagagctaccagagcctggaccagctgagcgccgaggtgagcctgagccagaccagcctggaccccggccagagccaggagggcgacggcaagcaggacaccctgaacgtgatgagcgagggcaaggaggacacccccagcctgctgggcctgtgcggcagcctgaccagcgtggccagctacaagagcctgaccagcctgaagagcaacgactacctggccagccccaccaccgagatgaccagccccggcctgacccccagctag

SEQ ID NO: 236066 - DNA, 1422 bp, Artificial Sequence
  derived and/or modified sequence
atggcttcgcgcagccttggtggactttccggaattcgcggcggaggagggggaggtggaaaaaagtccttgagcgctaggaatgccgccgtggaacgcaggaacctgattaccgtctgcaggttttctgtaaagacactgatcgatagatcatgtttcgaaaccattgacgacagttctcccgaatttaataattttgccgccatcctggagcaaatacttagccatcggctgaaagagatttcacagagctgccgctggctggctcaccttcagatacctttgcaggggcaggtgacttggttcgggtatgagagtcccagatctttttgggattatataagggtcgcatgtagaaaggtttctcagaactgcatctgcagcatagaaaacatggagaatgtgtcctcctcgcgggcaaagggacgcgcatggataagggtcgcactgatggagaaacacctctccgagtatatctctacagcccttagggactttaagaccactcgcaggttctacgaggatggagcaatcgtgttaggcgaagaagccaacatgttagcaggcatgctgctgggccttaacgccatcgactttagcttttgtctaaagggagaggggttggacggatcctttccggccgtgattgactataccccatatctcaaatacattcagagcagcgattctatctcctccgatgaagaggagctgaggacactcggtagttcagggagcgaatccagtacacctgagaatgtcggcccgcccttcctgatggatgagaacagttggttcaacaagtgcaaacgggtcaagcaaaagtaccaactgaccttggaacagaaaggttatttggaagagctccttagactccgcgagaaccagctgagcgagagcgtgtctcaaaacaaaatactactgcagcggattgaggactctgacttggcacacaaactggagaaagagcagcttgagtacatcatcgtcgagctgcaagaccagctgacagtgctgaagaacaacgacctgcggagccggcaggaactcactgctcaccttacaaaccaatggccctctccaggcgcactggatgtgaatgcagtcgcactcgacaccctgctgtatcgtaagcacaataagcaatggtacgagaaatcctaccagagcctggaccagttgtccgccgaggtcagtctgtctcagaccagtctggatccaggccagagtcaagaaggcgacggcaaacaggacaccctcaatgtgatgtctgaagggaaagaagacaccccatcgcttctgggactgtgtgggtccctgacaagcgtggcatcttacaagtcactcacatctttgaagtctaacgactacctcgcttcaccgaccaccgagatgaccagtcccggactaactcctagctag

SEQ ID NO: 236067 - DNA, 1422 bp, Artificial Sequence
  derived and/or modified sequence
atggccagccgcagcctgggcggcctgagcggcatccggggcggcggcggcggcggcggcaagaagagcctgagcgccagaaatgctgctgtggagaggaggaacctgatcaccgtgtgccgcttctctgtgaagaccctgattgacaggagctgctttgagaccattgatgacagcagccctgagttcaacaactttgctgccatcctggagcagatcctgagccaccggctgaaggagatcagccagagctgccgctggctggcccacctgcagatccccctgcagggccaggtgacctggtttggctatgagagccccaggagcttctgggactacatccgggtggcctgcaggaaggtgtcccagaactgcatctgcagcattgagaacatggagaatgtgagcagcagccgggccaagggccgggcctggatccgggtggccctgatggagaagcacctgtctgagtacatcagcacagccctgcgggacttcaagaccacccggcgcttctatgaagatggagccatcgtgctgggggaggaggccaacatgctggccggcatgctgctgggcctgaatgccatcgacttctccttctgcctgaagggggagggcctggatggcagcttccctgctgtgattgactacaccccctacctgaagtacatccagagcagtgacagcatcagcagtgatgaggaggagctgcggaccctgggcagcagcggcagcgagagcagcaccccagaaaatgtgggcccccccttcctgatggatgagaacagctggttcaacaagtgcaagagggtgaagcagaagtaccagctgaccctggagcagaagggctacctggaggagctgctgcggctgcgggagaaccagctgtctgagagcgtgtcccagaacaagatcctgctgcagagaattgaggacagcgacctggcccacaagctggagaaggagcagctggagtacatcatcgtggagctgcaggaccagctgactgtgctgaagaacaatgacctgcggagccggcaggagctgacagcccacctgaccaaccagtggcccagccctggggccctggatgtgaatgctgtggccctggacaccctgctgtacaggaagcacaacaagcagtggtatgagaagagctaccagagcctggaccagctgtctgctgaggtgtccctgagccagaccagcctggaccccggccagagccaggagggagatggcaagcaggacaccctgaatgtgatgtctgagggcaaggaggacacccccagcctgctgggcctgtgtggcagcctgacctctgtggccagctacaagagcctgaccagcctgaagagcaatgactacctggccagccccaccacagagatgaccagccctggcctgacccccagctag

SEQ ID NO: 236068 - DNA, 1422 bp, Artificial Sequence
  derived and/or modified sequence
atggccagccggagcctgggcggcctgagcggcatccggggcggcggtggaggcggcggaaaaaaaagcctctctgccaggaacgccgcagtggaaaggcggaacttgatcaccgtgtgcaggttcagtgtcaagaccctgattgatcgaagctgcttcgaaacaatagatgactccagcccggagtttaataacttcgcggcaatccttgagcagatcctgagccacagattgaaagaaatctcccagagctgtcggtggcttgcccacctccagatccccttacaggggcaagttacatggtttggctacgaatcccctcgttctttctgggactacatccgtgtcgcatgtagaaaggtgtctcagaattgtatctgttccatcgaaaatatggaaaatgtgtcttcttccagagccaagggacgagcctggattcgcgtggcgctgatggagaaacacctgagcgaatacatcagtaccgctctgcgagattttaaaaccacccgccgtttctacgaagacggggctattgtgctcggggaggaggccaacatgctggccggcatgctgctaggcctcaatgccatcgattttagtttctgtctcaagggggaaggcctcgatgggtcgtttccagccgtcattgattacaccccatacctgaagtatattcagtcctccgacagcatttcgtccgatgaggaagaactgagaactcttggctcatctggcagcgaatcatccactccagagaatgttggacctccattcctgatggatgaaaatagctggtttaacaaatgtaagagagtcaaacagaagtatcagctgacgctggagcaaaaaggctatttggaggagctgctgcgactcagagagaaccagctgtccgagagcgtcagccaaaacaagatcctgctgcagaggatagaagattccgatctggcacataaattagaaaaggagcagcttgaatacatcattgtggaacttcaggaccaactgacagtgcttaaaaacaatgatctccgaagccggcaagagctcacagcacatctcaccaaccagtggccctcgcctggcgccttggatgtcaacgctgttgccctggacacccttctgtaccgaaagcacaataaacagtggtatgaaaagagttatcagtctctcgaccagttgtcagccgaggtcagcctgtctcaaaccagcctagacccaggacagtcccaggagggtgatggcaagcaggataccctaaacgtgatgtcggagggaaaggaggatactccgtcacttctcggtctgtgcgggtccctgacatctgtcgcttcttataagagccttaccagcctcaagtcaaatgactacttagcctcccccaccaccgagatgacttctccaggactaaccccctcttag

SEQ ID NO: 236069 - DNA, 1422 bp, Artificial Sequence
  derived and/or modified sequence
atggcctctcgctcactcggcggtctgtcaggtatcagaggcggtggtggcggaggaggaaagaagtccctgtcagcaaggaacgccgctgtggaaaggaggaatctgattaccgtctgtaggttcagcgtcaaaacactgatagacaggagctgtttcgagaccatcgacgatagctcaccagagttcaacaacttcgcagccatccttgaacagattctgagtcacagactgaaagaaatttcccagagctgccgctggctcgcccatctccagatcccactccagggacaagtgacttggttcggatacgaaagcccacgctccttttgggactatattcgggtcgcctgcagaaaggtctctcagaattgcatctgctccattgagaatatggaaaacgtgtctagcagccgagctaagggtagggcatggattagagttgccctgatggagaagcacctgtcagagtacattagtacggccctgcgggatttcaaaacaacccgcagattttatgaagacggcgcaatcgtgcttggtgaagaggccaacatgctggcgggtatgctgctgggtcttaatgccatcgacttttctttctgcctgaagggagaaggcttagacggttccttccccgctgtcatcgactacaccccctatctcaaatacattcaaagcagtgacagtatcagtagtgacgaggaggagctccggactctgggttcctcagggagtgagtccagtaccccagagaatgtaggtcccccatttctcatggacgaaaatagctggttcaacaagtgcaaaagagtgaaacaaaagtatcagttgacactggaacaaaaggggtacctggaggagttactcaggctacgagaaaatcagctgagcgagagcgtttcccagaacaagatcctccttcagcggatcgaggattccgatctggcccacaaactcgaaaaggaacagttggagtatatcatagttgagctgcaggaccagcttaccgtcctgaagaataatgacctccgcagccggcaggagttaacagcccatctcaccaaccagtggccatcccccggtgcactggacgtcaacgctgttgcactcgacactctgctgtatcgtaaacacaacaagcagtggtacgagaaaagttatcaatctctggatcagttatccgccgaggtgtccctgtctcagacctctctagaccctggccagtcccaggaaggggatggtaagcaggataccctgaatgtgatgtctgaaggcaaggaggatacccccagcctgttggggctgtgcgggtctctgacatccgtcgcctcatacaagagtctcacatctctcaaatcaaatgactatctggcttcacctacaaccgaaatgacttctcctggtctgaccccatcttag

SEQ ID NO: 236070 - DNA, 4099 bp, Artificial Sequence
  derived and/or modified sequence
gctggggcacgagtggctgcggagtgtgggtggttgggcgtgaggggccgacgggctcgcgcgcgcgccgtctgctgaggtccctcgggaaggaggagagcgcctgacgccgacccgcaggcgcagcccggcagtcggcggcgcgccgagggcggaggtggtgcgtgcgtgcgtgtgtgtgtgtgtgtgtgtgtgtgtgtgtgtgtgtgtgtggagctcgggtgccaagggcgagccgtcagtccccgggtgcgagtccctgctgtcttccacacccttcctccctccaggctcctttcctacatccttcccgcgcccccacggttgcggaccgagcgagaacccccttaagcaggtgtggggggcgtgcggggtggcacgagacaaaaggggcacgggggtaagcccgccatggcctcccggagcctggggggcctgagcgggatccgcggcggtggcggcggaggcggcaagaaaagcctgagcgcccgcaatgctgcggtggagaggaggaacctgatcaccgtgtgcaggttttctgtgaagaccctgattgatcggtcttgctttgagacaattgatgattcttctcctgaatttaacaattttgcagctattttggaacagattttaagccaccggctaaaagagatttcccaaagttgcagatggctggctcatctccaaatacctcttcaaggtcaagtaacctggtttggttatgaaagtcctcgtagcttctgggactatatcagagtggcttgccggaaagtttcacagaattgtatctgcagcattgaaaatatggaaaatgtcagttcttctagagctaagggtagagcctggatcagagtagcactcatggaaaaacatttatctgaatacatctctacagctctgagagacttcaaaacaaccaggagattttatgaagatggagcaattgtcttgggtgaagaagcaaatatgcttgctggcatgcttctaggactcaatgctattgatttcagtttctgcctaaagggagaggggctggatggcagttttcctgctgtaatagactatacaccatatttgaagtatatccaaagttctgatagtatcagcagtgatgaggaggagctaaggactttgggaagcagtggtagcgaaagcagtactccagagaatgtcggacctcctttcctcatggatgagaacagttggttcaacaagtgtaagagagttaaacaaaagtatcagcttaccctggaacagaagggttaccttgaagaactcttacgacttcgagagaaccaactatctgaatctgtctcccagaataaaatactacttcaaaggattgaagattccgatctggctcataaactggagaaggaacaattagaatatataattgtggagcttcaagatcagctgactgtgctaaagaataatgatttaagatcgagacaagagttaactgcccatctcaccaaccagtggccttctccaggagctctggatgtcaatgctgttgccttggatacgttgctttaccgaaaacacaataaacagtggtatgagaaaagttatcaaagtcttgaccagttatcagcagaagttagcctttctcagacttcactagatccaggccagtcacaagaaggagatggaaaacaagacacattaaatgtaatgagtgaaggtaaggaagatactccctcattacttggcctctgtggatctctaacgtcagtggcaagttacaagtctctaacaagcttaaaatctaatgactaccttgcaagtcctacaacagagatgacaagtccaggcctaactccatcctgaaaatttttgtgtaaaagccaaaactttttatgttgtaaatgtttaatttacatgtttgactgctgggaagacctttgaaattttatattgttctggtacatgtctgaaattctattgcttggagagaatcccctccagataagagattttgagtgaaaaacataatgatcctgccatttttcatttttaaaattcttacatttgtcattgagaaagttcaaaatggaataggctttaaaaaaaaaaaaactttcaaagatccgccaaatcattcatagcaaattgtacatattgttcagctgatttttatatatttaaatacaccttagtggccagagactgacttcaaggttttattccagagactccagagacttaagctaagtattttttcattctttcagattttcaaaaaaaaaaaaaaaaaaagttaatttcattttttcattaatgtcttcctaagttctatgctttaaatgccttgtttttaataacgggaaagttctcagctgcattttcacagtggcttattcagtttttctttaatatttaccatttggtatcaattcagcattccacttaacattttataaattccataggaacatgcctgttttggtagttactgacttaatttgttagtgccacaaggaaaatattttacagtattttatgccatttaggcaaaatgaataaactgttttccaagattttcttaaaagattatcaatttaaaagtatgatcaagtatgcctcaaaaactagaaacatttcaaaatgtagaacaaacgttgaaaaattgttttgccaggaaagagttcaagttcagttaaggatttgagaggcttttaaacaaggatcagtaggatagttatcatatttacttaatatatgtctgatattcagtgctggttctttttcctgtttgtgcaacaatgaagtgtgtcatgtgtgttttatagcctctatcattaatcacaccagagtctcattttaaaacattttaatgttaaaacatccccacacttatacacaggtaaaattagtttttttttttttaaagttgtaatctgtacttttttttttttgcaatttttgaaacagctacattaatccctaaaaatcccaccatactgaaaatgtatggcgtgtattttctatagtaagtaatatgaggaaaacatgattagctgtgccaaagaaattttatacattgtttacatgatgaggccacagtacttactgaggacttcatatggtttttttgtttattattattgagaaaagagctgaggttaccacattcattctttgtgttagaaatgtaggagtgtggtggttttctgcaatatttagagcttagtctcataatttggaatttaagataataagtagtaacaaggcaagtcttttatgtaagacagtcaaacagtgtcacttcagggacaaaggcctggaagcccttaaaataagttatcttagatgtgccagaacatattcagagctttattcctttaagcttaaggcttcaatacttgtagaaatgcaaatattcttgagaaatgatacattttttgttctcaatttctcaattctacatacctgattatgagtgaagtatccaaagcaggttttcatcagcatgggggatggaaggtaggtataatatgaggacaatggaaactttgggagaagggagtgaggaaatggataaagagaaatttgaaaattttaggctggacttgagcactattgctgctttcctatgaactatcagaatgtttaaatgctttatcattcatggtccactctcaaccaacatttattatcctttagtaattaaacaatggttttacatacatttttataatgtagaaggaaattcaagattccataatcgtaaaatttttcagatttgtctaatgtgtaatttgtgcatcttcacatgctgctaaatgcagatttaaacattacatctgaggatcatgacttttcctcctttcttggagatcttggtataaaattcatctgctgttataaaatcaggtttctacagagttcgtttcacactaaaggtagtttgttactgtttgcatgaggaaaccatgtatgtctcaatctttaattttaggtggtagtgtttattgttcaccctccctcttgcctccaaaagaatgctgaattatacgccaatatttccatgtgtattctgttgccttgatgcgtactatacttgttgcatgtatattaaaaattttgtactatg

SEQ ID NO: 236071 - protein, 126 aa, Artificial Sequence
  derived and/or modified sequence
MDKSLLLELPILLCCFRALSGSLSMRNDAVNEIVAVKNNFPVIEIVQCRMCHLQFPGEKCSRGRGICTATTEEACMVGRMFKRDGNPWLTFMGCLKNCADVKGIRWSVYLVNFRCCRSHDLCNEDL

SEQ ID NO: 236072 - protein, 114 aa, Artificial Sequence
  derived and/or modified sequence
MDKSLLLELPILLCCFRALSGSLSMRNDAVIEIVQCRMCHLQFPGEKCSRGRGICTATTEEACMVGRMFKRDGNPWLTFMGCLKNCADVKGIRWSVYLVNFRCCRSHDLCNEDL

SEQ ID NO: 236073 - DNA, 381 bp, Artificial Sequence
  derived and/or modified sequence
atggataaatcactgctgcttgagctgccgattctcctttgttgctttagggcgctttccgggtcgctgagcatgaggaatgacgccgtgaatgaaatcgtcgctgttaaaaataacttccccgtgatcgaaatcgtacagtgtagaatgtgccacctgcagtttcctggtgaaaagtgttctcgtggccgaggcatatgcaccgccaccacagaggaagcttgcatggtcgggaggatgtttaagagggatgggaacccatggttgactttcatgggatgtttgaagaactgtgcagatgtgaagggcatcaggtggagcgtttatctcgtgaacttccggtgttgccgatctcatgacctgtgcaacgaagatctctag

SEQ ID NO: 236074 - DNA, 345 bp, Artificial Sequence
  derived and/or modified sequence
atggacaagtccctccttctcgagctacccatcctgttgtgttgtttccgagcattgagtggctccttgagcatgcggaacgacgctgttatagagattgtgcagtgcaggatgtgtcacttgcagtttcccggagagaagtgttcacggggaaggggaatttgtactgcaacgaccgaagaagcctgtatggttggcagaatgtttaaacgcgatggcaatccttggctcacatttatgggctgtctcaaaaactgcgcagatgtgaaaggaatacgctggagcgtgtacctggtgaacttcagatgttgtaggtctcacgatctctgcaacgaggacctctag

SEQ ID NO: 236075 - DNA, 381 bp, Artificial Sequence
  derived and/or modified sequence
atggataagagcttactgctcgaattgccaatactcttgtgttgttttagggccttgtccggtagcctgtcaatgcgcaacgatgccgtgaatgaaattgtagctgtgaaaaataatttcccagtgattgagatagtgcagtgtaggatgtgtcacttacaattccctggcgaaaagtgtagtaggggacgaggaatctgtaccgccaccacagaggaggcatgtatggttggcaggatgttcaagagagacgggaacccttggttgacctttatgggatgcctaaaaaattgtgccgatgtgaaaggaattcggtggagcgtgtaccttgtaaatttccggtgctgtagaagtcacgacctctgcaacgaggacctgtag

SEQ ID NO: 236076 - DNA, 345 bp, Artificial Sequence
  derived and/or modified sequence
atggacaagtcactactgctggaactccctatcttactctgctgctttagagccctgagcggctccttgtcaatgagaaacgacgctgtgattgaaatagtacaatgtagaatgtgccacctgcagtttcctggagagaagtgttcccggggcagaggaatttgcactgccacaaccgaggaggcctgcatggttgggagaatgttcaagagagacggtaacccatggctaacattcatgggatgtttaaagaactgcgccgatgtgaaagggatacgatggtcagtttatctggtgaacttccgatgttgccgatcgcacgacctctgtaatgaagatctgtag

SEQ ID NO: 236077 - DNA, 457 bp, Artificial Sequence
  derived and/or modified sequence
tttccaaaatggacaagtccctcttgctggaactccccatcctgctctgctgctttagggcattatctggatcactttcaatgagaaatgatgcagtgatagaaattgttcagtgtaggatgtgccacctccagttcccaggagaaaagtgctccagaggaagaggaatatgcacagcaacaacagaagaggcctgcatggttggaaggatgttcaaaagggatggtaatccctggttaaccttcatgggctgcctaaagaactgtgctgatgtgaaaggcataaggtggagtgtctatttggtgaacttcaggtgctgcaggagccatgacctgtgcaatgaagacctttagaagttaatggttcttctgtgactccaatttctgggtgaggttgttgcctcagcctcttcacaatgactttctaaaaaaaatcacacacacacacacacacacta

SEQ ID NO: 236078 - DNA, 381 bp, Artificial Sequence
  derived and/or modified sequence
atggataagagcttactgctcgaattgccaatactcttgtgttgttttagggccttgtccggtagcctgtcaatgcgcaacgatgccgtgaatgaaattgtagctgtgaaaaataatttcccagtgattgagatagtgcagtgtaggatgtgtcacttacaattccctggcgaaaagtgtagtaggggacgaggaatctgtaccgccaccacagaggaggcatgtatggttggcaggatgttcaagagagacgggaacccttggttgacctttatgggatgcctaaaaaattgtgccgatgtaaaaggaatccggtggtcagtatatctcgtcaatttcaggtgctgtcgctctcatgacctctgcaacgaagacctgtag

SEQ ID NO: 236079 - DNA, 345 bp, Artificial Sequence
  derived and/or modified sequence
atggacaagtcactactgctggaactccctatcttactctgctgctttagagccctgagcggctccttgtcaatgagaaacgacgctgtgattgaaatagtacaatgtagaatgtgccacctgcagtttcctggagagaagtgttcccggggcagaggaatttgcactgccacaaccgaggaggcctgcatggttgggagaatgttcaagagagacggtaacccatggctaacattcatgggatgtttaaagaactgcgccgatgtgaaagggatacgatggtcagtttatctggtgaacttcagatgctgccgaagccatgatttatgtaatgaagatttgtag

SEQ ID NO: 236080 - DNA, 381 bp, Artificial Sequence
  derived and/or modified sequence
atggacaagagcctgctgctggagctgcccatcctgctgtgctgcttcagagccctgagcggcagcctgagcatgagaaacgacgccgtgaacgagatcgtggccgtgaagaacaacttccccgtgatcgagatcgtgcagtgcagaatgtgccacctgcagttccccggcgagaagtgcagcagaggcagaggcatctgcaccgccaccaccgaggaggcctgcatggtgggcagaatgttcaagagagacggcaacccctggctgaccttcatgggctgcctgaagaactgcgccgacgtgaagggcatcagatggagcgtgtacctggtgaacttcagatgctgcagaagccacgacctgtgcaacgaggacctgtag

SEQ ID NO: 236081 - DNA, 1508 bp, Artificial Sequence
  derived and/or modified sequence
cctctttccaaaatggacaagtccctcttgctggaactccccatcctgctctgctgctttagggcattatctggatcactttcaatgagaaatgatgcagtcaatgaaatagttgctgtgaaaaacaattttcctgtgatagaaattgttcagtgtaggatgtgccacctccagttcccaggagaaaagtgctccagaggaagaggaatatgcacagcaacaacagaagaggcctgcatggttggaaggatgttcaaaagggatggtaatccctggttaaccttcatgggctgcctaaagaactgtgctgatgtgaaaggcataaggtggagtgtctatttggtgaacttcaggtgctgcaggagccatgacctgtgcaatgaagacctttagaagttaatggttcttctgtgactccaatttctgggtgaggttgttgcctcagcctcttcacaatgactttctaaaaaaaatcacacacacacacacacacactacagaagaggattgcaaacacatggctccatcttctgcacacgaaaggaaagtccctctccttttctacagtctctgtcacgccccttaaaataagtaaataaataaccttgagagaaagaacaagatcaatatatcctgcaggttgctacaaacccttgtgctttcactgtatagccagttcattcagaaaaggaggaaagggtagtttaatttcaaaaaagaatcccttcctctttcctctgctgctttccttccttctgtggcagggtattttaatatatttttcaaatttttttcctttctgtgttatccttcttatcccactccaaagaaagcacataactgtggcctgaagggatggggagtagcaacataaaaagaagtggctcaagtcttcttggagtttgttcatgaatgctgatcccagggtgaggagaagattgggacatagaaaggaaactgcatcagaaacatgaacagagaaagattgtctgccttctagaatcagatctgtttggggctgggggttggagaataaaagcaggagaagtctatgggattctagaaatagtacctgcatccagcttccctgccaaactcacaaggagacatcaacctctagacagggaacagcttcaggatacttccaggagacagagccaccagcagcaaaacaaatattcccatgcctggagcatggcatagaggaagctgagaaatgtggggtctgaggaagccatttgagtctggccactagacatctcatcagccacttgtgtgaagagatgccccatgaccccagatgcctctcccacccttacctccatctcacacacttgagcttgccactctgtataattctaacatcctggagaaaaatggcagtttgaccgaacctgttcacaagggtagaggctgatttctaacgaaacttgtagaatgaagcctggaaagagtgatgaattatattatattatataaaaataataataaaaatataaagaaagcta

SEQ ID NO: 236082 - DNA, 345 bp, Artificial Sequence
  derived and/or modified sequence
atggacaagagcctgctgctggagctgcccatcctgctgtgctgcttcagagccctgagcggcagcctgagcatgagaaacgacgccgtgatcgagatcgtgcagtgcagaatgtgccacctgcagttccccggcgagaagtgcagcagaggcagaggcatctgcaccgccaccaccgaggaggcctgcatggtgggcagaatgttcaagagagacggcaacccctggctgaccttcatgggctgcctgaagaactgcgccgacgtgaagggcatcagatggagcgtgtacctggtgaacttcagatgctgcagaagccacgacctgtgcaacgaggacctgtag

SEQ ID NO: 236083 - DNA, 381 bp, Artificial Sequence
  derived and/or modified sequence
atggacaagtccttgctcttagagttacccatcctgctctgctgctttagggcgctgtcaggctccctttccatgcgaaacgatgcagtcaatgagatcgtggccgtgaaaaacaacttcccagtcatagaaatcgtacagtgccgcatgtgccatctccaatttcccggtgagaagtgctctcggggcagggggatatgtaccgcaacaactgaggaggcttgtatggtagggcgaatgtttaagcgtgacggaaacccttggttgacatttatggggtgcctcaaaaattgtgcagacgtgaagggcataaggtggtccgtgtatcttgtaaacttccggtgctgccggagccatgatctctgtaacgaggatctgtag

SEQ ID NO: 236084 - DNA, 345 bp, Artificial Sequence
  derived and/or modified sequence
atggacaaaagcctgctactggagcttccgatattgctttgttgcttccgagcacttagcggtagtttgagcatgcgcaacgacgcagttattgaaatcgtgcagtgccgaatgtgtcatctccagtttcctggagagaaatgtagcagagggcgggggatctgcactgctactacggaggaggcatgtatggtggggcgcatgtttaagcgagacggaaacccatggttgaccttcatgggctgtctcaaaaattgtgccgatgtgaaggggattaggtggtccgtctacctcgtgaatttcagatgctgtcgttcccatgacctgtgcaacgaagatctctag

SEQ ID NO: 236085 - DNA, 381 bp, Artificial Sequence
  derived and/or modified sequence
atggacaagagcctgctgctggagctgcccatcctgctgtgctgcttccgggccctgagcggcagcctgtccatgagaaatgatgctgtgaatgaaattgtggccgtgaagaacaacttccctgtgattgaaattgtgcagtgcaggatgtgccacctgcagtttcctggagagaagtgcagccggggccggggcatctgcacagccaccacagaggaggcctgcatggtgggccgcatgttcaagagagatggcaacccctggctgaccttcatgggctgcctgaagaactgtgctgatgtgaagggcatccgctggagcgtgtacctggtgaacttccgctgctgccgcagccatgacctgtgcaatgaagacctgtag

SEQ ID NO: 236086 - DNA, 345 bp, Artificial Sequence
  derived and/or modified sequence
atggacaagagcctgctgctggagctgcccatcctgctgtgctgcttccgggccctgagcggcagcctgtccatgagaaatgatgctgtgattgaaattgtgcagtgcaggatgtgccacctgcagtttcctggagagaagtgcagccggggccggggcatctgcacagccaccacagaggaggcctgcatggtgggccgcatgttcaagagagatggcaacccctggctgaccttcatgggctgcctgaagaactgtgctgatgtgaagggcatccgctggagcgtgtacctggtgaacttccgctgctgccgcagccatgacctgtgcaatgaagacctgtag

SEQ ID NO: 236087 - DNA, 381 bp, Artificial Sequence
  derived and/or modified sequence
atggacaagagcctgctgctggagctgcccatcctgctgtgctgcttccgggcattgtctggatccctctccatgaggaatgacgccgtaaatgaaattgtggctgttaagaacaactttccggtgattgagatagtgcaatgccgtatgtgtcacctgcagtttccaggcgagaaatgctcacggggtagaggcatttgcactgccacaacagaagaggcctgtatggtgggtagaatgtttaaacgcgacgggaacccttggttaacattcatgggatgcctgaagaactgtgccgatgtcaagggtatccgatggtcagtctacctggtgaacttccggtgttgccggtcccacgatctatgcaacgaagacctgtag

SEQ ID NO: 236088 - DNA, 345 bp, Artificial Sequence
  derived and/or modified sequence
atggacaagagcctgctgctggagctgcccatcctgctgtgctgctttcgcgccctgagcggcagcctgagtatgcgtaacgacgctgtgatcgaaatcgtgcagtgccgaatgtgccatctgcagttccctggcgaaaaatgttctcgcggtcggggcatatgcaccgccaccacagaggaggcctgtatggtgggcagaatgtttaaacgcgacgggaatccatggctgaccttcatgggctgtctcaagaattgtgccgatgtcaaggggatccgctggtctgtctacttagtgaatttccgctgttgtcgttcacacgatctgtgcaacgaagacctatag

SEQ ID NO: 236089 - RNA, 381 nt, Artificial Sequence
  derived and/or modified sequence
auggauaagagcuuacugcucgaauugccaauacucuuguguuguuuuagggccuuguccgguagccugucaaugcgcaacgaugccgugaaugaaauuguagcugugaaaaauaauuucccagugauugagauagugcaguguaggaugugucacuuacaauucccuggcgaaaaguguaguaggggacgaggaaucuguaccgccaccacagaggaggcauguaugguuggcaggauguucaagagagacgggaacccuugguugaccuuuaugggaugccuaaaaaauugugccgaugugaaaggaauucgguggagcguguaccuuguaaauuuccggugcuguagaagucacgaccucugcaacgaggaccuguag

SEQ ID NO: 236090 - RNA, 345 nt, Artificial Sequence
  derived and/or modified sequence
auggacaagucacuacugcuggaacucccuaucuuacucugcugcuuuagagcccugagcggcuccuugucaaugagaaacgacgcugugauugaaauaguacaauguagaaugugccaccugcaguuuccuggagagaaguguucccggggcagaggaauuugcacugccacaaccgaggaggccugcaugguugggagaauguucaagagagacgguaacccauggcuaacauucaugggauguuuaaagaacugcgccgaugugaaagggauacgauggucaguuuaucuggugaacuuccgauguugccgaucgcacgaccucuguaaugaagaucuguag

SEQ ID NO: 236091 - RNA, 381 nt, Artificial Sequence
  derived and/or modified sequence
auggauaagagcuuacugcucgaauugccaauacucuuguguuguuuuagggccuuguccgguagccugucaaugcgcaacgaugccgugaaugaaauuguagcugugaaaaauaauuucccagugauugagauagugcaguguaggaugugucacuuacaauucccuggcgaaaaguguaguaggggacgaggaaucuguaccgccaccacagaggaggcauguaugguuggcaggauguucaagagagacgggaacccuugguugaccuuuaugggaugccuaaaaaauugugccgauguaaaaggaauccgguggucaguauaucucgucaauuucaggugcugucgcucucaugaccucugcaacgaagaccuguag

SEQ ID NO: 236092 - RNA, 345 nt, Artificial Sequence
  derived and/or modified sequence
auggacaagucacuacugcuggaacucccuaucuuacucugcugcuuuagagcccugagcggcuccuugucaaugagaaacgacgcugugauugaaauaguacaauguagaaugugccaccugcaguuuccuggagagaaguguucccggggcagaggaauuugcacugccacaaccgaggaggccugcaugguugggagaauguucaagagagacgguaacccauggcuaacauucaugggauguuuaaagaacugcgccgaugugaaagggauacgauggucaguuuaucuggugaacuucagaugcugccgaagccaugauuuauguaaugaagauuuguag

SEQ ID NO: 236093 - protein, 2849 aa, Artificial Sequence
  derived and/or modified sequence
MAEEAAQNISDDQERCLQAACCLSFGGELSVSTDKSWGLHLCSCSPPGGGLWVEVYANHVLLMSDGKCGCPWCALNGKAEDRESQSPSSSASRQKNIWKTTSEAALSVVNEKTQAVVNEKTQAPLDCDNSADRIPHKPFIIIARAWSSGGPRFHHRRLCATGTADSTFSALLQLQGTTSAAAPCSLKMEASCCVLRLLCCAEDVATGLLPGTVTMETPTKVARPTQTSSQRVPLWPISHFPTSPRSSHGLPPGIPRTPSFTASQSGSEILYPPTQHPPVAILARNSDNFMNPVLNCSLEVEARAPPNLGFRVHMASGEALCLMMDFGDSSGVEMRLHNMSEAMAVTAYHQYSKGIFFHLLHFQLDMSTYKEAETQNTTLNVYLCQSENSCLEDSDPSNLGYELISAFVTKGVYMLKAVIYNEFHGTEVELGPYYVEIGHEAVSAFMNSSSVHEDEVLVFADSQVNQKSTVVIHHFPSIPSYNVSFISQTQVGDSQAWHSMTVWYKMQSVSVYTNGTVFATDTDITFTAVTKETIPLEFEWYFGEDPPVRTTSRSIKKRLSIPQWYRVMVKASNRMSSVVSEPHVIRVQKKIVANRLTSPSSALVNASVAFECWINFGTDVAYLWDFGDGTVSLGSSSSSHVYSREGEFTVEVLAFNNVSASTLRQQLFIVCEPCQPPLVKNMGPGKVQIWRSQPVRLGVTFEAAVFCDISQGLSYTWNLMDSEGLPVSLPAAVDTHRQTLILPSHTLEYGNYTALAKVQIEGSVVYSNYCVGLEVRAQAPVSVISEGTHLFFSRTTSSPIVLRGTQSFDPDDPGATLRYHWECATAGSPAHPCFDSSTAHQLDAAAPTVSFEAQWLSDSYDQFLVMLRVSSGGRNSSETRVFLSPYPDSAFRFVHISWVSFKDTFVNWNDELSLQAMCEDCSEIPNLSYSWDLFLVNATEKNRIEVPFCRVVGLLGSLGLGAISESSQLNLLPTEPGTADPDATTTPFSREPSPVTLGQPATSAPRGTPTEPMTGVYWIPPAGDSAVLGEAPEEGSLDLEPGPQSKGSLMTGRSERSQPTHSPDPHLSDFEAYYSDIQEAIPSGGRQPAKDTSFPGSGPSLSAEESPGDGDNLVDPSLSAGRAEPVLMIDWPKALLGRAVFQGYSSSGITEQTVTIKPYSLSSGETYVLQVSVASKHGLLGKAQLYLTVNPAPRDMACQVQPHHGLEAHTVFSVFCMSGKPDFHYEFSYQIGNTSKHTLYHGRDTQYYFVLPAGEHLDNYKVMVSTEITDGKGSKVQPCTVVVTVLPRYHGNDCLGEDLYNSSLKNLSTLQLMGSYTEIRNYITVITRILSRLSKEDKTASCNQWSRIQDALISSVCRLAFVDQEEMIGSVLMLRDLVSFSNKLGFMSAVLILKYTRALLAQGQFSGPFVIDKGVRLELIGLISRVWEVSEQENSKEEVYRHEEGITVISDLLLGCLSLNHVSTGQMEFRTLLHYNLQSSVQSLGSVQVHLPGDLAGHSPAGAETQSPCYISQLILFKKNPYPGSQAPGQIGGVVGLNLYTCSSRRPINRQWLRKPVMVEFGEEDGLDNRRNKTTFVLLRDKVNLHQFTELSENPQESLQIEIEFSKPVTRAFPVMLLVRFSEKPTPSDFLVKQIYFWDESIVQIYIPAASQKDASVGYLSLLDADYDRKPPNRYLAKAVNYTVHFQWIRCLFWDKREWKSERFSPQPGTSPEKVNCSYHRLAAFALLRRKLKASFEVSDISKLQSHPENLLPSIFIMGSVILYGFLVAKSRQVDHHEKKKAGYIFLQEASLPGHQLYAVVIDTGFRAPARLTSKVYIVLCGDNGLSETKELSCPEKPLFERNSRHTFILSAPAQLGLLRKIRLWHDSRGPSPGWFISHVMVKELHTGQGWFFPAQCWLSAGRHDGRVERELTCLQGGLGFRKLFYCKFTEYLEDFHVWLSVYSRPSSSRYLHTPRLTVSFSLLCVYACLTALVAAGGQEQPHLDVSPTLGSFRVGLLCTLLASPGAQLLSLLFRLSKEAPGSARVEPHSPLRGGAQTEAPHGPNSWGRIPDAQEPRKQPASAILSGSGRAQRKAASDNGTACPAPKLQVHGADHSRTSLMGKSHCCPPHTQAPSSGLEGLMPQWSRALQPWWSSAVWAICGTASLACSLGTGFLAYRFGQEQCVQWLHLLSLSVVCCIFITQPLMVCLMALGFAWKRRADNHFFTESLCEATRDLDSELAERSWTRLPFSSSCSIPDCAGEVEKVLAARQQARHLRWAHPPSKAQLRGTRQRMRRESRTRAALRDISMDILMLLLLLCVIYGRFSQDEYSLNQAIRKEFTRNARNCLGGLRNIADWWDWSLTTLLDGLYPGGTPSARVPGAQPGALGGKCYLIGSSVIRQLKVFPRHLCKPPRPFSALIEDSIPTCSPEVGGPENPYLIDPENQNVTLNGPGGCGTREDCVLSLGRTRTEAHTALSRLRASMWIDRSTRAVSVHFTLYNPPTQLFTSVSLRVEILPTGSLVPSSLVESFSIFRSDSALQYHLMLPQLVFLALSLIHLCVQLYRMMDKGVLSYWRKPRNWLELSVVGVSLTYYAVSGHLVTLAGDVTNQFHRGLCRAFMDLTLMASWNQRARWLRGILLFLFTLKCVYLPGIQNTMASCSSMMRHSLPSIFVAGLVGALMLAALSHLHRFLLSMWVLPPGTFTDAFPGLLFHFPRRSQKDCLLGLSKSDQRAMACYFGILLIVSATLCFGMLRGFLMTLPQKRKSFQSKSFVRLKDVTAYMWEKVLTFLRLETPKLEEAEMVENHNYYLDEFANLLDELLMKINGLSDSLQLPLLEKTSNNTGEARTEESPLVDISSYQAAEPADIKDF

SEQ ID NO: 236094 - DNA, 8550 bp, Artificial Sequence
  derived and/or modified sequence
atggcagaggaggctgctcagaacataagtgacgatcaggaacggtgtctccaggctgcatgttgcctatcatttggaggcgaactcagcgtcagtacagataagtcttggggacttcacctatgttcttgtagtccaccaggaggtggattgtgggttgaggtgtacgccaaccacgtgctccttatgagtgacggaaagtgtggttgcccatggtgcgcgctgaatggcaaagctgaggatcgtgagtcgcagtctccctccagtagcgcgtctcgccaaaagaacatctggaaaacgaccagtgaggccgccttgtctgttgtgaacgaaaaaacccaggccgtggtgaacgaaaagacacaagctccgcttgactgtgataacagtgccgatcgcatcccacacaaacccttcatcattatagcccgcgcgtggagctctggcggccctcggtttcatcaccgacgcctgtgtgcaaccgggacagcggactcgactttctcagccttgttgcagctacagggaactacctccgccgccgccccatgctccttaaagatggaagcctcctgttgcgtgcttcgtctgctgtgttgcgcagaggatgtagccaccggcctccttccagggacagtaacaatggagactcctacgaaagtggctcgccctacccagacaagcagtcaacgggtgccactctggcccatctcccacttccccacatcaccgaggtcatcccatggactccctcctggcatacctcggaccccctcttttacggccagccagagcggctccgaaattctctaccctcccacacagcatcctccagtggcgattctggcacgtaacagtgataacttcatgaatcctgttcttaactgtagcctagaggtggaggccagggctccacctaaccttgggtttagagttcatatggctagtggggaagccttgtgcctgatgatggacttcggggatagtagcggagtggagatgaggttgcataatatgtcggaggccatggccgtgacggcttatcatcaatactctaaaggaatctttttccacctgttacattttcaattagacatgagcacctacaaggaggctgaaacacaaaacactaccctcaatgtctacctttgtcagtccgagaattcatgcctggaggactccgaccctagcaacctggggtatgaactgatctccgctttcgtcacgaagggcgtgtacatgttaaaagctgtgatttataacgagttccacggcaccgaggtcgaactcggaccttattatgtcgaaattgggcacgaggctgtgtctgctttcatgaattcatcctccgttcatgaagacgaggtgctggtgttcgctgacagccaagtcaatcagaagtccacagtagtgattcatcactttcccagcatccccagctataacgtgtcctttatctctcagacacaggtgggcgattcccaggcatggcacagcatgacagtgtggtacaaaatgcagagcgtgtccgtgtatactaacggtaccgtgttcgccaccgacactgacattacgttcacagctgtaactaaggagaccattccactggaatttgagtggtatttcggagaggatccaccagtccgcaccacctctcggtcgatcaagaaaagactttccattccccagtggtatcgcgtgatggtgaaagcttccaatcgcatgagctctgttgtgtcagaaccccacgtgatccgcgtgcagaagaagatagtggcgaatagactgacaagcccaagtagtgcgctagttaatgcttctgtggccttcgaatgctggattaatttcggcaccgacgttgcctatttatgggatttcggcgacgggacagtgtcactcggctcttctagctcatcccacgtgtactccagagagggagaattcactgtcgaggtgcttgcgtttaataatgtgtccgcctctaccctccgacagcagctgttcatagtctgcgaaccttgccagccgccgttggtgaagaatatgggccccggaaaggtgcagatctggcggagccagcccgtgaggttgggcgtgacctttgaagcggcagtcttttgtgatattagccagggtctctcatatacctggaatctgatggatagcgagggccttcctgtatccttaccagccgcagtggatacccatcgccagaccttgatacttccaagtcacaccctggaatacggcaactacactgcattagctaaagtacagattgaagggagcgtggtgtatagcaattactgtgttggcctggaagtccgggcgcaggctccggtgagtgttatctcagagggaacgcatctcttcttttccaggaccacaagcagccctattgtcttgaggggaacacaatcgttcgatccggacgaccccggagccacactccgctaccattgggaatgcgctacagcgggttcaccggcccacccgtgctttgattcaagcacagcgcaccaactggatgctgccgcccccacggtgtcctttgaagcccagtggttgagcgactcttatgaccagttcctggtaatgctgcgggtgtcctccgggggaaggaattcatccgaaaccagggtgtttttgtcaccgtaccccgactctgcattccgctttgtgcacatttcctgggtttccttcaaagatactttcgtcaactggaacgacgagctaagtctacaggctatgtgtgaggactgctctgaaattcctaatctaagctacagctgggacctgtttctcgttaatgctaccgagaagaacagaatcgaggtgcccttctgccgcgtggtgggactcctgggctctctcggcttgggcgcgatctcggagagctctcaattgaaccttcttcccactgagcccggcaccgccgaccccgacgctaccactactcccttttctcgggagccttcgcctgtcactcttgggcagcccgctacctccgcccctagaggtaccccgactgagccaatgaccggcgtgtattggattccccctgcaggggattccgccgtactgggcgaggcaccagaggagggatcacttgatctggagcccggacctcagtcaaagggtagcctgatgacagggaggtcggaacgcagtcagccaactcactcccccgacccacatctgtctgatttcgaggcttactactccgacatccaagaagcgattccatcaggcggcagacagccagccaaggacactagctttcctggatctggtccgtctttatccgccgaggagtcgcctggcgacggggacaacctagtagaccctagcttgtctgctggaagggctgaacccgtgcttatgatcgactggcccaaggccctgctaggacgcgctgtgttccagggatatagcagctccggcatcactgaacagacggtcaccattaagccttactcactctccagcggggagacatatgtactgcaggtcagcgtggcgtctaagcacggtcttctgggtaaagctcagctttatctgaccgtgaacccagccccccgagatatggcatgtcaggtgcagccccaccatggtctggaggcccacaccgtgtttagcgtcttttgtatgtctggtaagcctgatttccattacgagttcagctatcagattggaaatacatctaaacataccctgtaccatggtcgggatacccaatattatttcgtactgcctgctggggagcatttggacaattacaaagtaatggtgtctactgagattaccgatggcaaggggtcaaaggttcagccctgtacagtagtggtgactgttctgcctcgatatcacgggaatgattgtctcggggaagatctgtacaactcatctctaaagaacctctcgactttgcagctcatggggagctacactgaaataagaaattatatcaccgtgatcaccaggattttaagtagattgtccaaggaagacaaaactgcttcatgtaatcagtggtctcggatccaggacgctcttataagtagcgtctgtcgccttgcgttcgtggatcaagaagaaatgatcggcagcgtgctcatgctgcgcgaccttgtgagcttttcaaacaagctggggtttatgtctgcagtgcttatactgaagtacacaagggctctgctcgcacaggggcagtttagtggcccattcgtgattgataagggtgtccgcttagagctgatcggacttatctctagagtgtgggaggtatcagagcaggagaattcaaaggaggaggtttacagacacgaagagggtataaccgttatttctgacttactcttgggctgtctgtctctgaaccatgtctcaacgggacagatggaattcaggactctgcttcattataacttgcagagcagtgttcagagtctgggttcagttcaggttcacttgccgggcgacctggctggtcacagcccagccggagcggaaactcagtctccatgctacatctcgcagcttattctatttaagaaaaacccgtatccaggatctcaagctccagggcaaatcggtggcgtagtcggtcttaacctgtacacttgctcctcacgacgccctatcaataggcagtggctgaggaaaccggttatggttgaatttggcgaggaagatggtttggacaaccgccgcaacaagacaacctttgtgctcctcagagacaaagtgaatctccaccagttcaccgaactgtctgaaaacccgcaggagagtctccagatcgaaatcgagtttagcaagccggtcacgcgcgcgttcccagtgatgctgctggtgcggtttagcgagaagccgactcccagcgatttcctggtgaaacagatatacttctgggatgagagcatcgtgcagatctatattcccgcggcctcccaaaaggacgcatcagtcggctatctttcactgctggatgccgactacgatagaaagcctcctaaccgctacttggcaaaagccgtgaactacactgttcactttcagtggatcagatgcctgttttgggacaagcgggaatggaagtctgagagattctccccacagccggggaccagtcctgaaaaagtcaactgttcgtaccacagacttgccgcgtttgcactgttgcggcggaaattgaaagctagtttcgaggtctctgacatctccaaactgcagagccacccagagaatctgttgccttctatattcattatggggtccgtcattctttacggattcctggtcgcaaagtccagacaggtggaccatcacgaaaaaaaaaaggctgggtatatcttccttcaagaggccagcttgccaggacatcagctctatgctgtggttattgacactggattccgcgcccctgctaggctgacgtccaaggtgtatatcgtcctgtgcggtgataatggactgtccgaaactaaagaattgagttgtcccgagaaacccctgtttgagcgtaactcacgccacaccttcatcctctctgcccctgcccagctcggacttctacggaagattcggctgtggcatgacagcaggggtcctagcccaggctggtttatttctcatgtgatggtcaaagaactccataccggacaggggtggtttttcccggcccaatgctggctgtctgccggacgacatgatggacgagtcgaacgagagctgacatgcctgcagggaggactcggctttcgcaaactgttttactgtaagttcacagagtatctcgaggattttcatgtctggctctcagtatacagcaggccatcatcgagccgatacctgcacacccctagactcactgtcagcttttctctgctgtgcgtctatgcatgcttgacggctcttgtggctgccggtggccaggagcagcctcatttagacgtgagccccacccttggcagttttcgggtcgggcttctctgtaccctactcgcatcgcctggggcacagctgctaagcctgttgttccgacttagcaaggaggcccctggctctgcccgggtggagccgcactcccccctgcgcggcggcgcgcagacagaagcacctcatggtcctaactcttggggacggattcctgatgcacaggagccccgtaaacagcctgcgagcgctatcctgagcggatccggacgagcccagagaaaagccgcttcagataacgggaccgcctgtcctgcaccaaagctgcaggtgcacggagccgatcactccagaacctccctgatgggtaagtctcattgctgcccaccccacacacaggcaccatcatcaggactcgaaggacttatgccccaatggtcacgagctcttcaaccttggtggtcatccgccgtatgggcaatatgcggcaccgccagcctagcttgctctctgggcacgggctttcttgcctatagatttggtcaggagcagtgtgtccagtggcttcacttactcagcctctccgtcgtgtgctgtatcttcatcactcagccgcttatggtatgtctaatggccctgggcttcgcttggaagcggagagctgataaccattttttcacagagagtctttgcgaggcaacccgggacctggactctgaactggccgaaagatcatggaccagactgccattttctagcagttgctctattcccgattgcgccggagaagtggagaaggtgctggctgcacgacaacaggccagacatcttcgatgggctcacccaccctccaaggcccaactgagggggactagacagcgcatgaggcgtgaatcccggacacgggcagccctgcgcgacatttccatggatattctcatgctcctcctgttgctctgtgtaatttatggtcggttctcccaggacgagtatagccttaaccaggccattaggaaagaattcactcggaacgctcgaaactgcctcggaggccttagaaacatagctgattggtgggactggtctctgacaacgttacttgatggcctgtacccaggggggacaccatcagcccgcgttcccggagcacaaccaggggcattaggaggcaagtgttatctgattggttcaagtgtgatcaggcagctgaaagtgttccctaggcacctatgtaagcccccgaggccatttagtgctctgatagaggacagtatcccgacctgctcaccagaggtcggagggcccgagaacccatatctgatcgatcccgagaatcagaatgtgacattaaacgggccaggggggtgcggaacccgcgaagactgcgtcctttctcttgggagaactagaacagaagctcataccgctttgagtcgactgagagcatccatgtggatcgatcgaagcacacgcgctgtgagcgtgcactttaccttatacaatccccccacccaactgttcacctcagtgagtctgcgggtggagatcttgccgacgggttcactggtcccgagttccctcgtagagtcattcagcatcttcagatcggactcagcattgcagtaccatctcatgctgccccaactcgtgttcctagctctgagtctgatacatctatgcgtacagttatatcgcatgatggataaaggtgttctctcctattggcggaaaccacgtaactggctggaactatctgtcgtgggcgtgtcactgacctattacgccgtgagcggtcatctcgtgaccctggcaggagacgtgactaatcagttccataggggcctttgccgggcttttatggatctaactttgatggcttcatggaaccagagagccagatggctccgcggaatcctgctgtttctgtttaccctgaaatgtgtgtatctcccaggaatccaaaataccatggcatcatgcagctccatgatgagacactccctccctagcatattcgtggctggcctagtgggcgcgttgatgctggccgccctctcgcacctgcacaggttcctgctgtccatgtgggtgctaccaccgggaaccttcacagacgcctttccaggtctgctgttccattttccacggagaagtcagaaggattgtttactgggtctgtcaaagtcggaccagagggcaatggcgtgttacttcggcattttactaatcgtgtcggccactttatgctttgggatgctccgaggtttcttaatgacattgccacaaaaaagaaaaagctttcagtccaaaagtttcgttaggcttaaagacgtgactgcatacatgtgggaaaaggtcttaactttcttaaggctggagacccctaaattggaagaagcggagatggtggagaatcacaactactacctagacgagtttgcaaatttgctggatgagctattgatgaagatcaatgggctctcagattctcttcagttgcctctgctcgaaaaaacaagcaataacacaggtgaggcccgaactgaagagtctcccctggtagacatttcatcataccaggctgctgaacccgccgatatcaaggatttctag

SEQ ID NO: 236095 - DNA, 8550 bp, Artificial Sequence
  derived and/or modified sequence
atggccgaggaggccgcccagaacatcagtgatgaccaggagcgctgcctgcaggccgcctgctgcctgagctttggaggagagctgtctgtgtccacagacaagtcctggggcctgcacctgtgcagctgcagccccccaggcggcggcctgtgggtggaggtgtatgccaaccacgtgctgctgatgtctgatggaaaatgtggctgcccctggtgtgccctgaatggcaaggccgaggaccgggagagccagagccccagcagcagcgccagccggcagaagaacatctggaagaccaccagcgaggccgccctgtctgtggtgaatgagaagacccaggccgtggtgaatgagaagacccaggcccccctggactgtgacaacagcgctgaccgcatcccccacaagcccttcatcatcatcgcccgggcctggagcagcggcggcccccgcttccaccaccggcggctgtgtgccactggaacagctgacagcaccttcagcgccctgctgcagctgcagggcaccaccagcgctgctgccccctgcagcctgaagatggaggccagctgctgcgtgctgcggctgctgtgctgtgccgaggatgtggccaccggcctgctgcccggcaccgtgaccatggagacccccaccaaggtggcccggcccacccagaccagcagccagagggtgcccctgtggcccatcagccacttccccaccagccccaggagcagccacggcctgcccccaggcatccccaggacccccagcttcaccgccagccagagcggcagcgagatcctgtacccacccacccagcacccccctgtggccatcctggccaggaacagcgacaacttcatgaaccctgtgctgaactgcagcctggaggtggaggcccgggccccacccaacctgggcttccgggtgcacatggccagcggggaggccctgtgcctgatgatggactttggagacagcagcggcgtggagatgaggctgcacaacatgtctgaggccatggctgtgacagcctaccaccagtacagcaagggcatcttcttccacctgctgcacttccagctggacatgagcacctacaaggaggccgagacccagaacaccaccctgaatgtgtacctgtgccagagcgagaacagctgcctggaggacagcgaccccagcaacctgggctatgagctgatcagcgcctttgtgaccaagggcgtgtacatgctgaaggctgtgatctacaatgagttccacggcacagaggtggagctgggcccctactacgtggagattggacatgaagctgtgtctgccttcatgaacagcagctctgtgcatgaagatgaggtgctggtgtttgctgacagccaggtgaaccagaagagcacagtggtgatccaccacttccccagcatccccagctacaacgtgtccttcatcagccagacccaggtgggggacagccaggcctggcacagcatgacagtgtggtacaagatgcagagcgtgtctgtgtacaccaacggcaccgtgtttgccacagacacagacatcaccttcaccgctgtgaccaaggagaccatccccctggagtttgagtggtactttggagaggacccccctgtgaggaccaccagccgcagcatcaagaagaggctgagcatcccccagtggtacagagtgatggtgaaggccagcaacaggatgagctctgtggtgtctgagccccacgtgatccgggtgcagaagaagatcgtggccaaccggctgaccagccccagcagcgccctggtgaatgcctctgtggcctttgagtgctggatcaactttggaacagatgtggcctacctgtgggactttggagatggcaccgtgtccctgggcagcagcagcagcagccacgtgtacagccgggagggggagttcaccgtggaggtgctggccttcaacaacgtgtctgccagcaccctgcggcagcagctgttcatcgtgtgtgagccctgccagccccccctggtgaagaacatgggccctgggaaggtgcagatctggaggagccagcctgtgcggctgggcgtgacctttgaagctgctgtgttctgtgacatcagccagggcctgagctacacctggaacctgatggacagcgagggcctgcctgtgtccctgcctgctgctgtggacacccaccggcagaccctcatcctgcccagccacaccctggagtatggcaactacacagccctggccaaggtgcagatcgagggctctgtggtgtacagcaactactgtgtgggcctggaggtgcgggcccaggcccctgtgtctgtcatcagcgagggcacccacctgttcttcagcaggaccaccagcagccccatcgtgctgcggggcacccagagctttgatcctgatgatcctggggccaccctgcgctaccactgggagtgtgccacagctggcagccctgcccacccctgctttgacagcagcacagcccaccagctggatgctgctgcccccaccgtgtcctttgaggcccagtggctgagtgacagctatgaccagttcctggtgatgctgcgggtgtcctctgggggcaggaacagcagcgagaccagggtcttcctgagcccctacccagattctgccttccgctttgtgcacatctcctgggtgtccttcaaggacacctttgtgaactggaatgatgagctgagcctgcaggccatgtgtgaggactgcagcgagatccccaacctgagctacagctgggacctcttcctggtgaatgccacagagaagaaccgcatcgaggtgcccttctgccgggtggtgggcctgctgggcagcctgggcctgggcgccatcagcgagagcagccagctgaacctgctgcccacagagcccggcacagctgaccctgatgccaccaccacccccttcagccgggagcccagccctgtgaccctgggccagcctgccaccagcgccccccggggcacccccacagagcccatgactggagtgtactggatccccccagctggggacagcgctgtgctgggggaggcccctgaggagggcagcctggacctggagcccggcccccagagcaagggcagcctgatgacaggccgctctgagaggagccagcccacccacagcccagacccccacctgagtgactttgaggcctactacagcgacatccaggaggccatccccagcggcggccggcagcctgccaaggacaccagcttccctggcagcggccccagcctgtctgctgaggagagccctggagatggagacaacctggtggaccccagcctgtctgctggccgggcagagcctgtgctgatgattgactggcccaaggccctgctgggccgggctgtgttccagggctacagcagcagcggcatcacagagcagacagtgaccatcaagccctacagcctgagcagtggagagacctacgtgctgcaggtgtctgtggccagcaagcacggcctgctgggcaaggcccagctgtacctgactgtgaacccagccccccgggacatggcctgccaggtgcagccccaccacggcctggaggcccacacagtgttttctgtgttctgcatgtctgggaagccagacttccactatgagttctcctaccagatcggcaacaccagcaagcacaccctgtaccacggccgggacacccagtactactttgtgctgcctgctggggagcacctggacaactacaaggtgatggtgtccacagagatcacagatggcaagggcagcaaggtgcagccctgcaccgtggtggtgacagtgctgccccgctaccacggcaatgactgcctgggagaagatctctacaacagcagcctgaagaacctgagcaccctgcagctgatgggcagctacacagagatccggaactacatcaccgtcatcacccgcatcctgagccggctgagcaaggaggacaagacagccagctgcaaccagtggagccgcatccaggatgccctgatcagctctgtgtgccgcctggcctttgtggaccaggaggagatgattggctctgtgctgatgctgcgggacctggtgtccttcagcaacaagctgggcttcatgtctgctgtgctgatcctgaagtacacccgggccctgctggcccagggccagttcagcggcccctttgtgattgacaagggcgtgcggctggagctgattggcctcatcagccgggtgtgggaggtgtctgagcaggagaacagcaaggaggaggtgtacagacatgaggagggcatcaccgtcatcagtgacctgctgctgggctgcctgagcctgaaccacgtgtccacaggccagatggagttccgcaccctgctgcactacaacctgcagagctctgtgcagagcctgggctctgtgcaggtgcacctgcccggggacctggccggccacagccctgctggagctgagacccagagcccctgctacatcagccagctgatcctcttcaagaagaacccctacccaggcagccaggcccctggccagattggaggagtggtgggcctgaacctgtacacctgcagcagcagaagacccatcaaccggcagtggctgaggaagcctgtgatggtggagtttggagaggaggatggcctggacaacagaagaaacaagaccacctttgtgctgctgcgggacaaggtgaacctgcaccagttcacagagctgtctgagaacccccaggagagcctgcagattgaaattgagttcagcaagcctgtgacccgggccttccctgtgatgctgctggtgcgcttcagcgagaagcccacccccagcgacttcctggtgaagcagatctacttctgggatgagagcatcgtgcagatctacatcccagctgccagccagaaggatgcctctgtgggctacctgagcctgctggatgctgactatgacaggaagccacccaaccgctacctggccaaggctgtgaactacacagtgcacttccagtggatccgctgcctcttctgggacaagcgggagtggaagtctgagcgcttcagcccccagcccggcaccagccctgagaaggtgaactgcagctaccaccggctggccgcctttgccctgctgcggaggaagctgaaggccagctttgaggtgtctgacatcagcaagctgcagagccaccctgagaacctgctgcccagcatcttcatcatgggcagcgtcatcctgtatggcttcctggtggccaagagccggcaggtggaccaccacgagaagaagaaggccggctacatcttcctgcaggaggccagcctgcccggccaccagctgtatgctgtggtgattgacaccggcttccgggccccagcccggctgaccagcaaggtgtacatcgtgctgtgtggggacaatggcctgtctgagaccaaggagctgagctgcccagagaagcccctgtttgagaggaacagccgccacaccttcatcctgagcgccccagcccagctgggcctgctgaggaagatccggctgtggcatgacagccggggccccagccctggctggttcatcagccacgtgatggtgaaggagctgcacacaggccagggctggttcttccctgcccagtgctggctgtctgctggaagacatgatggccgggtggagcgggagctgacctgcctgcagggcggcctgggcttcaggaagctgttctactgcaagttcacagagtacctggaggacttccacgtgtggctgtctgtgtacagccggcccagcagcagccgctacctgcacaccccccggctgactgtgtccttcagcctgctgtgtgtgtatgcctgcctgacagccctggtggccgccggcggccaggagcagccccacctggatgtgagccccaccctgggcagcttccgggtgggcctgctgtgcaccctgctggccagccctggggcccagctgctgagcctgctcttccggctgagcaaggaggcccctggcagcgcccgggtggagccccacagccccctgcggggcggggcccagacagaggccccccacggccccaacagctggggccgcatcccagatgcccaggagcccaggaagcagcctgccagcgccatcctgagcggcagcggccgggcccagaggaaggccgccagtgacaatggaacagcctgcccagcccccaagctgcaggtgcatggagctgaccacagcaggaccagcctgatgggcaagagccactgctgccccccccacacccaggcccccagcagcggcctggagggcctgatgccccagtggagccgggccctgcagccctggtggagcagcgctgtgtgggccatctgtggcacagccagcctggcctgcagcctgggcaccggcttcctggcctacagatttggccaggagcagtgtgtgcagtggctgcacctgctgagcctgtctgtggtgtgctgcatcttcatcacccagcccctgatggtgtgcctgatggccctgggctttgcctggaagagaagagctgacaaccacttcttcacagagagcctgtgtgaggccacccgggacctggacagcgagctggccgagaggtcctggacccggctgcccttcagcagcagctgcagcatcccagactgtgccggggaggtggagaaggtgctggccgcccggcagcaggcccggcacctgcgctgggcccacccccccagcaaggcccagctgcggggcacccggcagaggatgagaagagagagcaggacccgggccgccctgcgggacatctccatggacatcctgatgctgctgctgctgctgtgtgtgatctacggccgcttcagccaggatgagtacagcctgaaccaggccatcaggaaggagttcaccagaaatgccaggaactgcctgggcggcctgaggaacattgctgactggtgggactggagcctgaccaccctgctggatggcctgtacccaggcggcacccccagcgcccgggtgcctggggcccagcccggggccctgggcggcaagtgctacctgattggcagcagcgtcatccggcagctgaaggtgttccccaggcacctgtgcaagccaccccggcccttcagcgccctgattgaagattccatccccacctgcagccctgaggtgggcggccctgagaacccctacctgattgatcctgagaaccagaatgtgaccctgaatggacctgggggctgcggcacccgggaggactgtgtgctgagcctgggccgcaccaggacagaggcccacacagccctgagccggctgcgggcctccatgtggattgacaggagcaccagggctgtgtctgtgcacttcaccctgtacaacccccccacccagctgttcacctctgtgtccctgcgggtggagatcctgcccaccggcagcctggtgcccagcagcctggtggagagcttcagcatcttcagaagtgacagcgccctgcagtaccacctgatgctgccccagctggtgttcctggccctgagcctcatccacctgtgtgtgcagctgtacaggatgatggacaagggcgtgctgagctactggaggaagcccaggaactggctggagctgtctgtggtgggcgtgtccctgacctactatgctgtgtctggccacctggtgaccctggccggagatgtgaccaaccagttccaccggggcctgtgccgggccttcatggacctgaccctgatggcctcctggaaccagagggcccgctggctgcggggcatcctgctcttcctgttcaccctgaagtgtgtgtacctgcccggcatccagaacaccatggccagctgcagctccatgatgaggcacagcctgcccagcatctttgtggccggcctggtgggcgccctgatgctggccgccctgagccacctgcaccgcttcctgctgtccatgtgggtgctgcccccaggcaccttcacagatgccttccctggcctgctcttccacttccccaggaggagccagaaggactgcctgctgggcctgagcaagagtgaccagagggccatggcctgctacttcggcatcctgctgattgtgtctgccaccctgtgcttcggcatgctgcggggcttcctgatgaccctgccccagaagaggaagagcttccagagcaagagctttgtgcggctgaaggatgtgacagcctacatgtgggagaaggtgctgaccttcctgcggctggagacccccaagctggaggaggccgagatggtggagaaccacaactactacctggatgaatttgccaacctgctggatgagctgctgatgaagatcaatggcctgagtgacagcctgcagctgcccctgctggagaagaccagcaacaacacaggagaggccaggacagaggagagccccctggtggacatcagcagctaccaggccgctgagcctgctgacatcaaggacttctag

SEQ ID NO: 236096 - DNA, 8550 bp, Artificial Sequence
  derived and/or modified sequence
atggccgaggaggccgcccagaacatcagcgacgaccaggagcggtgcctgcaggccgcgtgctgcctaagttttggaggcgaattaagcgtaagcaccgataaaagctggggcttgcacctctgttcctgctcacccccgggtggtggcttgtgggtggaggtgtacgcaaatcacgtgcttctgatgagcgacgggaaatgcggctgcccttggtgcgccctgaatggaaaggctgaagacagagaaagccagtctcccagttcgagtgctagtcggcaaaagaacatctggaaaacgacttctgaagccgctctatccgtggttaatgaaaaaacacaagccgtcgtgaatgaaaaaacccaggctccactagactgtgacaatagcgcagaccggatccctcacaagccctttatcattatcgctagggcctggtcctctggggggcctaggttccatcatcgcagactgtgcgcaacggggaccgccgattcgaccttctccgccctgctacagctgcagggcacgacttcagcggcagccccatgtagtctgaagatggaggcctcttgttgcgtgctacgcctcctttgctgcgctgaagatgttgctactggattgttgcccgggacagtgactatggaaacgccgaccaaggtggcacgtcctactcaaacgtcatcccagagagtcccactctggcctatcagtcattttcccacatccccccgcagtagccatggactccctcccggcatccctcgcaccccttcattcaccgccagtcaaagtggatctgagattctgtacccacccactcaacatccccccgtcgcaatcttggctcggaattcagacaatttcatgaaccccgtactgaattgctccttagaggttgaagcccgcgcgcctcccaatctgggcttccgagtccacatggccagcggagaggcactgtgcctgatgatggatttcggggattcatccggagtggagatgaggctccataacatgtctgaggccatggcggttacagcgtaccaccagtacagcaagggaatttttttccatctcttacactttcaactcgatatgagcacctataaagaggccgagacccagaatactaccttgaatgtgtacctgtgccaatcagagaattcctgcctggaggatagcgacccctccaacttaggttacgagcttatatcagctttcgtgacgaagggcgtatacatgctgaaagccgtcatctacaatgaattccacggtacagaggtcgagctcggcccttactatgtggagatcggtcacgaggcagtctccgctttcatgaactcctcatctgtgcacgaagatgaggtcctggtgttcgctgacagccaggtgaaccagaagagcaccgtggtcattcatcacttcccctctatcccttcctacaacgtgtctttcatctctcagacacaagtcggcgattcgcaggcttggcacagtatgaccgtctggtataagatgcagtccgtgtctgtgtatactaacgggaccgtgtttgccaccgacaccgacattaccttcaccgctgtgactaaagaaactatcccactggagttcgagtggtactttggtgaggaccctccagtgcgaaccacctctcgctctattaagaagcggctctctatcccccagtggtaccgggtcatggtcaaagcttcaaatagaatgtccagcgttgtgtccgagccccacgtgattagggtccagaaaaagattgtggcaaaccggcttacctctccgtcatccgccttagtgaatgccagtgtggctttcgagtgttggattaattttggaaccgacgtggcctacctgtgggactttggggacgggacggtgtcattggggagctcctcaagctctcatgtgtattcccgggaaggagagttcactgtggaggtgctggctttcaacaatgtatcagcctctactctccgtcaacagctctttattgtgtgtgagccctgccagccaccactcgtgaagaatatgggacctggaaaggtccagatttggcggagccagcccgttaggttaggagtcacatttgaggccgcagtcttttgtgacatttcacaaggcctttcatatacctggaatttaatggattctgagggcttgccggtttctttacccgctgccgtcgacacacaccgacagacattaatcctaccttcccacaccctggaatacggtaactataccgcattggcgaaggtccaaatcgagggcagcgttgtgtatagcaactactgcgtgggactcgaagttagagcccaggcacctgtctctgttatatccgaagggacccaccttttcttttctcgcacaacatcctcacctatcgtgttgagggggacccagagctttgatccagacgatcccggtgccactctgcgataccactgggaatgcgccactgctggctcacccgcccacccctgtttcgattctagcacagcccatcagctggatgctgccgccccaactgtctcatttgaggcacagtggctgagtgattcttatgaccagttcttggtgatgctacgggtgagctcgggagggcgaaatagcagtgagacacgggttttcttaagcccctatccagatagcgctttccgcttcgttcacatttcttgggtttctttcaaggataccttcgtgaactggaatgatgaactgagtctccaagccatgtgcgaggactgttccgagatcccaaatctgtcatattcttgggatctgtttttggtcaacgcgaccgagaaaaataggatagaggtgccgttttgcagagtcgtggggttgctcggtagccttggcctaggggctatttcagagtccagtcagctaaatttactgcccaccgagcccggtacagctgatccggacgcaactaccacacctttctccagggagcccagtccagtcacgcttgggcagcccgcaacctcagccccacgcggaaccccgacggagccaatgactggggtttattggatccctccagctggagattccgctgttctcggggaggccccagaggagggatcccttgacttagaaccgggtccccagtccaagggttctttaatgacagggcgtagcgagcggagccagcctacacactcacctgatccacacctttctgacttcgaggcatattactccgatatccaggaggcaatcccgtccgggggccggcagccagctaaggatacaagtttcccaggttctggcccatctctgagtgcagaggagagccctggggacggcgacaatctggttgatccctcactgtcagccggacgcgctgaacctgtgctgatgatagattggcctaaggcactcctgggtagggccgtattccaagggtatagtagcagcggcatcactgagcagaccgttaccattaaaccctacagcctgagttccggtgaaacgtacgtcctgcaggtgtccgtcgcatcaaaacatggactgcttggcaaagcccagctatacttgacagttaatcctgcaccgcgcgatatggcctgccaggtgcagccccatcatggcctggaggcacatacagtgttttcagtcttctgtatgtccgggaagcccgacttccactacgagttctcctaccagatagggaacacgagcaagcataccttgtatcatggtcgcgatacccagtactattttgtcctacccgccggggagcatttagacaattataaagtaatggtgtctaccgagatcacagacggaaaggggagcaaggtgcagccttgtactgtcgtggtgaccgtactgccaagatatcacggaaacgattgcctgggggaggacttgtacaatagctccctcaaaaacttgtccacattgcaattgatggggtcatataccgagatcaggaattatatcactgtgataacccgaattttgtcacggctgtccaaggaagacaagacggcatcttgcaaccagtggagtaggatccaggatgcgctgattagcagcgtgtgccggcttgcttttgttgaccaggaggaaatgattggcagcgtgctgatgctcagggatctcgtgtcctttagcaataaactgggatttatgtcagcggtactcatacttaaatacactcgcgctttgctagctcaggggcaattcagcggtcctttcgtaatcgacaagggtgttagactcgaactgatcgggttgataagcagggtatgggaagtcagtgagcaggagaactcgaaggaggaggtctaccggcacgaggagggaatcactgtaatctcggacctcctcttaggctgtctgagcctgaatcatgtgagtacggggcagatggagttcaggaccctgttacactataacttgcaatcctccgtgcagtctttaggttccgtccaggttcacctgccgggggacttggccggtcattcgccagctggcgcagagacacagtcgccttgctacattagccaactcattttgtttaaaaaaaacccttatccgggcagccaggcacctggccagattgggggggtggtggggctcaacctctatacatgtagtagtaggcgccccattaatcgccagtggttgcgcaagcccgtgatggtcgaattcggcgaggaagacggactcgacaaccgacgaaacaagacaacttttgtcttactcagagacaaagtcaatctgcaccagtttacagaactctctgaaaatccacaagagagcttgcagatcgaaatagagttttcaaaaccagttacgagggcgtttccagtcatgcttttggttcgcttcagtgaaaagcccactccatcagacttcctggtcaaacagatttacttttgggacgagagtattgtccagatttacatccctgccgcaagtcaaaaggatgcctcggttggataccttagtttactggatgccgactacgaccgtaagccccccaaccggtacctggcaaaagctgtcaattataccgtgcactttcaatggattagatgtcttttctgggacaagcgagagtggaagtccgagcgattcagtccacagcccgggacgtctcctgagaaggtaaattgctcataccaccgtttagcggcgtttgctctgttgcggcggaaactcaaggcaagctttgaagtttctgacatttctaagctacagtctcatcccgaaaacctcttgcctagcatctttatcatggggagtgttattctgtacggctttctggtcgctaaaagccgccaagtggatcaccacgaaaagaaaaaggccgggtatattttcctccaagaagctagtcttccaggtcaccagctgtatgcggtcgtcatcgatactggattcagggctccagctcgcctgaccagcaaagtgtacatagtgctctgcggtgataacggtctgtcagaaactaaagagctgtcctgtcccgaaaagcctctgtttgagcggaatagtcgacacacttttatcttaagcgcaccagctcagctgggactattgcgaaagattcgactgtggcatgacagtaggggacccagccctggctggtttatctctcacgtcatggtgaaggagctccacaccggccagggctggttcttccctgctcagtgttggctgtccgccggccgccacgacgggagagtggaacgggagctgacctgtttgcagggaggacttggttttagaaagctattttattgtaagttcacagagtacctcgaggattttcatgtgtggttaagcgtgtactcccgaccctcaagttcccgctacctgcatacaccgcgattgacggtgtccttctcattactgtgtgtctatgcctgcttaacggctttggtcgcagcaggtggccaagaacagccccatctcgacgtatcccctaccctcggttcgtttcgtgtcggactgctgtgtacactcctggcgtcccccggtgcacagcttctgtccctcctgttcagactctccaaggaagcgcccgggtctgctagggtcgaaccgcactcacctcttagaggtggagcccagaccgaagcccctcacggtcccaattcatggggacggatcccagatgcccaagagcctagaaagcagcccgctagtgctatcctgagcggctcaggaagggcacagcgtaaggccgcttcggataacgggactgcctgcccagcccccaagctgcaagtacacggggctgaccactccagaacctcattgatgggtaagtcccattgttgccccccccatacacaggcgccgtcctcaggactggagggattaatgccgcagtggtcgagggccctgcagccctggtggagcagcgcagtctgggcaatttgtggcaccgcttctcttgcctgttctctgggcacgggattcctcgcttatcgatttggacaagaacagtgtgtgcagtggctacatctgctgagcctgtcagttgtgtgttgcatctttattacccaacctttgatggtctgcctaatggcactgggctttgcttggaaacggagggctgataaccactttttcaccgagtccttatgcgaagcgacgcgtgaccttgacagtgagctcgccgagcgcagttggacaaggctgccattctcaagcagctgcagcatccctgattgcgccggggaggtggagaaggtgctggcagcacgccagcaggcaaggcacctacgctgggcacacccaccctcaaaagcacaattgcgcggaactcggcaaaggatgcggcgcgaatctcggaccagggcggccctgcgggacataagtatggatatcctcatgctgctgttgcttctttgtgtgatttatggtcggttttcccaggacgagtactctctcaaccaggcaatccgaaaagagtttactagaaatgccaggaattgtctaggtggtcttagaaatatcgctgattggtgggactggagtttgaccacactccttgacggtctgtatcctggagggactccttctgcccgtgttccaggagctcaacccggggccctcggagggaaatgttacctcatagggtcctccgtgatcagacaacttaaagtgttccctcggcacttgtgcaaacccccacggcctttttcagctctgatcgaggacagcattccaacatgctccccagaagttggaggacccgagaacccttatctcattgatcccgagaaccagaatgtgacccttaacggcccgggcggttgcggtacaagagaggactgcgtactgagtctgggtcgcacgcggacagaggcccacacagccttgtcacgtttaagggcttccatgtggatcgacagatccacgcgcgctgtcagtgttcacttcacactttataatccgcccacacaactctttacaagcgtgagccttagagtggaaatcttacccactgggtctctggtgccatcatctctggtagaaagcttttcaattttcagatcagactcagccttgcagtaccacctcatgttaccccagttagtgtttctcgctctgtcgctgattcatctttgtgtgcagctctatagaatgatggacaagggcgtgctgtcctattggcgtaagccgcgaaattggttagagctttccgtggtaggagtcagtctgacctactacgccgtgagcggacacctggtgaccctcgccggcgatgtcaccaatcagtttcatcgcggactctgtagggcattcatggacttaaccctcatggcctcctggaaccagcgggcccggtggctgcgggggatcctcctgttcttgtttacgttaaagtgcgtgtatttgccgggcattcaaaataccatggcatcctgctcttcaatgatgaggcattcactgccctccatcttcgtggcaggattagtcggggctctgatgctcgccgccctgagccatctgcatcgtttccttctgtcaatgtgggtgctcccccctgggacttttactgacgccttccctggcttgctcttccacttccccagacgctctcagaaagactgcctgttggggctaagcaagtccgaccagcgcgcaatggcgtgctatttcggaatcctccttattgtgtcagctaccctgtgctttggaatgctgcgagggttcctgatgactttgccgcagaaaagaaagtccttccagtcgaagagcttcgtgagactcaaagacgtgacagcctatatgtgggagaaagtcctgaccttcctccggctggaaactcccaagctggaagaggccgagatggtcgaaaatcacaactattacctcgacgaattcgccaatctgctcgatgaactccttatgaaaattaacggactgagtgattctctccaactgccattactggagaagaccagcaataatacaggtgaggcgcgcaccgaggaatctccactcgtagatattagttcctaccaagctgctgagcccgctgacattaaagacttttag

SEQ ID NO: 236097 - DNA, 9092 bp, Artificial Sequence
  derived and/or modified sequence
ggaagaagctggtctgctgactgtcatacttgtgaccagcttgcacaggacatggccgaggaggcagcccagaacatttctgatgaccaggaaaggtgtctccaggctgcctgctgcctttcctttggtggtgagctgtctgtgagcactgacaagagctggggtcttcatctgtgcagctgtagccctcctggaggtggattgtgggtcgaggtctatgctaatcatgtgcttcttatgagtgatgggaagtgtggctgtccttggtgtgctctgaatggaaaggcagaagaccgggaatcacagagcccatcctcatcagcttccaggcagaagaacatttggaaaacaactagtgaagcagcgttaagtgttgttaatgaaaaaacacaggctgttgttaatgaaaaaacacaggcgcctctggattgtgataacagtgctgatagaattccccacaaacctttcattataatcgcaagggcctggagcagtggtggccccaggttccatcacaggcggctgtgtgctactgggaccgcagacagcacattctctgctcttctccagctccagggcaccacttctgcagcagctccctgcagcctgaagatggaggcttcctgctgtgtcctgagactgctgtgctgtgcggaggatgtggccacggggctgcttcctgggactgtcacgatggagacccccaccaaggtggccagacccactcagaccagctcccagcgagtgcccctgtggccgatttcacattttcccacttctcccagaagctcccacggccttccgcctggcattcctcgcacccccagcttcacggcatcgcagtctggttctgagatcctctatccccctactcagcatcctcctgtggccatcctagctcgaaattctgataacttcatgaaccctgttcttaattgctccctggaagtggaagctcgggcacctccaaatctgggattccgtgttcatatggcttctggagaggctctctgtctgatgatggatttcggggacagttctggggttgaaatgaggctacacaacatgtctgaggcaatggcggtgactgcctaccaccagtactcaaaaggtattttttttcatcttttacattttcagttggatatgtccacctacaaagaagcagagacacaaaatacaactttaaatgtttacttgtgccaaagtgaaaacagctgcctggaagactcagaccccagtaaccttggatatgagcttatttctgcctttgtcaccaaaggagtctatatgctcaaggctgttatttataacgagtttcatggaaccgaagtggagcttgggccttattatgtggagattggccatgaggccgtgtctgcgttcatgaactccagcagtgtccatgaagatgaagtgcttgtctttgctgactcccaagtgaatcagaaaagcactgtggttatacatcactttccatctattccttcatataacgtgtcctttatttctcagactcaagtgggtgacagccaggcttggcacagcatgactgtctggtataagatgcaatccgtctctgtctacacaaatggaactgtgtttgccacagacacagacattacatttacagctgttaccaaggaaacaatacccctggaatttgagtggtattttggagaggatccaccagtgaggacaacttcaagaagcattaaaaaaagactcagcatcccccaatggtatcgtgtgatggttaaggcttccaacaggatgagcagtgtggtctctgagccccatgtcatcagggtgcagaagaaaattgtggccaatcggctcacgtccccctcctcagctctggtaaatgccagtgtggcctttgagtgctggatcaacttcggcacagatgttgcctacctgtgggactttggggatggcaccgtcagcctggggagcagctccagcagccatgtctacagtagggaaggagaatttacagtggaggtccttgccttcaataatgtcagtgcctccactctaagacagcaacttttcatcgtgtgcgagccctgccagccacccctggtgaagaacatggggcctgggaaagtccagatatggaggtctcagcctgtgaggctgggagtgacgtttgaagctgcagtcttctgtgatatttcccaaggtctttcttacacctggaacttgatggactctgaagggctccctgtctccctccctgctgctgtggacactcacagacagaccctcatcctcccgagccacaccttggagtatgggaactacactgcccttgccaaggttcagattgaaggcagtgtggtgtacagcaactactgtgtgggcctggaggtgcgagcccaggcccctgtcagtgtgatctccgagggcacacacctattcttctccaggaccacctcatcccccattgtcctcagagggacccagtccttcgaccctgacgaccctggggcgactctcaggtatcactgggaatgcgccaccgctggctccccagcacatccctgcttcgactcctccactgcacaccaactggatgccgcggctcccactgtttcctttgaggcacaatggctcagtgacagctatgatcagttccttgtgatgctgagggtctccagtggtggccggaactcttctgagacccgggtgttcctgtccccctaccctgactcggcgttcagattcgtccacatctcctgggtcagctttaaagacaccttcgtcaactggaatgacgaactctctcttcaagctatgtgtgaggactgcagtgaaataccgaatctgtcttattcctgggatctctttttagtcaatgcaacagaaaagaataggatagaagttcccttctgcagagtagtggggctgcttggctcgctgggactcggtgccatttcagagtcatcacagttaaacctgctgcccactgagcctggcactgcagatcctgatgcaacgaccacaccattctcacgggaaccttcacccgtgacccttggccaacctgccacttcagctccaaggggaacccccacagagcccatgactggagtctactggattcctcctgcgggggactctgcagtcctgggggaggctccagaggaaggttcactagacctagagccagggccacagagcaagggatccctgatgactggccgctctgagagaagtcagcccacccacagccctgaccctcacctctctgattttgaagcctattacagtgacattcaagaagcaataccatcgggaggaagacagccagctaaggacaccagctttccaggatcaggacctagcttgagtgccgaggagagccctggagatggggataacctggtggacccctccctgtctgcaggcagagccgagcctgtcctcatgattgactggcccaaggccctgctgggtcgagcagttttccaaggctattcatcctcaggtattacagaacagacagtgacaatcaagccatactctctgagcagtggagagacgtacgtcctgcaagtgtctgtggcttcgaagcatggcttactgggtaaagctcagctgtacttgacagtcaacccggctcctcgggacatggcctgtcaggtgcagccccaccatggtctggaagcacacaccgtcttcagtgtcttctgcatgtctggaaaaccggacttccattatgaatttagttaccagataggaaacacctccaaacacactttgtaccatgggagagacacccagtattattttgtgttgccagctggtgagcacttggacaattacaaagtcatggtttccactgaaatcacagatggcaaaggctccaaggtccagccgtgcactgtggtggtgactgtgctgccccgctaccatggaaatgactgtctgggcgaggacctgtataattccagcctgaaaaacctttctaccctccagctgatggggagttacacagaaatcaggaactacatcactgtgatcaccagaatcctgagtcgtttgtctaaggaggacaaaactgcctcctgcaaccaatggtcacgaatacaggatgcattaatttcttcagtatgcagattggcttttgtagatcaggaagaaatgattggttctgttcttatgttgagggacctcgtgagcttctctaataagctaggctttatgagtgcggttctcatcctcaagtacacccgggcactccttgctcaaggccagttctcggggccatttgtgattgacaaaggagtgaggcttgagctcatcggtctcatatccagagtctgggaagtctctgagcaagaaaactcgaaggaggaagtctatcgacatgaagaaggaattacagtcatctcagatttattgttgggttgtctctctttgaaccatgttagcactgggcagatggagttccggacccttcttcattacaaccttcagagctctgtccagagcctgggatctgtccaggtgcatttacctggtgaccttgctgggcacagtcctgctggggcggagacacagagcccatgctacattagccagctcatactcttcaagaagaacccatatccagggagccaagctcctgggcagattggtggagttgtgggcctcaacctctatacctgctccagcagaagacccatcaacaggcaatggctaaggaaacccgtgatggtcgagtttggggaggaggatggcctggataataggagaaataaaacgacatttgtattacttcgggataaagtgaatctccatcagttcactgagctttccgaaaacccccaggaatctctacagatagaaattgaattttccaaacctgttacaagggcatttcccgtcatgttgctagtaagattctctgagaaacctactccctctgattttcttgtgaagcagatctacttctgggatgagtcaattgtgcagatttatatacctgctgcttctcagaaagatgccagtgtaggctatttatccttattggatgctgactatgacagaaaacctccaaacagatatttagctaaggcagtgaactatacagtacatttccagtggatccgatgcctgttttgggacaagagagagtggaaatctgaacgtttctctccacaaccagggacttctcctgaaaaagtgaactgcagctaccatcgcctcgcggcattcgctctcctaaggagaaagctgaaggccagttttgaagtgagtgacatttccaagctacagagccacccagaaaacttgcttcccagtatttttattatgggttctgtgattctttatggatttttggtcgctaaaagtagacaagtagatcatcatgaaaaaaagaaagctggttacatctttctgcaagaagcttccctgccgggccatcagctatatgcggtcgtcattgacactggcttccgagctccggccaggttgacctcaaaggtgtacattgttttatgtggcgacaatggactgtcagaaaccaaggagctctcctgtccagagaagcccctgtttgaaaggaattccagacacacctttatcctgagcgctcctgcccaactgggcctgctgaggaagatccgcctctggcacgacagccgtgggccttccccaggctggttcatcagccacgtgatggtgaaggagctgcacacgggacagggctggttcttccctgcccagtgctggctgtctgccggcaggcatgatggtcgcgtggagcgggagctcacctgtctgcaagggggactcggcttccggaagcttttctattgcaagttcacagagtacctggaggatttccatgtctggctgtcggtgtacagcaggccctcctccagccgctacctgcacacgccgcgcctcaccgtgtccttctccctgctgtgcgtctacgcgtgtctcactgccctggttgctgctggagggcaagagcagccccacttggacgtcagccccacccttggatccttcagggtgggtctcctgtgtaccctcctggcttctccaggggcccagctcttgtccctgctcttcaggctcagcaaggaagccccggggtctgcccgagtggagccacacagcccacttagaggaggagcacagaccgaggcaccccatggtcctaattcctggggaaggataccagacgcacaggagccacgcaagcaacctgcatcagccattctctctgggagtggcagggcccaaaggaaggcggcaagtgacaatggcacagcttgtccagcccctaagctgcaggttcatggggctgaccacagcaggacttctctgatggggaaaagccactgctgccctccccacactcaagcacccagcagtggtttggagggactaatgccccagtggtcaagggcccttcagccttggtggagctctgcagtgtgggccatttgtgggaccgcttctttggcctgcagtttggggacaggatttctagcctacaggtttggccaggagcaatgtgtgcagtggctgcacctgctgtccctctccgtggtctgctgtattttcatcacccagccacttatggtatgcctcatggccttgggttttgcttggaaaagaagagctgacaaccacttttttactgagtctttatgtgaggctaccagggatctggactctgaattggcagaacgttcctggactcgcctccccttctcttcaagctgcagtattcctgactgtgcaggcgaggttgaaaaagtcttggctgcccgacaacaagctcgccacctgcgctgggcgcatccaccatccaaggcccagctgaggggcaccagacagaggatgaggagagagagtcgcacacgggctgccctgagagacatttccatggacatcctcatgctgcttctgcttttgtgtgtaatatatgggagattttcccaagatgaatactccctcaatcaagctatccggaaagaatttacaagaaatgccagaaactgcttgggtggcctgagaaacatcgctgactggtgggactggagtctgaccacacttctggatggcctgtacccgggaggcaccccgtcagcccgtgtgccgggggctcagcctggagctcttggaggaaaatgctacctaataggcagttccgtaattaggcagctaaaagtttttcctaggcatttatgcaagcctcccaggccattttcagcactcatcgaagactctattcctacatgtagtcccgaagttggaggccctgagaacccctacctgatagacccagagaaccaaaacgtgaccctgaatggtcctgggggctgtgggacaagggaggactgtgtgctcagcctgggcagaacaaggactgaagcccacacagccctgtcccgactcagggccagcatgtggattgaccgcagcaccagggctgtgtctgtgcacttcactctctataaccctccaacccaactcttcaccagcgtgtccctgagagtggagatcctccctacggggagtctcgtcccctcatccctggtggagtcattcagcatcttccgcagcgactcagccctgcagtaccacctcatgcttccccagctggtcttcctggcactcagcctgatccacctctgtgttcaactctaccgtatgatggacaagggcgtcctcagctactggcgaaagccaaggaactggctggagctctccgtggttggagtgagcctcacctactatgcagtttccggccaccttgttactcttgctggagatgtcactaaccagtttcacagaggactttgccgagcatttatggacctcacccttatggcatcatggaatcagagggctcgatggctccggggaatcctcttattcctcttcacattaaaatgcgtctatcttcctggcattcaaaacacaatggcatcctgctcctccatgatgcgccactcactccccagcatctttgtagcagggctggtgggggcactgatgctggccgccctctcccacctgcaccgatttctgctctctatgtgggttctaccacctggcaccttcacagacgccttccccgggctgctgtttcattttcccagaagaagccaaaaagactgcctccttggcctttccaagtctgaccagcgggccatggcttgttactttgggatccttttaatagtctctgccacactgtgttttggaatgctgagaggttttctcatgactttaccccaaaaaagaaaatcttttcaaagtaaatcttttgtgagacttaaagatgtcactgcttatatgtgggaaaaggtcctcacctttctgagactggaaacaccaaagttggaagaggctgagatggttgagaatcacaattactacttggatgaatttgcaaatctgttagacgaacttctgatgaagattaatggtttgtccgacagcctacaactcccccttctggaaaaaacatccaacaacacaggggaggcaaggacagaagagagtcccttagtggacatttctagttaccaagctgctgagccagcagacatcaaggacttctgaggagcctggtaccttgcataggcactatggaccctgttttgcttaacccacccaacagccaattttagcagacatcctagttttgcaggtgagaagagctgaggtacgaagaagttttgttaatttttccagttcacgtaacaagtaaatgggaaaccaggatgaaaatcaaggtttatctgtcatcagactgttactcataatcaccattcggagagttcagatgtgggacaagattctaactccagccttctcccaaatggttaatttgccagttgccctagagttacatattgtcttatttgtttgttttactgaatctgtctgagtattaaaagccttgtatcttgtgaaatttctttcaggtctcataaaagcgatgaaagagaccaggataacattctaatatttaaataagatttttgaagtaaaatccttattttgtaaatttaacaattgaatcttgctagattaataacgcatctttcctg

SEQ ID NO: 236098 - DNA, 8550 bp, Artificial Sequence
  derived and/or modified sequence
atggctgaggaggcagcacaaaacattagtgacgatcaggaaaggtgtctgcaggccgcatgctgtttgagctttggcggagagctgtcagtcagtacagataagtcttggggtctgcacctgtgctcctgctctcctcctggtggcggactttgggtcgaggtgtatgctaaccacgtgttgctcatgtcagatggcaaatgcggctgcccatggtgcgccttaaacgggaaggccgaagatagggaaagccagagccccagttcatctgcctctcgtcagaagaacatctggaagacaaccagtgaagctgctctctcagtggtgaatgagaaaactcaggcggtggtgaatgaaaaaacacaggcacctttagactgtgataacagcgcggaccggatcccccacaaacccttcatcattatagcccgtgcctggagtagcggcggtcctaggttccaccatagacgtctgtgcgcaacgggcaccgccgactccactttttctgctttgttgcagctccagggcactacctccgccgcagccccatgtagtctgaagatggaggccagctgttgtgttttgcgtttactctgctgcgccgaggacgtggctacaggattgctgcccggaacggtcacaatggaaacccctacaaaggtggccaggcccactcagacctcaagtcaaagggtgccgctctggcccatatctcatttcccaacatctccaaggtcaagccacggcctaccccctgggattccccgaacgccaagcttcacggcgtcacagtcgggctcagagattctgtatccccctactcagcatccccctgtggccatcctggcacggaattcggacaacttcatgaatcccgtgctgaattgttctttggaagtggaggccagggccccacccaacctaggcttccgggtgcatatggctagcggagaagctctctgcctgatgatggatttcggggactcctcaggagtggagatgaggcttcacaacatgagtgaggctatggctgtgacagcttatcaccagtactcaaagggcatctttttccacctcctgcactttcagttagatatgtcgacctataaggaggccgaaacccagaatacaaccttaaatgtctacctgtgccagagcgagaattcatgcctcgaggattccgacccaagcaatctcggctatgaattaattagcgcctttgtgaccaagggcgtgtacatgctgaaggctgtgatctataatgagttccatggcacggaggttgagctgggtccttattacgtggagatcggtcatgaggcggtgtccgcctttatgaactccagtagtgtgcacgaggacgaggtgctggtcttcgctgatagccaggtgaaccagaaaagcacagttgtaattcatcattttcccagcattccttcttataacgtgtccttcatctctcagactcaagtgggcgactctcaagcgtggcacagtatgacagtttggtacaagatgcaaagcgtgtctgtctacaccaacgggactgtatttgctactgatactgacattactttcactgctgtcacaaaagaaacgattcccctcgagttcgagtggtacttcggagaggatccgcctgtacgcaccacctcccggtctatcaaaaagagactgagcatcccacagtggtatcgtgtgatggtgaaggccagcaatcgaatgtcatctgtcgtctctgaaccccacgtgattcgcgtccaaaagaagatcgtggcaaatcgcctgactagtcctagttcagctttagtcaacgctagcgtggcattcgagtgctggatcaacttcggtacagatgtcgcttatctttgggattttggagatggcaccgtgtccttaggcagttcttcatccagtcatgtgtattctcgcgagggcgaatttacagtggaggtcctcgcatttaataatgtctccgccagtacacttcgtcagcaactgtttatagtatgcgagccctgtcagccccctctggtcaaaaatatgggccctggcaaggtgcagatatggaggtcccagccggtacggttaggggtcacattcgaagctgccgtgttttgtgacatctctcagggcctgagttacacatggaatctcatggacagcgagggcctccccgtgagtctccctgctgcagttgacacgcaccggcaaaccctgattcttcccagccacacactggagtatggcaactacacagcgctggcaaaggtacaaatagaggggtctgtcgtgtactctaactattgtgtgggtttggaagtccgtgcccaggcacctgtaagtgtgattagcgaggggacacacctgtttttctcgaggactactagctcgccgattgtcttgcggggaacccaaagcttcgaccccgatgacccaggtgctacattgcggtaccactgggagtgcgccaccgcaggcagcccggctcacccgtgtttcgacagcagcacagctcatcaactggatgccgctgccccaactgtctcttttgaggcccagtggctgagcgatagctacgatcaatttctggtgatgctgagagtttcgagtgggggtcggaacagttctgagaccagggtgttccttagcccttacccagatagtgccttccggtttgtacacatctcgtgggttagcttcaaagatacatttgtgaattggaatgacgaactgtctttacaggccatgtgcgaggattgcagcgagattccaaacctctcctactcatgggacctgtttctagtcaatgcaaccgagaaaaatagaattgaagttccattttgtcgggtcgttggcctgttgggttctctggggctcggagctatctcagaatctagccagttgaaccttttacctaccgaacccggaacagctgatcccgacgctacaaccacaccctttagcagagaaccctcacccgtcactctgggccagcccgcaaccagcgcccctcggggaacgcctacagaaccaatgaccggggtgtactggatcccgcctgctggagactctgccgtcctgggtgaggctcccgaagagggctcattagatctggagccaggcccacagagcaaaggctccttaatgaccggtaggtccgagagaagccagcctactcacagtccagacccccatctctctgattttgaggcctactatagcgacatccaagaagccatcccctctggcggtcgccagcctgcgaaagataccagcttccccggttctgggcctagtttgtccgcggaggaatcaccgggtgatggcgataatctggttgatcccagcctcagcgctggcagagcagagcccgtgcttatgatcgactggccaaaagctctgctcggtcgtgctgttttccagggatattcttctagtggaataaccgagcagaccgtcaccatcaagccttacagtctgtccagtggcgagacctacgtcttacaagtcagcgtggcctcaaaacacggcctgctagggaaggcccagctctacttgaccgtcaatcccgctccacgtgatatggcctgtcaggtgcagcctcaccacgggctcgaagcacataccgtgttttctgttttttgtatgtcgggtaaaccggacttccattatgagttttcttaccaaattggcaataccagtaaacataccttgtatcatggcagagacacccagtactacttcgtcctgccagcaggagaacatctggacaattacaaagtcatggtttccacagaaattacagacggtaagggttccaaagttcagccctgcacagttgtcgttacagtgttgccacgttaccatggcaacgactgcttgggagaagacctgtacaatagctcacttaagaacttatccacccttcaactgatgggatcctacactgagattcgcaactacataaccgttatcacacgcatacttagtcgtttgagtaaggaggacaagaccgctagctgcaatcagtggagcagaattcaagatgccctgatctcttctgtctgtcggctcgccttcgttgaccaggaggagatgattggatcagtgttgatgctgcgggatctggtgtcctttagtaataagttaggcttcatgagtgcagtgctcatcttaaaatataccagagcccttctggcgcagggtcagttcagcgggccattcgtgatagacaaaggagtgcggctagagctgattggattgatctcgagagtctgggaggtgtcagagcaggagaactccaaagaagaggtctatagacatgaagaaggcatcaccgtgatttcggatttgctgctgggatgcctcagcctgaaccatgtgagcaccggtcaaatggaatttaggactctcctgcactacaacttgcagagctctgtccaaagcctgggcagtgtgcaggttcacctgcctggagatctggctggacactctcccgcaggtgccgagacacagtccccgtgttatatctctcagctcatccttttcaagaaaaacccataccccggatctcaagccccaggccagattgggggagtcgtgggcttgaacctctatacctgttcaagccgcagaccaattaatcgccaatggctcaggaaaccagtcatggtggagttcggagaggaggacggtctagataaccgtcggaataagacaacatttgtgctcctccgggataaggtgaatttacaccagtttacagagctcagcgaaaatccccaggagtccttgcagattgagatcgaattttcaaaaccggtgacaagagcattccccgttatgttgttggtgcgtttcagcgaaaaaccaacccccagtgacttcctcgtgaagcagatctacttttgggacgagagtatagtccagatttacattccggcagcttcccaaaaagatgcatcggtagggtacctgtccttactcgacgccgattatgaccggaaaccccctaaccgctatctggccaaggcagtgaactacacagtccatttccagtggatcaggtgcctcttttgggataagagggaatggaagagtgagaggttttctcctcagcccggaacttcacctgagaaggtcaactgttcataccacaggctcgccgcttttgcactgctccggcgtaagctgaaagcatcctttgaggtcagtgatatttccaaacttcagtctcatcctgagaacctgctcccatccatctttatcatgggcagcgtcatactatacgggtttttggtggccaagagccggcaagtggaccatcatgagaaaaaaaaggctggatacatatttcttcaggaggcgtctctgcctggacaccagctctacgcagtggtgatagacaccgggtttagggctcccgctaggctgaccagtaaggtgtacatcgtgctctgcggggacaatgggctgtccgagacaaaggaactgtcctgtcccgagaaaccactcttcgaacgaaacagccgtcacacttttatcttatcagcacccgctcagctgggcctactgcgtaaaatcaggctatggcatgactcccggggaccttctcccggatggttcatcagtcacgtgatggtgaaagagctgcacactggacaggggtggttcttccccgctcaatgttggctttcagccggacggcacgacggcagagtagagagagagttgacctgcttgcaagggggactcggttttcggaagctgttttattgcaaatttactgagtatctagaagatttccacgtttggctgagcgtgtatagtcgaccgtcttcctctcgctatcttcacacaccacggctcacagtttcttttagcttgctttgtgtctacgcctgtttgaccgcgctggtggccgcaggaggccaagagcagcctcacttggatgtgagcccaacattggggtcattccgtgttggcctcctctgtaccctgctcgctagcccaggggctcagctcttgagcctgctctttcggctttccaaggaggcccctgggagcgcgagagttgaaccacactctccccttcgcggaggtgcacaaaccgaagcaccccatgggccaaacagttgggggagaattccagacgcacaagagcctcgaaaacagccggcttctgccatcctcagcggaagtggacgggctcaaaggaaggctgcttccgacaatggcactgcctgtcctgcgcctaagcttcaggtccacggtgccgatcactctcggacgagcctgatgggaaaatcccactgctgcccgccacacacacaggctcctagctcaggtctcgaaggtcttatgccacagtggtcccgagcactgcaaccgtggtggtcttccgcagtttgggccatttgcggaactgcatctctcgcttgctccttaggtaccggcttcctcgcctatagattcgggcaggaacaatgcgtccaatggcttcaccttctctcattatccgtggtgtgctgcatcttcatcacacagcctcttatggtgtgtctgatggcccttggcttcgcctggaagaggcgagcagataaccacttttttacagaatccctctgtgaagctacccgtgacttggactcagaactggccgagcgaagttggacccggcttccctttagctcttcctgctctattcctgactgcgctggcgaggtagagaaagttttggctgcgaggcagcaggctaggcatctgcggtgggcacaccccccttcaaaagcccaacttcggggaacacgacaacgcatgagacgggagtccagaactcgtgctgccctcagagatatctccatggatatcctcatgttgctcctgctgctttgcgtcatttatggcagattctcgcaagacgaatactcccttaatcaggccatccgaaaagaatttacccggaatgcgagaaattgtctcggagggctgcggaacatcgccgattggtgggattggagtctcaccactctgctcgatgggctatacccagggggaacgccctccgcgagagttcctggagcccagcccggagccttgggcggaaagtgctacctgatcggttcttccgtgattcgccagctgaaagtttttccaagacacctctgcaaacctcctaggccgttttctgccctgatcgaagactccatccctacgtgctctcccgaggtgggaggccctgagaatccatatttgatcgaccctgagaatcagaatgtcacactcaacggtcctggcggatgcggaacccgcgaggattgtgtgttatctttagggagaactcgcactgaagcccataccgctctgtccaggctgagagcctccatgtggatcgataggtccactcgcgctgtcagtgtgcactttacgttgtacaatcctccaacgcaactgttcacgagcgtgtccctccgtgttgaaatcctgccaactggctccctcgtgccttcatctctggttgagtcattcagcatatttagatcggacagcgccctgcagtatcatctcatgctccctcagctggtattcttagcactctcactgattcacctctgtgttcagctgtacaggatgatggataagggcgtcctatcctactggaggaaaccgaggaactggctggagctcagtgtggtgggagtaagtctgacatactacgctgtgtcaggacatttggtgaccctggctggcgatgtcacaaaccaatttcacaggggcttgtgcagagcttttatggatcttaccctgatggcgagttggaaccagagagccaggtggctgagaggcatactgctgttcctgtttaccctgaaatgcgtctatctgccgggtattcagaacacgatggcatcctgtagcagtatgatgaggcattccctcccctctatcttcgtagccggactggtcggagctctcatgctggctgcattgtctcacctccacaggtttttactgagcatgtgggtcttgcccccaggaacattcactgatgcattccccggtttgttgttccacttcccacgccgatcgcagaaggactgcctccttgggttgtccaaaagtgatcaacgggctatggcgtgctactttgggatcttactgattgtctctgctacactttgtttcggaatgctccgaggttttttgatgactcttccccagaagcgcaagtcttttcaaagcaaatcttttgtccgattaaaggacgtcaccgcatacatgtgggaaaaagtactgacttttcttcggctggaaacccccaagctggaggaggcggagatggtagaaaatcacaactattatttggatgagtttgcaaacctcctcgacgaattgctgatgaagataaatggcttaagcgactccctgcagttgccactgctcgagaaaacctcaaacaataccggtgaagctaggactgaagaaagccccttagttgacatatctagctatcaggccgcagaacccgcagatatcaaagatttttag

SEQ ID NO: 236099 - DNA, 8550 bp, Artificial Sequence
  derived and/or modified sequence
atggccgaggaggccgcccagaacatcagcgacgaccaggagagatgcctgcaggccgcctgctgcctgagcttcggcggcgagctgagcgtgagcaccgacaagagctggggcctgcacctgtgcagctgcagcccccccggcggcggcctgtgggtggaggtgtacgccaaccacgtgctgctgatgagcgacggcaagtgcggctgcccctggtgcgccctgaacggcaaggccgaggacagagagagccagagccccagcagcagcgccagcagacagaagaacatctggaagaccaccagcgaggccgccctgagcgtggtgaacgagaagacccaggccgtggtgaacgagaagacccaggcccccctggactgcgacaacagcgccgacagaatcccccacaagcccttcatcatcatcgccagagcctggagcagcggcggccccagattccaccacagaagactgtgcgccaccggcaccgccgacagcaccttcagcgccctgctgcagctgcagggcaccaccagcgccgccgccccctgcagcctgaagatggaggccagctgctgcgtgctgagactgctgtgctgcgccgaggacgtggccaccggcctgctgcccggcaccgtgaccatggagacccccaccaaggtggccagacccacccagaccagcagccagagagtgcccctgtggcccatcagccacttccccaccagccccagaagcagccacggcctgccccccggcatccccagaacccccagcttcaccgccagccagagcggcagcgagatcctgtacccccccacccagcacccccccgtggccatcctggccagaaacagcgacaacttcatgaaccccgtgctgaactgcagcctggaggtggaggccagagccccccccaacctgggcttcagagtgcacatggccagcggcgaggccctgtgcctgatgatggacttcggcgacagcagcggcgtggagatgagactgcacaacatgagcgaggccatggccgtgaccgcctaccaccagtacagcaagggcatcttcttccacctgctgcacttccagctggacatgagcacctacaaggaggccgagacccagaacaccaccctgaacgtgtacctgtgccagagcgagaacagctgcctggaggacagcgaccccagcaacctgggctacgagctgatcagcgccttcgtgaccaagggcgtgtacatgctgaaggccgtgatctacaacgagttccacggcaccgaggtggagctgggcccctactacgtggagatcggccacgaggccgtgagcgccttcatgaacagcagcagcgtgcacgaggacgaggtgctggtgttcgccgacagccaggtgaaccagaagagcaccgtggtgatccaccacttccccagcatccccagctacaacgtgagcttcatcagccagacccaggtgggcgacagccaggcctggcacagcatgaccgtgtggtacaagatgcagagcgtgagcgtgtacaccaacggcaccgtgttcgccaccgacaccgacatcaccttcaccgccgtgaccaaggagaccatccccctggagttcgagtggtacttcggcgaggacccccccgtgagaaccaccagcagaagcatcaagaagagactgagcatcccccagtggtacagagtgatggtgaaggccagcaacagaatgagcagcgtggtgagcgagccccacgtgatcagagtgcagaagaagatcgtggccaacagactgaccagccccagcagcgccctggtgaacgccagcgtggccttcgagtgctggatcaacttcggcaccgacgtggcctacctgtgggacttcggcgacggcaccgtgagcctgggcagcagcagcagcagccacgtgtacagcagagagggcgagttcaccgtggaggtgctggccttcaacaacgtgagcgccagcaccctgagacagcagctgttcatcgtgtgcgagccctgccagccccccctggtgaagaacatgggccccggcaaggtgcagatctggagaagccagcccgtgagactgggcgtgaccttcgaggccgccgtgttctgcgacatcagccagggcctgagctacacctggaacctgatggacagcgagggcctgcccgtgagcctgcccgccgccgtggacacccacagacagaccctgatcctgcccagccacaccctggagtacggcaactacaccgccctggccaaggtgcagatcgagggcagcgtggtgtacagcaactactgcgtgggcctggaggtgagagcccaggcccccgtgagcgtgatcagcgagggcacccacctgttcttcagcagaaccaccagcagccccatcgtgctgagaggcacccagagcttcgaccccgacgaccccggcgccaccctgagataccactgggagtgcgccaccgccggcagccccgcccacccctgcttcgacagcagcaccgcccaccagctggacgccgccgcccccaccgtgagcttcgaggcccagtggctgagcgacagctacgaccagttcctggtgatgctgagagtgagcagcggcggcagaaacagcagcgagaccagagtgttcctgagcccctaccccgacagcgccttcagattcgtgcacatcagctgggtgagcttcaaggacaccttcgtgaactggaacgacgagctgagcctgcaggccatgtgcgaggactgcagcgagatccccaacctgagctacagctgggacctgttcctggtgaacgccaccgagaagaacagaatcgaggtgcccttctgcagagtggtgggcctgctgggcagcctgggcctgggcgccatcagcgagagcagccagctgaacctgctgcccaccgagcccggcaccgccgaccccgacgccaccaccacccccttcagcagagagcccagccccgtgaccctgggccagcccgccaccagcgcccccagaggcacccccaccgagcccatgaccggcgtgtactggatcccccccgccggcgacagcgccgtgctgggcgaggcccccgaggagggcagcctggacctggagcccggcccccagagcaagggcagcctgatgaccggcagaagcgagagaagccagcccacccacagccccgacccccacctgagcgacttcgaggcctactacagcgacatccaggaggccatccccagcggcggcagacagcccgccaaggacaccagcttccccggcagcggccccagcctgagcgccgaggagagccccggcgacggcgacaacctggtggaccccagcctgagcgccggcagagccgagcccgtgctgatgatcgactggcccaaggccctgctgggcagagccgtgttccagggctacagcagcagcggcatcaccgagcagaccgtgaccatcaagccctacagcctgagcagcggcgagacctacgtgctgcaggtgagcgtggccagcaagcacggcctgctgggcaaggcccagctgtacctgaccgtgaaccccgcccccagagacatggcctgccaggtgcagccccaccacggcctggaggcccacaccgtgttcagcgtgttctgcatgagcggcaagcccgacttccactacgagttcagctaccagatcggcaacaccagcaagcacaccctgtaccacggcagagacacccagtactacttcgtgctgcccgccggcgagcacctggacaactacaaggtgatggtgagcaccgagatcaccgacggcaagggcagcaaggtgcagccctgcaccgtggtggtgaccgtgctgcccagataccacggcaacgactgcctgggcgaggacctgtacaacagcagcctgaagaacctgagcaccctgcagctgatgggcagctacaccgagatcagaaactacatcaccgtgatcaccagaatcctgagcagactgagcaaggaggacaagaccgccagctgcaaccagtggagcagaatccaggacgccctgatcagcagcgtgtgcagactggccttcgtggaccaggaggagatgatcggcagcgtgctgatgctgagagacctggtgagcttcagcaacaagctgggcttcatgagcgccgtgctgatcctgaagtacaccagagccctgctggcccagggccagttcagcggccccttcgtgatcgacaagggcgtgagactggagctgatcggcctgatcagcagagtgtgggaggtgagcgagcaggagaacagcaaggaggaggtgtacagacacgaggagggcatcaccgtgatcagcgacctgctgctgggctgcctgagcctgaaccacgtgagcaccggccagatggagttcagaaccctgctgcactacaacctgcagagcagcgtgcagagcctgggcagcgtgcaggtgcacctgcccggcgacctggccggccacagccccgccggcgccgagacccagagcccctgctacatcagccagctgatcctgttcaagaagaacccctaccccggcagccaggcccccggccagatcggcggcgtggtgggcctgaacctgtacacctgcagcagcagaagacccatcaacagacagtggctgagaaagcccgtgatggtggagttcggcgaggaggacggcctggacaacagaagaaacaagaccaccttcgtgctgctgagagacaaggtgaacctgcaccagttcaccgagctgagcgagaacccccaggagagcctgcagatcgagatcgagttcagcaagcccgtgaccagagccttccccgtgatgctgctggtgagattcagcgagaagcccacccccagcgacttcctggtgaagcagatctacttctgggacgagagcatcgtgcagatctacatccccgccgccagccagaaggacgccagcgtgggctacctgagcctgctggacgccgactacgacagaaagccccccaacagatacctggccaaggccgtgaactacaccgtgcacttccagtggatcagatgcctgttctgggacaagagagagtggaagagcgagagattcagcccccagcccggcaccagccccgagaaggtgaactgcagctaccacagactggccgccttcgccctgctgagaagaaagctgaaggccagcttcgaggtgagcgacatcagcaagctgcagagccaccccgagaacctgctgcccagcatcttcatcatgggcagcgtgatcctgtacggcttcctggtggccaagagcagacaggtggaccaccacgagaagaagaaggccggctacatcttcctgcaggaggccagcctgcccggccaccagctgtacgccgtggtgatcgacaccggcttcagagcccccgccagactgaccagcaaggtgtacatcgtgctgtgcggcgacaacggcctgagcgagaccaaggagctgagctgccccgagaagcccctgttcgagagaaacagcagacacaccttcatcctgagcgcccccgcccagctgggcctgctgagaaagatcagactgtggcacgacagcagaggccccagccccggctggttcatcagccacgtgatggtgaaggagctgcacaccggccagggctggttcttccccgcccagtgctggctgagcgccggcagacacgacggcagagtggagagagagctgacctgcctgcagggcggcctgggcttcagaaagctgttctactgcaagttcaccgagtacctggaggacttccacgtgtggctgagcgtgtacagcagacccagcagcagcagatacctgcacacccccagactgaccgtgagcttcagcctgctgtgcgtgtacgcctgcctgaccgccctggtggccgccggcggccaggagcagccccacctggacgtgagccccaccctgggcagcttcagagtgggcctgctgtgcaccctgctggccagccccggcgcccagctgctgagcctgctgttcagactgagcaaggaggcccccggcagcgccagagtggagccccacagccccctgagaggcggcgcccagaccgaggccccccacggccccaacagctggggcagaatccccgacgcccaggagcccagaaagcagcccgccagcgccatcctgagcggcagcggcagagcccagagaaaggccgccagcgacaacggcaccgcctgccccgcccccaagctgcaggtgcacggcgccgaccacagcagaaccagcctgatgggcaagagccactgctgccccccccacacccaggcccccagcagcggcctggagggcctgatgccccagtggagcagagccctgcagccctggtggagcagcgccgtgtgggccatctgcggcaccgccagcctggcctgcagcctgggcaccggcttcctggcctacagattcggccaggagcagtgcgtgcagtggctgcacctgctgagcctgagcgtggtgtgctgcatcttcatcacccagcccctgatggtgtgcctgatggccctgggcttcgcctggaagagaagagccgacaaccacttcttcaccgagagcctgtgcgaggccaccagagacctggacagcgagctggccgagagaagctggaccagactgcccttcagcagcagctgcagcatccccgactgcgccggcgaggtggagaaggtgctggccgccagacagcaggccagacacctgagatgggcccacccccccagcaaggcccagctgagaggcaccagacagagaatgagaagagagagcagaaccagagccgccctgagagacatcagcatggacatcctgatgctgctgctgctgctgtgcgtgatctacggcagattcagccaggacgagtacagcctgaaccaggccatcagaaaggagttcaccagaaacgccagaaactgcctgggcggcctgagaaacatcgccgactggtgggactggagcctgaccaccctgctggacggcctgtaccccggcggcacccccagcgccagagtgcccggcgcccagcccggcgccctgggcggcaagtgctacctgatcggcagcagcgtgatcagacagctgaaggtgttccccagacacctgtgcaagccccccagacccttcagcgccctgatcgaggacagcatccccacctgcagccccgaggtgggcggccccgagaacccctacctgatcgaccccgagaaccagaacgtgaccctgaacggccccggcggctgcggcaccagagaggactgcgtgctgagcctgggcagaaccagaaccgaggcccacaccgccctgagcagactgagagccagcatgtggatcgacagaagcaccagagccgtgagcgtgcacttcaccctgtacaacccccccacccagctgttcaccagcgtgagcctgagagtggagatcctgcccaccggcagcctggtgcccagcagcctggtggagagcttcagcatcttcagaagcgacagcgccctgcagtaccacctgatgctgccccagctggtgttcctggccctgagcctgatccacctgtgcgtgcagctgtacagaatgatggacaagggcgtgctgagctactggagaaagcccagaaactggctggagctgagcgtggtgggcgtgagcctgacctactacgccgtgagcggccacctggtgaccctggccggcgacgtgaccaaccagttccacagaggcctgtgcagagccttcatggacctgaccctgatggccagctggaaccagagagccagatggctgagaggcatcctgctgttcctgttcaccctgaagtgcgtgtacctgcccggcatccagaacaccatggccagctgcagcagcatgatgagacacagcctgcccagcatcttcgtggccggcctggtgggcgccctgatgctggccgccctgagccacctgcacagattcctgctgagcatgtgggtgctgccccccggcaccttcaccgacgccttccccggcctgctgttccacttccccagaagaagccagaaggactgcctgctgggcctgagcaagagcgaccagagagccatggcctgctacttcggcatcctgctgatcgtgagcgccaccctgtgcttcggcatgctgagaggcttcctgatgaccctgccccagaagagaaagagcttccagagcaagagcttcgtgagactgaaggacgtgaccgcctacatgtgggagaaggtgctgaccttcctgagactggagacccccaagctggaggaggccgagatggtggagaaccacaactactacctggacgagttcgccaacctgctggacgagctgctgatgaagatcaacggcctgagcgacagcctgcagctgcccctgctggagaagaccagcaacaacaccggcgaggccagaaccgaggagagccccctggtggacatcagcagctaccaggccgccgagcccgccgacatcaaggacttctag

SEQ ID NO: 236100 - protein, 281 aa, Artificial Sequence
  derived and/or modified sequence
MAGTWLLLLLALGCPALPTGVGGTPFPSLAPPIMLLVDGKQQMVVVCLVLDVAPPGLDSPIWFSAGNGSALDAFTYGPSPATDGTWTNLAHLSLPSEELASWEPLVCHTGPGAEGHSRSTQPMHLSGEASTARTCPQEPLRGTPGGALWLGVLRLLLFKLLLFDLLLTCSCLCDPAGPLPSPATTTRLRALGSHRLHPATETGGREATSSPRPQPRDRRWGDTPPGRKPGSPVWGEGSYLSSYPTCPAQAWCSRSALRAPSSSLGAFFAGDLPPPLQAGAA

SEQ ID NO: 236101 - DNA, 846 bp, Artificial Sequence
  derived and/or modified sequence
atggccggcacttggctattactactcctggcgctgggctgcccagctctgcccactggggtcgggggaacaccattcccctccctcgctccacccattatgcttttggtcgacggaaagcagcagatggttgtcgtttgtttggtcctagatgtagccccccccggactcgattcccccatttggttttcggcaggtaacggcagcgctttagacgccttcacatacggcccttcccccgctaccgatggtacatggaccaaccttgctcatctgtctcttcctagcgaggagctggctagttgggaacccttagtctgccacaccggccccggggctgaaggccattcgaggtcaacgcagccgatgcacctctccggggaagcatcgacagcccgaacttgtccacaggagcccttaagaggaactccaggaggagcgctgtggttgggggttctgagacttctcttattcaaactgctactttttgatttgttgctgacctgctcttgcctgtgcgaccctgccggccctctcccttcccccgcgacgactactcgactccgagcccttggaagccatcgactgcaccccgctaccgaaacagggggacgcgaagccacaagcagcccccgccctcaaccaagggatcgaagatggggcgacaccccccccggtcgcaagcccgggagccctgtttggggagagggcagctatctgtccagttaccccacctgccccgcccaggcctggtgctcgcgttccgcactgcgggccccatccagttcccttggcgccttctttgccggcgatctcccgcctcctctccaagcaggcgctgcctag

SEQ ID NO: 236102 - DNA, 846 bp, Artificial Sequence
  derived and/or modified sequence
atggccggcacctggctgctgctgctgctggccctgggctgcccagccctgcccactggagtgggcggcacccccttccccagcctggccccacccatcatgctgctggtggatggcaagcagcagatggtggtggtgtgcctggtgctggatgtggcccctcctggcctggacagccccatctggttctctgctggaaatggaagtgccctggatgccttcacctacggccccagccctgccacagatggcacctggaccaacctggcccacctgagcctgcccagcgaggagctggcctcctgggagcccctggtgtgccacactggacctggagctgagggccacagccgcagcacccagcccatgcacctgagcggggaggccagcacagcccggacctgcccccaggagcccctgcggggcacccctgggggcgccctgtggctgggcgtgctgcggctgctgctcttcaagctgctgctgtttgacctgctgctgacctgcagctgcctgtgtgaccctgctggccccctgcccagccctgccaccaccacccggctgcgggccctgggcagccaccggctgcacccagccacagagaccggcggccgggaggccaccagcagcccccggccccagccccgggaccggcgctggggagacaccccacctggcaggaagccaggcagccctgtgtggggcgagggcagctacctgagcagctaccccacctgcccagcccaggcctggtgcagccgcagcgccctgcgggcccccagcagcagcctgggcgccttctttgctggggacctgcccccacccctgcaggccggggccgcctag

SEQ ID NO: 236103 - DNA, 846 bp, Artificial Sequence
  derived and/or modified sequence
atggccggcacctggctgctgctgctgctggccctgggctgccccgccctgcctactggggtgggcggcacccctttcccttccctggctccaccgattatgcttcttgttgacggaaagcagcagatggtggttgtgtgcctcgtcctggacgtcgctcctcccggcctggacagtcctatctggttcagtgccggcaatggtagcgccctggatgcctttacctatgggccctcaccggcaactgacgggacttggactaatctggctcatttatcattgcccagtgaggagctcgcgtcttgggagccactcgtgtgtcataccggaccgggcgccgaagggcacagtcgtagtacacagcctatgcacctttccggggaggcaagtaccgcacgcacgtgtcctcaggaaccactccgaggaaccccagggggcgcactttggctaggggtactgcgcctgctgctgtttaagctgcttctgttcgacctattgctgacttgctcctgtttgtgcgatcccgctggccccctgccctcccctgcaaccacgacccggctcagggcgctggggagccaccgcctgcatccagctactgagaccggcggcagagaagccacttcttccccacggccccagcctagggataggcggtggggcgatacgccaccaggccggaaaccaggcagcccggtttggggcgaagggtcatacctgagtagttaccccacatgtccagcacaggcctggtgctccaggtctgccctgcgggctccctccagcagcctgggggctttcttcgcaggcgacttacccccccctctgcaggctggcgcggcgtag

SEQ ID NO: 236104 - DNA, 1080 bp, Artificial Sequence
  derived and/or modified sequence
tagaaggcagtcttgtgggtgcctcctcccccagccgcaactcaggtctgcagctgggtcctgcctccttccgagtgggccatggccggtacatggctgctacttctcctggcccttgggtgtccagccctacccacaggtgtgggcggcacaccctttccttctctggccccaccaatcatgctgctggtggatggaaagcagcagatggtggtggtctgcctggtccttgatgttgcaccccctggccttgacagccccatctggttctcagccggcaatggcagtgcactggatgccttcacctatggcccttccccagcaacggatggcacctggaccaacttggcccatctctccctgccttctgaggagctggcatcctgggagcctttggtctgccacactgggcctggggctgagggtcacagcaggagtacacagcccatgcatctgtcaggagaggcttctacagccaggacctgcccccaggagcctctcagggggacaccgggtggggcgctgtggctgggggtcctgcggctgctgctcttcaagctgctgctgtttgacctgctcctgacctgcagctgcctgtgcgaccccgcgggcccgctgccttcccccgcaaccaccacccgcctgcgagccctcggctcccatcgactgcacccggccacggagactgggggacgagaggccaccagctcacccagaccccagcctcgggaccgccgctggggtgacacccctccgggtcggaagcccgggagcccagtatggggggaagggtcttacctcagcagttaccccacttgcccagcacaggcctggtgctcaagatctgccctcagggctccttcctccagtcttggagcattttttgcaggtgacctgcctcctcctctgcaggctggagctgcctgagggcagggctctacctcccctgcgtcacactgtgtgaggctgtgtctctgccatccaaaagggggccccttgagaatggtgatccacccagttacaggggcatttagggagcagatgactgagaacattaaaaaagaacttaaatgacacagc

SEQ ID NO: 236105 - DNA, 846 bp, Artificial Sequence
  derived and/or modified sequence
atggcaggtacgtggctcctgttgctcctggcactggggtgtcccgcactccctaccggcgtcggcggaacaccattccctagcctggctcctcccattatgctgttggtggacggcaaacagcagatggttgttgtttgtctcgttctcgacgtcgctcccccaggactggattctcctatctggttctccgcagggaacggttcggcactggacgcctttacatatgggccatctcccgctacggatgggacatggacaaacctggcgcacctaagcctaccctcagaggaactggcaagctgggagccattagtatgccacacaggaccaggagctgagggccactcacggtctactcagcctatgcacctgagcggagaggcatctacggctcgaacatgcccacaggaaccattacggggaacgccgggaggggctctgtggctcggggtgctgagacttcttctcttcaaacttttattgtttgaccttctcttgacctgttcttgtctgtgtgatccagccggacccctcccatcccctgccaccaccacccgactgcgcgctttggggtcccaccggcttcatccagccactgagactggaggcagggaggccacatcttcgccacgtccacaacccagagataggcggtggggggatactccacctgggagaaaaccgggttctcctgtctggggcgagggcagctacttgagcagctacccaacctgtccggcacaggcgtggtgcagcagaagcgccctacgcgcaccctcctctagcctcggcgcatttttcgctggggacctcccaccaccgctgcaggccggtgccgcttag

SEQ ID NO: 236106 - DNA, 846 bp, Artificial Sequence
  derived and/or modified sequence
atggccggcacctggctgctgctgctgctggccctgggctgccccgccctgcccaccggcgtgggcggcacccccttccccagcctggccccccccatcatgctgctggtggacggcaagcagcagatggtggtggtgtgcctggtgctggacgtggccccccccggcctggacagccccatctggttcagcgccggcaacggcagcgccctggacgccttcacctacggccccagccccgccaccgacggcacctggaccaacctggcccacctgagcctgcccagcgaggagctggccagctgggagcccctggtgtgccacaccggccccggcgccgagggccacagcagaagcacccagcccatgcacctgagcggcgaggccagcaccgccagaacctgcccccaggagcccctgagaggcacccccggcggcgccctgtggctgggcgtgctgagactgctgctgttcaagctgctgctgttcgacctgctgctgacctgcagctgcctgtgcgaccccgccggccccctgcccagccccgccaccaccaccagactgagagccctgggcagccacagactgcaccccgccaccgagaccggcggcagagaggccaccagcagccccagaccccagcccagagacagaagatggggcgacaccccccccggcagaaagcccggcagccccgtgtggggcgagggcagctacctgagcagctaccccacctgccccgcccaggcctggtgcagcagaagcgccctgagagcccccagcagcagcctgggcgccttcttcgccggcgacctgcccccccccctgcaggccggcgccgcctag

SEQ ID NO: 236107 - DNA, 3378 bp, Artificial Sequence
  derived and/or modified sequence
atgaaaggcgcacggtggcggcgcgttccatgggtgagtctgagttgtttgtgtctgtgtctgttaccgcacgtggtgcccggagtcagtctgttcccatacggcgccggcgccggagacctggaattcgtgaggaggacagtcgacttcacatccccattattcaagccggcgaccggtttccccctgggctccagtctccgggattctctgtatttcacagacaacggacagatcatttttcctgaatcagactatcagatcttctcatatcccaatcccctgcctacaggctttacgggccgagatccggttgccctggttgcaccgttctgggatgacgctgatttcagtactggcagggggacaacattttaccaggagtacgaaacattttatggcgagcacagcctcctcgttcagcaggccgagagttggattcggaagatgaccaacaacggcggttacaaggcccggtgggcgctaaaagtaacatgggtgaatgcacacgcctaccccgcccagtggacgctcggatctaacacgtatcaggccattctgtctaccgacggttctcgaagttacgcgttattcttatatcagagtggtggcatgcaatgggacgtggctcaacgctctgggaaccctgtgctcatgggtttctcaagtggcgatggttactttgaaaactctcctttgatgtctcaaccggtgtgggagagataccggcccgatcgcttcctaaactcaaacagcggactgcaagggctgcagttttaccggctgcaccgtgaggagcggcccaactaccggctcgagtgcctgcagtggcttaaatctcaacctcgttggccatcttggggctggaatcaagtatcctgtccctgcagttggcagcagggccgccgcgacctacggtttcagcccgtgtcaattggtcgatggggacttggttcgcgccagctgtgctctttcaccagctggagggggggggtatgttgtagctacgggccctggggcgagtttcgcgagggctggcacgtccaaaggccgtggcaactcgcccaggaactcgaacctcaatcctggtgttgcaggtggaatgacaaaccctacctgtgcgcgctgtaccagcagcgccgccctcatgttggctgcgccacctacaggcccccgcaaccagcttggatgttcggggaccctcatatcaccaccctggacggcgtgtcatataccttcaatggcctaggcgacttcttgcttgtaggagctcaggacgggaatagctcctttctgctgcaggggcgcacagctcagaccggctctgctcaggctacaaactttattgcttttgcagcccagtaccggtctagctcactcgggcccgtgacggtgcagtggctactcgagcctcatgatgccatcagagtacttctggacaaccagacagtaaccttccaacccgatcatgaagacgggggaggtcaggagacgttcaatgccaccggagtgctactatcccgcaatggctcggaagtgtctgcgagcttcgacggctgggctaccgtgtccgttatcgctctctctaatattcttcatgcctcagcctcgcttccccccgaataccagaacaggaccgaggggctcctaggagtttggaataacaatccagaagatgactttcgcatgccgaacggttcaactataccccctgggtctccagaggagatgctatttcacttcgggatgacatggcaaataaatggaaccggcctgctaggtaaacgaaatgatcaactcccgtctaattttacccccgtgttctacagtcaactgcaaaagaacagctcctgggccgagcacctgatctccaattgcgatggggactccagctgcatctatgataccttagccttgaggaacgcaagcattggcctgcacacacgagaagtgagcaagaactacgaacaggctaacgcgactctaaaccaatatcctcccagcattaatgggggccgggtgatcgaggcttacaaagggcagacaactctgattcaatacacgtctaacgcggaggacgccaacttcacattgagggactcttgcaccgatctcgagctgttcgagaacggaactctgctctggacccctaagagtctggaaccatttaccctggagatactcgctcgcagcgcaaagatcgggttggcatcagcactgcaacctcggacggtcgtctgccactgcaacgctgaatctcaatgtctgtataatcagactagtcgagttggaaactcatccctggaggtagccgggtgcaagtgcgatggcggtaccttcggtcgctattgtgaaggatctgaagatgcatgcgaagagccatgctttcccagcgttcattgtgtgcccgggaaggggtgcgaggcctgtccccctaacctgacaggagacggacgacattgtgctgcattaggaagctcattcctttgccagaatcaatcgtgtcctgtgaactattgctataatcagggacactgttatatctcacagacactcggctgtcagcccatgtgtacatgtccccccgcatttacagactccagatgttttctcgctgggaacaattttagtcctacagtgaatctggagcttcctctgagggttattcaactgttgctttccgaggaagaaaatgccagtatggcggaagtaaacgcttcagtggcttaccggctcggcaccctggatatgcgagcctttctccgaaattctcaggtggagcggatcgattctgcagctcctgccagcggaagtcctatccagcactggatggtgattagcgagttccagtataggccaagggggcctgtgattgactttctcaataaccagcttcttgctgcagtggttgaagcgtttctctaccatgtgccgcgacgaagcgaggaaccccggaatgacgtcgtttttcagcccatcagtggcgaggatgtgagggacgttactgccctgaacgtgtccactcttaaagcttatttccgttgcgacggctacaagggatacgatctggtctactcacctcagtctggtttcacgtgcgtgtccccttgctccaggggctactgcgaccacggtgggcaatgccaacacttgccctctggccctcgatgctcttgtgtaagtttttcaatctacacagcctggggcgagcactgcgaacatctcagcatgaaattggatgcgttcttcggaatcttctttggcgcactgggagggttgctccttctgggagtgggcacatttgtggtgctgaggttctggggatgctcgggtgcgagattcagctacttcctgaattcagctgaggccttaccatag

SEQ ID NO: 236108 - DNA, 3378 bp, Artificial Sequence
  derived and/or modified sequence
atgaagggggcccgctggaggagagtgccctgggtgtccctgagctgcctgtgcctgtgcctgctgccccacgtggtgcctggggtgtccctcttcccctacggggccggggccggggacctggagtttgtgagaagaacagtggacttcaccagccccctcttcaagccagccaccggcttccccctgggcagcagcctgcgggacagcctgtacttcacagacaatggccagatcatcttccctgagagtgactaccagatcttctcctaccccaaccccctgcccaccggcttcaccggccgggaccctgtggccctggtggcccccttctgggatgatgctgacttcagcacaggccggggcaccaccttctaccaggagtatgagaccttctatggagagcacagcctgctggtgcagcaggccgagagctggatcaggaagatgaccaacaatggaggctacaaggcccgctgggccctgaaggtgacctgggtgaatgcccacgcctacccagcccagtggaccctgggcagcaacacctaccaggccatcctgagcacagatggcagccgctcctatgccctcttcctgtaccagagcggcggcatgcagtgggatgtggcccagaggagcggcaaccctgtgctgatgggcttcagcagtggagatggctactttgagaacagccccctgatgagccagcctgtgtgggagcgctacagaccagaccgcttcctgaacagcaacagcggcctgcagggcctgcagttctaccgcctgcaccgggaggagcggcccaactaccgcctggagtgcctgcagtggctgaagagccagccccgctggcccagctggggctggaaccaggtgtcctgcccctgctcctggcagcagggccggcgggacctgcgcttccagcctgtgtccatcggccgctggggcctgggcagccggcagctgtgcagcttcacctcctggagaggaggagtgtgctgcagctatggcccctggggcgagttccgggagggctggcacgtgcagaggccctggcagctggcccaggagctggagccccagagctggtgctgccgctggaatgacaagccctacctgtgtgccctgtaccagcagaggcggccccacgtgggctgtgccacctacagaccaccccagcctgcctggatgtttggagacccccacatcaccaccctggatggagtgtcctacaccttcaacggcctgggggacttcctgctggtgggcgcccaggacggcaacagcagcttcctgctgcagggccgcacagcccagacaggcagcgcccaggccaccaacttcatcgcctttgctgcccagtaccgcagcagcagcctgggccctgtgacagtgcagtggctgctggagccccatgatgccatccgggtgctgctggacaaccagacagtgaccttccagcctgaccatgaagatggcggcggccaggagaccttcaatgccaccggggtgctgctgagcagaaatggaagtgaggtgtctgccagctttgatggctgggccaccgtgtctgtcatcgccctgagcaacatcctgcacgccagcgccagcctgcccccagagtaccagaacagaacagagggcctgctgggcgtgtggaacaacaacccagaagatgacttcaggatgcccaacggcagcaccatccccccaggcagccctgaggagatgctgttccacttcggcatgacctggcagatcaatggcaccggcctgctgggcaagagaaatgaccagctgcccagcaacttcacccctgtgttctacagccagctgcagaagaacagctcctgggccgagcacctgatcagcaactgtgatggagacagcagctgcatctatgacaccctggccctgagaaatgccagcatcggcctgcacacccgggaggtgtccaagaactatgagcaggccaatgccaccctgaaccagtacccacccagcatcaatggaggccgggtgattgaggcctacaagggccagaccaccctcatccagtacaccagcaatgcagaagatgccaacttcaccctgcgggacagctgcacagacctggagctgtttgaaaatggcaccctgctgtggacccccaagagcctggagcccttcaccctggagatcctggcccggagcgccaagattggcctggccagcgccctgcagcccaggacagtggtgtgccactgcaatgctgagagccagtgcctgtacaaccagaccagccgggtgggcaacagcagcctggaggtggccggctgcaagtgtgatggcggcaccttcggccgctactgtgagggctctgaagatgcctgtgaggagccctgcttccccagcgtgcactgtgtgcctgggaagggctgtgaggcctgcccccccaacctgactggagatggccgccactgtgccgccctgggcagcagcttcctgtgccagaaccagagctgccctgtgaactactgctacaaccagggccactgctacatcagccagaccctgggctgccagcccatgtgcacctgccccccagccttcacagacagccgctgcttcctggccggcaacaacttcagccccaccgtgaacctggagctgcccctgcgggtcatccagctgctgctgtctgaggaggagaatgcctccatggccgaggtgaatgcctctgtggcctaccgcctgggcaccctggacatgagggccttcctgaggaacagccaggtggagagaattgattctgctgccccagccagcggcagccccatccagcactggatggtgatcagcgagttccagtaccggccccggggccctgtgattgacttcctgaacaaccagctgctggccgctgtggtggaggccttcctgtaccacgtgcccaggagaagtgaggagcccagaaatgatgtggtgttccagcccatcagcggggaggatgtgagagatgtgacagccctgaatgtgtccaccctgaaggcctacttccgctgtgatggctacaagggctatgacctggtgtacagcccccagagcggcttcacctgtgtgagcccctgcagccggggctactgtgaccacggcggccagtgccagcacctgcccagcggcccccgctgcagctgtgtgtccttcagcatctacacagcctggggcgagcactgtgagcacctgtccatgaagctggatgccttcttcggcatcttctttggagccctgggcggcctgctgctgctgggcgtgggcacctttgtggtgctgcgcttctggggctgcagcggggcccgcttctcctacttcctgaacagcgctgaggccctgccctag

SEQ ID NO: 236109 - DNA, 3829 bp, Artificial Sequence
  derived and/or modified sequence
ggagcttccccagggagccagggggacttttgccgcagccatgaagggggcacgctggaggagggtcccctgggtgtccctgagctgcctgtgtctctgcctccttccgcatgtggtcccaggagtttccctcttcccctatggggcaggcgccggggacctggagttcgtcaggaggaccgtggacttcacctccccactcttcaagccggcgactggcttcccccttggctcctctctccgtgattccctctacttcacagacaatggccagatcatcttcccagagtcagactaccagattttctcctaccccaacccactcccaacaggcttcacaggccgggaccctgtggccctggtggctccgttctgggacgatgctgacttctccactggtcgggggaccacattttatcaggaatacgagacgttctatggtgaacacagcctgctagtccagcaggccgagtcttggattagaaagatgacaaacaacgggggctacaaggccaggtgggccctaaaggtcacgtgggtcaatgcccacgcctatcctgcccagtggaccctcgggagcaacacctaccaagccatcctctccacggacgggagcaggtcctatgccctgtttctctaccagagcggtgggatgcagtgggacgtggcccagcgctcaggcaacccggtgctcatgggcttctctagtggagatggctatttcgaaaacagcccactgatgtcccagccagtgtgggagaggtatcgccctgatagattcctgaattccaactcaggcctccaagggctgcagttctacaggctacaccgggaagaaaggcccaactaccgtctcgagtgcctgcagtggctgaagagccagcctcggtggcccagctggggctggaaccaggtctcctgcccttgttcctggcagcagggacgacgggacttacgattccaacccgtcagcataggtcgctggggcctcggcagtaggcagctgtgcagcttcacctcttggcgaggaggcgtgtgctgcagctacgggccctggggagagtttcgtgaaggctggcacgtgcagcgtccttggcagttggcccaggaactggagccacagagctggtgctgccgctggaatgacaagccctacctctgtgccctgtaccagcagaggcggccccacgtgggctgtgctacatacaggcccccacagcccgcctggatgttcggggacccccacatcaccaccttggatggtgtcagttacaccttcaatgggctgggggacttcctgctggtcggggcccaagacgggaactcctccttcctgcttcagggccgcaccgcccagactggctcagcccaggccaccaacttcatcgcctttgcggctcagtaccgctccagcagcctgggccccgtcacggtccaatggctccttgagcctcacgacgcaatccgtgtcctgctggataaccagactgtgacatttcagcctgaccatgaagacggcggaggccaggagacgttcaacgccaccggagtcctcctgagccgcaacggctctgaggtctcggccagcttcgacggctgggccaccgtctcggtgatcgcgctctccaacatcctccacgcctccgccagcctcccgcccgagtaccagaaccgcacggaggggctcctgggggtctggaataacaatccagaggacgacttcaggatgcccaatggctccaccattcccccagggagccctgaggagatgcttttccactttggaatgacctggcagatcaacgggacaggcctccttggcaagaggaatgaccagctgccttccaacttcacccctgttttctactcacaactgcaaaaaaacagctcctgggctgaacatttgatctccaactgtgacggagatagctcatgcatctatgacaccctggccctgcgcaacgcaagcatcggacttcacacgagggaagtcagtaaaaactacgagcaggcgaacgccaccctcaatcagtacccgccctccatcaatggtggtcgtgtgattgaagcctacaaggggcagaccacgctgattcagtacaccagcaatgctgaggatgccaacttcacgctcagagacagctgcaccgacttggagctctttgagaatgggacgttgctgtggacacccaagtcgctggagccattcactctggagattctagcaagaagtgccaagattggcttggcatctgcactccagcccaggactgtggtctgccattgcaatgcagagagccagtgtttgtacaatcagaccagcagggtgggcaactcctccctggaggtggctggctgcaagtgtgacgggggcaccttcggccgctactgcgagggctccgaggatgcctgtgaggagccgtgcttcccgagtgtccactgcgttcctgggaagggctgcgaggcctgccctccaaacctgactggggatgggcggcactgtgcggctctggggagctctttcctgtgtcagaaccagtcctgccctgtgaattactgctacaatcaaggccactgctacatctcccagactctgggctgtcagcccatgtgcacctgccccccagccttcactgacagccgctgcttcctggctgggaacaacttcagtccaactgtcaacctagaacttcccttaagagtcatccagctcttgctcagtgaagaggaaaatgcctccatggcagaagtcaacgcctcggtggcatacagactggggaccctggacatgcgggcctttctccgcaacagccaagtggaacgaatcgattctgcagcaccggcctcgggaagccccatccaacactggatggtcatctcggagttccagtaccgccctcggggcccggtcattgacttcctgaacaaccagctgctggccgcggtggtggaggcgttcttataccacgttccacggaggagtgaggagcccaggaacgacgtggtcttccagcccatctccggggaagacgtgcgcgatgtgacagccctgaacgtgagcacgctgaaggcttacttcagatgcgatggctacaagggctacgacctggtctacagcccccagagcggcttcacctgcgtgtccccgtgcagtaggggctactgtgaccatggaggccagtgccagcacctgcccagtgggccccgctgcagctgtgtgtccttctccatctacacggcctggggcgagcactgtgagcacctgagcatgaaactcgacgcgttcttcggcatcttctttggggccctgggcggcctcttgctgctgggggtcgggacgttcgtggtcctgcgcttctggggttgctccggggccaggttctcctatttcctgaactcagctgaggccttgccttgaaggggcagctgtggcctaggctacctcaagactcacctcatccttaccgcacatttaaggcgccattgcttttgggagactggaaaagggaaggtgactgaaggctgtcaggattcttcaaggagaatgaatactgggaatcaagacaagactataccttatccataggcgcaggtgcacagggggaggccataaagatcaaacatgcatggatgggtcctcacgcagacacacccacagaaggacactagcctgtgcacgcgcgcgtgcacacacacacacacacacacgagttcataatgtggtgatggccctaagttaagcaaaatgcttctgcacacaaaactctctggtttacttcaaattaactctatttaaataaagtctctctgactttttgtgtctccaaaa

SEQ ID NO: 236110 - DNA, 3378 bp, Artificial Sequence
  derived and/or modified sequence
atgaagggcgcccggtggcggcgggtgccctgggtgagcctgagctgtctctgcctctgcctgctgccacacgtggtgcctggagtttccttattcccgtatggagccggtgcaggcgatctggagtttgtaaggcgcacggtagactttactagtccactgttcaagcctgctacgggctttccgctgggttcctctcttagagactctttgtactttaccgacaatgggcaaatcatctttcccgagtctgactaccaaatctttagctacccaaacccactccccaccggctttaccggtcgggatcctgtggctttggtggcccccttctgggatgatgcagacttctctactggtcgggggacaacgttctatcaagagtatgagaccttttatggggagcactcacttttggtgcagcaggctgaatcatggatccgtaagatgactaataacggggggtacaaggcccgatgggctctgaaggtaacgtgggtcaacgcccacgcgtaccctgcccagtggacactggggtccaatacatatcaggcgatcctttccaccgatggaagcaggtcgtatgcgctgtttctgtatcagagtggaggtatgcagtgggacgttgcacagaggtccgggaaccccgtcctgatgggcttttcgagtggcgacggttattttgagaacagtcccttgatgtctcaaccggtgtgggagaggtacagacccgaccgcttcctcaatagtaactccggactccagggactgcagttttacaggcttcaccgggaggagcgcccaaattatagactggagtgcctgcaatggttaaagagccagcctcggtggccatcgtggggatggaaccaggtatcatgcccctgctcttggcaacagggtcggagggacttgcgcttccaacccgtgtccataggcagatgggggcttggcagcagacagttatgcagtttcaccagctggcgcgggggggtttgctgctcctacggaccctggggtgagttcagggaaggatggcatgtccagcggccttggcagctggctcaggagctcgagccacagagttggtgttgccgctggaatgacaaaccatacttgtgtgccctatatcagcagcggaggcctcacgtcggctgtgccacctaccggcctcctcagccagcgtggatgtttggggaccctcacatcaccaccctagatggagtctcttacacatttaacggtctgggtgatttcctgcttgtgggcgcgcaggatgggaattcttccttcctgctgcagggccgtaccgcacagactggatcagcacaggccactaatttcattgcctttgccgcccagtacagatcttcaagtcttggacccgttacagtgcagtggctgctggaacctcatgacgctattcgcgttctgctggataaccagaccgtaacgtttcagccagaccacgaggatggcggtggccaggagactttcaacgcaaccggcgtcctgctttcccgaaatgggtcagaggtctcagctagttttgatggatgggctactgtctccgtgatcgctctgagcaatattctacatgcatccgcttcactcccccctgagtaccagaataggaccgagggccttctgggagtgtggaataataatcctgaagatgatttccgcatgccaaacggcagcacgatcccccctggcagccctgaggagatgctgttccattttgggatgacctggcagataaacggcactggcctgctgggaaaaagaaacgaccagttgccctccaattttaccccagtgttctacagtcagcttcaaaaaaatagtagctgggccgagcacctaatctcaaattgcgatggcgactcttcatgtatttatgatactctagcccttcggaacgcctctatcggactgcatacccgcgaggtgagcaaaaactacgagcaggccaacgctacactgaatcaatatcccccctcaattaatggcggccgggtgatcgaagcctacaaagggcagacgactctcattcagtatacctcgaacgccgaggatgccaactttaccctgcgggattcttgtacagatttagaattattcgagaatggcacacttctctggacccctaagtctctggagccttttactctggaaattttagccaggagcgctaagattgggctagctagtgcactgcaacccaggacagtcgtgtgtcattgcaatgctgagtctcagtgtttgtataaccagaccagcagagtgggcaacagttcgctggaggtagctggatgcaagtgcgatggaggtacctttggccggtactgtgaagggtcagaagatgcatgtgaggagccatgcttccccagtgtgcactgtgttcccggtaaaggatgtgaagcctgtccacccaacctcacaggcgatggtagacattgcgccgccctgggatcaagtttcttatgtcagaatcagtcatgtccagtaaactactgctataaccaaggccactgctacatctctcaaaccctgggttgccagccaatgtgcacctgtcctcccgcctttacagatagcaggtgtttcctcgcaggaaacaacttctctcctacagtaaatctagaactgcccctgcgcgtaattcaactcctgctctccgaagaggagaacgcaagcatggccgaagttaacgcatctgtcgcctacaggctgggaacactcgacatgagagcctttctacgcaactcacaggtggagagaatagactcggcggcacctgcctccggaagccctattcagcactggatggtgatttcagaattccagtatcgaccgagaggcccagtgattgatttcctgaataatcagctgttggctgccgttgtggaggccttcctgtaccacgttccccggcggagcgaagaaccacggaacgatgtggtatttcagcctatttcaggtgaagacgtaagggacgttaccgccctgaacgttagcacactgaaagcgtactttcggtgtgacgggtacaaaggatacgatctggtatacagcccccagagcgggtttacatgtgtctcaccctgtagccggggatactgtgaccacggtggccagtgtcagcatctgccaagtggacctcggtgctcttgcgtgagtttcagcatctacacagcctggggagagcattgtgagcatctctctatgaaattagacgcttttttcggcattttcttcggggctctgggcggcctcttactgctgggagtaggaacctttgtcgtcttgcgcttttggggatgctctggagctcgattctcgtactttctgaacagtgcagaagcgctcccttag

SEQ ID NO: 236111 - DNA, 3378 bp, Artificial Sequence
  derived and/or modified sequence
atgaagggtgcccgttggcggcgtgtgccctgggtgtctctcagctgcctctgcctgtgcttgctcccccacgtggttcccggagtttcactgttcccttatggagccggagccggtgatctggaattcgtcagacggacagtcgactttactagccccttgttcaaacctgcgactggattccctctgggcagctcactccgagacagcctctacttcacagataacggccaaatcatcttccctgaaagcgactaccaaatatttagttaccccaatccgctgcctacgggctttactggtagggatcccgtcgctttggtggccccattttgggacgatgctgacttcagcaccggacgcggaaccaccttctaccaggagtatgagaccttctatggcgagcactcactgctcgtacagcaagccgaaagttggattcgtaagatgacgaacaatggaggttacaaagccaggtgggctctgaaggttacatgggtaaatgcgcatgcctaccccgctcagtggaccctcggcagtaacacatatcaggcaatcctctcgactgatggatccaggagttacgccctctttctgtatcagtcaggcggtatgcagtgggacgtcgcccagcggtcgggcaacccagttcttatggggttctcgagtggggacgggtattttgagaactccccactgatgagccagcctgtatgggaacgctaccggcctgatcgatttttgaactcaaacagtggcctgcagggtctccaattctatcgacttcacagagaagaacgacctaattacagattagaatgtctgcagtggctgaaaagccagccacgatggcccagctggggctggaatcaggtcagttgtccttgtagctggcagcaggggagaagagatttgcgctttcaacccgtgtccatagggagatgggggctcggctcccgacaactgtgctctttcactagttggcgaggtggtgtgtgttgcagctacgggccttggggcgagtttagagagggctggcacgtgcagaggccatggcagctggcccaggagctggagccgcagagctggtgctgtcggtggaatgataagccctacttgtgcgccctgtatcaacagcggcgtccacacgttggctgcgccacctatcgacctccccaacctgcatggatgttcggggatccccacataactacattggatggggtgagttatacatttaatggactgggagacttcctcctggttggcgcacaggatggaaactccagtttcttgctgcagggacggaccgcccagactggaagtgcccaggccacaaacttcatagcttttgccgctcagtaccgatcctcttctctgggtccagttacagtgcagtggctgttggaacctcacgatgcgattcgggtcctattagacaaccagactgtaacgtttcagcctgatcatgaggacgggggagggcaagagacttttaatgccacgggagtactgctttctagaaatgggagcgaagtgagcgcatcatttgacggatgggcgaccgtgtcagtgatcgccctgagtaacatactccatgcaagcgcgtccctgccacccgaatatcagaatcgtacagagggcctgctgggtgtgtggaacaataatccagaagacgacttcagaatgcccaatgggagcaccattcctcctgggtcccctgaagaaatgttatttcatttcggcatgacatggcagatcaacgggaccgggctacttggaaaacgtaatgaccagcttccgtctaattttactcccgtgttttattcacagctccagaaaaactcatcatgggctgagcacttaattagcaattgcgacggagattcttcatgcatctacgatacgctggctttacggaatgccagcatcggccttcacacaagggaagtatccaaaaactacgaacaggccaatgctactctcaaccagtaccccccaagtatcaacggtgggagagttatcgaagcctacaaaggccagaccacactgattcagtacacctcgaatgccgaggacgcgaacttcaccctcagagatagttgcacggatctggagctcttcgagaatggtactttactctggacccccaagagtctcgagccattcacactggaaatactggccagatcggccaagattggcctggcctccgcgctccaacctcgtaccgtcgtctgccattgcaacgccgagtcccagtgcctctacaaccagacgtctagagtcggcaattcttccctggaggtggccggttgcaaatgcgatgggggaacgttcgggcgttattgcgagggaagcgaagacgcatgtgaagagccttgtttcccatccgtgcactgtgtcccaggtaaggggtgtgaggcttgtcctcccaatctcactggcgacgggcgtcattgcgctgcccttggctcttcctttctctgtcagaaccaatcctgccctgtcaattactgttacaaccaggggcattgttacattagccaaaccctgggttgtcagcccatgtgcacctgcccaccggcatttacagatagccgatgctttcttgcaggcaataacttcagtccgactgtcaacctagaacttcctctacgggtcattcagctccttttgagtgaagaggagaacgcttccatggccgaagttaatgcatccgtagcctaccgcctcggaaccctggacatgcgtgctttcctgagaaatagtcaagtggagcgcatagacagcgccgctcccgcttccggatcaccaattcagcactggatggttatcagcgaattccaataccggccaaggggaccagtgatagacttcctgaacaatcaattactggcagctgtggtggaggcgtttctctaccacgtacccagacgaagcgaagagccaagaaatgacgtggtgttccaacctatctccggcgaagacgtgcgagatgtgactgccctgaacgtgagcacactcaaggcctattttcggtgcgacggttacaaaggctacgatttggtctatagcccccagagtggcttcacatgtgtctccccctgtagccggggttactgtgaccacggagggcaatgtcagcacctgccgtccgggccacggtgcagttgcgtgtctttcagtatatatacagcatggggggagcactgcgagcacttatccatgaagctggatgctttcttcggcatcttctttggggctctgggcggattgcttcttctgggggtaggcacctttgtggttctgagattctggggatgctccggggctcggttcagctacttcttgaactcggcggaggccctcccatag

SEQ ID NO: 236112 - DNA, 3378 bp, Artificial Sequence
  derived and/or modified sequence
atgaagggcgccagatggagaagagtgccctgggtgagcctgagctgcctgtgcctgtgcctgctgccccacgtggtgcccggcgtgagcctgttcccctacggcgccggcgccggcgacctggagttcgtgagaagaaccgtggacttcaccagccccctgttcaagcccgccaccggcttccccctgggcagcagcctgagagacagcctgtacttcaccgacaacggccagatcatcttccccgagagcgactaccagatcttcagctaccccaaccccctgcccaccggcttcaccggcagagaccccgtggccctggtggcccccttctgggacgacgccgacttcagcaccggcagaggcaccaccttctaccaggagtacgagaccttctacggcgagcacagcctgctggtgcagcaggccgagagctggatcagaaagatgaccaacaacggcggctacaaggccagatgggccctgaaggtgacctgggtgaacgcccacgcctaccccgcccagtggaccctgggcagcaacacctaccaggccatcctgagcaccgacggcagcagaagctacgccctgttcctgtaccagagcggcggcatgcagtgggacgtggcccagagaagcggcaaccccgtgctgatgggcttcagcagcggcgacggctacttcgagaacagccccctgatgagccagcccgtgtgggagagatacagacccgacagattcctgaacagcaacagcggcctgcagggcctgcagttctacagactgcacagagaggagagacccaactacagactggagtgcctgcagtggctgaagagccagcccagatggcccagctggggctggaaccaggtgagctgcccctgcagctggcagcagggcagaagagacctgagattccagcccgtgagcatcggcagatggggcctgggcagcagacagctgtgcagcttcaccagctggagaggcggcgtgtgctgcagctacggcccctggggcgagttcagagagggctggcacgtgcagagaccctggcagctggcccaggagctggagccccagagctggtgctgcagatggaacgacaagccctacctgtgcgccctgtaccagcagagaagaccccacgtgggctgcgccacctacagacccccccagcccgcctggatgttcggcgacccccacatcaccaccctggacggcgtgagctacaccttcaacggcctgggcgacttcctgctggtgggcgcccaggacggcaacagcagcttcctgctgcagggcagaaccgcccagaccggcagcgcccaggccaccaacttcatcgccttcgccgcccagtacagaagcagcagcctgggccccgtgaccgtgcagtggctgctggagccccacgacgccatcagagtgctgctggacaaccagaccgtgaccttccagcccgaccacgaggacggcggcggccaggagaccttcaacgccaccggcgtgctgctgagcagaaacggcagcgaggtgagcgccagcttcgacggctgggccaccgtgagcgtgatcgccctgagcaacatcctgcacgccagcgccagcctgccccccgagtaccagaacagaaccgagggcctgctgggcgtgtggaacaacaaccccgaggacgacttcagaatgcccaacggcagcaccatcccccccggcagccccgaggagatgctgttccacttcggcatgacctggcagatcaacggcaccggcctgctgggcaagagaaacgaccagctgcccagcaacttcacccccgtgttctacagccagctgcagaagaacagcagctgggccgagcacctgatcagcaactgcgacggcgacagcagctgcatctacgacaccctggccctgagaaacgccagcatcggcctgcacaccagagaggtgagcaagaactacgagcaggccaacgccaccctgaaccagtacccccccagcatcaacggcggcagagtgatcgaggcctacaagggccagaccaccctgatccagtacaccagcaacgccgaggacgccaacttcaccctgagagacagctgcaccgacctggagctgttcgagaacggcaccctgctgtggacccccaagagcctggagcccttcaccctggagatcctggccagaagcgccaagatcggcctggccagcgccctgcagcccagaaccgtggtgtgccactgcaacgccgagagccagtgcctgtacaaccagaccagcagagtgggcaacagcagcctggaggtggccggctgcaagtgcgacggcggcaccttcggcagatactgcgagggcagcgaggacgcctgcgaggagccctgcttccccagcgtgcactgcgtgcccggcaagggctgcgaggcctgcccccccaacctgaccggcgacggcagacactgcgccgccctgggcagcagcttcctgtgccagaaccagagctgccccgtgaactactgctacaaccagggccactgctacatcagccagaccctgggctgccagcccatgtgcacctgcccccccgccttcaccgacagcagatgcttcctggccggcaacaacttcagccccaccgtgaacctggagctgcccctgagagtgatccagctgctgctgagcgaggaggagaacgccagcatggccgaggtgaacgccagcgtggcctacagactgggcaccctggacatgagagccttcctgagaaacagccaggtggagagaatcgacagcgccgcccccgccagcggcagccccatccagcactggatggtgatcagcgagttccagtacagacccagaggccccgtgatcgacttcctgaacaaccagctgctggccgccgtggtggaggccttcctgtaccacgtgcccagaagaagcgaggagcccagaaacgacgtggtgttccagcccatcagcggcgaggacgtgagagacgtgaccgccctgaacgtgagcaccctgaaggcctacttcagatgcgacggctacaagggctacgacctggtgtacagcccccagagcggcttcacctgcgtgagcccctgcagcagaggctactgcgaccacggcggccagtgccagcacctgcccagcggccccagatgcagctgcgtgagcttcagcatctacaccgcctggggcgagcactgcgagcacctgagcatgaagctggacgccttcttcggcatcttcttcggcgccctgggcggcctgctgctgctgggcgtgggcaccttcgtggtgctgagattctggggctgcagcggcgccagattcagctacttcctgaacagcgccgaggccctgccctag

SEQ ID NO: 236113 - protein, 369 aa, Artificial Sequence
  derived and/or modified sequence
MKSPEKKRRKSNTQGPAYSHLTEFAPPPTPMVDHLVASNPFEDDFGAPKVGVAAPPFLGSPVPFGGFRVQGGMAGQVPPGYSTGGGGGPQPLRRQPPPFPPNPMGPAFNMPPQGPGYPPPGNMNFPSQPFNQPLGQNFSPPSGQMMPGPVGGFGPMISPTMGQPPRAELGPPSLSQRFAQPGAPFGPSPLQRPGQGLPSLPPNTSPFPGPDPGFPGPGGEDGGKPLNPPASTAFPQEPHSGSPAAAVNGNQPSFPPNSSGRGGGTPDANSLAPPGKAGGGSGPQPPPGLVYPCGACRSEVNDDQDAILCEASCQKWFHRECTGMTESAYGLLTTEASAVWACDLCLKTKEIQSVYIREGMGQLVAANDG

SEQ ID NO: 236114 - protein, 406 aa, Artificial Sequence
  derived and/or modified sequence
MAASAPPPPDKLEGGGGPAPPPAPPSTGRKQGKAGLQMKSPEKKRRKSNTQGPAYSHLTEFAPPPTPMVDHLVASNPFEDDFGAPKVGVAAPPFLGSPVPFGGFRVQGGMAGQVPPGYSTGGGGGPQPLRRQPPPFPPNPMGPAFNMPPQGPGYPPPGNMNFPSQPFNQPLGQNFSPPSGQMMPGPVGGFGPMISPTMGQPPRAELGPPSLSQRFAQPGAPFGPSPLQRPGQGLPSLPPNTSPFPGPDPGFPGPGGEDGGKPLNPPASTAFPQEPHSGSPAAAVNGNQPSFPPNSSGRGGGTPDANSLAPPGKAGGGSGPQPPPGLVYPCGACRSEVNDDQDAILCEASCQKWFHRECTGMTESAYGLLTTEASAVWACDLCLKTKEIQSVYIREGMGQLVAANDG

SEQ ID NO: 236115 - DNA, 510 bp, Artificial Sequence
  derived and/or modified sequence
atggtgccccgggccccaccctgtgcctggctgcggcctggaagaagagcccaggccggggagggcccccgggaccctggaaatgctgcctggaggaccaggagaacaggcttccctgaggccaccggccctgcccggcacctgcagctgctgtatgtggactttggccgctggacccacggccggcctgtgcccctgtgcagagctggctggaggccccagtgccctggagctgctgctgccctgggcctggccggcctgggggaccacatctggcccccaggccgcacagtgccccaggaccccccagcctgggccccacccagcagcctggcccacagcctgggcgcccctgtgggcgctggggccgccggctgcccctgtggccctgccatccacaggcctgcccacgccgccagccccagcacctgcctgcccaccccaccccagccccccaccagccacctggaggagaccatgggccctgcccccccagcccctggctgctag

SEQ ID NO: 236116 - DNA, 1110 bp, Artificial Sequence
  derived and/or modified sequence
atgaaatcccctgaaaagaagcggcggaagagtaacacacagggacccgcctattcacacctgaccgagtttgctccacctcccaccccaatggtggatcacttggtagcatcaaacccatttgaagatgattttggggccccgaaagtgggagtagccgctccaccattcctcggctcccctgtgccattcggcgggttcagagtgcagggaggcatggcagggcaggtcccccctggctacagtacaggtggcggcggcgggccccagcctctgcgccggcagccacctccattccctccgaatcccatggggcccgccttcaatatgcctccacagggtccaggctacccccccccaggtaacatgaatttcccaagtcaacccttcaaccaaccattagggcaaaacttcagtcctccatctggccagatgatgcccgggcccgtaggcgggttcgggcccatgatatctcccactatgggccagccccccagagctgagttggggccccccagcttgtcccagcgctttgcccagccaggagccccatttgggccttccccgctgcagcgaccaggtcaaggactgcctagcctgccacctaacacatcaccctttcctgggccggatcccgggttcccaggccccggaggcgaggacgggggtaagcccttgaatccccccgcatctacagccttcccccaggagccacacagcggctctccggcagctgcggtgaatggcaatcagccaagcttcccccccaactcttccggtcggggcggcgggacaccagatgctaattctttggcacctcctggcaaggccggcggcggatccggaccccagcctcccccgggactagtgtacccctgtggtgcttgccgttccgaggtgaacgacgaccaggacgccattctgtgtgaggcttcatgccaaaaatggttccaccgcgagtgtacgggcatgactgagagcgcttatggattactgaccactgaagcctcagctgtgtgggcttgcgacctgtgtctaaagacaaaggagatccagtcagtgtatattcgtgagggaatggggcagcttgtcgctgccaacgacggctag

SEQ ID NO: 236117 - DNA, 1221 bp, Artificial Sequence
  derived and/or modified sequence
atggccgcttctgcacctccaccacccgacaagctggaaggcggcggtggccctgccccaccacctgctccaccttccacaggacggaagcagggcaaggcaggcctgcagatgaaaagccccgagaagaaaaggaggaaaagcaacacacaggggcctgcttatagtcacctgacggagtttgcgcccccccccaccccaatggttgatcatcttgtcgcctctaacccctttgaggatgacttcggggctcctaaggtcggcgtggcagcaccaccctttctgggatccccagtcccgttcgggggattccgcgttcagggcggcatggcgggacaggtgccaccgggctactctacaggaggtggaggaggaccccaacctctacggcgccagccccctccatttcctcccaaccctatgggaccagccttcaatatgccacctcagggcccaggctatccgccccccggcaatatgaatttcccatcccagcccttcaaccaacctttggggcaaaacttctctccgcctagcggccaaatgatgcccggtccggtggggggatttgggcccatgattagccccacgatgggacagccccctagagccgagctgggcccaccttcactaagccaacggtttgcacagcccggcgcaccgttcggtccctcacccctccagaggccgggccaagggcttccttcgctcccacctaacacctcgccctttcccggcccagacccagggtttccggggcccgggggggaggatggcggtaagccgttgaacccccctgctagtaccgcctttccgcaggagccccacagcggtagtcctgccgctgccgtcaatgggaatcagcccagctttcctcctaactcttccgggagaggcggaggaacgccggatgcaaatagcctggctcccccggggaaagccggaggaggatcggggccccagccaccccctggcttagtctacccttgcggcgcctgtcgaagtgaggttaacgacgatcaagacgccattttgtgtgaagcctcctgtcagaagtggttccatagagaatgcactggtatgacggaatcagcctacggccttctgacgacggaagccagcgcagtctgggcctgtgatttgtgcctgaagactaaagagatccagagtgtctacattagagaggggatgggacagctcgtggctgccaacgacggttag

SEQ ID NO: 236118 - DNA, 1110 bp, Artificial Sequence
  derived and/or modified sequence
atgaagagccctgagaagaagaggaggaagagcaacacccagggccctgcctacagccacctgacagaatttgcccccccacccacccccatggtggaccacctggtggccagcaacccctttgaagatgactttggagcccccaaggtgggcgtggccgccccacccttcctgggcagccctgtgccctttggaggcttccgggtgcagggcggcatggccggccaggtgcccccaggctacagcactggaggcggcggcggcccccagcccctgcggcggcagcccccacccttcccccccaaccccatgggccctgccttcaacatgccaccccagggccctggctacccacctcctggcaacatgaacttccccagccagcccttcaaccagcccctgggccagaacttcagcccccccagcggccagatgatgcctggccctgtgggcggcttcggccccatgatcagccccaccatgggccagccccccagggctgagctgggcccccccagcctgagccagagatttgcccagcccggggcccccttcggccccagccccctgcagaggcctggccagggcctgcccagcctgccccccaacaccagccccttccctggccctgaccccggcttccctggccctggaggagaagatggcggcaagcccctgaaccccccagccagcacagccttcccccaggagccccacagcggcagccctgctgctgctgtgaatggaaaccagcccagcttcccccccaacagcagcggccggggcggcggcaccccagatgccaacagcctggcccctcctgggaaggccggcggcggcagcggcccccagcccccacctggcctggtgtacccctgtggggcctgccgctctgaggtgaatgatgaccaggatgccatcctgtgtgaggccagctgccagaagtggttccaccgggagtgcaccggcatgacagaaagtgcctacggcctgctgaccacagaggccagcgctgtgtgggcctgtgacctgtgcctgaagaccaaggagatccagagcgtgtacatccgggagggcatgggccagctggtggccgccaatgatggatag

SEQ ID NO: 236119 - DNA, 1221 bp, Artificial Sequence
  derived and/or modified sequence
atggccgccagcgcccctcctcctccagacaagctggagggcggcggcggccctgcccctcctccagccccacccagcactggaaggaagcagggcaaggccggcctgcagatgaagagccctgagaagaagaggaggaagagcaacacccagggccctgcctacagccacctgacagaatttgcccccccacccacccccatggtggaccacctggtggccagcaacccctttgaagatgactttggagcccccaaggtgggcgtggccgccccacccttcctgggcagccctgtgccctttggaggcttccgggtgcagggcggcatggccggccaggtgcccccaggctacagcactggaggcggcggcggcccccagcccctgcggcggcagcccccacccttcccccccaaccccatgggccctgccttcaacatgccaccccagggccctggctacccacctcctggcaacatgaacttccccagccagcccttcaaccagcccctgggccagaacttcagccccccatctggccagatgatgcctggccctgtgggcggcttcggccccatgatcagccccaccatgggccagccccccagggctgagctgggcccccccagcctgagccagagatttgcccagcccggggcccccttcggccccagccccctgcagaggcctggccagggcctgcccagcctgccccccaacaccagccccttccctggccctgaccccggcttccctggccctggaggagaagatggcggcaagcccctgaaccccccagccagcacagccttcccccaggagccccacagcggcagccctgctgctgctgtgaatggaaaccagcccagcttcccccccaacagcagcggccggggcggcggcaccccagatgccaacagcctggcccctcctgggaaggccggcggcggcagcggcccccagcccccacctggcctggtgtacccctgtggggcctgccgctctgaggtgaatgatgaccaggatgccatcctgtgtgaggccagctgccagaagtggttccacagagaatgtacaggcatgacagagagcgcctacggcctgctgaccacagaggccagcgctgtgtgggcctgtgacctgtgcctgaagaccaaggagatccagagcgtgtacatccgggagggcatgggccagctggtggccgccaatgatggatag

SEQ ID NO: 236120 - DNA, 1110 bp, Artificial Sequence
  derived and/or modified sequence
atgaagagccccgagaagaagcggcggaagagcaacacccagggcccggcttactcgcacttgacagaattcgcccccccaccaaccccaatggtcgatcatcttgtggcctccaatccatttgaggatgacttcggagctccgaaagtgggggtggcggccccgcccttcctggggtctcccgtgccattcgggggctttagggttcagggaggaatggcaggccaagtcccacccggctactccacaggcggggggggggggccccaacctctcagaagacaaccgccacctttccctccgaatccgatgggacctgcgttcaacatgcccccccagggacctggatatccaccaccgggcaatatgaattttcctagccagcctttcaaccagccattgggccaaaatttcagtccgcctagcgggcaaatgatgcctgggcccgttggaggattcggacccatgatctccccgactatgggacagccaccaagagccgaactcggtcctccttccctgtcacagcgctttgcccaaccgggcgctccattcggaccttctccactccagcgccccggacagggtttgccatcactccctcccaatactagcccctttcccggccctgatcccggcttccccgggccaggaggggaggacggtggaaaacccctgaacccaccggctagcacagcttttccccaagagccccattcaggctccccagccgcagcagtgaacggcaatcagcccagtttccccccaaactcctccggacgcggggggggtacgccagacgctaatagtctggctccaccaggaaaggcaggaggtggatctggaccccagccaccacctggcctggtgtatccatgtggcgcgtgcaggtctgaggtgaacgacgatcaagacgcaatcctgtgtgaagcttcatgccagaagtggtttcaccgcgaatgtacaggcatgaccgaaagcgcatatgggctgttgaccactgaagcaagcgcagtttgggcctgcgatctctgcctaaagaccaaagaaatccagtcggtttatatccgcgagggtatgggtcaactcgttgcggctaacgatgggtag

SEQ ID NO: 236121 - DNA, 1221 bp, Artificial Sequence
  derived and/or modified sequence
atggccgccagcgccccccccccccccgacaagctggagggcggcggaggccctgctccacctccagcccctccgtccacggggcgcaaacaggggaaagctggcttgcagatgaagtcaccagagaagaaacgacgaaaatcaaatacccagggtcccgcctactcacacctgacagagttcgcccccccccccaccccaatggtggatcatttagtagcgagcaaccccttcgaagatgactttggagcacccaaggttggagtcgctgccccccccttcctaggcagcccagtcccattcggtgggtttcgggtgcagggggggatggcgggtcaggtgccccctggatacagtacagggggaggtgggggccctcagccgcttcgtaggcagccgcccccattccctccgaatccaatgggccctgccttcaatatgccgccccagggacccggctacccaccaccggggaatatgaatttcccttcccagccttttaatcagccgctgggccaaaatttctcccctccttctggacagatgatgcctgggccagtaggcggttttggtccgatgatatccccaactatgggacagccacctagagccgagttgggtccaccatctctctcacaacggtttgcacaacctggggcacccttcgggccatccccccttcagagaccaggtcagggacttcccagtcttcctccaaacacctcaccatttccaggaccggacccgggcttccctgggcccggaggggaagacggcggaaagcccctgaaccctcccgcatcaacagcattcccacaagagccacactcaggatcccccgctgccgccgttaacggtaatcaacctagcttcccgcccaactccagtggtaggggtggagggacacccgatgccaactccctagcaccacctggcaaggccgggggcggctccggtccccaacctccacctgggctggtgtatccttgtggagcatgcagaagtgaggtaaatgacgatcaggacgctatcctttgcgaagccagctgtcagaagtggttccatcgagaatgtactggcatgaccgaatccgcatacggcctgctcactacagaggcctctgcagtgtgggcctgtgatctgtgcctcaagaccaaggaaattcagtccgtgtacatcagggaaggaatggggcagctcgtggcggctaatgacggatag

SEQ ID NO: 236122 - DNA, 1110 bp, Artificial Sequence
  derived and/or modified sequence
atgaagtcgccagagaagaaaaggcggaaaagcaacacccaggggcctgcttattcccatctcaccgaatttgccccaccccctactcctatggtggatcacctggtggcgtcaaatccctttgaggacgatttcggagcgcctaaggtgggcgttgccgcacctccttttctggggtcgccagttccatttggtggcttccgtgtccagggcggtatggcagggcaggtgccccctgggtacagtaccggcggtggaggcggaccccagccactccgcaggcagcctccaccctttcccccaaatcctatggggcctgcttttaacatgccccctcagggtcccggatacccacctcccggaaacatgaactttccttctcagccgtttaaccagccactcggccaaaatttctcccccccatccggccaaatgatgcccggacccgtgggtggttttggcccaatgatcagccctactatgggtcaaccccctcgagctgagctaggacccccatccttgtcacaaagattcgcacaacccggtgccccatttggcccatcccctctgcagcggccaggccagggtctgccttcattacctccaaacacttcaccgtttccgggacctgaccccggttttcccggacctggaggagaagatgggggaaagcccctgaacccacctgcttctacagccttcccccaggaaccacattcaggcagcccagcagccgctgtcaatggcaaccagccaagttttcccccaaacagttccgggaggggaggaggcactccagacgcgaattccttagcccctccaggaaaagccggtggcggatccggacctcaaccaccaccgggactcgtttatccctgtggcgcttgccgttcagaggtcaatgatgatcaagacgcaatattatgtgaagccagctgtcaaaaatggtttcacagagagtgcactggcatgacagagtcagcatacggccttctaactacagaagcatcggccgtgtgggcgtgtgacttatgccttaaaacaaaggagattcagagtgtgtatatccgggaaggcatgggtcaactggtcgccgctaatgacggctag

SEQ ID NO: 236123 - DNA, 1221 bp, Artificial Sequence
  derived and/or modified sequence
atggcagcttctgcccctcctccacccgataagctggaggggggagggggacccgctccccctcctgccccaccatctaccggaaggaaacaaggtaaagccggactccaaatgaaaagccctgaaaagaaacgaagaaagtccaacacacaggggcctgcctactctcatctcacggaatttgcacccccacctacacctatggtggatcatcttgtagcctcaaacccctttgaagatgactttggggcacctaaggtgggggtggccgcacccccttttctgggcagtccagtgccctttgggggttttcgggtccagggcggaatggctggccaagtcccgcctgggtacagtaccgggggtggaggtggacctcaacctctcagaagacagcctcctcctttcccaccgaacccaatgggtccggcttttaatatgcctccccagggcccaggatatcccccacccggaaacatgaatttcccatcccaaccgtttaatcagcctcttgggcaaaatttctcgccccctagtgggcagatgatgccagggccagttggtggcttcgggcctatgatttcaccaacaatgggtcaaccacccagagccgagctgggtccacctagtctgagccagcggttcgctcagcctggagcgccatttggaccatctcctctgcaaaggcccggacagggactcccctcgctaccccctaatacctctccctttcccggacccgatccaggttttccaggtcctggcggagaggacggcggaaagccgctcaaccctcccgcttcaaccgccttcccccaagagccccatagtggtagccctgctgcagctgtgaacggtaatcagccttcttttccacccaattccagtgggcgagggggtgggacccccgacgcaaactccctggcaccccctgggaaagcaggaggagggagtggaccccagcctccacccggactggtttacccttgtggcgcatgtcgatccgaagtgaatgacgaccaagacgccattctttgtgaggcctcctgccagaaatggtttcaccgcgagtgcacagggatgaccgaaagtgcctatggactattgaccaccgaggcgagcgccgtgtgggcctgcgacctatgtctgaagaccaaagagatccagtccgtgtacataagagagggcatgggccagctcgtagcagctaacgatggatag

SEQ ID NO: 236124 - DNA, 1306 bp, Artificial Sequence
  derived and/or modified sequence
gcgccttcggctcgcgcgcgcccctccgcggcggctccaccgcccgggatggtacggtccggcagccgggccgcgcgctgccgcccctcggtgagctggtgtgggccgccgctagcggagacgaccctttccactcgcgtggtgccgtggtctgcaaatgaagagtccagaaaagaagcgaaggaagtcaaatactcagggccctgcatactcacatctgacggagtttgcaccacccccaactcccatggtggatcacctggttgcatccaacccttttgaagatgacttcggagcccccaaagtgggggttgcagcccctccattccttggcagtcctgtgcccttcggaggcttccgtgtgcaggggggcatggcgggccaggtacccccaggctacagcactggaggtggagggggcccccagccactccgtcgacagccaccccccttccctcccaatcctatgggccctgctttcaacatgcccccccagggtcctggctacccacccccaggcaacatgaactttcccagccaacccttcaaccagcctctgggtcaaaactttagtcctcccagtgggcagatgatgccgggcccagtggggggatttggtcccatgatctcacccaccatgggacagcctcccagagcagagctgggcccaccttctctgtcccaacgatttgctcagccaggggctccttttggcccttctcctctccagagacctggtcaggggctccccagcctgccgcctaacacaagtccctttcctggtccggaccctggctttcctggccctggtggtgaggatggggggaagcccttgaatccacctgcttctactgcttttccccaggagccccactcaggctccccggctgctgctgttaatgggaaccagcccagtttccccccgaacagcagtgggcggggtgggggcactccagatgccaacagcttggcaccccctggcaaggcaggtgggggctccgggccccagcctcccccaggcttggtgtacccatgtggtgcctgtcggagtgaggtgaacgatgaccaggatgccattctgtgtgaggcctcctgccagaaatggttccaccgtgagtgcacaggcatgactgagagcgcctatgggctgctgaccactgaagcttctgccgtctgggcctgcgatctctgcctcaagaccaaggagatccagtctgtctacatccgtgagggcatggggcagctggtggctgctaacgatgggtgacgctggtgaagtggcccagggaagtgcacatgtctctcc

SEQ ID NO: 236125 - DNA, 3146 bp, Artificial Sequence
  derived and/or modified sequence
gtctggagagagcgcgcagtttgcgcggcggctcggcgcttccctgtcgtcgcactttgtggttgctgcagctcgggggcctgggctgcccctgacaccccttctgggcgatggtgcagcccaagggcgcctccatcccccgccgctgccgctaacccgggtcccccactccatggccgcctcggcgccgcccccaccggacaagctggagggaggtggcggccccgcaccgccccctgcgccgcccagcaccgggaggaagcagggcaaggccggtctgcaaatgaagagtccagaaaagaagcgaaggaagtcaaatactcagggccctgcatactcacatctgacggagtttgcaccacccccaactcccatggtggatcacctggttgcatccaacccttttgaagatgacttcggagcccccaaagtgggggttgcagcccctccattccttggcagtcctgtgcccttcggaggcttccgtgtgcaggggggcatggcgggccaggtacccccaggctacagcactggaggtggagggggcccccagccactccgtcgacagccaccccccttccctcccaatcctatgggccctgctttcaacatgcccccccagggtcctggctacccacccccaggcaacatgaactttcccagccaacccttcaaccagcctctgggtcaaaactttagtcctcccagtgggcagatgatgccgggcccagtggggggatttggtcccatgatctcacccaccatgggacagcctcccagagcagagctgggcccaccttctctgtcccaacgatttgctcagccaggggctccttttggcccttctcctctccagagacctggtcaggggctccccagcctgccgcctaacacaagtccctttcctggtccggaccctggctttcctggccctggtggtgaggatggggggaagcccttgaatccacctgcttctactgcttttccccaggagccccactcaggctccccggctgctgctgttaatgggaaccagcccagtttccccccgaacagcagtgggcggggtgggggcactccagatgccaacagcttggcaccccctggcaaggcaggtgggggctccgggccccagcctcccccaggcttggtgtacccatgtggtgcctgtcggagtgaggtgaacgatgaccaggatgccattctgtgtgaggcctcctgccagaaatggttccaccgtgagtgcacaggcatgactgagagcgcctatgggctgctgaccactgaagcttctgccgtctgggcctgcgatctctgcctcaagaccaaggagatccagtctgtctacatccgtgagggcatggggcagctggtggctgctaacgatgggtgacgctggtgaagtggcccagggaagtgcacatgtctctccctgctcttccagggtgatttttttgatgtttggctcttggtccttgtttccactggctttccatccccatggggcagaaacagtggctcctgggagcagaaaaggaattgaggtgggcaggcagaagagcctggattgctcactgttttgggaaacttacatgttgagatctacagagatccaggaaaccaaagccctgctgagcagagccattttgtggctatttctggaggcccaggagtgtggctgcaagagaaaaggggctggaggaagatccggagggcaggggtgttccctctgctgatgatggatgcccctaacacctgtgcctaacacccctactgaaccccacagctccagccttagtttttggagtcaagtgttaaaggtttctggccagaggaattggggtcttgccatccctgcaatagcccttttatgggctctgggagacagctttagggaataaatggggattttcccctttttctacccactcctttgcttcctccaagacttacccaactccttccccctcagagaaccaaatagcctgaggaagcaggagagttcctggttatggcagtttcttggtgatttggggcttcaagacagtaggtgagagatgctgtcaggacgtatcttcttcataccaaagtcactggtcctttctcagcctctctcgtgcttttctcctaatgaccatatttttgccaaaaattgggatatgttatctgacagaccagaatatttgaagtttgggctgtcctgaaagtctggactttggtggtaccctcctcccccagcccatctgttgcacattatactccgtgtgttcttcaactttcggcgcccttattcccctgccttcctggcttgattgaaggaaagcttgaaaaggcgcagagccctatacctcatttcctccatgataaaaggatccaagtgaggccctgtcacagcctgtgggtaggggatgcggcgggatcctcattgccatggtactcaaaggtagaagagcctggagtttgttgcttctctttgctattctttcatatcctcttgggcctggtgattaattagcaattctcattcctctcagccaaaggcctgcactgggctttatttgtctttttttattttttaagcactgcctgccagagatgggcctggggcctgatgaggaccttagcgctgctcgttctccttttctgttcatgcacacattcctccatggggtggggaaggcaggcatggggtgtggccctcggagaagttaggagtcccccagctcaagatacagtggcaaagacctagtggtcccctacccccacttctctcagttcctggcatgaggagagaagaccctgctctggtggagctgacaacctttgaggctgggaggagagcagcctctgggcatcgttcccagtgtccctcacactaaaacggcgtagatggcaaccccccacccccaccccgctgctcaactcttgtgtttgttgttctgtttgccccatttatctgttgctgtttttgtgttgtcttcccctgctccgcattttgtaaaatggcccctgggggagtgtttttgctggatctgctccctctcgctctctcactccactactttttggaacaaagtgatggcagaatgcggtggtggtgggggtcttttgtactgttggattaataaaatgattttaaaatccca

SEQ ID NO: 236126 - DNA, 1110 bp, Artificial Sequence
  derived and/or modified sequence
atgaagagccccgagaagaagagaagaaagagcaacacccagggccccgcctacagccacctgaccgagttcgcccccccccccacccccatggtggaccacctggtggccagcaaccccttcgaggacgacttcggcgcccccaaggtgggcgtggccgccccccccttcctgggcagccccgtgcccttcggcggcttcagagtgcagggcggcatggccggccaggtgccccccggctacagcaccggcggcggcggcggcccccagcccctgagaagacagcccccccccttcccccccaaccccatgggccccgccttcaacatgcccccccagggccccggctaccccccccccggcaacatgaacttccccagccagcccttcaaccagcccctgggccagaacttcagcccccccagcggccagatgatgcccggccccgtgggcggcttcggccccatgatcagccccaccatgggccagccccccagagccgagctgggcccccccagcctgagccagagattcgcccagcccggcgcccccttcggccccagccccctgcagagacccggccagggcctgcccagcctgccccccaacaccagccccttccccggccccgaccccggcttccccggccccggcggcgaggacggcggcaagcccctgaacccccccgccagcaccgccttcccccaggagccccacagcggcagccccgccgccgccgtgaacggcaaccagcccagcttcccccccaacagcagcggcagaggcggcggcacccccgacgccaacagcctggccccccccggcaaggccggcggcggcagcggcccccagcccccccccggcctggtgtacccctgcggcgcctgcagaagcgaggtgaacgacgaccaggacgccatcctgtgcgaggccagctgccagaagtggttccacagagagtgcaccggcatgaccgagagcgcctacggcctgctgaccaccgaggccagcgccgtgtgggcctgcgacctgtgcctgaagaccaaggagatccagagcgtgtacatcagagagggcatgggccagctggtggccgccaacgacggctag

SEQ ID NO: 236127 - DNA, 1221 bp, Artificial Sequence
  derived and/or modified sequence
atggccgccagcgccccccccccccccgacaagctggagggcggcggcggccccgcccccccccccgccccccccagcaccggcagaaagcagggcaaggccggcctgcagatgaagagccccgagaagaagagaagaaagagcaacacccagggccccgcctacagccacctgaccgagttcgcccccccccccacccccatggtggaccacctggtggccagcaaccccttcgaggacgacttcggcgcccccaaggtgggcgtggccgccccccccttcctgggcagccccgtgcccttcggcggcttcagagtgcagggcggcatggccggccaggtgccccccggctacagcaccggcggcggcggcggcccccagcccctgagaagacagcccccccccttcccccccaaccccatgggccccgccttcaacatgcccccccagggccccggctaccccccccccggcaacatgaacttccccagccagcccttcaaccagcccctgggccagaacttcagcccccccagcggccagatgatgcccggccccgtgggcggcttcggccccatgatcagccccaccatgggccagccccccagagccgagctgggcccccccagcctgagccagagattcgcccagcccggcgcccccttcggccccagccccctgcagagacccggccagggcctgcccagcctgccccccaacaccagccccttccccggccccgaccccggcttccccggccccggcggcgaggacggcggcaagcccctgaacccccccgccagcaccgccttcccccaggagccccacagcggcagccccgccgccgccgtgaacggcaaccagcccagcttcccccccaacagcagcggcagaggcggcggcacccccgacgccaacagcctggccccccccggcaaggccggcggcggcagcggcccccagcccccccccggcctggtgtacccctgcggcgcctgcagaagcgaggtgaacgacgaccaggacgccatcctgtgcgaggccagctgccagaagtggttccacagagagtgcaccggcatgaccgagagcgcctacggcctgctgaccaccgaggccagcgccgtgtgggcctgcgacctgtgcctgaagaccaaggagatccagagcgtgtacatcagagagggcatgggccagctggtggccgccaacgacggctag

SEQ ID NO: 236128 - protein, 314 aa, Artificial Sequence
  derived and/or modified sequence
MKLINGKKQTFPWFGMDIGGTLVKLVYFEPKDITAEEEQEEVENLKSIRKYLTSNTAYGKTGIRDVHLELKNLTMCGRKGNLHFIRFPSCAMHRFIQMGSEKNFSSLHTTLCATGGGAFKFEEDFRMIADLQLHKLDELDCLIQGLLYVDSVGFNGKPECYYFENPTNPELCQKKPYCLDNPYPMLLVNMGSGVSILAVYSKDNYKRVTGTSFGNMMSKEKRDSISKEDLARATLVTITNNIGSIARMCALNENIDRVVFVGNFLRINMVSMKLLAYAMDFWSKGQLKALFLEHEGYFGAVGALLELFKMTDDK

SEQ ID NO: 236129 - DNA, 945 bp, Artificial Sequence
  derived and/or modified sequence
atgaagttgatcaatggtaaaaaacagaccttcccctggttcgggatggatattgggggcactctggttaaattggtgtacttcgagcccaaggacatcaccgcggaagaggagcaggaggaggtggaaaatcttaaatcaattagaaaatatctcaccagcaacaccgcctacgggaaaacaggaatacgggacgtgcatctagagttgaagaaccttactatgtgcggcagaaagggaaatctgcactttatcagattcccaagctgcgctatgcaccgtttcatccagatgggatcagagaaaaatttctccagcctgcataccactctctgcgctaccggcggaggggcctttaaatttgaggaggattttagaatgattgccgacttgcaactccacaagctggacgaactggactgtctcatccagggcctactgtatgtagactccgtcggattcaatggcaaacccgagtgctactattttgagaatcccactaaccccgaactgtgtcagaaaaagccttactgcctagataatccataccccatgctgctggtgaacatggggagtggggtgtctatcctagccgtatatagcaaggataattataaaagggtaactggcacaagtttcggaaacatgatgagcaaagaaaagcgcgattccatctctaaggaggatttggccagagccaccctcgtgactataacaaataatatcggctcaattgcgcgaatgtgtgccctaaatgaaaacattgacagagtggtgtttgttggtaattttctaaggatcaatatggtctccatgaagctgcttgcttatgccatggacttctggagtaagggccagcttaaggccctgttcctcgaacacgagggatacttcggtgctgtgggcgcactgctggaactatttaagatgacggatgataaatag

SEQ ID NO: 236130 - DNA, 945 bp, Artificial Sequence
  derived and/or modified sequence
atgaagctgatcaatggcaagaagcagaccttcccctggtttggcatggacatcggcggcaccctggtgaagctggtgtactttgagcccaaggacatcacagctgaggaggagcaggaggaggtggagaacctgaagagcatcaggaagtacctgaccagcaacacagcctacggcaagacaggcatcagagatgtgcacctggagctgaagaacctgaccatgtgtggcaggaaaggaaacctgcacttcatccgcttccccagctgtgccatgcaccgcttcatccagatgggcagcgagaagaacttcagcagcctgcacaccaccctgtgtgccaccggcggcggggccttcaagtttgaggaggacttcaggatgattgctgacctgcagctgcacaagctggatgagctggactgcctgatccagggcctgctgtatgtggacagcgtgggcttcaacgggaagccagagtgctactactttgagaaccccaccaaccctgagctgtgccagaagaagccctactgcctggacaacccctaccccatgctgctggtgaacatgggcagcggcgtgtccatcctggccgtgtacagcaaggacaactacaagagggtgacaggcaccagctttggaaacatgatgagcaaggagaagagggacagcatcagcaaggaggacctggcccgggccaccctggtgaccatcaccaacaacatcggcagcatcgccaggatgtgtgccctgaatgaaaatattgacagagtggtgtttgtgggcaacttcctgcgcatcaacatggtgtccatgaagctgctggcctatgccatggacttctggagcaagggccagctgaaggccctcttcctggagcacgagggctactttggagctgtgggcgccctgctggagctgttcaagatgacagatgacaagtag

SEQ ID NO: 236131 - DNA, 945 bp, Artificial Sequence
  derived and/or modified sequence
atgaagctgatcaacggcaagaagcagaccttcccctggttcggcatggacatcggcggcaccctcgtgaaattggtgtacttcgagcctaaagacataactgccgaggaagagcaggaagaggtcgaaaatcttaagagcattcggaagtatctgacgagcaacacagcctatggcaagactggcattagggatgtgcacctcgagctgaagaatctgacaatgtgcggacggaagggcaacctacatttcattcggttcccgagctgtgcaatgcaccgctttatccagatgggatcggagaagaatttttctagtctccacaccacactatgtgccaccggtggcggcgccttcaagttcgaagaagatttccgcatgatagctgacctgcaactgcacaaactcgatgaactggattgtctgattcagggcctcttatatgtggattctgtggggtttaacggcaagccagagtgttactatttcgaaaacccaacaaatcccgagctttgtcaaaagaagccatactgcctagacaacccttaccccatgttgttggtcaatatgggctcgggtgtgagtattctggccgtgtatagtaaggataattataagcgggtaaccggcactagcttcgggaatatgatgagcaaagagaaaagagattccataagcaaggaggatctggcgagagcaacactggtgactattacgaacaacatcggctccatcgccagaatgtgtgcgttaaatgaaaatatagaccgcgtggtttttgtaggcaattttctgaggattaatatggtgtccatgaagctcttagcttatgccatggatttttggtccaaaggccagctcaaagcgctgtttctcgaacacgagggctacttcggagctgtcggggctctcctcgaactttttaaaatgacggacgataagtag

SEQ ID NO: 236132 - DNA, 2513 bp, Artificial Sequence
  derived and/or modified sequence
cacaatctaaagcttgtatatataatggtagtttgtaaagtgtaccttccccacaggacgctgtgggatgtaaatttgtaggtcgagtttacagctggtttttcttgactgaagctcattcaactggttacttctttgtgggtgtctttaatgaagcttataaatggcaaaaagcaaacattcccatggtttggcatggacatcggtggaacgctggttaaattggtgtatttcgagccgaaggatattacagccgaagaggagcaagaggaagtggagaacctgaagagcatccggaagtatttgacttctaatactgcttatgggaaaactgggatccgagacgtccacctggaactgaaaaacctgaccatgtgtggacgcaaagggaacctgcacttcatccgctttcccagctgtgctatgcacaggttcattcagatgggcagcgagaagaacttctctagccttcacaccaccctctgtgccacaggaggcggggctttcaaattcgaagaggacttcagaatgattgctgacctgcagctgcataaactggatgaactggactgtctgattcagggcctgctttatgtcgactctgttggcttcaacggcaagccagaatgttactattttgaaaatcccacaaatcctgaattgtgtcaaaaaaagccgtactgccttgataacccataccctatgttgctggttaacatgggctcaggtgtcagcattctagccgtgtactccaaggacaactataaaagagttacagggaccagctttggcaacatgatgagtaaagaaaagcgagattccatcagcaaggaagacctcgcccgggccacattggtcaccatcaccaacaacattggctccattgctcggatgtgcgcgttgaatgagaacatagacagagttgtgtttgttggaaattttctcagaatcaatatggtctccatgaagctgctggcatatgccatggatttttggtccaaaggacaactgaaagctctgtttttggaacatgagggttattttggagccgttggggcactgttggaactgttcaaaatgactgatgacaagtagagacgagcagtggaggaaacagcctcccaaaaggacagagaactaaaaaattgctgctggagaaggtgaaagtcgctttgggacggaagccaagccattatggcagatgaacctgctggatttgtaaataatttaaaatccttccagatgatcttttactcttaggttttgagctaatgattcaaaacgggggaatataaaaggttttttttctgtatactgtatttttttaaaaaaatggtgcagcgtggccaaacctaccaattgtatgcattaactttgaaaagttgtttgatgtttaagaaggacctgatatgtaagcgctggtcatttttcttctggggtttactgatcagtgtggtgattttaacttcatttagtaattactctaggagattttaccttgacttatatttttcatgacgtttcatgatttgctgttggtttcaaatgaaactacaaatctggcatgttttactgtgaacacttttgttatttgttttgtacccttttttgtcttgtttttctgttttagttgtcttctgaaaaaagagtcgttccctctgtttctgtcctcagatgatgtccctccccctacctgtaacctttctttgacataattgttcatatcaatgaaggtgctgaccagctcaatacaaagttaagcacaagatctaaagctcttgaaaatgcccgtgaagagaagactgaatgtgttaatgaatttaatgagtctggcaaaagttgcaaattatatgcaagtttgtcctatcgcttataaatgtagtgtttcattggatttattttatgctaggttatattaagttgaaatagtctgtgattaaatgtcctcatccatgcacagaatatgaatggcagcaaatctttgtgcaagaaatttgaaacttattgggaaaagcctcccagtagattaattgttcatatcaggagatttagggtaagtcatgggttgaggtgtcagatagtaatatctatttgttttgtacatgtatatatctaggaactttgtaacaacacatctttaataatgttaaaggttttttcatttttaatattttaaactaaaaactgtacttcaatctcagtttctaaaattaaaaataatttatactgatctatatattttttctttttgaaagatttcattaagactgatgggtaactttcaaatgagggtcatgtacaaatattgggatgcatgagatcccatgatcttgtgtattgagcttattgttgaaagggatttttgaaggacagaacaattactccatgatgaatcttcctttctctgccttctgagcaccgtctttaatttccatatcttcaagtcttgaagaagttgatgttaattgaagaattcacttgtctggttgaaataaagcctgtttctgttgtga

SEQ ID NO: 236133 - DNA, 945 bp, Artificial Sequence
  derived and/or modified sequence
atgaaactcataaacggtaagaaacaaacctttccttggtttggcatggacatagggggaacgctcgtaaaactggtgtatttcgaaccgaaagacatcacagccgaggaggagcaagaagaggtggaaaatctgaaatctatccgcaagtaccttactagcaacacagcatacggaaagacaggcattagggacgtccatctagagctcaagaatcttactatgtgcggtagaaaagggaacctgcatttcattagatttccatcctgtgccatgcatagatttattcagatgggttcagaaaagaatttttcatccctccatacgactctttgcgcaaccggtggtggtgccttcaaatttgaagaagattttagaatgatagcagacctgcaactgcataaactcgacgagctcgactgcctcatccaaggtcttctatatgtcgactccgtgggcttcaatggcaagccagaatgctattacttcgagaaccccaccaatcctgaattgtgtcagaagaaaccttactgtctggataatccttatcctatgctcttagtgaacatggggagcggtgtgtccatccttgcagtatattctaaagacaattataaacgggtcaccggcaccagttttgggaacatgatgtcaaaagagaagcgggacagcatttccaaagaggacttggcccgagccacccttgtgaccatcaccaacaacatcggctcgatagcccgtatgtgtgccttgaatgagaatatcgatcgggtcgttttcgtcggaaactttctccgcataaatatggtctcaatgaaactgctggcttatgccatggacttctggagtaagggccaactcaaggcgctgtttttggagcacgagggatactttggggcagtgggcgcactgctggagctattcaaaatgacagatgataagtag

SEQ ID NO: 236134 - DNA, 945 bp, Artificial Sequence
  derived and/or modified sequence
atgaagctgatcaacggcaagaagcagaccttcccctggttcggcatggacatcggcggcaccctggtgaagctggtgtacttcgagcccaaggacatcaccgccgaggaggagcaggaggaggtggagaacctgaagagcatcagaaagtacctgaccagcaacaccgcctacggcaagaccggcatcagagacgtgcacctggagctgaagaacctgaccatgtgcggcagaaagggcaacctgcacttcatcagattccccagctgcgccatgcacagattcatccagatgggcagcgagaagaacttcagcagcctgcacaccaccctgtgcgccaccggcggcggcgccttcaagttcgaggaggacttcagaatgatcgccgacctgcagctgcacaagctggacgagctggactgcctgatccagggcctgctgtacgtggacagcgtgggcttcaacggcaagcccgagtgctactacttcgagaaccccaccaaccccgagctgtgccagaagaagccctactgcctggacaacccctaccccatgctgctggtgaacatgggcagcggcgtgagcatcctggccgtgtacagcaaggacaactacaagagagtgaccggcaccagcttcggcaacatgatgagcaaggagaagagagacagcatcagcaaggaggacctggccagagccaccctggtgaccatcaccaacaacatcggcagcatcgccagaatgtgcgccctgaacgagaacatcgacagagtggtgttcgtgggcaacttcctgagaatcaacatggtgagcatgaagctgctggcctacgccatggacttctggagcaagggccagctgaaggccctgttcctggagcacgagggctacttcggcgccgtgggcgccctgctggagctgttcaagatgaccgacgacaagtag

SEQ ID NO: 236135 - protein, 543 aa, Artificial Sequence
  derived and/or modified sequence
MKFPIETPRKQVNWDPKVAVPAAAPVCQPKSATNGQPPAPAPTPTPRLSISSRATVVARMEGTSQGGLQTVMKWKTVVAIFVVVVVYLVTGGLVFRALEQPFESSQKNTIALEKAEFLRDHVCVSPQELETLIQHALDADNAGVSPIGNSSNNSSHWDLGSAFFFAGTVITTIGYGNIAPSTEGGKIFCILYAIFGIPLFGFLLAGIGDQLGTIFGKSIARVEKVFRKKQVSQTKIRVISTILFILAGCIVFVTIPAVIFKYIEGWTALESIYFVVVTLTTVGFGDFVAGGNAGINYREWYKPLVWFWILVGLAYFAAVLSMIGDWLRVLSKKTKEEVGEIKAHAAEWKANVTAEFRETRRRLSVEIHDKLQRAATIRSMERRRLGLDQRAHSLDMLSPEKRSVFAALDTGRFKASSQESINNRPNNLRLKGPEQLNKHGQGASEDNIINKFGSTSRLTKRKNKDLKKTLPEDVQKIYKTFRNYSLDEEKKEEETEKMCNSDNSSTAMLTDCIQQHAELENGMIPTDTKDREPENNSLLEDRN

SEQ ID NO: 236136 - DNA, 1632 bp, Artificial Sequence
  derived and/or modified sequence
atgaagtttcctatcgagacaccccgaaaacaggtaaactgggatcccaaggttgctgtccccgcagccgcacctgtgtgccagccaaagagcgcaactaacggacagcctcctgccccggctcccacaccaacccctagactatctatctcctctcgggccactgtcgtagcaagaatggagggcactagtcagggcggcttacagaccgtcatgaagtggaagaccgtggtggcaatttttgtagttgtcgttgtgtacttggtaaccgggggtttggtctttcgagctttagagcaaccgtttgagtcttcccaaaagaataccatcgcattggagaaggccgaattccttagagatcatgtgtgcgttagtccccaggagctggagactctgatccagcacgcattagatgccgacaatgcaggcgttagcccaatcgggaattctagcaacaatagttcccattgggatctgggctctgccttcttcttcgccgggactgtcataacaactatcgggtacggcaatatcgcaccaagtacagagggcggcaagattttttgtatcttatacgccatattcgggatcccactgtttggatttctgctagctggtattggcgatcaactgggcactatatttgggaaaagcatcgctagggtcgaaaaggtgttcaggaaaaagcaggtaagccagaccaagatccgagtgattagcactatactgttcatcttagccggttgcattgtcttcgtcactatccccgccgtgatcttcaagtatattgagggctggaccgctctggagtccatctatttcgtggtggtgactcttacaacagtgggatttggtgactttgtggccggtggcaacgcgggaatcaattacagggagtggtataaacctctggtttggttctggatcctcgtgggactggcctattttgctgccgtcttatctatgataggggattggctccgggtgctgagtaagaagactaaggaggaggttggggagattaaggcccacgcagcggaatggaaggccaacgtaacagccgagttcagagagacacgccgtcggctgtccgttgaaatccatgataaacttcagcgagccgccactatccggagtatggaacgtcggcgcctaggccttgaccagcgggctcactccctggatatgctctctcccgaaaaaaggtcggttttcgccgcgctggataccggaagattcaaggcgtcgtcccaggagtccatcaataaccgccctaataatctgcgcctgaaaggccccgagcagctcaacaaacatggacagggtgcctcagaggacaatattattaacaaatttgggtcaacgtccagactgactaagcgtaaaaacaaggacctgaaaaagacgctccccgaagacgtccagaaaatctacaagacgtttcgcaactattcacttgacgaagagaaaaaagaagaagagacagaaaaaatgtgcaattctgacaattcttcaaccgctatgttgactgactgtattcagcagcacgctgaactggaaaatggcatgataccaactgataccaaggacagagagccagaaaataacagcctactcgaggatagaaattag

SEQ ID NO: 236137 - DNA, 1632 bp, Artificial Sequence
  derived and/or modified sequence
atgaagttccccatcgagacccccaggaagcaggtgaactgggaccccaaggtggccgtgcctgctgctgcccctgtgtgccagcccaagagcgccaccaacggccagcccccagccccagcccccacccccaccccccggctgagcatcagcagccgggccaccgtggtggccaggatggagggcaccagccagggcggcctgcagacagtgatgaagtggaagacagtggtggccatctttgtggtggtggtggtgtacctggtgactggaggcctggtgttccgggccctggagcagccctttgagagcagccagaagaacaccatcgccctggagaaggccgagttcctgcgggaccacgtgtgtgtgagcccccaggagctggagaccctcatccagcacgccctggatgctgacaatgctggggtgagccccatcggcaacagcagcaacaacagcagccactgggacctgggcagcgccttcttctttgctggcaccgtcatcaccaccatcggctacggcaacatcgcccccagcacagagggcggcaagatcttctgcatcctgtatgccatcttcggcatccccctgtttggcttcctgctggccggcattggagaccagctgggcaccatctttgggaagagcatcgcccgggtggagaaggtgttcaggaagaagcaggtgtcccagaccaagatccgggtcatcagcaccatcctcttcatcctggccggctgcatcgtgtttgtgaccatcccagctgtgatcttcaagtacatcgagggctggacagccctggagagcatctactttgtggtggtgaccctgaccaccgtgggctttggagactttgtggccggcggcaatgccggcatcaactaccgggagtggtacaagcccctggtgtggttctggatcctggtgggcctggcctactttgctgctgtgctgtccatgattggagactggctgcgggtgctgagcaagaagaccaaggaggaggtgggggagatcaaggcccatgctgctgagtggaaggccaacgtgacagctgagttccgggagacccggcggcggctgtctgtggagatccatgacaagctgcagagagctgccaccatccgctccatggagcggcggcggctgggcctggaccagagggcccacagcctggacatgctgagccctgagaagaggtctgtgtttgctgccctggacaccggccgcttcaaggccagcagccaggagagcatcaacaaccggcccaacaacctgcggctgaagggccctgagcagctgaacaagcacggccagggcgccagcgaggacaacatcatcaacaagtttggcagcaccagccggctgaccaagaggaagaacaaggacctgaagaagaccctgcctgaagatgtgcagaagatctacaagaccttcaggaactacagcctggatgaggagaagaaggaggaggagacagagaagatgtgcaacagcgacaacagcagcacagccatgctgacagactgcatccagcagcacgccgagctggagaatggcatgatccccacagacaccaaggaccgggagcctgagaacaacagcctgctggaggacaggaactag

SEQ ID NO: 236138 - DNA, 1632 bp, Artificial Sequence
  derived and/or modified sequence
atgaagttccccatcgagaccccccggaagcaggtgaactgggacccaaaggtcgcagtccctgccgccgcacctgtgtgtcagcccaagtcagctacaaacggtcagcccccggcgcccgctccaactcccacccccagactgtcaatttcctctagggcaaccgtggtagcgagaatggagggtactagccagggcggactacagacggtgatgaagtggaaaaccgtagtggccattttcgtagtggttgtcgtgtacttggtgacaggcggcctcgttttcagggctcttgagcagccttttgagtcctcacagaaaaacaccatcgctctcgaaaaagccgagttccttcgggatcatgtgtgcgttagccctcaagagctggagacactaattcaacacgctctagatgccgataacgccggtgtttctcctattggcaacagctcaaacaactcatcgcactgggacctgggctccgcctttttcttcgccggtaccgtgatcacaacaattggatatggaaacattgcaccttccactgagggaggaaagatattctgtatactgtacgcaatcttcgggatcccattgttcggatttctactggccggaatcggagaccagctaggcaccatatttgggaaatcaattgcgcgggtggagaaagtcttcaggaagaaacaggtctcccagactaagatcagagtcatttccaccattttattcatcctggccgggtgtatcgtgttcgtcactatccccgcagttattttcaagtacatagaagggtggactgctctcgaatctatatacttcgttgttgtcacgctcaccacagtcgggttcggcgatttcgttgcgggtgggaatgctggcattaattacagagaatggtacaagccactggtttggttttggatcttggtgggactggcatactttgcggcggtcctctccatgattggcgattggcttcgcgtgcttagcaaaaaaactaaggaggaggtaggcgagattaaagctcatgccgccgaatggaaagctaatgtgactgcagagtttagggaaactcgccggcgcctgagcgtagaaatccatgataaacttcagcgagccgctaccatcagaagtatggagagacggcgtctggggcttgaccagcgtgcccattccttggacatgctatcaccagagaaacgtagcgtattcgccgcactggataccggacggtttaaagcgtcttctcaggagtccatcaacaaccggccaaataatcttcggctgaaggggcccgagcagttgaacaagcatggccagggggcaagcgaagacaatatcatcaataagtttggttcaacaagccgcttaaccaaacggaaaaataaggacttgaagaagactctccctgaggacgtgcagaagatttataagacatttaggaattattccctcgatgaagaaaaaaaagaggaagagaccgaaaaaatgtgtaatagtgataactctagcacagccatgcttaccgattgtatccagcagcatgccgagctggaaaatgggatgattccaacggacacaaaggatagagagcccgagaacaactccctccttgaggataggaattag

SEQ ID NO: 236139 - DNA, 2725 bp, Artificial Sequence
  derived and/or modified sequence
gtgtgcgggtgtgtgtgtgcgggagtgtgtgcgcacacgccttcgggggctggagtgacactgcagtgggcttctccgtagccccagccttcaggctgcgcagcccctaacctgccggcaccgcttttgggaagcagcttggctcttccatctccccaagccttcctctccatcctttcatccacccctcgccgatcttactttttcttttacccacggggccgcggccggccaccccctggccggtgcaaacacccaagccctctccagttctcccccaagctaatattttcccacctgtctttttctggggttcctccacgagccagtccaaggctcccccatcctcggaaattgttttgttggactgctaaaccgaggcgtgtaaagcttgaggactttattattatttgggttcttttcatttcttccccttctgggcaacgaagcaatgaaatttccaatcgagacgccaagaaaacaggtgaactgggatcctaaagtggccgttcccgcagcagcaccggtgtgccagcccaagagcgccactaacgggcaacccccggctccggctccgactccaactccgcgcctgtccatttcctcccgagccacagtggtagccaggatggaaggcacctcccaagggggcttgcagaccgtcatgaagtggaagacggtggttgccatctttgtggttgtggtggtctaccttgtcactggcggtcttgtcttccgggcattggagcagccctttgagagcagccagaagaataccatcgccttggagaaggcggaattcctgcgggatcatgtctgtgtgagcccccaggagctggagacgttgatccagcatgctcttgatgctgacaatgcgggagtcagtccaataggaaactcttccaacaacagcagccactgggacctcggcagtgcctttttctttgctggaactgtcattacgaccatagggtatgggaatattgctccgagcactgaaggaggcaaaatcttttgtattttatatgccatctttggaattccactctttggtttcttattggctggaattggagaccaacttggaaccatctttgggaaaagcattgcaagagtggagaaggtctttcgaaaaaagcaagtgagtcagaccaagatccgggtcatctcaaccatcctgttcatcttggccggctgcattgtgtttgtgacgatccctgctgtcatctttaagtacatcgagggctggacggccttggagtccatttactttgtggtggtcactctgaccacggtgggctttggtgattttgtggcagggggaaacgctggcatcaattatcgggagtggtataagcccctagtgtggttttggatccttgttggccttgcctactttgcagctgtcctcagtatgatcggagattggctacgggttctgtccaaaaagacaaaagaagaggtgggtgaaatcaaggcccatgcggcagagtggaaggccaatgtcacggctgagttccgggagacacggcgaaggctcagcgtggagatccacgataagctgcagcgggcggccaccatccgcagcatggagcgccggcggctgggcctggaccagcgggcccactcactggacatgctgtcccccgagaagcgctctgtctttgctgccctggacaccggccgcttcaaggcctcatcccaggagagcatcaacaaccggcccaacaacctgcgcctgaaggggccggagcagctgaacaagcatgggcagggtgcgtccgaggacaacatcatcaacaagttcgggtccacctccagactcaccaagaggaaaaacaaggacctcaaaaagaccttgcccgaggacgttcagaaaatctacaagaccttccggaattactccctggacgaggagaagaaagaggaggagacggaaaagatgtgtaactcagacaactccagcacagccatgctgacggactgtatccagcagcacgctgagttggagaacggaatgatacccacggacaccaaagaccgggagccggagaacaactcattacttgaagacagaaactaaatgtgaaggacattggtcttggactgagcgttgtgtgtgtgtgtgtgtgtgtttttaatattcacactgagacatgtgccttaaacagactttttagtccaaaattacatagcattgaagaatatatttcactgtgccataaacaactgaaagcttgctctgccaaaaggaatcagagaacaagaacttcatttcagatagcaaacgcaggacacaccaagagtgtccgtgcacgtagccggttctggccgtacatgttaagggcatttcagtggcagtgctgtacccctgggcagtgctacctgggcacacacgtagacaagggcagctattccttagaccagcctcctgaaagaaacaggtgtgtctttttagtggagtcgtagtaatatgtgcacacacagaaggggacctgattgggtgggagctggttatgtgtaactagcgttggagttgacattttggcatgtgctctgagcttgaattttgataccaaccattcagtgcatcatacctagtctttctatgctccaaatgaatgtctgtggggacctgagagcacctggaatttgttggaagcagatcagagcacacgtacgaaaaggtgcaattgcttttctcatgacaaaagaaaaaaaataa

SEQ ID NO: 236140 - DNA, 1632 bp, Artificial Sequence
  derived and/or modified sequence
atgaaattccccattgagacaccacgcaaacaggtcaactgggacccaaaagtggccgtgcccgctgcagcgcctgtatgtcagcccaaatcggcaactaacggacagccacccgcacccgctccaacaccgactcctagactatccatttcctccagggctactgttgtggccagaatggagggtacgtcacagggaggcctgcaaactgtcatgaagtggaagacagtcgtggctatcttcgtcgtggtggtggtatatttggtcacagggggtctggtgttccgcgctctcgaacagccgtttgagtcctctcagaagaatacaattgcattagagaaggcggagttccttcgcgaccatgtgtgtgtctctcctcaggagctggagaccctgatccagcacgcactggacgccgataatgccggagtgtctcccattggaaactcttcaaacaacagttctcattgggacctcgggtctgcctttttttttgccggtaccgttatcacaacaatcggttacggcaacatcgctccctcaactgagggcggaaaaatcttctgtatcctctatgcaattttcgggataccgctgtttggttttctgctcgccggaataggtgaccagctaggcactattttcggaaagtctatcgccagggtggagaaggtttttaggaagaaacaagttagccagactaaaattagagtcatttccactatccttttcatactggctggatgcatcgtatttgtgactatacctgccgtcatattcaagtacattgaggggtggaccgccctggagagcatatattttgttgtcgttacgttgaccacagtcgggttcggcgactttgtggcaggcggaaatgccggaatcaactaccgcgaatggtacaaacccctggtgtggttctggatcctagtcgggttggcctactttgccgcagtgttatccatgataggagactggctaagagtgttgtctaaaaaaaccaaggaagaggtgggcgagataaaggcacatgctgctgagtggaaagctaatgtgactgctgagtttagagagacacgcagacggctcagtgtcgaaatacacgacaaattgcagcgggctgccacaattcgctccatggagaggcgaaggctgggcctggaccaaagggcacactctctggatatgctgagccccgagaaacgcagcgtcttcgccgcactcgatactggcagattcaaggcttcatcccaagagtctatcaacaataggccaaataatctgcgtttgaaaggtcctgaacaactcaacaagcacggccagggggcttcggaggacaacattatcaacaaatttggtagcacgagcaggctgacgaagaggaaaaataaggatctcaagaagactctgcctgaggatgtgcaaaagatctacaaaacgttccgtaactattcccttgacgaggaaaagaaagaagaagagaccgaaaagatgtgcaattccgataacagctcaacagccatgctgaccgattgcattcagcagcatgccgagttggagaacggcatgatccccaccgataccaaggatagggaacccgaaaataacagcctactggaggaccgcaactag

SEQ ID NO: 236141 - DNA, 1632 bp, Artificial Sequence
  derived and/or modified sequence
atgaagttccccatcgagacccccagaaagcaggtgaactgggaccccaaggtggccgtgcccgccgccgcccccgtgtgccagcccaagagcgccaccaacggccagccccccgcccccgcccccacccccacccccagactgagcatcagcagcagagccaccgtggtggccagaatggagggcaccagccagggcggcctgcagaccgtgatgaagtggaagaccgtggtggccatcttcgtggtggtggtggtgtacctggtgaccggcggcctggtgttcagagccctggagcagcccttcgagagcagccagaagaacaccatcgccctggagaaggccgagttcctgagagaccacgtgtgcgtgagcccccaggagctggagaccctgatccagcacgccctggacgccgacaacgccggcgtgagccccatcggcaacagcagcaacaacagcagccactgggacctgggcagcgccttcttcttcgccggcaccgtgatcaccaccatcggctacggcaacatcgcccccagcaccgagggcggcaagatcttctgcatcctgtacgccatcttcggcatccccctgttcggcttcctgctggccggcatcggcgaccagctgggcaccatcttcggcaagagcatcgccagagtggagaaggtgttcagaaagaagcaggtgagccagaccaagatcagagtgatcagcaccatcctgttcatcctggccggctgcatcgtgttcgtgaccatccccgccgtgatcttcaagtacatcgagggctggaccgccctggagagcatctacttcgtggtggtgaccctgaccaccgtgggcttcggcgacttcgtggccggcggcaacgccggcatcaactacagagagtggtacaagcccctggtgtggttctggatcctggtgggcctggcctacttcgccgccgtgctgagcatgatcggcgactggctgagagtgctgagcaagaagaccaaggaggaggtgggcgagatcaaggcccacgccgccgagtggaaggccaacgtgaccgccgagttcagagagaccagaagaagactgagcgtggagatccacgacaagctgcagagagccgccaccatcagaagcatggagagaagaagactgggcctggaccagagagcccacagcctggacatgctgagccccgagaagagaagcgtgttcgccgccctggacaccggcagattcaaggccagcagccaggagagcatcaacaacagacccaacaacctgagactgaagggccccgagcagctgaacaagcacggccagggcgccagcgaggacaacatcatcaacaagttcggcagcaccagcagactgaccaagagaaagaacaaggacctgaagaagaccctgcccgaggacgtgcagaagatctacaagaccttcagaaactacagcctggacgaggagaagaaggaggaggagaccgagaagatgtgcaacagcgacaacagcagcaccgccatgctgaccgactgcatccagcagcacgccgagctggagaacggcatgatccccaccgacaccaaggacagagagcccgagaacaacagcctgctggaggacagaaactag

SEQ ID NO: 236142 - protein, 543 aa, Artificial Sequence
  derived and/or modified sequence
MEDGFKGDRTEGCRSDSVAVPAAAPVCQPKSATNGQPPAPAPTPTPRLSISSRATVVARMEGTSQGGLQTVMKWKTVVAIFVVVVVYLVTGGLVFRALEQPFESSQKNTIALEKAEFLRDHVCVSPQELETLIQHALDADNAGVSPIGNSSNNSSHWDLGSAFFFAGTVITTIGYGNIAPSTEGGKIFCILYAIFGIPLFGFLLAGIGDQLGTIFGKSIARVEKVFRKKQVSQTKIRVISTILFILAGCIVFVTIPAVIFKYIEGWTALESIYFVVVTLTTVGFGDFVAGGNAGINYREWYKPLVWFWILVGLAYFAAVLSMIGDWLRVLSKKTKEEVGEIKAHAAEWKANVTAEFRETRRRLSVEIHDKLQRAATIRSMERRRLGLDQRAHSLDMLSPEKRSVFAALDTGRFKASSQESINNRPNNLRLKGPEQLNKHGQGASEDNIINKFGSTSRLTKRKNKDLKKTLPEDVQKIYKTFRNYSLDEEKKEEETEKMCNSDNSSTAMLTDCIQQHAELENGMIPTDTKDREPENNSLLEDRN

SEQ ID NO: 236143 - DNA, 1632 bp, Artificial Sequence
  derived and/or modified sequence
atggaggatggctttaagggcgaccgaactgaaggctgccgtagcgattctgtggccgtgccagccgctgctcccgtctgtcaacctaaaagcgccacaaacggacagcctcctgccccagcgcccaccccgactccacgacttagcattagttcgcgggctaccgtagtggctcgtatggagggtacatcacagggggggctccagaccgtgatgaaatggaaaacagtggtggctatcttcgtcgttgttgtggtctacttagtgactggcggcttagtttttagagccctagagcagcccttcgaatcttctcagaagaatacaattgccttagaaaaagcagaatttctcagagaccatgtgtgcgtaagcccacaggagctggaaaccttgattcagcacgccctagacgccgacaacgccggcgtttcacctattggcaactctagcaacaattcttcccactgggacctgggcagcgctttcttttttgctggaactgttatcaccaccatcggttacggcaatatcgccccgtcaacagaaggtggaaaaattttctgtattctctatgccatcttcggcatccctcttttcggatttctcctcgctggcataggggatcaactcggaactatttttgggaagtctattgcccgcgttgagaaggtgttccgcaagaagcaggtatcgcagacgaaaattagggtcataagcaccatattattcatcttggccggatgtatcgtattcgttaccattccagccgtcatcttcaagtacatcgaagggtggacagcattggagtctatttacttcgtggtggtgacactgaccaccgtggggttcggtgacttcgtggccgggggtaacgcaggtatcaattacagagagtggtataagccactggtgtggttctggattttggtcgggcttgcctactttgccgccgtgctcagtatgatcggcgactggttgagggttctgagtaagaaaactaaggaggaggtcggagagataaaagcccacgcagcagagtggaaggccaacgtaacggcagaatttagagaaacaaggcgcagactcagcgtagagattcacgataaattgcagagagcagctacaattcggtccatggagcggcggcgcctcggactggaccagcgagcccatagcttagacatgctttcgcctgagaagagatcagtgtttgccgctctcgacacgggtagatttaaagcaagctcacaggaatctattaataacagaccaaataacctgagactgaagggcccggagcaacttaacaagcatggacaaggagcaagcgaagataatataatcaacaagtttggcagcacttctagacttactaaaaggaaaaataaagacctcaagaagaccctgccagaggatgtgcagaagatctataaaacgttcaggaattacagccttgacgaggagaaaaaagaggaggagacagaaaaaatgtgcaattccgacaactctagcacagcaatgctcactgattgcattcagcagcacgccgagcttgagaatgggatgatcccaacggatacaaaggacagggagccagaaaataactccttgttggaggaccggaattag

SEQ ID NO: 236144 - DNA, 1632 bp, Artificial Sequence
  derived and/or modified sequence
atggaggatggcttcaagggggacagaacagagggctgccgcagtgacagcgtggccgtgcctgctgctgcccctgtgtgccagcccaagagcgccaccaacggccagcccccagccccagcccccacccccaccccccggctgagcatcagcagccgggccaccgtggtggccaggatggagggcaccagccagggcggcctgcagacagtgatgaagtggaagacagtggtggccatctttgtggtggtggtggtgtacctggtgactggaggcctggtgttccgggccctggagcagccctttgagagcagccagaagaacaccatcgccctggagaaggccgagttcctgcgggaccacgtgtgtgtgagcccccaggagctggagaccctcatccagcacgccctggatgctgacaatgctggggtgagccccatcggcaacagcagcaacaacagcagccactgggacctgggcagcgccttcttctttgctggcaccgtcatcaccaccatcggctacggcaacatcgcccccagcacagagggcggcaagatcttctgcatcctgtatgccatcttcggcatccccctgtttggcttcctgctggccggcattggagaccagctgggcaccatctttgggaagagcatcgcccgggtggagaaggtgttcaggaagaagcaggtgtcccagaccaagatccgggtcatcagcaccatcctcttcatcctggccggctgcatcgtgtttgtgaccatcccagctgtgatcttcaagtacatcgagggctggacagccctggagagcatctactttgtggtggtgaccctgaccaccgtgggctttggagactttgtggccggcggcaatgccggcatcaactaccgggagtggtacaagcccctggtgtggttctggatcctggtgggcctggcctactttgctgctgtgctgtccatgattggagactggctgcgggtgctgagcaagaagaccaaggaggaggtgggggagatcaaggcccatgctgctgagtggaaggccaacgtgacagctgagttccgggagacccggcggcggctgtctgtggagatccatgacaagctgcagagagctgccaccatccgctccatggagcggcggcggctgggcctggaccagagggcccacagcctggacatgctgagccctgagaagaggtctgtgtttgctgccctggacaccggccgcttcaaggccagcagccaggagagcatcaacaaccggcccaacaacctgcggctgaagggccctgagcagctgaacaagcacggccagggcgccagcgaggacaacatcatcaacaagtttggcagcaccagccggctgaccaagaggaagaacaaggacctgaagaagaccctgcctgaagatgtgcagaagatctacaagaccttcaggaactacagcctggatgaggagaagaaggaggaggagacagagaagatgtgcaacagcgacaacagcagcacagccatgctgacagactgcatccagcagcacgccgagctggagaatggcatgatccccacagacaccaaggaccgggagcctgagaacaacagcctgctggaggacaggaactag

SEQ ID NO: 236145 - DNA, 1632 bp, Artificial Sequence
  derived and/or modified sequence
atggaggacggcttcaagggcgaccggaccgagggctgccggagcgattccgtcgccgtaccggcagctgccccagtctgccagccaaaatcagcaacaaatggccaaccacccgcccctgcccccactcctactccccgcctctcgatcagttccagggccacagttgtggcccgcatggaagggacctcacagggagggctccagaccgtgatgaaatggaaaaccgtagtggccattttcgtcgtagtggtcgtgtacctagttacaggagggcttgtgtttagagctctggaacaacctttcgagagttcccagaaaaataccatcgcgctggagaaagccgagtttcttcgcgaccacgtatgtgtttctcctcaggagctggagactctcattcaacatgccctggacgctgacaatgctggcgtgtctccgattggcaattcctcaaacaacagtagtcactgggacctgggctctgccttcttctttgcaggcacggtaattactacaatagggtatgggaacatcgcaccaagtaccgaagggggtaagatcttctgcattctttacgccatcttcggtattccgttgttcgggtttctcctggccggcattggcgatcagcttggcaccatcttcggcaagtctatcgcccgcgtcgagaaagtctttagaaaaaaacaagtctctcagaccaagatccgggttatctccacaatacttttcattctcgcagggtgcatcgtgttcgtgactatccccgccgttatttttaagtatatcgaagggtggacagctctggaatctatctacttcgtggtggtgacgttgactaccgtgggcttcggcgactttgtggccggcggcaacgctggtattaattaccgggagtggtacaaacccctagtatggttttggatactcgtcggacttgcatatttcgcagcggtcctgagtatgattggcgattggctgagggtgcttagtaagaagactaaagaggaggttggggaaatcaaagcacacgcagctgagtggaaagccaatgtgaccgctgagttccgtgagaccaggcggaggctaagtgttgaaatccacgataaactgcagcgcgctgcgacaatcagatcaatggaacgccgccgtctggggctggatcagcgcgcacacagccttgacatgctatctcccgaaaaacgcagcgtattcgcagcgctggacaccggtaggttcaaagcttcttcacaggagtcaattaacaataggcctaacaatttgcgcttgaagggcccagaacagttgaataagcatggccaaggcgcttctgaggacaatataattaacaaattcggatctacatcgaggctcacgaagcgcaaaaacaaagacctaaaaaaaacattgcccgaggacgtgcagaaaatttacaaaactttcaggaactactccttggatgaagagaagaaggaggaagagactgaaaagatgtgcaactctgataactcatcaacagcaatgttaaccgattgtatccaacaacacgcagaacttgagaacggaatgattcccaccgataccaaagatcgggagcccgagaacaactctcttcttgaggacagaaactag

SEQ ID NO: 236146 - DNA, 2396 bp, Artificial Sequence
  derived and/or modified sequence
gcaaggcatggagcctgcactttactctgaatgttggtggcgccttcagagcattgttagcaagggtccatgtgatcacactgacacctgagagagtgacacaccatgtacatggctggtatatggaggatggatttaagggggacaggactgaaggctgtcgcagtgattcagtggccgttcccgcagcagcaccggtgtgccagcccaagagcgccactaacgggcaacccccggctccggctccgactccaactccgcgcctgtccatttcctcccgagccacagtggtagccaggatggaaggcacctcccaagggggcttgcagaccgtcatgaagtggaagacggtggttgccatctttgtggttgtggtggtctaccttgtcactggcggtcttgtcttccgggcattggagcagccctttgagagcagccagaagaataccatcgccttggagaaggcggaattcctgcgggatcatgtctgtgtgagcccccaggagctggagacgttgatccagcatgctcttgatgctgacaatgcgggagtcagtccaataggaaactcttccaacaacagcagccactgggacctcggcagtgcctttttctttgctggaactgtcattacgaccatagggtatgggaatattgctccgagcactgaaggaggcaaaatcttttgtattttatatgccatctttggaattccactctttggtttcttattggctggaattggagaccaacttggaaccatctttgggaaaagcattgcaagagtggagaaggtctttcgaaaaaagcaagtgagtcagaccaagatccgggtcatctcaaccatcctgttcatcttggccggctgcattgtgtttgtgacgatccctgctgtcatctttaagtacatcgagggctggacggccttggagtccatttactttgtggtggtcactctgaccacggtgggctttggtgattttgtggcagggggaaacgctggcatcaattatcgggagtggtataagcccctagtgtggttttggatccttgttggccttgcctactttgcagctgtcctcagtatgatcggagattggctacgggttctgtccaaaaagacaaaagaagaggtgggtgaaatcaaggcccatgcggcagagtggaaggccaatgtcacggctgagttccgggagacacggcgaaggctcagcgtggagatccacgataagctgcagcgggcggccaccatccgcagcatggagcgccggcggctgggcctggaccagcgggcccactcactggacatgctgtcccccgagaagcgctctgtctttgctgccctggacaccggccgcttcaaggcctcatcccaggagagcatcaacaaccggcccaacaacctgcgcctgaaggggccggagcagctgaacaagcatgggcagggtgcgtccgaggacaacatcatcaacaagttcgggtccacctccagactcaccaagaggaaaaacaaggacctcaaaaagaccttgcccgaggacgttcagaaaatctacaagaccttccggaattactccctggacgaggagaagaaagaggaggagacggaaaagatgtgtaactcagacaactccagcacagccatgctgacggactgtatccagcagcacgctgagttggagaacggaatgatacccacggacaccaaagaccgggagccggagaacaactcattacttgaagacagaaactaaatgtgaaggacattggtcttggactgagcgttgtgtgtgtgtgtgtgtgtgtttttaatattcacactgagacatgtgccttaaacagactttttagtccaaaattacatagcattgaagaatatatttcactgtgccataaacaactgaaagcttgctctgccaaaaggaatcagagaacaagaacttcatttcagatagcaaacgcaggacacaccaagagtgtccgtgcacgtagccggttctggccgtacatgttaagggcatttcagtggcagtgctgtacccctgggcagtgctacctgggcacacacgtagacaagggcagctattccttagaccagcctcctgaaagaaacaggtgtgtctttttagtggagtcgtagtaatatgtgcacacacagaaggggacctgattgggtgggagctggttatgtgtaactagcgttggagttgacattttggcatgtgctctgagcttgaattttgataccaaccattcagtgcatcatacctagtctttctatgctccaaatgaatgtctgtggggacctgagagcacctggaatttgttggaagcagatcagagcacacgtacgaaaaggtgcaattgcttttctcatgacaaaagaaaaaaaataa

SEQ ID NO: 236147 - DNA, 1632 bp, Artificial Sequence
  derived and/or modified sequence
atggaagacggtttcaagggcgaccgaactgaaggctgcagaagcgactctgtggcagttcctgctgcagcccctgtgtgccaaccaaagagtgcaacaaatgggcagcctcccgcacctgctcccacaccgacacctcggctcagtatttcctcacgagccactgtggttgcccgaatggagggtacatcccagggcggattgcaaacagtgatgaaatggaagaccgtggtggcaatttttgttgtggtggtcgtatacctggtcacaggaggtctggtgttccgggcactggagcagccattcgaaagtagtcagaaaaatacaattgcactcgagaaagcagaatttctgcgggatcatgtctgcgtttcacctcaagagcttgagaccctgattcagcatgctctggatgcagacaacgcaggcgtctctcctatcggcaatagcagcaacaacagttcacactgggacctgggctccgcctttttctttgctggcaccgtcattacaacaatcggttacggcaacatcgcccctagcactgaagggggtaagattttttgcatactgtatgcaatcttcggcattccgctattcgggttcttattagccggtatcggggatcaacttggaacgatctttggaaagtctatcgcccgagtcgaaaaggtcttccgcaagaaacaggtctcacagacgaagattcgagtcatatccacaatcctgtttatcctggcgggttgtatcgtctttgttacaatcccggctgtaattttcaaatacatcgaggggtggacggcactggaatccatctacttcgtggtggtaactctgacgactgtgggattcggggactttgttgcaggtggcaacgctggaatcaattatagggaatggtataagcctctggtatggttctggatcctggtgggtttagcttattttgcagccgtcttgagcatgatcggcgattggttgcgcgtgttatccaagaaaaccaaagaagaggtcggagagatcaaagcgcatgccgcagaatggaaagcaaatgttacagccgagttccgggagacccggcgtaggctttctgtggaaattcacgataagttacagcgagcagcaacaatccgcagcatggagaggcggaggctggggctcgatcaaagggcccacagtcttgatatgctaagccccgagaaaagatccgtgtttgctgccttggatacaggcaggttcaaggcctccagtcaggagagcattaataacaggcctaataacctcagacttaaagggcctgaacagcttaataagcatggacagggagccagcgaggataatattatcaataagtttgggtcaacgtcaaggctcaccaaacgaaagaacaaggatttaaaaaagacactgcctgaggacgtgcagaagatctataagacgttccgcaattattctttagacgaggagaagaaagaggaagagacagagaaaatgtgtaactctgacaattcctccactgctatgctgactgactgcattcagcaacatgctgaattggaaaatggcatgatcccaacggataccaaagacagggaacccgaaaataattctctactcgaagaccggaactag

SEQ ID NO: 236148 - DNA, 1632 bp, Artificial Sequence
  derived and/or modified sequence
atggaggacggcttcaagggcgacagaaccgagggctgcagaagcgacagcgtggccgtgcccgccgccgcccccgtgtgccagcccaagagcgccaccaacggccagccccccgcccccgcccccacccccacccccagactgagcatcagcagcagagccaccgtggtggccagaatggagggcaccagccagggcggcctgcagaccgtgatgaagtggaagaccgtggtggccatcttcgtggtggtggtggtgtacctggtgaccggcggcctggtgttcagagccctggagcagcccttcgagagcagccagaagaacaccatcgccctggagaaggccgagttcctgagagaccacgtgtgcgtgagcccccaggagctggagaccctgatccagcacgccctggacgccgacaacgccggcgtgagccccatcggcaacagcagcaacaacagcagccactgggacctgggcagcgccttcttcttcgccggcaccgtgatcaccaccatcggctacggcaacatcgcccccagcaccgagggcggcaagatcttctgcatcctgtacgccatcttcggcatccccctgttcggcttcctgctggccggcatcggcgaccagctgggcaccatcttcggcaagagcatcgccagagtggagaaggtgttcagaaagaagcaggtgagccagaccaagatcagagtgatcagcaccatcctgttcatcctggccggctgcatcgtgttcgtgaccatccccgccgtgatcttcaagtacatcgagggctggaccgccctggagagcatctacttcgtggtggtgaccctgaccaccgtgggcttcggcgacttcgtggccggcggcaacgccggcatcaactacagagagtggtacaagcccctggtgtggttctggatcctggtgggcctggcctacttcgccgccgtgctgagcatgatcggcgactggctgagagtgctgagcaagaagaccaaggaggaggtgggcgagatcaaggcccacgccgccgagtggaaggccaacgtgaccgccgagttcagagagaccagaagaagactgagcgtggagatccacgacaagctgcagagagccgccaccatcagaagcatggagagaagaagactgggcctggaccagagagcccacagcctggacatgctgagccccgagaagagaagcgtgttcgccgccctggacaccggcagattcaaggccagcagccaggagagcatcaacaacagacccaacaacctgagactgaagggccccgagcagctgaacaagcacggccagggcgccagcgaggacaacatcatcaacaagttcggcagcaccagcagactgaccaagagaaagaacaaggacctgaagaagaccctgcccgaggacgtgcagaagatctacaagaccttcagaaactacagcctggacgaggagaagaaggaggaggagaccgagaagatgtgcaacagcgacaacagcagcaccgccatgctgaccgactgcatccagcagcacgccgagctggagaacggcatgatccccaccgacaccaaggacagagagcccgagaacaacagcctgctggaggacagaaactag

SEQ ID NO: 236149 - protein, 955 aa, Artificial Sequence
  derived and/or modified sequence
MPPRAPPAPGPRPPPRAAAATDTAAGAGGAGGAGGAGGPGFRPLAPRPWRWLLLLALPAACSPPPRPVYTNHWAVQVLGGPAEADRVAAAHGYLNLGQIGNLEDYYHFYHSKTFKRSTLSSRGPHTFLRMDPQVKWLQQQEVKRRVKRQVRSDPQALYFNDPIWSNMWYLHCGDKNSRCRSEMNVQAAWKRGYTGKNVVVTILDDGIERNHPDLAPNYDSYASYDVNGNDYDPSPRYDASNENKHGTRCAGEVAASANNSYCIVGIAYNAKIGGIRMLDGDVTDVVEAKSLGIRPNYIDIYSASWGPDDDGKTVDGPGRLAKQAFEYGIKKGRQGLGSIFVWASGNGGREGDYCSCDGYTNSIYTISVSSATENGYKPWYLEECASTLATTYSSGAFYERKIVTTDLRQRCTDGHTGTSVSAPMVAGIIALALEANSQLTWRDVQHLLVKTSRPAHLKASDWKVNGAGHKVSHFYGFGLVDAEALVVEAKKWTAVPSQHMCVAASDKRPRSIPLVQVLRTTALTSACAEHSDQRVVYLEHVVVRTSISHPRRGDLQIYLVSPSGTKSQLLAKRLLDLSNEGFTNWEFMTVHCWGEKAEGQWTLEIQDLPSQVRNPEKQGKLKEWSLILYGTAEHPYHTFSAHQSRSRMLELSAPELEPPKAALSPSQVEVPEDEEDYTGVCHPECGDKGCDGPNADQCLNCVHFSLGSVKTSRKCVSVCPLGYFGDTAARRCRRCHKGCETCSSRAATQCLSCRRGFYHHQEMNTCVTLCPAGFYADESQKNCLKCHPSCKKCVDEPEKCTVCKEGFSLARGSCIPDCEPGTYFDSELIRCGECHHTCGTCVGPGREECIHCAKNFHFHDWKCVPACGEGFYPEEMPGLPHKVCRRCDENCLSCAGSSRNCSRCKTGFTQLGTSCITNHTCSNADETFCEMVKSNRLCERKLFIQFCCRTCLLAG

SEQ ID NO: 236150 - DNA, 2868 bp, Artificial Sequence
  derived and/or modified sequence
atgccgcccagagccccaccagctcctggcccgagaccccccccgagagctgctgccgccacagacaccgccgcaggcgcgggtggcgcaggtggggccgggggagctgggggcccggggttccgacctctcgcgcccaggccctggcgatggctgctgctccttgccctgcctgctgcttgcagtcccccgccgcgccctgtatatactaaccactgggcggttcaggtgctgggtggcccggcagaagccgatagagtcgctgcagcgcatgggtacctcaatctgggtcagattggaaatctggaggactactatcacttctaccacagcaaaaccttcaagagatccaccctctcttcccgcggaccccacaccttcctgaggatggacccacaggtgaaatggctgcagcaacaagaggtcaagcggagggtcaagaggcaggtgcggtctgaccctcaggccctttattttaacgatcccatctggagtaacatgtggtatctccactgtggagacaagaactcgagatgccggagtgagatgaacgttcaggccgcctggaagcggggatacacgggcaagaacgtcgtggttacgatcctggatgacggtattgaaagaaaccatcccgatttggcgccaaattacgatagttatgcaagctatgatgtgaatggaaatgactacgatccttcgcctcgctatgatgcatctaacgagaataaacacggcacccgctgtgccggcgaggttgctgcatcagctaacaatagctattgcatagtgggaatcgcctataacgccaaaattggcgggatccgcatgctggatggcgacgtgacagatgtcgtcgaggccaagagtcttggcatcagacccaattatattgatatctactcagccagttgggggcccgacgacgacggaaagaccgtggatggtcctgggcgattggccaaacaagccttcgagtatgggatcaaaaaaggcaggcaggggctgggctctatcttcgtgtgggctagtgggaacgggggaagggaaggcgactattgtagttgcgatggctatacaaacagcatttatacaataagtgtgagttctgccactgagaacggctataagccgtggtacctggaagaatgtgcctctactctggccactacatacagctcaggggccttctacgaacggaaaatcgtcactaccgacctgagacagcgttgcacagatggtcatacaggcacttccgtctcggccccaatggtagccgggattatcgccttagcactagaagccaattctcagctgacgtggagggatgtgcaacatctcctggtgaagacctccagacccgcgcatctcaaagccagcgattggaaggtgaacggggcagggcacaaggtctcacatttttacggatttgggctagttgacgcagaagccctggtggtcgaagctaagaagtggactgcagtcccgtcccagcacatgtgtgtggccgcaagtgacaagcgcccgagaagtatccctctagtacaggtcctccgcacgaccgcattgacctccgcatgcgcagaacactctgaccagagggttgtgtatctagagcatgtggttgtgcgcacctcaatctcgcaccctcggaggggtgacctccagatctacttggtttctccatcagggacaaagtcccagctcctcgccaaacggctcctcgacttaagtaatgaaggatttacaaactgggagttcatgacagtccactgttggggtgagaaagccgagggccagtggacgctcgaaatccaggatctcccaagccaggttcggaaccctgaaaaacagggaaagctgaaagagtggtcacttatattgtacggaaccgctgagcacccttatcacacattctccgcacaccaaagcaggtctaggatgttggaactgtctgcacctgagttggagccccccaaagctgcgctcagtccttctcaagtcgaagtaccggaagatgaagaagattacacaggggtttgccaccccgagtgcggggacaagggttgcgatggacctaatgcagatcagtgcctgaactgcgtacatttttctctgggatccgtaaaaacatcccgtaaatgtgtgtccgtttgccctctggggtacttcggcgacactgccgccagaagatgcagaaggtgccataagggctgcgagacctgttcttctcgggctgctacacagtgcctgtcctgccggcggggattctaccatcaccaggagatgaatacctgtgttaccctttgccccgcaggcttctatgcagatgaatctcagaagaactgtctcaaatgtcacccatcttgtaaaaaatgcgttgatgaacccgaaaaatgcaccgtctgcaaagaaggcttctctctcgccagagggtcctgtatcccagattgcgagcccgggacatatttcgacagcgagttaatccggtgcggggaatgccaccatacatgcggcacctgcgtgggcccaggccgcgaggagtgcatccattgtgccaaaaatttccattttcacgactggaagtgtgtgcctgcgtgtggcgaagggttttatcccgaggagatgcctgggctgccccataaagtttgtcgaaggtgcgacgagaactgccttagttgtgctggttcctcccggaattgttcccggtgtaagacaggattcacgcagcttggcacctcttgcatcactaaccacacctgttctaacgccgatgagacattttgcgaaatggtgaagagtaacagattatgcgagcgcaaactatttatacagttctgttgcaggacatgtctcctcgccgggtag

SEQ ID NO: 236151 - DNA, 2868 bp, Artificial Sequence
  derived and/or modified sequence
atgccaccccgggcccccccagcccctggcccccggcccccacccagggctgctgctgccacagacacagctgctggagctggaggagctgggggcgccggcggggccggcggccctggcttccggcccctggccccccggccctggcgctggctgctgctgctggccctgcctgctgcctgcagccccccacccaggcctgtgtacaccaaccactgggccgtgcaggtgctgggcggccctgctgaggccgacagagtggccgccgcccacggctacctgaacctgggccagatcggcaacctggaggactactaccacttctaccacagcaagaccttcaagaggagcaccctgagcagccggggcccccacaccttcctgaggatggacccccaggtgaagtggctgcagcagcaggaggtgaagagaagagtgaagaggcaggtgcggagtgacccccaggccctgtacttcaatgaccccatctggagcaacatgtggtacctgcactgtggggacaagaacagccgctgccgctctgagatgaatgtgcaggccgcctggaagaggggctacaccgggaagaatgtggtggtgaccatcctggatgatggcattgaaagaaaccacccagacctggcccccaactatgacagctatgccagctatgatgtgaatggaaatgactatgaccccagccccaggtatgatgccagcaatgaaaacaagcacggcacccgctgtgccggggaggtggccgccagcgccaacaacagctactgcatcgtgggcatcgcctacaatgccaagattggaggcatccgcatgctggatggagatgtgacagatgtggtggaggccaagagcctgggcatccggcccaactacatcgacatctacagcgcctcctggggcccagatgatgatggcaagacagtggatggccctggccgcctggccaagcaggcctttgaatatggcatcaagaagggccggcagggcctgggcagcatctttgtgtgggccagcggaaatggaggccgggagggggactactgcagctgtgatggctacaccaacagcatctacaccatctctgtgagcagcgccacagaaaatggctacaagccctggtacctggaggagtgtgccagcaccctggccaccacctacagcagcggggccttctatgaaaggaagatcgtgaccacagacctgcggcagcgctgcacagatggccacacaggcacctctgtgtctgcccccatggtggccggcatcatcgccctggccctggaggccaacagccagctgacctggagagatgtgcagcacctgctggtgaagaccagcaggcctgcccacctgaaggccagtgactggaaggtgaatggagctggccacaaggtgagccacttctacggcttcggcctggtggatgctgaggccctggtggtggaggccaagaagtggacagctgtgcccagccagcacatgtgtgtggccgccagtgacaagaggcccaggagcatccccctggtgcaggtgctgcggaccacagccctgaccagcgcctgtgccgagcacagcgaccagagggtggtgtacctggagcacgtggtggtgaggaccagcatcagccaccccaggagaggagacctgcagatctacctggtgagccccagcggcaccaagagccagctgctggccaagaggctgctggacctgagcaatgaaggcttcaccaactgggagttcatgacagtgcactgctggggcgagaaggccgagggccagtggaccctggagatccaggacctgcccagccaggtgagaaatcctgagaagcagggcaagctgaaggagtggagcctcatcctgtatggaacagctgagcacccctaccacaccttcagcgcccaccagagccgcagcaggatgctggagctgagcgcccctgagctggagccccccaaggccgccctgagccccagccaggtggaggtgcctgaagatgaggaggactacacaggagtgtgccacccagaatgtggggacaagggctgtgatggccccaatgctgaccagtgcctgaactgtgtgcacttcagcctgggctctgtgaagaccagcaggaaatgtgtgtctgtgtgccccctgggctactttggagacacagctgcccggcgctgccgccgctgccacaagggctgtgagacctgcagcagccgggccgccacccagtgcctgagctgccggcggggcttctaccaccaccaggagatgaacacctgtgtgaccctgtgcccagctggcttctatgcagatgagagccagaagaactgcctgaagtgccaccccagctgcaagaagtgtgtggatgagcctgagaagtgcaccgtgtgcaaggagggcttcagcctggcccggggcagctgcatcccagactgtgagcccggcacctactttgacagcgagctgatccgctgtggggagtgccaccacacctgtggcacctgtgtgggccctggccgggaggagtgcatccactgtgccaagaacttccacttccatgactggaagtgtgtgcctgcctgtggggagggcttctacccagaggagatgcctggcctgccccacaaggtgtgcagaagatgtgatgagaactgcctgagctgtgccggcagcagcaggaactgcagccgctgcaagacaggcttcacccagctgggcaccagctgcatcaccaaccacacctgcagcaatgctgatgagaccttctgtgagatggtgaagagcaaccggctgtgtgagaggaagctgttcatccagttctgctgcaggacctgcctgctggccggctag

SEQ ID NO: 236152 - DNA, 2868 bp, Artificial Sequence
  derived and/or modified sequence
atgcccccccgggccccccccgcccccggcccccggccccccccccgggcagccgctgctacggacacagcggcaggggctgggggcgccgggggtgcaggcggcgccggcgggcctggctttaggccactggccccacgcccctggaggtggctcctactgcttgcccttcctgctgcctgcagtccaccaccaagacctgtgtacacaaaccactgggccgttcaggtgctgggcgggcctgcggaggctgatcgtgtggctgccgctcacggatacctgaatctggggcagattgggaacctggaagactactaccatttttatcactcgaagacattcaagcgttcgaccctctcctcgcgcggaccccacacctttctgcgcatggacccccaagtcaagtggctgcagcaacaggaggtgaagcgccgggttaagaggcaagtgcggagcgatccacaggccctttatttcaatgaccccatatggagcaatatgtggtacctacactgcggagacaagaactctcgctgcagatccgagatgaacgtgcaggcggcttggaaaagaggctacaccgggaagaatgttgtggtaaccatcctggacgacggaatcgaaaggaaccacccggatctagctcctaactatgactcctatgccagctatgatgtaaacggcaacgactatgatccgtcgccaaggtacgatgcatcaaacgaaaataagcatgggaccaggtgcgcaggggaagtggccgcatcggccaacaacagctactgcattgttgggattgcgtacaatgcaaaaattggggggattaggatgctggacggcgacgttactgacgtggtcgaggcgaagtccctgggaatccgacccaactatattgacatctattctgccagttggggcccagatgatgacgggaagactgtggatggaccaggtcgactcgcgaagcaggcttttgagtatggcatcaagaagggccgccaggggctgggaagcatatttgtgtgggcttcgggaaatggtggtcgcgaaggagattattgttcctgcgacggctatacgaactcaatttatacgatctctgtaagttctgcgacggaaaatggctacaaaccttggtatctagaggaatgcgcctctacacttgcaaccacatacagttccggcgctttttacgagcgcaagatcgtcaccacagacttgagacagaggtgcaccgatggtcacactggcacaagcgtctcagcccccatggtggccggcatcatcgcgttggcattagaggcgaacagtcagctcacctggcgagatgtgcagcatctgttggtgaagacctcacggccggcacacctgaaggcatctgactggaaagtgaacggagcagggcacaaagtgtcccacttttacgggttcggtctggttgacgcagaggctttggtggtggaagccaaaaagtggacggcagtgcccagccagcatatgtgtgttgcggcatccgacaaacgtcctaggtccatccccctcgtacaagtgctccgcactaccgcccttactagtgcatgcgctgaacactccgatcaacgggtagtctaccttgaacacgtcgttgttcgcacttctatttctcatccaagacgaggagacctccagatctatctggtctcacccagcgggacaaaatcccagttgctagctaagcggctgctggacctctctaacgagggattcacaaactgggagtttatgactgttcactgttggggcgaaaaggccgaaggccaatggacattagaaattcaggacttacctagtcaggtccggaacccagaaaagcagggcaaactgaaggaatggtccctgattctgtatggaacagcagagcatccatatcatactttttccgctcaccagtccagaagccgaatgctggaattaagtgcaccagaactcgagccgcccaaggctgccctgtcccctagtcaggtggaggtcccagaagacgaggaggactataccggagtgtgccaccccgaatgtggagacaagggctgtgacggtcccaatgccgaccagtgcttgaactgtgttcacttttctcttgggtcagtcaagacgtcacgaaagtgtgtttccgtgtgtcccttggggtacttcggggataccgccgcccgcaggtgcaggcgatgccacaagggatgcgagacttgcagcagccgcgccgctacacaatgcctaagttgccggcgcggattttatcatcatcaggaaatgaatacttgcgttactctgtgtcccgcagggttctatgcggatgagtcccagaagaactgcctgaaatgtcacccgtcttgtaagaaatgcgttgatgaacccgaaaaatgcacagtatgtaaagagggtttctctctggcaagggggtcctgtatccccgattgtgaacctgggacgtacttcgattcagagctgatccgctgcggcgagtgtcatcacacttgtgggacatgcgtgggacccggcagggaagaatgtatccattgcgccaagaacttccatttccatgactggaagtgcgtcccagcatgcggtgagggcttctatcccgaagagatgccaggcctccctcacaaagtgtgccgccgatgcgatgaaaactgcctgagctgcgcgggctcctctcgtaattgttcccgttgcaaaaccggttttacacagcttggcacatcttgtattacaaatcatacttgtagcaatgccgacgagacattttgcgagatggtaaaaagcaatcgtctctgcgagcgtaaactattcatccagttctgttgtagaacctgcttattagcgggatag

SEQ ID NO: 236153 - DNA, 2868 bp, Artificial Sequence
  derived and/or modified sequence
atgcctccacgcgcacctcctgccccaggcccacgccctccacctagagcagcggctgccaccgacactgctgctggggctggaggagccggtggagcaggtggggctggaggtcccggattccgcccactagctccccgaccttggcgctggcttctgctccttgccctaccagctgcatgcagcccgcctccgaggccggtttatacaaatcattgggcggtgcaggtcctcgggggtcccgctgaagcggacagggtagccgcagctcacggatatcttaatctggggcaaatcggcaacctggaggattactaccacttttatcactccaagaccttcaagcggtccactctgtctagccgcggtccccacacctttttgaggatggacccccaggtgaagtggctgcagcagcaggaagtaaagagaagagtcaagagacaggtgagatccgacccacaggccctgtacttcaacgaccccatctggtctaatatgtggtatctgcactgcggtgacaagaattcaaggtgccgatctgaaatgaatgtgcaggctgcttggaagagaggctacactggaaaaaatgtagtcgttaccatcctggatgatggaatcgagcgcaaccatcctgacttagctcccaactacgatagttacgctagctatgatgtcaacggaaacgactatgatccgtccccgaggtacgacgccagtaacgagaataagcacggcactagatgtgcaggcgaggtcgccgcttctgcaaacaattcgtattgcatcgtggggatagcgtacaacgccaaaattgggggaatacggatgctggatggggacgtaacagacgtggtagaagccaaaagcttgggtattcggccaaactacatcgatatttactccgcctcctggggacccgatgacgacggcaagaccgtggacgggccaggaagattggctaaacaagctttcgagtatggtatcaaaaaaggcagacaaggactcggaagcatcttcgtgtgggccagtgggaatggcggaagggaaggagattactgttcatgcgacggctatactaattccatctataccataagcgtgtcatcagcgactgaaaatggctacaagccgtggtatttggaggaatgcgcatcaactctggctactacatactcctcaggtgccttttatgaacgcaagatagtcaccacagatctgcgtcagcggtgtaccgatgggcatacaggcacaagtgtgtcagcacctatggtggccggtattatcgccctggccctggaggccaattcccagctgacttggagagatgtccaacacttgttagtcaaaacttcaaggcccgctcatctgaaggcctcagattggaaggtgaacggcgctggccacaaagtcagccatttttacggcttcggcctggtggacgccgaagctctggttgtcgaggccaaaaagtggacggccgtgcccagccagcacatgtgtgtggcggcttcagacaaaaggcctaggtcaatccccttagtccaagtccttaggactacggcacttaccagcgcctgtgctgaacatagcgaccagagagtggtgtacctggaacacgtggtggtgcgcacaagtatttcacatcctagacggggagatttacagatctacctggtgtcaccatccgggaccaaatcccagttgttagctaagaggttacttgacctgagtaacgagggcttcacaaactgggaatttatgaccgtgcattgctggggggagaaagctgagggccagtggactctcgagatccaagacctcccttcgcaggtgcgcaaccctgaaaagcaaggcaagttgaaggaatggtctctgatcctttacgggactgcagagcacccttatcacactttcagcgcccatcagagccgctccagaatgcttgaactgtctgcccctgagctcgagccccctaaagccgctctgtctccttcgcaggttgaagtgcctgaagatgaagaggactacacaggggtgtgccacccagagtgtggcgacaagggttgcgacggaccgaacgcggaccagtgcctaaactgtgttcactttagtcttggatccgtcaaaacttccaggaaatgtgtgagtgtttgccctctggggtacttcggtgatacggcagccagacgctgccgaagatgtcacaaaggttgtgagacctgcagcagccgtgcagctacacagtgcttatcttgcagacggggattctatcaccaccaggagatgaatacatgcgtcacgctgtgtcccgctggattctatgccgatgagagtcagaagaattgcctgaaatgtcatccatcttgcaagaagtgcgtagacgagccagaaaagtgcaccgtctgcaaggaagggttctccttggcccgagggtcttgcatcccggattgcgagccaggcacgtacttcgattcagagctcataagatgcggagagtgccatcatacgtgtggaacatgtgtgggaccgggacgagaagaatgcattcactgcgccaagaacttccattttcacgactggaaatgcgttccagcgtgtggggaggggttttaccctgaagagatgccgggactcccccacaaggtgtgcaggcgatgtgatgagaattgcctcagctgcgccggttcctctcgcaactgctcaaggtgtaaaaccggatttacccagcttgggaccagttgcattaccaatcatacatgctccaatgccgatgagacattctgcgaaatggtaaaatcgaaccgcctgtgcgagagaaaattgttcatccagttttgctgccgaacctgtctgctagctggatag

SEQ ID NO: 236154 - DNA, 4197 bp, Artificial Sequence
  derived and/or modified sequence
atgcctccgcgcgcgccgcctgcgcccgggccccggccgccgccccgggccgccgccgccaccgacaccgccgcgggcgcggggggcgcggggggcgcggggggcgccggcgggcccgggttccggccgctcgcgccgcgtccctggcgctggctgctgctgctggcgctgcctgccgcctgctcccccccgccgcgccccgtctacaccaaccactgggcggtgcaagtgctgggcggcccggccgaggcggaccgcgtggcggcggcgcacgggtacctcaacttgggccagattggaaacctggaagattactaccatttttatcacagcaaaacctttaaaagatcaaccttgagtagcagaggccctcacaccttcctcagaatggacccccaggtgaaatggctccagcaacaggaagtgaaacgaagggtgaagagacaggtgcgaagtgacccgcaggccctttacttcaacgaccccatttggtccaacatgtggtacctgcattgtggcgacaagaacagtcgctgccggtcggaaatgaatgtccaggcagcgtggaagaggggctacacaggaaaaaacgtggtggtcaccatccttgatgatggcatagagagaaatcaccctgacctggccccaaattatgattcctacgccagctacgacgtgaacggcaatgattatgacccatctccacgatatgatgccagcaatgaaaataaacacggcactcgttgtgcgggagaagttgctgcttcagcaaacaattcctactgcatcgtgggcatagcgtacaatgccaaaataggaggcatccgcatgctggacggcgatgtcacagatgtggtcgaggcaaagtcgctgggcatcagacccaactacatcgacatttacagtgccagctgggggccggacgacgacggcaagacggtggacgggcccggccgactggctaagcaggctttcgagtatggcattaaaaagggccggcagggcctgggctccattttcgtctgggcatctgggaatggcgggagagagggggactactgctcgtgcgatggctacaccaacagcatctacaccatctccgtcagcagcgccaccgagaatggctacaagccctggtacctggaagagtgtgcctccaccctggccaccacctacagcagtggggccttttatgagcgaaaaatcgtcaccacggatctgcgtcagcgctgtaccgatggccacactgggacctcagtctctgcccccatggtggcgggcatcatcgccttggctctagaagcaaacagccagttaacctggagggacgtccagcacctgctagtgaagacatcccggccggcccacctgaaagcgagcgactggaaagtgaacggcgcgggtcataaagttagccatttctatggatttggtttggtggacgcagaagctctcgttgtggaggcaaagaagtggacagcagtgccatcgcagcacatgtgtgtggccgcctcggacaagagacccaggagcatccccttagtgcaggtgctgcggactacggccctgaccagcgcctgcgcggagcactcggaccagcgggtggtctacttggagcacgtggtggttcgcacctccatctcacacccacgccgaggagacctccagatctacctggtttctccctcgggaaccaagtctcaacttctggcaaagaggttgctggatctttccaatgaagggtttacaaactgggaattcatgactgtccactgctggggagaaaaggctgaagggcagtggaccttggaaatccaagatctgccatcccaggtccgcaacccggagaagcaagggaagttgaaagaatggagcctcatactgtatggcacagcagagcacccgtaccacaccttcagtgcccatcagtcccgctcgcggatgctggagctctcagccccagagctggagccacccaaggctgccctgtcaccctcccaggtggaagttcctgaagatgaggaagattacacaggtgtgtgccatccggagtgtggtgacaaaggctgtgatggccccaatgcagaccagtgcttgaactgcgtccacttcagcctggggagtgtcaagaccagcaggaagtgcgtgagtgtgtgccccttgggctactttggggacacagcagcaagacgctgtcgccggtgccacaaggggtgtgagacctgctccagcagagctgcgacgcagtgcctgtcttgccgccgcgggttctatcaccaccaggagatgaacacctgtgtgaccctctgtcctgcaggattttatgctgatgaaagtcagaaaaattgccttaaatgccacccaagctgtaaaaagtgcgtggatgaacctgagaaatgtactgtctgtaaagaaggattcagccttgcacggggcagctgcattcctgactgtgagccaggcacctactttgactcagagctgatcagatgtggggaatgccatcacacctgcggaacctgcgtggggccaggcagagaagagtgcattcactgtgcgaaaaacttccacttccacgactggaagtgtgtgccagcctgtggtgagggcttctacccagaagagatgccgggcttgccccacaaagtgtgtcgaaggtgtgacgagaactgcttgagctgtgcaggctccagcaggaactgtagcaggtgtaagacgggcttcacacagctggggacctcctgcatcaccaaccacacgtgcagcaacgctgacgagacattctgcgagatggtgaagtccaaccggctgtgcgaacggaagctcttcattcagttctgctgccgcacgtgcctcctggccgggtaagggtgcctagctgcccacagagggcaggcactcccatccatccatccgtccaccttcctccagactgtcggccagagtctgtttcaggagcggcgccctgcacctgacagctttatctccccaggagcagcatctctgagcacccaagccaggtgggtggtggctcttaaggaggtgttcctaaaatggtgatatcctctcaaatgctgcttgttggctccagtcttccgacaaactaacaggaacaaaatgaattctgggaatccacagctctggctttggagcagcttctgggaccataagtttactgaatcttcaagaccaaagcagaaaagaaaggcgcttggcatcacacatcactcttctccccgtgcttttctgcggctgtgtagtaaatctccccggcccagctggcgaaccctgggccatcctcacatgtgacaaagggccagcagtctacctgctcgttgcctgccactgagcagtctggggacggtttggtcagactataaataagataggtttgagggcataaaatgtatgaccactggggccggagtatctatttctacatagtcagctacttctgaaactgcagcagtggcttagaaagtccaattccaaagccagaccagaagattctatcccccgcagcgctctcctttgagcaagccgagctctccttgttaccgtgttctgtctgtgtcttcaggagtctcatggcctgaacgaccacctcgacctgatgcagagccttctgaggagaggcaacaggaggcattctgtggccagccaaaaggtaccccgatggccaagcaattcctctgaacaaaatgtaaagccagccatgcattgttaatcatccatcacttcccattttatggaattgcttttaaaatacatttggcctctgcccttcagaagactcgtttttaaggtggaaactcctgtgtctgtgtatattacaagcctacatgacacagttggatttattctgccaaacctgtgtaggcattttataagctacatgttctaatttttaccgatgttaattattttgacaaatatttcatatattttcattgaaatgcacagatctgcttgatcaattcccttgaatagggaagtaacatttgccttaaattttttcgacctcgtctttctccatattgtcctgctcccctgtttgacgacagtgcatttgccttgtcacctgtgagctggagagaacccagatgttgtttattgaatctacaactctgaaagagaaatcaatgaagcaagtacaatgttaaccctaaattaataaaagagttaacatcccatggc

SEQ ID NO: 236155 - DNA, 2868 bp, Artificial Sequence
  derived and/or modified sequence
atgccccccagagccccccccgcccccggccccagacccccccccagagccgccgccgccaccgacaccgccgccggcgccggcggcgccggcggcgccggcggcgccggcggccccggcttcagacccctggcccccagaccctggagatggctgctgctgctggccctgcccgccgcctgcagccccccccccagacccgtgtacaccaaccactgggccgtgcaggtgctgggcggccccgccgaggccgacagagtggccgccgcccacggctacctgaacctgggccagatcggcaacctggaggactactaccacttctaccacagcaagaccttcaagagaagcaccctgagcagcagaggcccccacaccttcctgagaatggacccccaggtgaagtggctgcagcagcaggaggtgaagagaagagtgaagagacaggtgagaagcgacccccaggccctgtacttcaacgaccccatctggagcaacatgtggtacctgcactgcggcgacaagaacagcagatgcagaagcgagatgaacgtgcaggccgcctggaagagaggctacaccggcaagaacgtggtggtgaccatcctggacgacggcatcgagagaaaccaccccgacctggcccccaactacgacagctacgccagctacgacgtgaacggcaacgactacgaccccagccccagatacgacgccagcaacgagaacaagcacggcaccagatgcgccggcgaggtggccgccagcgccaacaacagctactgcatcgtgggcatcgcctacaacgccaagatcggcggcatcagaatgctggacggcgacgtgaccgacgtggtggaggccaagagcctgggcatcagacccaactacatcgacatctacagcgccagctggggccccgacgacgacggcaagaccgtggacggccccggcagactggccaagcaggccttcgagtacggcatcaagaagggcagacagggcctgggcagcatcttcgtgtgggccagcggcaacggcggcagagagggcgactactgcagctgcgacggctacaccaacagcatctacaccatcagcgtgagcagcgccaccgagaacggctacaagccctggtacctggaggagtgcgccagcaccctggccaccacctacagcagcggcgccttctacgagagaaagatcgtgaccaccgacctgagacagagatgcaccgacggccacaccggcaccagcgtgagcgcccccatggtggccggcatcatcgccctggccctggaggccaacagccagctgacctggagagacgtgcagcacctgctggtgaagaccagcagacccgcccacctgaaggccagcgactggaaggtgaacggcgccggccacaaggtgagccacttctacggcttcggcctggtggacgccgaggccctggtggtggaggccaagaagtggaccgccgtgcccagccagcacatgtgcgtggccgccagcgacaagagacccagaagcatccccctggtgcaggtgctgagaaccaccgccctgaccagcgcctgcgccgagcacagcgaccagagagtggtgtacctggagcacgtggtggtgagaaccagcatcagccaccccagaagaggcgacctgcagatctacctggtgagccccagcggcaccaagagccagctgctggccaagagactgctggacctgagcaacgagggcttcaccaactgggagttcatgaccgtgcactgctggggcgagaaggccgagggccagtggaccctggagatccaggacctgcccagccaggtgagaaaccccgagaagcagggcaagctgaaggagtggagcctgatcctgtacggcaccgccgagcacccctaccacaccttcagcgcccaccagagcagaagcagaatgctggagctgagcgcccccgagctggagccccccaaggccgccctgagccccagccaggtggaggtgcccgaggacgaggaggactacaccggcgtgtgccaccccgagtgcggcgacaagggctgcgacggccccaacgccgaccagtgcctgaactgcgtgcacttcagcctgggcagcgtgaagaccagcagaaagtgcgtgagcgtgtgccccctgggctacttcggcgacaccgccgccagaagatgcagaagatgccacaagggctgcgagacctgcagcagcagagccgccacccagtgcctgagctgcagaagaggcttctaccaccaccaggagatgaacacctgcgtgaccctgtgccccgccggcttctacgccgacgagagccagaagaactgcctgaagtgccaccccagctgcaagaagtgcgtggacgagcccgagaagtgcaccgtgtgcaaggagggcttcagcctggccagaggcagctgcatccccgactgcgagcccggcacctacttcgacagcgagctgatcagatgcggcgagtgccaccacacctgcggcacctgcgtgggccccggcagagaggagtgcatccactgcgccaagaacttccacttccacgactggaagtgcgtgcccgcctgcggcgagggcttctaccccgaggagatgcccggcctgccccacaaggtgtgcagaagatgcgacgagaactgcctgagctgcgccggcagcagcagaaactgcagcagatgcaagaccggcttcacccagctgggcaccagctgcatcaccaaccacacctgcagcaacgccgacgagaccttctgcgagatggtgaagagcaacagactgtgcgagagaaagctgttcatccagttctgctgcagaacctgcctgctggccggctag

SEQ ID NO: 236156 - protein, 622 aa, Artificial Sequence
  derived and/or modified sequence
MPPRAPPAPGPRPPPRAAAATDTAAGAGGAGGAGGAGGPGFRPLAPRPWRWLLLLALPAACSAPPRPVYTNHWAVQVLGGPAEADRVAAAHGYLNLGQIGNLEDYYHFYHSKTFKRSTLSSRGPHTFLRMDPQVKWLQQQEVKRRVKRQVRSDPQALYFNDPIWSNMWYLHCGDKNSRCRSEMNVQAAWKRGYTGKNVVVTILDDGIERNHPDLAPNYDSYASYDVNGNDYDPSPRYDASNENKHGTRCAGEVAASANNSYCIVGIAYNAKIGGIRMLDGDVTDVVEAKSLGIRPNYIDIYSASWGPDDDGKTVDGPGRLAKQAFEYGIKKGRQGLGSIFVWASGNGGREGDYCSCDGYTNSIYTISVSSATENGYKPWYLEECASTLATTYSSGAFYERKIVTTDLRQRCTDGHTGTSVSAPMVAGIIALALEANSQLTWRDVQHLLVKTSRPAHLKASDWKVNGAGHKVSHFYGFGLVDAEALVVEAKKWTAVPSQHMCVAASDKRPRSIPLVQVLRTTALTSACAEHSDQRVVYLEHVVVRTSISHPRRGDLQIYLVSPSGTKSQLLAKRLLDLSNEGFTNWEFMTVHCWGEKAEGQWTLEIQDLPSQVRNPEKQGNLD

SEQ ID NO: 236157 - DNA, 1869 bp, Artificial Sequence
  derived and/or modified sequence
atgccacccagagctcctcctgcccccggccctcgtcctcctccgagagcagctgccgccacagacacggctgcaggggcggggggggctgggggggcaggtggtgctggcgggcccgggttccgaccactggcacccaggccttggaggtggctcttgttacttgctctgccagccgcttgttccgcccccccgagacctgtctatacaaaccactgggctgtgcaggtgctgggtgggccggccgaagcagacagagtggctgcagcccacggctacctaaatctgggccaaattgggaatcttgaagactattaccacttttaccacagtaaaacctttaagcggtccactctgtctagccgggggcctcatacctttctgcggatggacccgcaagtgaagtggttacaacagcaagaagtcaaaaggagagtgaaaagacaggtacggagcgatccacaagccctctatttcaacgaccctatttggtcaaacatgtggtacctgcactgtggggataagaattcaagatgtagatccgaaatgaatgtgcaggctgcctggaagagaggttataccggaaagaatgtggtagtgacgattttagatgacggcatagaacgcaatcaccccgatctggcaccaaactatgactcatatgctagctatgacgtcaacgggaacgactatgacccttcacctcgctacgacgcatccaacgagaataaacacggcactcggtgtgcgggagaggtcgcagcatcggctaacaactcatactgtatcgtgggtatcgcatacaatgccaagatcgggggaattagaatgctggacggtgacgtaacagatgttgtagaggctaagagtctgggcatccgccctaactacattgatatttactcggctagttgggggccggacgacgatgggaaaaccgtggacgggcctggaagactcgcaaagcaggcgttcgagtacggtataaaaaagggaagacaagggctcgggtcaattttcgtgtgggcctccgggaacggggggcgggagggggactattgttcctgcgatggctataccaactccatatacactatcagtgtgagtagcgctacagaaaatggctacaagccctggtacttggaagagtgcgcctccactttggctactacctactcctcgggcgcgttctacgagcggaagatcgtgactactgacctgagacagaggtgtactgatggtcacaccggcacttccgtgtcggcgcccatggtggctggaatcatcgcgcttgccctggaggccaattcccagctgacatggagggacgtgcagcaccttctggtaaaaactagccggcccgcacatttaaaggcctcagactggaaggtcaacggcgccgggcataaggtgtcccacttttacgggtttggcctcgtcgacgcggaggccctcgtagttgaggccaaaaagtggactgctgtcccatcacagcatatgtgtgtggcggcctccgataagaggccacgatccatacccctcgtccaagtgttgaggaccacagcgctgacatcggcctgtgcagagcacagcgaccagcgagtggtgtacttggagcatgttgtcgtgaggactagtatttcacacccacggagaggcgatctccagatttacttagtatctccaagtggcaccaaaagccagctgctggcaaagcggcttctcgatctgtcaaatgaaggttttacgaactgggagtttatgactgttcactgttggggcgagaaggccgaggggcaatggaccctggagatacaggacctgccatcccaggtaaggaatccagaaaaacagggaaacctggactag

SEQ ID NO: 236158 - DNA, 1869 bp, Artificial Sequence
  derived and/or modified sequence
atgccaccccgggcccccccagcccctggcccccggcccccacccagggctgctgctgccacagacacagctgctggagctggaggagctgggggcgccggcggggccggcggccctggcttccggcccctggccccccggccctggcgctggctgctgctgctggccctgcctgctgcctgcagcgccccacccaggcctgtgtacaccaaccactgggccgtgcaggtgctgggcggccctgctgaggccgacagagtggccgccgcccacggctacctgaacctgggccagatcggcaacctggaggactactaccacttctaccacagcaagaccttcaagaggagcaccctgagcagccggggcccccacaccttcctgaggatggacccccaggtgaagtggctgcagcagcaggaggtgaagagaagagtgaagaggcaggtgcggagtgacccccaggccctgtacttcaatgaccccatctggagcaacatgtggtacctgcactgtggggacaagaacagccgctgccgctctgagatgaatgtgcaggccgcctggaagaggggctacaccgggaagaatgtggtggtgaccatcctggatgatggcattgaaagaaaccacccagacctggcccccaactatgacagctatgccagctatgatgtgaatggaaatgactatgaccccagccccaggtatgatgccagcaatgaaaacaagcacggcacccgctgtgccggggaggtggccgccagcgccaacaacagctactgcatcgtgggcatcgcctacaatgccaagattggaggcatccgcatgctggatggagatgtgacagatgtggtggaggccaagagcctgggcatccggcccaactacatcgacatctacagcgcctcctggggcccagatgatgatggcaagacagtggatggccctggccgcctggccaagcaggcctttgaatatggcatcaagaagggccggcagggcctgggcagcatctttgtgtgggccagcggaaatggaggccgggagggggactactgcagctgtgatggctacaccaacagcatctacaccatctctgtgagcagcgccacagaaaatggctacaagccctggtacctggaggagtgtgccagcaccctggccaccacctacagcagcggggccttctatgaaaggaagatcgtgaccacagacctgcggcagcgctgcacagatggccacacaggcacctctgtgtctgcccccatggtggccggcatcatcgccctggccctggaggccaacagccagctgacctggagagatgtgcagcacctgctggtgaagaccagcaggcctgcccacctgaaggccagtgactggaaggtgaatggagctggccacaaggtgagccacttctacggcttcggcctggtggatgctgaggccctggtggtggaggccaagaagtggacagctgtgcccagccagcacatgtgtgtggccgccagtgacaagaggcccaggagcatccccctggtgcaggtgctgcggaccacagccctgaccagcgcctgtgccgagcacagcgaccagagggtggtgtacctggagcacgtggtggtgaggaccagcatcagccaccccaggagaggagacctgcagatctacctggtgagccccagcggcaccaagagccagctgctggccaagaggctgctggacctgagcaatgaaggcttcaccaactgggagttcatgacagtgcactgctggggcgagaaggccgagggccagtggaccctggagatccaggacctgcccagccaggtgagaaatcctgagaagcagggcaacctggactag

SEQ ID NO: 236159 - DNA, 1869 bp, Artificial Sequence
  derived and/or modified sequence
atgcccccccgggccccccccgcccccggcccccggcccccccccagggcggccgccgcaacagacacggctgccggggctggaggcgctggaggggcgggtggagctggaggcccaggttttaggccactcgctccacgcccgtggcgctggcttctgctcttggcacttcctgcagcttgtagcgccccaccaaggcccgtgtacaccaaccactgggccgtgcaagtcctcggcggccccgccgaggccgacagagttgccgccgctcacggctatctgaacctcggccaaattggaaatctggaagattactaccacttctaccacagtaaaacctttaagcgctctacgctgagcagcagaggcccgcatacctttctgagaatggatccgcaggtcaagtggctgcaacagcaggaggtcaagaggcgcgtgaagagacaggtgcgcagcgatccccaggcactgtatttcaatgacccgatctggtcaaatatgtggtatctgcactgcggtgataagaactctcgttgtcgctccgaaatgaacgttcaggcggcgtggaaacgcgggtacaccggtaagaacgtagtggtaacgattcttgacgacggaatagaaaggaaccatcccgaccttgcaccgaattacgactcctacgccagttacgatgtgaacggtaatgactatgacccatcgccccgttacgatgcctctaacgaaaataagcatggcacacgatgtgctggagaagtagcggcctcggcaaacaattcctattgcattgtcgggattgcttataacgccaagatcgggggcattcggatgttggacggagacgtgacggacgtagtggaagcaaaaagcctaggaatccggcccaactatattgatatctactctgcgagttggggccctgatgacgacgggaagaccgtggacgggcctgggaggcttgccaagcaagcattcgaatacggcattaagaagggtcgtcagggcctaggatccatttttgtttgggcttccggcaacggcggtcgcgagggcgactattgctcatgtgacgggtataccaacagcatctacaccatctccgtgagcagcgccaccgagaatggctacaagccctggtacctggaggagtgcgcttcaacgctcgccaccacatacagctccggcgcattttatgagagaaaaattgtgacaactgatttgcggcaaagatgcactgacggccacaccgggacaagtgtctctgcacccatggtggctggaataatcgccctggctctggaggcaaatagccagctgacatggcgggatgttcagcacttacttgtgaagacatcaaggccagcccatctgaaggcaagtgattggaaagtgaacggcgccggccacaaagttagtcatttttatggcttcggccttgtcgatgcagaggccctggtagtggaagcgaaaaagtggaccgctgtaccctctcaacatatgtgcgtcgccgcatccgataagcgtcctaggtctatacctttggtgcaggtactgcgcaccacagcgctcacctccgcatgtgccgagcactctgatcagcgggtcgtgtatctggagcacgtcgttgtccgaacatccattagccacccccgacgtggggacctccagatctacctggtctcaccttctggcaccaaaagccaattattagcaaagcgattgctcgacctgagtaatgagggatttaccaactgggaattcatgaccgtgcactgttggggagagaaggccgaggggcagtggaccctggagatccaggatttaccaagtcaggtgaggaacccagagaaacagggcaaccttgattag

SEQ ID NO: 236160 - DNA, 1869 bp, Artificial Sequence
  derived and/or modified sequence
atgccccctcgggcaccacctgcacccggacccagacctccccctagagccgcagctgccaccgataccgccgcaggtgctgggggagccggaggggctggcggtgctggcggaccgggatttcggccactggcacctaggccatggcgatggctgcttcttctcgctttacccgcagcctgctccgcaccaccacgacccgtctataccaaccattgggctgtacaggtcctgggagggccagcagaggccgatagagtggccgcagcccatggctatctgaacctgggtcaaatcgggaacctcgaggattactatcatttttatcactccaaaacctttaagcgatctacactgtctagccggggaccacacacctttctgcgcatggaccctcaggtgaaatggttgcaacagcaggaggtgaagaggagagttaaaaggcaggtgcggtctgatccacaggcactctatttcaacgatcctatctggtcaaatatgtggtacctgcactgcggagacaaaaattcccgttgtaggtctgagatgaatgttcaagccgcttggaagagagggtataccggaaagaatgtggtcgtaacgattttggatgacggtatcgagcgtaatcacccggacctcgctccaaattacgactcttacgccagttacgacgtcaatgggaatgattatgaccctagccctcgttatgatgccagcaatgaaaacaagcatggcacaaggtgtgcaggcgaggttgccgcatcagccaataattcctattgtatcgtaggcattgcttacaacgcgaagattggaggcatccgaatgttggacggtgatgtaaccgatgtggtcgaggcaaagagcctgggcatcagacctaactatatcgacatttactcagcctcttggggaccggatgatgatggcaagactgtcgatggtcccggaagactggcaaagcaggcattcgaatatggaatcaaaaagggcagacagggcctcggctcaatctttgtgtgggcctctggcaatgggggacgagagggggactactgcagctgcgacggctatacgaactctatttatacgataagcgtttcatcggcaacagaaaacggttacaaaccttggtatctggaagaatgcgccagtactctagccacaacatacagttctggcgctttttacgagaggaagatcgtgaccactgacctgcgccagcggtgtactgatggccataccggtacctcagtgtccgctcctatggtagcgggaatcatcgccctggccctcgaagctaatagtcaacttacatggcgggatgtacagcacctcctggtgaaaacctctcgccctgcacatctcaaggcctctgattggaaggtcaacggagccggacataaggttagccacttctacggcttcggactggtcgacgccgaggccctggtcgtagaagccaaaaagtggactgccgttccctctcaacacatgtgtgttgcagccagcgacaaacggccacggagcatccccctggttcaggtactcagaaccactgcattaacatctgcatgtgccgagcacagcgatcagagggtggtgtacctggaacacgtggtggtgcgcacatcaatctcacacccccgacgcggagacctgcagatatacctggtgagtccttccgggactaagtctcaactcctggccaagagattgctggatctgtccaacgagggtttcacaaattgggagtttatgactgtacattgctggggggagaaggccgaagggcaatggaccctggaaattcaggaccttcccagtcaagtcaggaacccagagaaacaaggcaacctggactag

SEQ ID NO: 236161 - DNA, 3205 bp, Artificial Sequence
  derived and/or modified sequence
tcgcgggccgaggacgcctctggggcggcaccgcgtcccgagagccccagaagtcggcggggaagttcccccggtggggggcgtttcgggcctcccggacggctctcggccccggagcccggtcgcaggagcgcgggcccgggggcgggaacgcgccgcggccgcctcctcctccccggctcccgcccgcggcggtgttggcggcggcggtggcggcggcggcggcgcttccccggcgcggagcggctttaaaaggcggcactccaccccccggcgcactcgcagctcgggcgccgcgcgagcctgtcgccgctatgcctccgcgcgcgccgcctgcgcccgggccccggccgccgccccgggccgccgccgccaccgacaccgccgcgggcgcggggggcgcggggggcgcggggggcgccggcgggcccgggttccggccgctcgcgccgcgtccctggcgctggctgctgctgctggcgctgcctgccgcctgctccgcccccccgcgccccgtctacaccaaccactgggcggtgcaagtgctgggcggcccggccgaggcggaccgcgtggcggcggcgcacgggtacctcaacttgggccagattggaaacctggaagattactaccatttttatcacagcaaaacctttaaaagatcaaccttgagtagcagaggccctcacaccttcctcagaatggacccccaggtgaaatggctccagcaacaggaagtgaaacgaagggtgaagagacaggtgcgaagtgacccgcaggccctttacttcaacgaccccatttggtccaacatgtggtacctgcattgtggcgacaagaacagtcgctgccggtcggaaatgaatgtccaggcagcgtggaagaggggctacacaggaaaaaacgtggtggtcaccatccttgatgatggcatagagagaaatcaccctgacctggccccaaattatgattcctacgccagctacgacgtgaacggcaatgattatgacccatctccacgatatgatgccagcaatgaaaataaacacggcactcgttgtgcgggagaagttgctgcttcagcaaacaattcctactgcatcgtgggcatagcgtacaatgccaaaataggaggcatccgcatgctggacggcgatgtcacagatgtggtcgaggcaaagtcgctgggcatcagacccaactacatcgacatttacagtgccagctgggggccggacgacgacggcaagacggtggacgggcccggccgactggctaagcaggctttcgagtatggcattaaaaagggccggcagggcctgggctccattttcgtctgggcatctgggaatggcgggagagagggggactactgctcgtgcgatggctacaccaacagcatctacaccatctccgtcagcagcgccaccgagaatggctacaagccctggtacctggaagagtgtgcctccaccctggccaccacctacagcagtggggccttttatgagcgaaaaatcgtcaccacggatctgcgtcagcgctgtaccgatggccacactgggacctcagtctctgcccccatggtggcgggcatcatcgccttggctctagaagcaaacagccagttaacctggagggacgtccagcacctgctagtgaagacatcccggccggcccacctgaaagcgagcgactggaaagtgaacggcgcgggtcataaagttagccatttctatggatttggtttggtggacgcagaagctctcgttgtggaggcaaagaagtggacagcagtgccatcgcagcacatgtgtgtggccgcctcggacaagagacccaggagcatccccttagtgcaggtgctgcggactacggccctgaccagcgcctgcgcggagcactcggaccagcgggtggtctacttggagcacgtggtggttcgcacctccatctcacacccacgccgaggagacctccagatctacctggtttctccctcgggaaccaagtctcaacttctggcaaagaggttgctggatctttccaatgaagggtttacaaactgggaattcatgactgtccactgctggggagaaaaggctgaagggcagtggaccttggaaatccaagatctgccatcccaggtccgcaacccggagaagcaagggaacctggactaaaacacgtgttccggtggcagattgaacaagagctttggtaatctctgtgaaatactgcagagggacagatgaccaaagccaccacatttagaactttggctgcctttggaagtccagagctggatctctcagctcccgcccccagaggctcagcactttggacatggctcacaaacagttgttgattgactgcatgaatgcgtgtgcgtgcaagcatgaaccttgtttaaatcaagagcttacataattttaaccagttctgtcttcagctgtacatactcagtaaaatgtttaatgaaggggaagagattagtctcttctgtgtgaccatgttttccctttattcatcctaaaaagttccatgaattcttgatttcctttcagtggccctttcaacaatgtcttttttcccaagagcataactgttctcattttattgctagccatcttgatctgtgttttattgacatctcttttgagctaatcttcatttctaagataagagttgagattttgcaatctgtgttcgatggctcaatctatcctgtgcttgatgctagaaaggaagacagatttaaagcacatgccttctgtgccggctttcaagtttgtcactaaactctcatttctggaaagtgcaattatagagtatcactcccacttccttggaaacagagctgaagaacttggcacactctccaaacagtcaccatacacactgttgtcaaaaagttccatttttaaccccatttgcattaatattgcagtcaatctctttacctccttttctctttcacggggccgtgacagtgacgcctttccccaaaactctcctcgtttgagaaaaaaagaagtatgtatccccacttatctcggggagaaatgcaaccaactgctgctgtgcacatttatgaatcacagtattgtttagtcggttctgtatctccagtagaaagcataacaaaaagatgacctttgtctcacctcatagctaatttttgcaaataaaatactaaacattg

SEQ ID NO: 236162 - DNA, 1869 bp, Artificial Sequence
  derived and/or modified sequence
atgccccccagagccccccccgcccccggccccagacccccccccagagccgccgccgccaccgacaccgccgccggcgccggcggcgccggcggcgccggcggcgccggcggccccggcttcagacccctggcccccagaccctggagatggctgctgctgctggccctgcccgccgcctgcagcgccccccccagacccgtgtacaccaaccactgggccgtgcaggtgctgggcggccccgccgaggccgacagagtggccgccgcccacggctacctgaacctgggccagatcggcaacctggaggactactaccacttctaccacagcaagaccttcaagagaagcaccctgagcagcagaggcccccacaccttcctgagaatggacccccaggtgaagtggctgcagcagcaggaggtgaagagaagagtgaagagacaggtgagaagcgacccccaggccctgtacttcaacgaccccatctggagcaacatgtggtacctgcactgcggcgacaagaacagcagatgcagaagcgagatgaacgtgcaggccgcctggaagagaggctacaccggcaagaacgtggtggtgaccatcctggacgacggcatcgagagaaaccaccccgacctggcccccaactacgacagctacgccagctacgacgtgaacggcaacgactacgaccccagccccagatacgacgccagcaacgagaacaagcacggcaccagatgcgccggcgaggtggccgccagcgccaacaacagctactgcatcgtgggcatcgcctacaacgccaagatcggcggcatcagaatgctggacggcgacgtgaccgacgtggtggaggccaagagcctgggcatcagacccaactacatcgacatctacagcgccagctggggccccgacgacgacggcaagaccgtggacggccccggcagactggccaagcaggccttcgagtacggcatcaagaagggcagacagggcctgggcagcatcttcgtgtgggccagcggcaacggcggcagagagggcgactactgcagctgcgacggctacaccaacagcatctacaccatcagcgtgagcagcgccaccgagaacggctacaagccctggtacctggaggagtgcgccagcaccctggccaccacctacagcagcggcgccttctacgagagaaagatcgtgaccaccgacctgagacagagatgcaccgacggccacaccggcaccagcgtgagcgcccccatggtggccggcatcatcgccctggccctggaggccaacagccagctgacctggagagacgtgcagcacctgctggtgaagaccagcagacccgcccacctgaaggccagcgactggaaggtgaacggcgccggccacaaggtgagccacttctacggcttcggcctggtggacgccgaggccctggtggtggaggccaagaagtggaccgccgtgcccagccagcacatgtgcgtggccgccagcgacaagagacccagaagcatccccctggtgcaggtgctgagaaccaccgccctgaccagcgcctgcgccgagcacagcgaccagagagtggtgtacctggagcacgtggtggtgagaaccagcatcagccaccccagaagaggcgacctgcagatctacctggtgagccccagcggcaccaagagccagctgctggccaagagactgctggacctgagcaacgagggcttcaccaactgggagttcatgaccgtgcactgctggggcgagaaggccgagggccagtggaccctggagatccaggacctgcccagccaggtgagaaaccccgagaagcagggcaacctggactag

SEQ ID NO: 236163 - protein, 651 aa, Artificial Sequence
  derived and/or modified sequence
MPPRAPPAPGPRPPPRAAAATDTAAGAGGAGGAGGAGGPGFRPLAPRPWRWLLLLALPAACSPPPRPVYTNHWAVQVLGGPAEADRVAAAHGYLNLGQIGNLEDYYHFYHSKTFKRSTLSSRGPHTFLRMDPQVKWLQQQEVKRRVKRQVRSDPQALYFNDPIWSNMWYLHCGDKNSRCRSEMNVQAAWKRGYTGKNVVVTILDDGIERNHPDLAPNYDSYASYDVNGNDYDPSPRYDASNENKHGTRCAGEVAASANNSYCIVGIAYNAKIGGIRMLDGDVTDVVEAKSLGIRPNYIDIYSASWGPDDDGKTVDGPGRLAKQAFEYGIKKGRQGLGSIFVWASGNGGREGDYCSCDGYTNSIYTISVSSATENGYKPWYLEECASTLATTYSSGAFYERKIVTTDLRQRCTDGHTGTSVSAPMVAGIIALALEANSQLTWRDVQHLLVKTSRPAHLKASDWKVNGAGHKVSHFYGFGLVDAEALVVEAKKWTAVPSQHMCVAASDKRPRSIPLVQVLRTTALTSACAEHSDQRVVYLEHVVVRTSISHPRRGDLQIYLVSPSGTKSQLLAKRLLDLSNEGFTNWEFMTVHCWGEKAEGQWTLEIQDLPSQVRNPEKQGDLETPVANQLTTEEREPGLKHVFRWQIEQELW

SEQ ID NO: 236164 - DNA, 1956 bp, Artificial Sequence
  derived and/or modified sequence
atgcctcccagagccccacctgcaccaggacctcgaccgcccccccgtgccgcagcagctaccgacactgcggccggtgctggcggtgcgggcggtgcgggtggcgctggaggccctgggttcagacccctggccccgcgcccctggcggtggttgctcctgctggctctgccggccgcctgcagcccacccccacgacccgtgtacacaaaccattgggccgtgcaagtgctgggaggccccgccgaggccgacagagttgccgctgctcatggttacctgaacctaggccaaattggcaacctggaggactactaccacttttatcactcgaaaactttcaagcggtccacactctcctccaggggccctcacacatttctaagaatggatcctcaagtcaagtggctgcagcagcaggaggtgaaacgtcgcgtcaagagacaggttcggtcggatccccaggccttgtactttaatgacccgatctggagcaacatgtggtatcttcactgcggagacaaaaattcgcggtgcagatcagagatgaacgttcaggctgcatggaaacgaggctatacagggaaaaacgtcgtggtgacaatactggacgacggaattgagagaaaccatcctgacttggcccctaattacgacagctatgcctcctacgacgtgaacggaaacgactacgacccatctccccgatacgacgcctcaaacgagaataaacatggaacacgatgcgccggcgaagttgcagcttcagcaaacaattcgtactgtatcgtgggcattgcctacaacgcgaagattgggggaattaggatgttggatggcgacgtgacggacgtggtggaggccaaatccctgggaatacggcctaattatattgacatttactccgctagctgggggccagatgatgatggcaagacagtagatggtcccggccgcctggctaaacaggctttcgagtacggtatcaagaagggcaggcagggcttaggttctatttttgtgtgggcctctggcaatggaggaagggagggcgactactgctcctgtgatggatataccaactctatctatacaatttccgtgagcagcgcaacagagaacggatacaagccatggtaccttgaggagtgcgcctccacgttggcaactacttatagctctggtgctttctacgaaaggaagatcgtgaccaccgacctgagacaaagatgtaccgacggccacaccgggactagcgtgtccgctcctatggtcgctggaatcattgcattggccctggaagcaaactctcagctcacctggcgcgacgtacagcacctgttagtgaagacttccagacctgctcatctgaaagctagtgattggaaggtcaacggtgccggacataaagttagccacttttacggcttcggactggttgatgcggaagcccttgttgtggaggccaagaaatggaccgcagtgccttcccagcacatgtgcgtggctgcgtctgataagagacctaggtccatccctctcgtacaggtgctccgcacaacagctctgacaagcgcttgtgcagaacacagcgaccagcgggtcgtctacctcgagcacgtggtagtaagaaccagcatatcccatcccagacgcggtgatctacagatatacctcgtgtctccgtccggaacgaagtctcagctgcttgcgaaaaggcttttggatttaagtaacgaaggatttactaattgggagtttatgacagtgcattgttggggcgaaaaagctgaaggacaatggacccttgaaatccaagatctgccatcccaagtgcgtaatcctgagaaacagggggatctagaaactcctgttgctaaccaactcaccactgaggaaagggagccaggtctaaagcacgttttccggtggcaaatcgagcaggaattgtggtag

SEQ ID NO: 236165 - DNA, 1956 bp, Artificial Sequence
  derived and/or modified sequence
atgccaccccgggcccccccagcccctggcccccggcccccacccagggctgctgctgccacagacacagctgctggagctggaggagctgggggcgccggcggggccggcggccctggcttccggcccctggccccccggccctggcgctggctgctgctgctggccctgcctgctgcctgcagccccccacccaggcctgtgtacaccaaccactgggccgtgcaggtgctgggcggccctgctgaggccgacagagtggccgccgcccacggctacctgaacctgggccagatcggcaacctggaggactactaccacttctaccacagcaagaccttcaagaggagcaccctgagcagccggggcccccacaccttcctgaggatggacccccaggtgaagtggctgcagcagcaggaggtgaagagaagagtgaagaggcaggtgcggagtgacccccaggccctgtacttcaatgaccccatctggagcaacatgtggtacctgcactgtggggacaagaacagccgctgccgctctgagatgaatgtgcaggccgcctggaagaggggctacaccgggaagaatgtggtggtgaccatcctggatgatggcattgaaagaaaccacccagacctggcccccaactatgacagctatgccagctatgatgtgaatggaaatgactatgaccccagccccaggtatgatgccagcaatgaaaacaagcacggcacccgctgtgccggggaggtggccgccagcgccaacaacagctactgcatcgtgggcatcgcctacaatgccaagattggaggcatccgcatgctggatggagatgtgacagatgtggtggaggccaagagcctgggcatccggcccaactacatcgacatctacagcgcctcctggggcccagatgatgatggcaagacagtggatggccctggccgcctggccaagcaggcctttgaatatggcatcaagaagggccggcagggcctgggcagcatctttgtgtgggccagcggaaatggaggccgggagggggactactgcagctgtgatggctacaccaacagcatctacaccatctctgtgagcagcgccacagaaaatggctacaagccctggtacctggaggagtgtgccagcaccctggccaccacctacagcagcggggccttctatgaaaggaagatcgtgaccacagacctgcggcagcgctgcacagatggccacacaggcacctctgtgtctgcccccatggtggccggcatcatcgccctggccctggaggccaacagccagctgacctggagagatgtgcagcacctgctggtgaagaccagcaggcctgcccacctgaaggccagtgactggaaggtgaatggagctggccacaaggtgagccacttctacggcttcggcctggtggatgctgaggccctggtggtggaggccaagaagtggacagctgtgcccagccagcacatgtgtgtggccgccagtgacaagaggcccaggagcatccccctggtgcaggtgctgcggaccacagccctgaccagcgcctgtgccgagcacagcgaccagagggtggtgtacctggagcacgtggtggtgaggaccagcatcagccaccccaggagaggagacctgcagatctacctggtgagccccagcggcaccaagagccagctgctggccaagaggctgctggacctgagcaatgaaggcttcaccaactgggagttcatgacagtgcactgctggggcgagaaggccgagggccagtggaccctggagatccaggacctgcccagccaggtgagaaatcctgagaagcagggcgacctggagacccctgtggccaaccagctgaccacagaggagcgggagcccggcctgaagcacgtgttccgctggcagatcgagcaggagctgtggtag

SEQ ID NO: 236166 - DNA, 1956 bp, Artificial Sequence
  derived and/or modified sequence
atgcccccccgggccccccccgcccccggcccccggcccccccccagggctgccgcggcgactgacactgccgcgggcgccgggggggcaggcggagccggcggtgctggaggccctggatttcgcccactggcccctagaccttggcggtggctgctgctgttggcactaccagccgcatgcagtcccccaccccgaccggtttacacgaatcattgggcggtgcaggttctcgggggaccggcagaagcagaccgcgtcgccgcagcccatggctacctgaacctgggacagatcggaaatctagaggattattaccacttctatcactccaaaacatttaaacgctccactcttagctcacgcggccctcataccttcctccgcatggatccacaagtgaagtggttgcagcagcaagaggtaaagagaagggtaaagagacaggtcagatcagatcctcaggctttgtactttaacgatcccatatggtccaatatgtggtacttgcactgcggggacaagaatagccgctgccgctccgaaatgaacgtccaagctgcctggaaaaggggctacacagggaagaacgtggtggttaccatcctagacgatgggattgaaaggaatcatccagatctcgctccgaactacgacagctatgcgagctacgacgtaaacggaaacgactatgatccaagcccgcgctacgacgccagcaacgaaaataagcacgggacacggtgcgccggggaagtcgcagcttcagccaacaattcatactgtattgtcggcatcgcatacaacgcaaagattgggggcatccggatgctggacggcgacgtgaccgacgttgtggaggccaagagtcttgggatcagacctaactacattgacatctacagtgcctcctggggccccgatgatgacggcaagacagtcgacgggcccggccgactcgccaaacaggcttttgaatatggaatcaaaaagggacggcagggactcgggtcgatttttgtttgggcatcagggaatgggggccgagaaggagattactgtagttgtgacggctacactaattccatctatacaatttcagtctcctccgctacggaaaacggctataaaccttggtatctcgaagagtgtgcgagcacgctggcaaccacatattcatcaggagcattttacgaaaggaaaatcgtgacgacagacctgcggcagaggtgtaccgacggtcacactggaactagtgtttccgcaccgatggtggctggcatcattgccctggcattggaagcaaattcgcagctgacctggcgcgatgttcagcacttactagtgaagactagcaggcctgcccatttaaaggcaagcgactggaaagtcaatggagctggacacaaggtgtcacatttttacggtttcgggcttgtagatgcagaagcactggtggtggaggctaaaaagtggaccgcagttccctcacagcacatgtgcgtggcagctagcgataagcgcccacggtccatcccgctcgtgcaagtcctccgcactacagcactgaccagcgcatgcgccgagcattctgatcagcgggtcgtgtacctggaacatgtcgtggtgaggacctcaatctcacatcctcgccgaggggacctgcaaatttacctggtgtccccatcagggactaagagccagttactcgccaagagactgctggacttgagtaacgagggttttactaattgggagttcatgacggttcactgttggggcgaaaaggctgaaggacagtggacactggagatccaggacttaccgagtcaggtcagaaatccagagaagcagggtgacctggaaaccccagttgctaatcaactaacaacagaagaaagggaacccggcctcaagcacgtgtttcgatggcagatagaacaggagctctggtag

SEQ ID NO: 236167 - DNA, 1956 bp, Artificial Sequence
  derived and/or modified sequence
atgccgcctagggctcccccagcaccgggacctcggccaccacccagagccgcagctgccacagatacggctgcaggcgctggtggcgcaggcggagcaggcggagctggaggaccgggattccgacctttggctcccaggccctggcgctggctgctgttgctcgcgttacccgcagcctgcagcccccctcctcggccagtgtataccaatcactgggctgtgcaagtgctcggcggtcctgcagaggccgatagagtcgctgccgctcatggatatctgaacctcggccagatcggcaacttggaggactattatcatttctatcattcaaaaacctttaaaaggagcacgctctcaagccgcggaccccatacgttccttcgaatggatcctcaggtcaaatggttgcagcaacaggaggtcaagcgcagggtcaaacgccaggtaagatcggatccgcaggccttatactttaatgacccaatatggtcaaacatgtggtatctgcattgcggcgacaagaacagtaggtgccggtccgagatgaacgttcaggcggcttggaaaagagggtatacgggcaagaacgtcgttgtcactatcctggacgacggcattgagcgcaaccatcctgacctcgcccctaattatgactcctatgcatcatatgatgtgaacggaaacgattatgatccgagccctagatatgacgcttcaaacgagaataaacacggaactcgatgcgccggtgaggtggctgcttctgccaataatagttattgtatcgtaggcatcgcctataatgcaaagatcggtggtatccgaatgctggacggagatgtgaccgatgttgtggaggccaaaagcctcgggattcggccaaactatatcgatatatatagcgcatcgtggggacccgatgacgacgggaagacagtggacggacccggaaggctagcaaaacaggccttcgagtatggaatcaagaagggtcgtcagggcctggggtctatctttgtgtgggcctctgggaacgggggacgagaaggagattattgcagctgcgacggatacaccaactccatctacacaatctccgttagttctgccacagagaacggatacaagccatggtatctcgaagagtgcgcctccaccctcgcaacaacctatagcagtggcgctttttatgagagaaaaattgtgacaactgatttacgccaaaggtgcactgatggtcacacaggcacttccgtgagtgcccctatggtggcgggtataatcgccttagctctggaggcaaactcccaacttacatggcgagatgtacagcacttgctggtgaagacctccaggccagcccacctcaaggcatctgattggaaggtgaacggtgcaggacataaagtttcccatttctatggcttcggccttgtggatgcggaggccctggtcgtagaggccaagaagtggacggccgtgccatctcagcatatgtgtgtcgctgccagcgataagcggccacgaagtattcctttagtccaggtgttgagaaccacagctctcacatccgcttgcgctgagcacagtgatcagagggtagtatatctggagcatgtggttgtgaggacctccatcagtcatccgaggcgaggggacctgcaaatttacctggtgtccccgtcaggaacgaagtcgcagctgctggcgaaacggctgctcgatttgtccaatgaggggttcaccaattgggagttcatgacagtccattgttggggagaaaaggccgaaggccaatggactctcgaaattcaggaccttccttctcaggtgagaaaccccgaaaagcaaggggatttagaaactccagttgctaaccagctaacaacagaggagagggagcccggtctgaagcacgtttttagatggcaaattgaacaggaactctggtag

SEQ ID NO: 236168 - DNA, 2937 bp, Artificial Sequence
  derived and/or modified sequence
atgcctccgcgcgcgccgcctgcgcccgggccccggccgccgccccgggccgccgccgccaccgacaccgccgcgggcgcggggggcgcggggggcgcggggggcgccggcgggcccgggttccggccgctcgcgccgcgtccctggcgctggctgctgctgctggcgctgcctgccgcctgctcccccccgccgcgccccgtctacaccaaccactgggcggtgcaagtgctgggcggcccggccgaggcggaccgcgtggcggcggcgcacgggtacctcaacttgggccagattggaaacctggaagattactaccatttttatcacagcaaaacctttaaaagatcaaccttgagtagcagaggccctcacaccttcctcagaatggacccccaggtgaaatggctccagcaacaggaagtgaaacgaagggtgaagagacaggtgcgaagtgacccgcaggccctttacttcaacgaccccatttggtccaacatgtggtacctgcattgtggcgacaagaacagtcgctgccggtcggaaatgaatgtccaggcagcgtggaagaggggctacacaggaaaaaacgtggtggtcaccatccttgatgatggcatagagagaaatcaccctgacctggccccaaattatgattcctacgccagctacgacgtgaacggcaatgattatgacccatctccacgatatgatgccagcaatgaaaataaacacggcactcgttgtgcgggagaagttgctgcttcagcaaacaattcctactgcatcgtgggcatagcgtacaatgccaaaataggaggcatccgcatgctggacggcgatgtcacagatgtggtcgaggcaaagtcgctgggcatcagacccaactacatcgacatttacagtgccagctgggggccggacgacgacggcaagacggtggacgggcccggccgactggctaagcaggctttcgagtatggcattaaaaagggccggcagggcctgggctccattttcgtctgggcatctgggaatggcgggagagagggggactactgctcgtgcgatggctacaccaacagcatctacaccatctccgtcagcagcgccaccgagaatggctacaagccctggtacctggaagagtgtgcctccaccctggccaccacctacagcagtggggccttttatgagcgaaaaatcgtcaccacggatctgcgtcagcgctgtaccgatggccacactgggacctcagtctctgcccccatggtggcgggcatcatcgccttggctctagaagcaaacagccagttaacctggagggacgtccagcacctgctagtgaagacatcccggccggcccacctgaaagcgagcgactggaaagtgaacggcgcgggtcataaagttagccatttctatggatttggtttggtggacgcagaagctctcgttgtggaggcaaagaagtggacagcagtgccatcgcagcacatgtgtgtggccgcctcggacaagagacccaggagcatccccttagtgcaggtgctgcggactacggccctgaccagcgcctgcgcggagcactcggaccagcgggtggtctacttggagcacgtggtggttcgcacctccatctcacacccacgccgaggagacctccagatctacctggtttctccctcgggaaccaagtctcaacttctggcaaagaggttgctggatctttccaatgaagggtttacaaactgggaattcatgactgtccactgctggggagaaaaggctgaagggcagtggaccttggaaatccaagatctgccatcccaggtccgcaacccggagaagcaaggtgatcttgagactcctgttgcaaatcaactgaccacagaagagagggaacctggactaaaacacgtgttccggtggcagattgaacaagagctttggtaatctctgtgaaatactgcagagggacagatgaccaaagccaccacatttagaactttggctgcctttggaagtccagagctggatctctcagctcccgcccccagaggctcagcactttggacatggctcacaaacagttgttgattgactgcatgaatgcgtgtgcgtgcaagcatgaaccttgtttaaatcaagagcttacataattttaaccagttctgtcttcagctgtacatactcagtaaaatgtttaatgaaggggaagagattagtctcttctgtgtgaccatgttttccctttattcatcctaaaaagttccatgaattcttgatttcctttcagtggccctttcaacaatgtcttttttcccaagagcataactgttctcattttattgctagccatcttgatctgtgttttattgacatctcttttgagctaatcttcatttctaagataagagttgagattttgcaatctgtgttcgatggctcaatctatcctgtgcttgatgctagaaaggaagacagatttaaagcacatgccttctgtgccggctttcaagtttgtcactaaactctcatttctggaaagtgcaattatagagtatcactcccacttccttggaaacagagctgaagaacttggcacactctccaaacagtcaccatacacactgttgtcaaaaagttccatttttaaccccatttgcattaatattgcagtcaatctctttacctccttttctctttcacggggccgtgacagtgacgcctttccccaaaactctcctcgtttgagaaaaaaagaagtatgtatccccacttatctcggggagaaatgcaaccaactgctgctgtgcacatttatgaatcacagtattgtttagtcggttctgtatctccagtagaaagcataacaaaaagatgacctttgtctcacctcatagctaatttttgcaaataaaatactaaacattg

SEQ ID NO: 236169 - DNA, 1956 bp, Artificial Sequence
  derived and/or modified sequence
atgccccccagagccccccccgcccccggccccagacccccccccagagccgccgccgccaccgacaccgccgccggcgccggcggcgccggcggcgccggcggcgccggcggccccggcttcagacccctggcccccagaccctggagatggctgctgctgctggccctgcccgccgcctgcagccccccccccagacccgtgtacaccaaccactgggccgtgcaggtgctgggcggccccgccgaggccgacagagtggccgccgcccacggctacctgaacctgggccagatcggcaacctggaggactactaccacttctaccacagcaagaccttcaagagaagcaccctgagcagcagaggcccccacaccttcctgagaatggacccccaggtgaagtggctgcagcagcaggaggtgaagagaagagtgaagagacaggtgagaagcgacccccaggccctgtacttcaacgaccccatctggagcaacatgtggtacctgcactgcggcgacaagaacagcagatgcagaagcgagatgaacgtgcaggccgcctggaagagaggctacaccggcaagaacgtggtggtgaccatcctggacgacggcatcgagagaaaccaccccgacctggcccccaactacgacagctacgccagctacgacgtgaacggcaacgactacgaccccagccccagatacgacgccagcaacgagaacaagcacggcaccagatgcgccggcgaggtggccgccagcgccaacaacagctactgcatcgtgggcatcgcctacaacgccaagatcggcggcatcagaatgctggacggcgacgtgaccgacgtggtggaggccaagagcctgggcatcagacccaactacatcgacatctacagcgccagctggggccccgacgacgacggcaagaccgtggacggccccggcagactggccaagcaggccttcgagtacggcatcaagaagggcagacagggcctgggcagcatcttcgtgtgggccagcggcaacggcggcagagagggcgactactgcagctgcgacggctacaccaacagcatctacaccatcagcgtgagcagcgccaccgagaacggctacaagccctggtacctggaggagtgcgccagcaccctggccaccacctacagcagcggcgccttctacgagagaaagatcgtgaccaccgacctgagacagagatgcaccgacggccacaccggcaccagcgtgagcgcccccatggtggccggcatcatcgccctggccctggaggccaacagccagctgacctggagagacgtgcagcacctgctggtgaagaccagcagacccgcccacctgaaggccagcgactggaaggtgaacggcgccggccacaaggtgagccacttctacggcttcggcctggtggacgccgaggccctggtggtggaggccaagaagtggaccgccgtgcccagccagcacatgtgcgtggccgccagcgacaagagacccagaagcatccccctggtgcaggtgctgagaaccaccgccctgaccagcgcctgcgccgagcacagcgaccagagagtggtgtacctggagcacgtggtggtgagaaccagcatcagccaccccagaagaggcgacctgcagatctacctggtgagccccagcggcaccaagagccagctgctggccaagagactgctggacctgagcaacgagggcttcaccaactgggagttcatgaccgtgcactgctggggcgagaaggccgagggccagtggaccctggagatccaggacctgcccagccaggtgagaaaccccgagaagcagggcgacctggagacccccgtggccaaccagctgaccaccgaggagagagagcccggcctgaagcacgtgttcagatggcagatcgagcaggagctgtggtag

SEQ ID NO: 236170 - protein, 498 aa, Artificial Sequence
  derived and/or modified sequence
IWNVHHCGDKNSRCRSEMNVQAAWKRGYTGKNVVVTILDDGIERNHPDLAPNYDSYASYDVNGNDYDPSPRYDASNENKHGTRCAGEVAASANNSYCIVGIAYNAKIGGIRMLDGDVTDVVEAKSLGIRPNYIDIYSASWGPDDDGKTVDGPGRLAKQAFEYGIKKGRQGLGSIFVWASGNGGREGDYCSCDGYTNSIYTISVSSATENGYKPWYLEECASTLATTYSSGAFYERKIVTTDLRQRCTDGHTGTSVSAPMVAGIIALALEANSQLTWRDVQHLLVKTSRPAHLKASDWKVNGAGHKVSHFYGFGLVDAEALVVEAKKWTAVPSQHMCVAASDKRPRSIPLVQVLRTTALTSACAEHSDQRVVYLEHVVVRTSISHPRRGDLQIYLVSPSGTKSQLLAKRLLDLSNEGFTNWEFMTVHCWGEKAEGQWTLEIQDLPSQVRNPEKQGDLETPVANQLTTEERFVSTLSILFHWSVYLSWSQYHIVLITVAL

SEQ ID NO: 236171 - DNA, 89 bp, Artificial Sequence
  derived and/or modified sequence
cccaacttcaaattatactacaaggctacagtaatcaaaaaagcatagtactattacaaaaacagacacacaggccaatggaatacaat

SEQ ID NO: 236172 - DNA, 91 bp, Artificial Sequence
  derived and/or modified sequence
tgaatagacacacagaccaatggaacagaatagagaacacagaataaatctgcacacttatagccagctgatttttgacaaatttgccaag

SEQ ID NO: 236173 - DNA, 741 bp, Artificial Sequence
  derived and/or modified sequence
atggccatcctgcccaaggtgatctacagattcaacgccatccccatcaagctgcccatgaccttcttcaccgagctggagaagaccaccctgaagttcatctggaaccagaagagagcctgcatcaccaagagcatcctgagacagaagaagaaggccggcggcatcaccctgcccgacttcaagctgtactacaccgccaccgtgaccaagaccgcctggtactggtaccagaacagagacatcgaccagtggaacagaaccgagcccagcgagatcatgccccacatctacaactacctgatcttcgacaagcccgacaagaacaagcagtggggcaaggacagcctgagcaacaagtggtgctgggagaactggctggccatctgcaagaagctgaagctggaccccttcctgaccccctacaccaagatcaacagcagatggatcaaggacctgaacatcagacccaagaccatcaagaccctggaggagaacctgggcatcaccatccaggacatcggcatgggcaagcacttcatgagcaagacccccaaggccatggccaccaaggccaagatcgacaagtgggacctgatcaagctgaagagcttctgcaccgccaaggagaccaccatcagagtgaacagacagcccaccgagtgggagaagatcttcaccacctacagcagcgacaagggcctgatcagcagaatctacaacgagctgaagcagatctag

SEQ ID NO: 236174 - DNA, 741 bp, Artificial Sequence
  derived and/or modified sequence
atggctatcctgcccaaggtgatctaccggttcaatgctatccctattaagctgcccatgactttttttaccgagcttgaaaaaactactttgaaattcatttggaaccaaaaacgagcatgtattaccaagagtattttgcggcagaaaaagaaagccggtggtatcacactgccggattttaaattatactatactgcaacggtcacgaaaacggcatggtattggtaccaaaaccgggatatcgaccagtggaatagaactgaacctagcgagataatgccccacatctataactacttaatctttgataagccagacaaaaacaaacagtgggggaaagacagtttgagtaacaaatggtgttgggaaaactggttggctatttgtaagaagttaaagcttgaccctttcctgacaccttacactaaaattaatagcagatggatcaaggacctgaacatcagacccaagactatcaagacactcgaagagaatttaggaatcacaatacaggacattggaatgggtaagcacttcatgtccaaaactcctaaagctatggcaaccaaggccaaaatcgataaatgggatctgattaagctcaaatctttttgcacggctaaggagacaacaatccgggtgaacagacagcctactgagtgggagaaaatttttacaacttacagtagcgacaagggactcattagcagaatctataacgagctgaaacaaatttag

SEQ ID NO: 236175 - DNA, 741 bp, Artificial Sequence
  derived and/or modified sequence
atggccatcctgcccaaggtgatctaccgcttcaatgccatccccatcaagctgcccatgaccttcttcacagagctggagaagaccaccctgaagttcatctggaaccagaagagggcctgcatcaccaagagcatcctgcggcagaagaagaaggccggcggcatcaccctgcctgacttcaagctgtactacacagccaccgtgaccaagacagcctggtactggtaccagaacagagacatcgaccagtggaacagaacagagcccagcgagatcatgccccacatctacaactacctgatctttgacaagccagacaagaacaagcagtggggcaaggacagcctgagcaacaagtggtgctgggagaactggctggccatctgcaagaagctgaagctggaccccttcctgaccccctacaccaagatcaacagccgctggatcaaggacctgaacatccggcccaagaccatcaagaccctggaggagaacctgggcatcaccatccaggacatcggcatgggcaagcacttcatgagcaagacccccaaggccatggccaccaaggccaagattgacaagtgggacctgatcaagctgaagagcttctgcacagccaaggagaccaccatccgggtgaaccggcagcccacagagtgggagaagatcttcaccacctacagcagtgacaagggcctcatcagccgcatctacaatgagctgaagcagatctag

SEQ ID NO: 236176 - DNA, 1497 bp, Artificial Sequence
  derived and/or modified sequence
atttggaatgtccaccattgcggtgacaaaaattcgagatgtcgtagcgagatgaacgtccaggctgcatggaagcgcggatataccggtaagaacgtcgtcgtgacgatcctcgacgacggaatcgagagaaaccatcctgacctggctccaaattatgacagctatgcctcctacgatgtcaacgggaatgattacgaccccagtccccggtatgacgcatcgaacgagaataaacatgggacccgttgcgccggcgaggtggccgcctccgccaataacagctattgcattgtgggaatagcctacaacgcaaaaatcggcggcatccgcatgttggatggggacgtcacggacgtggtcgaagccaagtctcttgggatccggcccaattatattgatatctactctgctagttggggccctgatgatgatggcaagactgtagacggcccaggcaggttggctaaacaggcattcgagtacggcataaaaaagggaagacagggcttaggctctatcttcgtctgggcctcaggaaacggcggacgagaaggtgactattgttcttgtgacggttatacaaactctatatatacaataagcgtctccagcgccaccgagaatggttacaagccatggtacctcgaagaatgcgcctccacattagcgaccacctactcttctggggccttttatgaacggaaaatagtgaccaccgacttgcgtcagcgctgcaccgatggtcatacaggcaccagcgtgtcagcgcctatggttgccggcatcattgctctggccctcgaagccaacagccagcttacatggcgggacgttcaacacttgctagtgaaaacgagtcgacctgcacacctgaaagcgtcggattggaaggtgaacggggccggacacaaggtgtcacatttttatgggtttgggctggttgacgcggaggctctcgtcgttgaagcgaagaaatggacggcggtcccttcccagcacatgtgtgttgcagcatccgacaagcggccacggagtataccacttgtacaagtactgaggaccaccgccctgaccagtgcctgcgccgagcactccgaccaaagagtagtgtacctcgagcatgtggtggttagaacaagcatcagtcatccacgtagaggagatttgcaaatctatcttgtgtctccgtccggcactaaatcacagctgcttgcaaaaagattactggacctgagcaatgaagggtttacaaattgggagttcatgaccgttcactgttggggagaaaaagccgagggacagtggacgctggagatccaggaccttccgagccaggtgagaaaccccgagaaacagggagacctggagacgccagtagccaaccaattaaccactgaggagcgattcgtctcaaccctgtccattctttttcactggagtgtgtacttgagctggtcacaataccacatagttctgattactgtagccctatag

SEQ ID NO: 236177 - DNA, 1497 bp, Artificial Sequence
  derived and/or modified sequence
atctggaatgtgcaccactgtggggacaagaacagccgctgccgctctgagatgaatgtgcaggccgcctggaagaggggctacacaggcaagaatgtggtggtgaccatcctggatgatggcatcgagaggaaccacccagacctggcccccaactatgacagctatgccagctatgatgtgaatggaaatgactatgaccccagccccaggtatgatgccagcaatgaaaacaagcacggcacccgctgtgccggggaggtggccgccagcgccaacaacagctactgcatcgtgggcatcgcctacaatgccaagattggaggcatccgcatgctggatggagatgtgacagatgtggtggaggccaagagcctgggcatccggcccaactacatcgacatctacagcgcctcctggggcccagatgatgatggcaagacagtggatggccctggccgcctggccaagcaggcctttgaatatggcatcaagaagggccggcagggcctgggcagcatctttgtgtgggccagcggaaatggaggccgggagggggactactgcagctgtgatggctacaccaacagcatctacaccatctctgtgtcctctgccacagaaaatggctacaagccctggtacctggaggagtgtgccagcaccctggccaccacctacagcagcggggccttctatgaaaggaagatcgtgaccacagacctgcggcagcgctgcacagatggccacacaggcacctctgtgtctgcccccatggtggccggcatcatcgccctggccctggaggccaacagccagctgacctggagagatgtgcagcacctgctggtgaagaccagcaggcctgcccacctgaaggccagtgactggaaggtgaatggagctggccacaaggtgagccacttctacggcttcggcctggtggatgctgaggccctggtggtggaggccaagaagtggacagctgtgcccagccagcacatgtgtgtggccgccagtgacaagaggcccaggagcatccccctggtgcaggtgctgcggaccacagccctgaccagcgcctgtgccgagcacagcgaccagagggtggtgtacctggagcacgtggtggtgaggaccagcatcagccacccccggcggggggacctgcagatctacctggtgagccccagcggcaccaagagccagctgctggccaagaggctgctggacctgagcaatgaaggcttcaccaactgggagttcatgacagtgcactgctggggcgagaaggccgagggccagtggaccctggagatccaggacctgcccagccaggtgaggaaccctgagaagcagggcgacctggagacccctgtggccaaccagctgaccacagaggagagatttgtgtccaccctgagcatcctcttccactggagcgtgtacctgtcctggagccagtaccacatcgtgctgatcaccgtggccctgtag

SEQ ID NO: 236178 - DNA, 1497 bp, Artificial Sequence
  derived and/or modified sequence
atctggaacgtgcaccactgcggcgacaagaacagccggtgccggagcgagatgaatgtccaagccgcctggaagagaggctacactggtaaaaatgtggtggttacaatcctggatgatggaattgagcgaaatcacccagatcttgctccaaactatgattcctatgccagctatgatgtgaacggcaacgattacgacccatcccctcgatatgatgcatctaacgagaacaaacacggcaccaggtgtgccggagaggtcgcggcttctgcaaataatagttactgtatcgtgggcattgcatacaatgccaaaattggggggatcaggatgttagatggcgacgtgacagatgtggtcgaggctaaatcccttggaatccgtccaaattacatcgacatctatagtgcatcttggggccccgatgacgacggcaagaccgtggacgggcctgggcgcctggctaagcaggcctttgagtacggaatcaagaagggcaggcagggcttggggtctatattcgtgtgggccagcggcaacggggggcgggagggggactactgcagctgcgatgggtacaccaattccatatacaccatctctgtgagctctgctaccgagaatggttacaaaccatggtacctggaagaatgcgcgtccacgctcgctaccacatactcaagtggtgccttttatgagaggaaaattgtgactaccgacttgcgacaaagatgtacggatggtcacaccggaacatccgtgagcgcgccaatggtcgcaggtattatcgccctggctttggaggctaactcccagctgacatggcgcgatgtgcaacacctactggtgaagacatcgcgaccagcccatctgaaagcctctgattggaaagtcaacggtgcaggccataaggtctcccacttctatggctttggccttgttgacgctgaggccctggtggtagaggccaaaaagtggacagcagttccgtcccagcatatgtgcgtggcagcctctgacaagagaccgcggagcattcccctcgtgcaggtgctgcgaacaactgctcttacttcagcctgcgccgagcacagcgatcaacgggttgtttatcttgagcatgtggtggtgagaaccagcatttctcatccccggcgcggcgacctgcagatctacttggtgtctccgagtggcacaaaatctcagctcttggccaagcggctgctggatctgagcaatgaggggtttaccaactgggagttcatgactgtgcactgttggggagaaaaagccgagggccagtggactctcgagattcaggacctgcctagccaggttagaaaccccgagaagcagggcgatcttgagactcctgttgcaaaccagctgaccacagaagaaagatttgtgagtaccctgtctatcctttttcactggtccgtgtacctgtcttggagccagtaccacatcgttcttattactgtggccctgtag

SEQ ID NO: 236179 - DNA, 1497 bp, Artificial Sequence
  derived and/or modified sequence
atctggaatgtacaccactgtggcgataaaaacagtaggtgccggagcgagatgaacgtacaggcagcctggaagaggggttacactggaaaaaatgttgtagtcacgatccttgacgacggaatcgagcggaaccaccccgacctagcccctaactacgactcctatgccagctacgatgttaatggcaatgactatgatccctcacccagatatgacgcatccaatgaaaacaagcacggaacccgatgcgccggtgaagtcgcagcttccgccaacaattcctactgcatcgtcggaatcgcttacaatgctaagataggagggattcggatgctggacggtgacgtaaccgatgtcgtggaagctaaatctctgggcatacgccctaactacattgatatctatagcgcgtcctggggacccgacgatgatggaaagaccgtcgacggacctggcagactggccaagcaggccttcgaatacggtattaaaaaaggcaggcaaggcctgggatctatatttgtgtgggcttctgggaacgggggacgcgagggagactactgtagttgtgatggctacaccaactctatctacaccatatccgtctccagcgccaccgagaatggctacaaaccctggtacctggaggaatgcgcgtctaccctggctacgacttattcttctggcgcattttacgagcgaaaaatcgtgaccaccgacctacgacagagatgtaccgatggccatacaggcacttctgtgagcgctcccatggtcgctggaatcatcgccctggccctggaggcaaactcgcaattaacctggcgtgatgttcagcacctgctagttaagacatcccggccagcccacctgaaggcctctgactggaaagtcaacggggctggccataaggtttcccacttttacgggttcggccttgtagacgcagaggctctcgtggtcgaggcaaaaaagtggacagcggtcccttcgcaacacatgtgcgtggccgcatccgataagcgcccacggtccatacctttggtccaggtgttgcggacaaccgcgcttacatctgcctgtgccgagcactccgaccagagagttgtgtacctggagcatgtggttgttcgaacctccatctcacacccccgacgtggcgatctgcagatctacttagtgtcgccaagcgggacaaaatcacagctactcgccaagcgactcttggacttgagcaacgaaggatttactaattgggaattcatgactgtgcactgttggggtgaaaaagcagagggtcagtggactctggagatccaggacctgcctagccaggtgaggaacccagagaagcagggggacctggagacaccagtggccaatcaactgactacagaggagagattcgtgtcaacgctgtcaatactattccactggtccgtgtacttgtcgtggtcacagtatcatatcgtgctcatcactgtcgctctttag

SEQ ID NO: 236180 - DNA, 1497 bp, Artificial Sequence
  derived and/or modified sequence
atctggaatgtccatcattgtggcgacaagaacagtcgctgccggtcggaaatgaatgtccaggcagcgtggaagaggggctacacaggaaaaaacgtggtggtcaccatccttgatgatggcatagagagaaatcaccctgacctggccccaaattatgattcctacgccagctacgacgtgaacggcaatgattatgacccatctccacgatatgatgccagcaatgaaaataaacacggcactcgttgtgcgggagaagttgctgcttcagcaaacaattcctactgcatcgtgggcatagcgtacaatgccaaaataggaggcatccgcatgctggacggcgatgtcacagatgtggtcgaggcaaagtcgctgggcatcagacccaactacatcgacatttacagtgccagctgggggccggacgacgacggcaagacggtggacgggcccggccgactggctaagcaggctttcgagtatggcattaaaaagggccggcagggcctgggctccattttcgtctgggcatctgggaatggcgggagagagggggactactgctcgtgcgatggctacaccaacagcatctacaccatctccgtcagcagcgccaccgagaatggctacaagccctggtacctggaagagtgtgcctccaccctggccaccacctacagcagtggggccttttatgagcgaaaaatcgtcaccacggatctgcgtcagcgctgtaccgatggccacactgggacctcagtctctgcccccatggtggcgggcatcatcgccttggctctagaagcaaacagccagttaacctggagggacgtccagcacctgctagtgaagacatcccggccggcccacctgaaagcgagcgactggaaagtgaacggcgcgggtcataaagttagccatttctatggatttggtttggtggacgcagaagctctcgttgtggaggcaaagaagtggacagcagtgccatcgcagcacatgtgtgtggccgcctcggacaagagacccaggagcatccccttagtgcaggtgctgcggactacggccctgaccagcgcctgcgcggagcactcggaccagcgggtggtctacttggagcacgtggtggttcgcacctccatctcacacccacgccgaggagacctccagatctacctggtttctccctcgggaaccaagtctcaacttctggcaaagaggttgctggatctttccaatgaagggtttacaaactgggaattcatgactgtccactgctggggagaaaaggctgaagggcagtggaccttggaaatccaagatctgccatcccaggtccgcaacccggagaagcaaggtgatcttgagactcctgttgcaaatcaactgaccacagaagagaggttcgtttccacactctcgattctgttccattggtctgtatatctatcttggagtcagtaccatattgttttgatcactgtagctttgtag

SEQ ID NO: 236181 - DNA, 1497 bp, Artificial Sequence
  derived and/or modified sequence
atctggaacgtgcaccactgcggcgacaagaacagcagatgcagaagcgagatgaacgtgcaggccgcctggaagagaggctacaccggcaagaacgtggtggtgaccatcctggacgacggcatcgagagaaaccaccccgacctggcccccaactacgacagctacgccagctacgacgtgaacggcaacgactacgaccccagccccagatacgacgccagcaacgagaacaagcacggcaccagatgcgccggcgaggtggccgccagcgccaacaacagctactgcatcgtgggcatcgcctacaacgccaagatcggcggcatcagaatgctggacggcgacgtgaccgacgtggtggaggccaagagcctgggcatcagacccaactacatcgacatctacagcgccagctggggccccgacgacgacggcaagaccgtggacggccccggcagactggccaagcaggccttcgagtacggcatcaagaagggcagacagggcctgggcagcatcttcgtgtgggccagcggcaacggcggcagagagggcgactactgcagctgcgacggctacaccaacagcatctacaccatcagcgtgagcagcgccaccgagaacggctacaagccctggtacctggaggagtgcgccagcaccctggccaccacctacagcagcggcgccttctacgagagaaagatcgtgaccaccgacctgagacagagatgcaccgacggccacaccggcaccagcgtgagcgcccccatggtggccggcatcatcgccctggccctggaggccaacagccagctgacctggagagacgtgcagcacctgctggtgaagaccagcagacccgcccacctgaaggccagcgactggaaggtgaacggcgccggccacaaggtgagccacttctacggcttcggcctggtggacgccgaggccctggtggtggaggccaagaagtggaccgccgtgcccagccagcacatgtgcgtggccgccagcgacaagagacccagaagcatccccctggtgcaggtgctgagaaccaccgccctgaccagcgcctgcgccgagcacagcgaccagagagtggtgtacctggagcacgtggtggtgagaaccagcatcagccaccccagaagaggcgacctgcagatctacctggtgagccccagcggcaccaagagccagctgctggccaagagactgctggacctgagcaacgagggcttcaccaactgggagttcatgaccgtgcactgctggggcgagaaggccgagggccagtggaccctggagatccaggacctgcccagccaggtgagaaaccccgagaagcagggcgacctggagacccccgtggccaaccagctgaccaccgaggagagattcgtgagcaccctgagcatcctgttccactggagcgtgtacctgagctggagccagtaccacatcgtgctgatcaccgtggccctgtag

SEQ ID NO: 236182 - protein, 336 aa, Artificial Sequence
  derived and/or modified sequence
MKIDIHSHILPKEWPDLKKRFGYGGWVQLQHHSKGEAKLLKDGKVFRVVRENCWDPEVRIREMDQKGVTVQALSTVPVMFSYWAKPEDTLNLCQLLNNDLASTVVSYPRRFVGLGTLPMQAPELAVKEMERCVKELGFPGVQIGTHVNEWDLNAQELFPVYAAAERLKCSLFVHPWDMQMDGRMAKYWLPWLVGMPAETTIAICSMIMGGVFEKFPKLKVCFAHGGGAFPFTVGRISHGFSMRPDLCAQDNPMNPKKYLGSFYTDALVHDPLSLKLLTDVIGKDKVILGTDYPFPLGELEPGKLIESMEEFDEETKNKLKAGNALAFLGLERKQFE

SEQ ID NO: 236183 - DNA, 1011 bp, Artificial Sequence
  derived and/or modified sequence
atgaagatcgacatccacagccacatcctgcccaaggagtggcccgacctgaagaagagattcggctacggcggctgggtgcagctgcagcaccacagcaagggcgaggccaagctgctgaaggacggcaaggtgttcagagtggtgagagagaactgctgggaccccgaggtgagaatcagagagatggaccagaagggcgtgaccgtgcaggccctgagcaccgtgcccgtgatgttcagctactgggccaagcccgaggacaccctgaacctgtgccagctgctgaacaacgacctggccagcaccgtggtgagctaccccagaagattcgtgggcctgggcaccctgcccatgcaggcccccgagctggccgtgaaggagatggagagatgcgtgaaggagctgggcttccccggcgtgcagatcggcacccacgtgaacgagtgggacctgaacgcccaggagctgttccccgtgtacgccgccgccgagagactgaagtgcagcctgttcgtgcacccctgggacatgcagatggacggcagaatggccaagtactggctgccctggctggtgggcatgcccgccgagaccaccatcgccatctgcagcatgatcatgggcggcgtgttcgagaagttccccaagctgaaggtgtgcttcgcccacggcggcggcgccttccccttcaccgtgggcagaatcagccacggcttcagcatgagacccgacctgtgcgcccaggacaaccccatgaaccccaagaagtacctgggcagcttctacaccgacgccctggtgcacgaccccctgagcctgaagctgctgaccgacgtgatcggcaaggacaaggtgatcctgggcaccgactaccccttccccctgggcgagctggagcccggcaagctgatcgagagcatggaggagttcgacgaggagaccaagaacaagctgaaggccggcaacgccctggccttcctgggcctggagagaaagcagttcgagtag

SEQ ID NO: 236184 - DNA, 1321 bp, Artificial Sequence
  derived and/or modified sequence
gggttgggcaggcctactgactgctgcctgaaggttgctgtaaagggactaagtaaatcaattaactccacagttttcacaaaggtctcttgatatcaaaacttctttccttgcatgcttctctgatcctgtggagatgaaaattgacatccatagtcatattctaccaaaagaatggccagatctaaaaaagaggtttggctacggaggctgggtgcagctccaacaccacagcaagggagaagcaaagttgttgaaagatgggaaagtcttcagagtggtgcgagagaattgctgggatccagaagttcgtattagagaaatggaccaaaaaggagtaacagtgcaagccctttccacagttcctgtcatgtttagctactgggccaaacctgaggacactttaaacctgtgccagcttttaaacaacgaccttgccagcaccgttgtgagctaccccaggaggttcgtgggtctggggacgttgcccatgcaggcccctgagctggcggtcaaggagatggagcgctgtgtgaaagagctgggctttcccggggtccaaattggcacccacgtcaacgagtgggacctgaacgcgcaggagctctttcctgtctatgcggcagccgaaaggctgaagtgttccctgttcgtgcatccctgggacatgcagatggatggacgaatggccaaatactggctcccttggcttgtaggaatgccagcagagaccaccatagccatttgctccatgatcatgggtggagtatttgagaagtttcccaaactgaaagtgtgtttcgcacatggtggtggtgccttccccttcacagtgggaagaatctcccatggattcagcatgcgcccagatctgtgtgcccaggacaaccccatgaacccgaagaaataccttggttccttttacacagatgctttggttcatgatcctctgtccctcaagctgttaacagatgtcataggaaaggataaagtcattttgggaaccgattacccctttccactaggtgagctggaacctgggaaactaatagagtccatggaagaatttgatgaagaaacaaagaataaactcaaagccggcaatgccctggcatttttgggtcttgagagaaaacaatttgaatgactgaatttactacaaaggcaaactttcaaaaggatatctcatttttgtttctaaatatgtatcaacaggtatcaacaaaatcctattttgaactattttactcagaaatgaatgtcccaaatatcctaaattattcataataaaaatgatttgtaagtgttttcattctgaaaa

SEQ ID NO: 236185 - DNA, 1011 bp, Artificial Sequence
  derived and/or modified sequence
atgaagatagacatccactctcatattctcccaaaggagtggcccgatctgaagaagcggttcggttacggcgggtgggtgcagctgcagcatcatagcaaaggcgaagcaaaacttttgaaagacggtaaggtttttcgggtagtgagagagaactgttgggaccccgaggttagaattagagaaatggaccagaaaggagtgactgtgcaggcactgagtacagtgcccgtaatgttctcctattgggccaagcccgaggacacgctaaatctgtgccagttacttaacaacgacttagcctcaaccgtagtgtcctacccacggagatttgttggcctcggcaccctccctatgcaggctccagagctcgctgttaaggagatggaaaggtgcgtcaaagagctcgggttcccgggagttcaaatcggaacccatgttaacgaatgggatctgaacgcccaggaacttttccctgtttacgcagcagccgagcggttgaagtgctccctgtttgtgcacccctgggacatgcaaatggacggccgcatggccaaatactggttgccctggttggtggggatgcccgcagaaaccacaatagctatttgtagtatgatcatgggcggcgttttcgaaaagttcccaaagctgaaggtgtgcttcgcccacggaggcggagcctttccattcacagtcggccggatcagtcacggatttagcatgaggcctgatctctgtgcacaagataaccccatgaaccccaagaaatatttagggagcttctacactgacgccttggtgcatgaccctttaagcttgaagctactcacagatgtaatcggcaaggataaagtcattctggggacagactacccttttccactgggagaactggagcctggcaagctcatcgagtcaatggaggaatttgatgaagaaacaaagaataaactaaaagctgggaatgccctggcctttctcggattagaaaggaagcagttcgagtag

SEQ ID NO: 236186 - DNA, 1011 bp, Artificial Sequence
  derived and/or modified sequence
atgaagattgacatccacagccacatcctgcccaaggagtggccagacctgaagaagagatttggctatggaggctgggtgcagctgcagcaccacagcaagggggaggccaagctgctgaaggatggcaaggtgttccgggtggtgcgggagaactgctgggaccctgaggtgcgcatccgggagatggaccagaagggcgtgacagtgcaggccctgagcacagtgcctgtgatgttctcctactgggccaagccagaggacaccctgaacctgtgccagctgctgaacaatgacctggccagcacagtggtgtcctaccccaggagatttgtgggcctgggcaccctgcccatgcaggcccctgagctggccgtgaaggagatggagcgctgtgtgaaggagctgggcttccctggggtgcagatcggcacccacgtgaatgagtgggacctgaatgcccaggagctgtttcctgtgtatgctgctgctgagcggctgaagtgcagcctgtttgtgcacccctgggacatgcagatggatggccgcatggccaagtactggctgccctggctggtgggcatgcctgctgagaccaccatcgccatctgcagcatgatcatgggcggcgtgtttgagaagttccccaagctgaaggtgtgctttgcccacggcggcggggccttccccttcaccgtgggccgcatcagccacggcttctccatgaggccagacctgtgtgcccaggacaaccccatgaaccccaagaagtacctgggcagcttctacacagatgccctggtgcatgaccccctgagcctgaagctgctgacagatgtgattggcaaggacaaggtgatcctgggcacagactaccccttccccctgggggagctggagcccgggaagctgattgaatccatggaggagtttgatgaggagaccaagaacaagctgaaggctggaaatgccctggccttcctgggcctggagaggaagcagtttgaatag

SEQ ID NO: 236187 - DNA, 1011 bp, Artificial Sequence
  derived and/or modified sequence
atgaagatcgacatccacagccacatcctgcccaaggagtggcccgaccttaagaaaaggttcggctacggaggatgggtgcagctgcaacaccacagtaaaggcgaggccaagctcctcaaggacgggaaggtgttccgggtggtcagggagaactgttgggatcccgaagtgcgcatacgcgaaatggaccaaaagggcgtgacagtgcaggctctcagtaccgttcccgtgatgtttagctactgggccaagccagaggacactcttaatttgtgccagctgcttaataacgatctagcttctacagtcgtatcctaccctaggaggtttgttggcctcggcactttgcctatgcaagcccctgaactcgcggtcaaggagatggagcggtgcgtgaaggaactcgggttccctggcgtccaaattggtacccacgtgaacgaatgggacctgaacgcgcaagaactgtttcctgtgtacgctgctgctgagagactgaagtgctccttgttcgttcatccttgggatatgcagatggatgggcgcatggcaaaatattggctcccttggttagtaggcatgcccgcggaaaccacaatagccatctgttctatgatcatgggaggggtgttcgagaagtttcccaaactgaaggtctgtttcgcacatggcgggggggccttcccattcacagtcgggaggattagccatggattcagtatgcggccagacttatgcgctcaggataaccccatgaaccctaaaaaatatctagggagcttctacacggacgccttggtccacgaccccttgagccttaagctgctgacagacgtgattggcaaagacaaggtcattctcggaacggattaccccttccccctgggagaactggagcccgggaaacttatcgaaagcatggaggagtttgacgaagagactaaaaacaagctcaaggcgggaaacgctctcgcctttcttggcctcgaacgcaaacagtttgagtag

SEQ ID NO: 236188 - DNA, 1011 bp, Artificial Sequence
  derived and/or modified sequence
atgaagattgacatccactcgcatattctgcctaaagagtggcccgatcttaagaaaaggtttggctacggcggatgggtccagctgcagcatcattccaagggcgaagctaagctgcttaaggatgggaaggtgtttagagtggtcagagagaattgctgggacccagaggtccgcattagggagatggatcagaagggcgtgaccgtgcaggcactgagcaccgtccccgtgatgttttcatactgggcaaagcccgaggacacccttaatctttgccaactgcttaacaacgacctggcctctactgtggtgagttaccctagacggtttgtcggcctggggacactgcccatgcaggctcctgaactcgccgtgaaggagatggagaggtgtgtcaaggagttaggattcccgggagtgcaaatcggtacacacgtgaacgagtgggacttgaacgcccaggaactatttcctgtctatgcggcagccgaacgcctgaaatgttcgctgtttgtccatccatgggacatgcagatggacgggagaatggcgaaatattggctcccttggcttgtgggcatgccagctgaaaccaccattgcgatctgttccatgattatggggggtgtatttgaaaaatttcctaaattaaaggtctgctttgcccatggcggtggcgcttttcctttcacagttggaaggatttcccacggcttctccatgagaccggatctctgcgctcaggacaacccaatgaaccccaaaaaatacctaggctccttttacacagacgctcttgtgcacgacccactgtcactcaaactcctgacagacgtgataggcaaagacaaggtgattctgggtacagattacccgttcccccttggtgaactcgaaccagggaagctcattgagtcaatggaagagttcgacgaggagactaagaacaagctcaaggcaggtaatgcacttgcttttctcggtttggagagaaagcaatttgaatag

SEQ ID NO: 236189 - protein, 339 aa, Artificial Sequence
  derived and/or modified sequence
MMPFCHNIINISCVKNNWSNDVRASLYSLMVLIILTTLVGNLIVIVSISHFKQLHTPTNWLIHSMATVDFLLGCLVMPYSMVRSAEHCWYFGEVFCKIHTSTDIMLSSASIFHLSFISIDRYYAVCDPLRYKAKMNILVICVMIFISWSVPAVFAFGMIFLELNFKGAEEIYYKHVHCRGGCSVFFSKISGVLTFMTSFYIPGSIMLCVYYRIYLIAKEQARLISDANQKLQIGLEMKNGISQSKERKAVKTLGIVMGVFLICWCPFFICTVMDPFLHYIIPPTLNDVLIWFGYLNSTFNPMVYAFFYPWFRKALKMMLFGKIFQKDSSRCKLFLELSS

SEQ ID NO: 236190 - DNA, 1020 bp, Artificial Sequence
  derived and/or modified sequence
atgatgcccttctgccacaacatcatcaacatcagctgcgtgaagaacaactggagcaacgacgtgagagccagcctgtacagcctgatggtgctgatcatcctgaccaccctggtgggcaacctgatcgtgatcgtgagcatcagccacttcaagcagctgcacacccccaccaactggctgatccacagcatggccaccgtggacttcctgctgggctgcctggtgatgccctacagcatggtgagaagcgccgagcactgctggtacttcggcgaggtgttctgcaagatccacaccagcaccgacatcatgctgagcagcgccagcatcttccacctgagcttcatcagcatcgacagatactacgccgtgtgcgaccccctgagatacaaggccaagatgaacatcctggtgatctgcgtgatgatcttcatcagctggagcgtgcccgccgtgttcgccttcggcatgatcttcctggagctgaacttcaagggcgccgaggagatctactacaagcacgtgcactgcagaggcggctgcagcgtgttcttcagcaagatcagcggcgtgctgaccttcatgaccagcttctacatccccggcagcatcatgctgtgcgtgtactacagaatctacctgatcgccaaggagcaggccagactgatcagcgacgccaaccagaagctgcagatcggcctggagatgaagaacggcatcagccagagcaaggagagaaaggccgtgaagaccctgggcatcgtgatgggcgtgttcctgatctgctggtgccccttcttcatctgcaccgtgatggaccccttcctgcactacatcatcccccccaccctgaacgacgtgctgatctggttcggctacctgaacagcaccttcaaccccatggtgtacgccttcttctacccctggttcagaaaggccctgaagatgatgctgttcggcaagatcttccagaaggacagcagcagatgcaagctgttcctggagctgagcagctag

SEQ ID NO: 236191 - DNA, 1020 bp, Artificial Sequence
  derived and/or modified sequence
atgatgccattttgtcacaacatcattaatatctcctgtgtgaaaaacaactggtctaacgatgtgcgcgcctcactgtattcactgatggtgctcatcattctcaccactctggtggggaacttgatcgttattgtgtctatttcacatttcaagcagctgcacacacccacaaattggctcatccattctatggccaccgtcgacttcttattggggtgccttgttatgccctacagcatggttcgatctgccgagcactgctggtatttcggggaagtgttctgtaagatccacacctctactgatattatgcttagctccgcgtccatttttcacctctccttcatcagcatcgacaggtattacgctgtctgtgatccgcttagatataaagcaaagatgaatatcctagtaatctgtgtaatgatattcatatcctggtccgtcccggctgtgttcgccttcggaatgatcttcctggaactgaacttcaagggtgcagaagagatctactataagcatgttcactgtcggggcggatgttccgtgttcttctcgaagataagcggagtactgaccttcatgacgtcattttacattcctgggtccattatgttatgcgtttattacagaatctacctgatagcaaaggaacaagcccgtctcatctcagacgcaaatcagaagctgcagatcggtctggaaatgaaaaacgggataagtcagagcaaggaaaggaaggctgtcaagaccctcggtattgtgatgggagtgttcttaatctgttggtgtccctttttcatttgcactgtgatggaccccttccttcactacattattcctcctacactgaatgacgtactgatctggtttgggtacttgaacagtaccttcaaccccatggtttacgccttcttctatccctggttccggaaggctctgaagatgatgctatttggaaaaatttttcaaaaagactcctctcgatgtaagctgttcctggaactgtctagttag

SEQ ID NO: 236192 - DNA, 1020 bp, Artificial Sequence
  derived and/or modified sequence
atgatgcccttctgccacaacatcatcaacatcagctgtgtgaagaacaactggagcaatgatgtgcgggccagcctgtacagcctgatggtgctgatcatcctgaccaccctggtgggcaacctgattgtgattgtgtccatcagccacttcaagcagctgcacacccccaccaactggctgatccacagcatggccaccgtggacttcctgctgggctgcctggtgatgccctacagcatggtgcgctctgctgagcactgctggtactttggagaggtgttctgcaagatccacaccagcacagacatcatgctgagcagcgccagcatcttccacctgtccttcatcagcattgaccgctactatgctgtgtgtgaccccctgcgctacaaggccaagatgaacatcctggtgatctgtgtgatgatcttcatctcctggagcgtgcctgctgtgtttgccttcggcatgatcttcctggagctgaacttcaagggagctgaggagatctactacaagcacgtgcactgccggggcggctgcagcgtcttcttcagcaagatcagcggcgtgctgaccttcatgaccagcttctacatccctggcagcatcatgctgtgtgtgtactaccgcatctacctgattgccaaggagcaggcccggctcatcagtgatgccaaccagaagctgcagatcggcctggagatgaagaatggcatcagccagagcaaggagaggaaggctgtgaagaccctgggcatcgtgatgggcgtcttcctgatctgctggtgccccttcttcatctgcaccgtgatggaccccttcctgcactacatcatcccccccaccctgaatgatgtgctgatctggtttggctacctgaacagcaccttcaaccccatggtgtatgccttcttctacccctggttcaggaaggccctgaagatgatgctgtttgggaagatcttccagaaggacagcagccgctgcaagctgttcctggagctgagcagctag

SEQ ID NO: 236193 - DNA, 1020 bp, Artificial Sequence
  derived and/or modified sequence
atgatgcccttctgccacaacatcatcaacatcagctgcgtgaagaacaattggtcaaatgacgtgcgtgcctcactgtactctctcatggtgttaattattttaaccactctcgttgggaatctgatcgtgatcgtctcgattagtcactttaagcaacttcacacacccacaaactggctgatacattcaatggctactgtggattttctgctgggctgcttagtcatgccttactccatggttcgctctgccgagcactgttggtacttcggggaggtattctgtaaaattcataccagtacagacattatgcttagtagcgcctcaatcttccacctcagcttcattagtatagaccgctactatgccgtttgtgatccgcttaggtacaaggcaaagatgaatatattagttatctgcgtgatgattttcatctcctggagtgtgcctgctgtcttcgcctttggcatgatattcctggaactgaactttaaaggagctgaggagatatattataaacacgtgcactgccggggcgggtgctccgtgtttttcagcaagataagtggcgttctgacattcatgactagtttctatatacctggctcaatcatgctgtgcgtctattatcgcatctatcttatcgctaaagaacaagcccgtctcatctcagacgccaaccaaaaactgcagattggcttggagatgaaaaatggaatctcccaatcaaaagaaagaaaggccgtgaagaccctggggattgtcatgggcgtgtttctgatttgttggtgcccattcttcatctgcactgtgatggacccattcctgcactatattatccctccgacattaaatgacgtccttatctggttcgggtaccttaattctaccttcaatcccatggtgtacgcattcttctatccatggttcagaaaggcattgaaaatgatgctgttcgggaaaatcttccaaaaagattccagccggtgcaaactctttctggagctgtccagttag

SEQ ID NO: 236194 - DNA, 1020 bp, Artificial Sequence
  derived and/or modified sequence
atgatgccgttctgccacaatattataaatataagctgcgtaaagaacaactggtcaaacgacgtgagagcgtccctgtactccctaatggttttgatcatcctaaccacccttgtggggaacctgattgttattgtgagtatttctcactttaagcagcttcatactccaaccaactggctgattcactctatggctactgtggacttcctgctaggttgtctcgtaatgccctactctatggtgcgaagcgctgagcactgttggtactttggcgaagtgttttgtaagatacacacatcgactgatattatgctatctagcgcctccatattccacctgagcttcatttcaatcgatcggtattacgcagtttgtgacccactgaggtataaagccaaaatgaacattctcgtgatctgtgtgatgatctttataagctggtccgtgcctgcagtcttcgcatttgggatgattttcctggagttaaactttaaaggagcagaagaaatctattacaaacatgtccactgccgaggcggatgttcggtgttttttagcaaaattagcggggtgcttacctttatgacctctttttacatccctggatctatcatgttatgcgtttactaccgcatttatctgattgccaaggagcaggcgagactgatctctgacgctaatcagaagctgcagattgggctggagatgaagaatgggatctctcagtcaaaggaaagaaaagctgtgaaaacattgggcatagttatgggcgtgtttcttatctgttggtgtcccttctttatttgcactgtgatggaccccttcctccactacatcatccctcctacgctgaatgatgttctgatctggtttggatacctcaattcaacgtttaaccctatggtctacgccttcttttacccttggttccgaaaggccttgaagatgatgctcttcggcaaaatattccagaaggacagttcaaggtgtaagctttttctcgagttgagctcatag

SEQ ID NO: 236195 - DNA, 1020 bp, Artificial Sequence
  derived and/or modified sequence
atgatgcccttttgccacaatataattaatatttcctgtgtgaaaaacaactggtcaaatgatgtccgtgcttccctgtacagtttaatggtgctcataattctgaccacactcgttggcaatctgatagttattgtttctatatcacacttcaaacaacttcataccccaacaaattggctcattcattccatggccactgtggactttcttctggggtgtctggtcatgccttacagtatggtgagatctgctgagcactgttggtattttggagaagtcttctgtaaaattcacacaagcaccgacattatgctgagctcagcctccattttccatttgtctttcatctccattgaccgctactatgctgtgtgtgatccactgagatataaagccaagatgaatatcttggttatttgtgtgatgatcttcattagttggagtgtccctgctgtttttgcatttggaatgatctttctggagctaaacttcaaaggcgctgaagagatatattacaaacatgttcactgcagaggaggttgctctgtcttctttagcaaaatatctggggtactgacctttatgacttctttttatatacctggatctattatgttatgtgtctattacagaatatatcttatcgctaaagaacaggcaagattaattagtgatgccaatcagaagctccaaattggattggaaatgaaaaatggaatttcacaaagcaaagaaaggaaagctgtgaagacattggggattgtgatgggagttttcctaatatgctggtgccctttctttatctgtacagtcatggacccttttcttcactacattattccacctactttgaatgatgtattgatttggtttggctacttgaactctacatttaatccaatggtttatgcatttttctatccttggtttagaaaagcactgaagatgatgctgtttggtaaaattttccaaaaagattcatccaggtgtaaattatttttggaattgagttcatag

SEQ ID NO: 236196 - protein, 892 aa, Artificial Sequence
  derived and/or modified sequence
MDQPEAPCSSTGPRLAVARELLLAALEELSQEQLKRFRHKLRDVGPDGRSIPWGRLERADAVDLAEQLAQFYGPEPALEVARKTLKRADARDVAAQLQERRLQRLGLGSGTLLSVSEYKKKYREHVLQLHARVKERNARSVKITKRFTKLLIAPESAAPEEAMGPAEEPEPGRARRSDTHTFNRLFRRDEEGRRPLTVVLQGPAGIGKTMAAKKILYDWAAGKLYQGQVDFAFFMPCGELLERPGTRSLADLILDQCPDRGAPVPQMLAQPQRLLFILDGADELPALGGPEAAPCTDPFEAASGARVLGGLLSKALLPTALLLVTTRAAAPGRLQGRLCSPQCAEVRGFSDKDKKKYFYKYFRDERRAERAYRFVKENETLFALCFVPFVCWIVCTVLRQQLELGRDLSRTSKTTTSVYLLFITSVLSSAPVADGPRLQGDLRNLCRLAREGVLGRRAQFAEKELEQLELRGSKVQTLFLSKKELPGVLETEVTYQFIDQSFQEFLAALSYLLEDGGVPRTAAGGVGTLLRGDAQPHSHLVLTTRFLFGLLSAERMRDIERHFGCMVSERVKQEALRWVQGQGQGCPGVAPEVTEGAKGLEDTEEPEEEEEGEEPNYPLELLYCLYETQEDAFVRQALCRFPELALQRVRFCRMDVAVLSYCVRCCPAGQALRLISCRLVAAQEKKKKSLGKRLQASLGGGSSSQGTTKQLPASLLHPLFQAMTDPLCHLSSLTLSHCKLPDAVCRDLSEALRAAPALTELGLLHNRLSEAGLRMLSEGLAWPQCRVQTVRVQLPDPQRGLQYLVGMLRQSPALTTLDLSGCQLPAPMVTYLCAVLQHQGCGLQTLSLASVELSEQSLQELQAVKRAKPDLVITHPALDGHPQPPKELISTF

SEQ ID NO: 236197 - DNA, 2679 bp, Artificial Sequence
  derived and/or modified sequence
atggaccagcctgaggccccgtgctcttccaccggcccacggctggcagttgctagggagctgctactcgcagccctggaggaactgtcacaggagcagctgaaacggttcaggcacaaacttcgagatgtgggacctgatggacggagcataccatggggcagactggagagggccgacgctgtcgatctggctgaacagttggcccagttctacggcccagagcccgcgcttgaagtcgctcgaaagaccctgaagcgcgctgacgctagagacgttgccgcacagctgcaggagcggagattgcagcggctcgggctggggtccggaacactcctgagcgtgagtgagtacaaaaaaaagtacagggaacatgttctccagctccacgcgagggtgaaggaaagaaacgccagaagcgtgaagattaccaaaagattcaccaaactgttgatcgcccccgaatcagctgcccctgaagaggccatggggcctgctgaggagcccgagcctggaagggcaagacgaagtgatacccacacttttaacaggctcttccggcgcgacgaggaaggaaggagaccgctcactgtggttctgcaggggcccgcagggataggaaagacaatggcagccaagaagatattgtacgattgggccgctgggaaactctaccaaggacaggtggactttgcattttttatgccttgcggcgagttgcttgaaaggcccggaaccagatcactggccgatctgatcttagaccagtgcccagatagaggagcaccagtaccacagatgcttgcacagcctcagagactactgttcatcttagacggagcagacgagctcccggctctggggggaccagaagctgcgccctgtactgatccgtttgaagccgcatccggcgcccgagtcttggggggactgctttccaaagccctgctgcctacagccctgttgctcgttaccactcgcgccgccgcccctggccggctgcaggggcgcctttgtagcccgcagtgcgctgaagtgagaggtttttcggacaaagacaagaaaaagtacttctacaagtattttcgggatgaacgacgggccgagagagcttacaggtttgtgaaggagaatgagaccctgtttgccctgtgcttcgtaccatttgtctgctggatagtctgtacagtgttacgacagcaattggagttaggcagagacctgagtcgtacttcaaaaacgaccacatccgtgtatctcctgttcatcacctctgtgctgtcttcagcccccgtggctgacggtccaaggctgcagggcgacctccgcaatctttgtcgactcgccagagagggcgtcctgggacgcagggctcaattcgccgagaaggagctcgagcagctggagttacgcggcagtaaggtccaaactctttttctgagcaaaaaggaactcccgggcgtgctggagacagaagtaacctaccagttcattgatcaaagtttccaagaattcctggcggccctcagctacctccttgaagatggaggcgtgcccagaactgccgctggcggcgtcggcacgctgttacggggcgatgcccagccccattctcatcttgtgttaacaaccaggtttctattcgggcttctgagcgctgagcgaatgagagatatagagcgacacttcggttgcatggtgagcgagcgcgtgaagcaggaggccctgaggtgggtgcagggccagggacagggttgtcctggagtggcaccagaagttaccgagggagcgaagggcttagaagacacagaggaacctgaggaagaggaagaaggtgaagagccgaactacccgcttgagctcttgtactgcttatacgagactcaagaggatgcctttgtacgccaggccctgtgccgattccctgaactggctcttcagagggtcagattttgtagaatggacgtcgctgttctgtcatattgcgttagatgctgtcccgccggtcaagcactgaggctgatttcatgcaggctcgtggcagctcaggagaagaaaaagaagtccctgggaaagagactccaagcatcattgggcggaggcagctcgagccagggcaccaccaaacagctgcccgcatcgctgctacatccgctgttccaggcgatgacagaccctctgtgtcatctgtcgtctctcacgttatcccattgcaaactaccagacgctgtgtgcagggatttgagtgaggccctgagagctgcccccgctcttaccgagcttgggctgttacacaatagacttagtgaagccggcctgcgaatgctgtccgaagggctcgcttggccccagtgccgcgtccaaacagttcgtgtgcagctccccgacccccagcgggggctacagtacctggtgggcatgttacgtcagtcaccagctctcacaaccctcgatctgtcaggatgccagcttcctgccccaatggtgacttatctgtgcgccgtactccagcaccagggctgcggactgcagactttgtcacttgcatccgttgagctgtcagagcagagtcttcaggagcttcaggctgtgaaacgagccaagccagacctcgtaataacacatccagctctggatggccatccacagccacccaaggagttgatcagtactttctag

SEQ ID NO: 236198 - DNA, 2679 bp, Artificial Sequence
  derived and/or modified sequence
atggaccagcctgaggccccctgcagcagcacaggcccccggctggccgtggcccgggagctgctgctggccgccctggaggagctgagccaggagcagctgaagcgcttccgccacaagctgagagatgtgggcccagatggccgcagcatcccctggggccgcctggagcgggcagatgctgtggacctggccgagcagctggcccagttctacggccctgagcccgccctggaggtggccaggaagaccctgaagagagcagatgccagagatgtggccgcccagctgcaggagcggcggctgcagaggctgggcctgggcagcggcaccctgctgtctgtgtctgagtacaagaagaagtaccgggagcacgtgctgcagctgcacgcccgggtgaaggagagaaatgcccggtctgtgaagatcaccaagcgcttcaccaagctgctgattgcccctgagagcgctgcccctgaggaggccatgggccctgctgaggagcctgagcccggccgggccaggagaagtgacacccacaccttcaacagactcttcagaagagatgaggagggcagaagacccctgactgtggtgctgcagggccctgctggcatcggcaagaccatggccgccaagaagatcctgtatgactgggccgccggcaagctgtaccagggccaggtggactttgccttcttcatgccctgtggggagctgctggagcggcccggcaccaggagcctggccgacctgatcctggaccagtgcccagacagaggagcccctgtgccccagatgctggcccagccccagaggctgctcttcatcctggatggagcagatgagctgcctgccctgggcggccctgaggccgccccctgcacagacccctttgaagctgccagcggggcccgggtgctgggcggcctgctgagcaaggccctgctgcccacagccctgctgctggtgaccaccagggctgctgcccctggccgcctgcagggccgcctgtgcagcccccagtgtgccgaggtgcggggcttcagtgacaaggacaagaagaagtacttctacaagtacttcagagatgagcggcgggcagagcgggcctacagatttgtgaaggaaaatgagaccctgtttgccctgtgctttgtgccctttgtgtgctggatcgtgtgcaccgtgctgcggcagcagctggagctgggccgggacctgagcaggaccagcaagaccaccacctctgtgtacctgctcttcatcacctctgtgctgagcagcgcccctgtggctgatggcccccggctgcagggcgacctgaggaacctgtgccgcctggcccgggagggcgtgctgggccggcgggcccagtttgctgagaaggagctggagcagctggagctgcggggcagcaaggtgcagaccctcttcctgagcaagaaggagctgcccggggtgctggagacagaggtgacctaccagttcatcgaccagagcttccaggagttcctggccgccctgagctacctgctggaggatggaggagtgcccaggacagctgctggaggagtgggcaccctgctgcggggagatgcccagccccacagccacctggtgctgaccacccgcttcctgtttggcctgctgtctgctgagaggatgagggacatcgagcggcacttcggctgcatggtgtctgagcgggtgaagcaggaggccctgcgctgggtgcagggccagggccagggctgccctggggtggcccctgaggtgacagagggcgccaagggcctggaggacacagaggagcctgaggaggaggaggagggggaggagcccaactaccccctggagctgctgtactgcctgtatgagacccaggaggatgcctttgtgcggcaggccctgtgccgcttccctgagctggccctgcagagggtgcgcttctgcaggatggatgtggccgtgctgagctactgtgtgcgctgctgcccagctggccaggccctgcggctcatcagctgccgcctggtggccgcccaggagaagaagaagaagagcctgggcaagaggctgcaggccagcctgggcggcggcagcagcagccagggcaccaccaagcagctgcctgccagcctgctgcaccccctcttccaggccatgacagaccccctgtgccacctgagcagcctgaccctgagccactgcaagctgcctgatgctgtgtgccgggacctgtctgaggccctgcgggccgccccagccctgacagagctgggcctgctgcacaaccggctgtctgaggccggcctgaggatgctgtctgagggcctggcctggccccagtgccgggtgcagacagtgcgggtgcagctgcctgacccccagaggggcctgcagtacctggtgggcatgctgcggcagagccctgccctgaccaccctggacctgagcggctgccagctgcctgcccccatggtgacctacctgtgtgctgtgctgcagcaccagggctgcggcctgcagaccctgagcctggcctctgtggagctgtctgagcagagcctgcaggagctgcaggccgtgaagagggccaagccagacctggtgatcacccacccagccctggatggccacccccagccccccaaggagctgatcagcaccttctag

SEQ ID NO: 236199 - DNA, 2679 bp, Artificial Sequence
  derived and/or modified sequence
atggaccagcccgaggccccctgcagcagcaccggcccccggctggccgtggctcgggaacttctcttagccgcactcgaggagctgtcacaggaacaactgaaaaggtttcgacacaaactgcgtgacgtcggacccgacgggaggagtatcccatgggggcgcctggaacgcgcggacgcggtggacttggccgaacaattggcacaattctatggcccagaaccggctctagaagttgcaagaaaaaccctgaagagggcggatgctcgcgacgtagcggcgcagttacaagagcgccgcctgcagcgactgggactcggcagcgggactctgctctccgtgtcagagtacaaaaaaaaatatagagagcatgtcctccagctccacgcaagggtcaaagagaggaacgccagatcggtgaagattacgaaacggttcactaagctcctgatcgctcccgaatcagctgctccagaggaggcgatgggacctgctgaggaacctgagcctggccgggcgaggagatccgacacacacaccttcaaccgtctcttccgtagagacgaggagggcagaagacctctaaccgtggttttacaaggtcctgctggaattggcaaaaccatggccgctaagaaaattttgtatgactgggctgctggcaagctgtatcaaggtcaggtggacttcgcttttttcatgccttgcggcgaactgctagagcggccaggcactcggtctttagctgatcttatcctggatcagtgccccgatagaggagccccggtaccacagatgcttgcccagccccaacgcttgttatttattctcgacggcgccgatgagctgccagcacttgggggacccgaggcagcaccctgcacagaccccttcgaagccgcttccggagcgcgcgtgctcgggggcctcctgtccaaagccctcctgcccaccgccctcttgctagttactacaagagccgcggcgcctggtaggttgcaggggaggctatgttccccacagtgcgccgaggtgcgcggattctcagataaggacaagaaaaaatacttctataaatattttagggacgagagacgagcggagagagcctataggttcgttaaggaaaatgagacactgtttgcgctttgcttcgtcccattcgtttgctggatcgtctgcaccgtcctccggcagcagctcgaactcggacgcgacctttcacggacatctaagaccacgacttctgtatatctgctctttatcacatccgtcctgtcttcagctcctgttgccgacggccctcggttgcagggtgacttaaggaatctatgtcgcctcgcgcgcgaaggggtccttggacggagagcccaattcgccgagaaggaactcgagcagctggaattgcggggaagcaaagtccagaccttatttctttcaaaaaaagagttacctggagtcctggagaccgaggtgacttatcagtttattgaccagagctttcaggaattcctcgccgcacttagctacctgttggaggacggaggcgtgccgcgcacagctgctgggggtgtcggcacactgctcaggggagacgcacaaccacatagtcatctggtgttaacaacacggtttctctttggcctactgagcgcggagcgcatgcgtgacattgagagacattttgggtgcatggtgtcagaacgggtaaagcaagaggctctgaggtgggtgcaaggtcagggccagggctgccccggcgttgcacctgaggttacggagggcgctaaggggctggaggacacagaggagccagaggaggaagaggaaggcgaggagcctaactaccccctggagttgttgtattgtctgtacgaaactcaggaagatgccttcgtgcgccaggccttatgccgtttccccgaattagcgcttcaacgggttagattctgccgcatggacgtggccgtcttgtcttattgcgttagatgctgtcctgcagggcaagctctcagacttatttcttgccggctggtcgcggcacaagaaaagaagaagaagtctctagggaagcgactgcaggcttccctgggagggggctcttcctctcagggcactacaaaacagctgccagcctccctgctccaccctttatttcaagcgatgacagacccattgtgccacctgtcttctctcaccttatctcactgcaaactacccgacgctgtgtgccgtgatctttccgaggcactgcgagcagcccccgccctcacggaacttgggctcctgcacaaccggctgtccgaggctgggctgcggatgctcagtgaagggttagcctggccgcagtgcagagtacaaacagtgagagtgcagcttcccgatccccagcgggggctgcagtacctggttggcatgttaagacagtccccggcgctgacgactctggatctaagtggttgtcagctgcctgccccaatggtgacctacctgtgtgcagtgcttcagcatcaagggtgtggcttgcagacactgtcactcgcaagcgttgagctaagtgagcagtccttacaggagcttcaagctgttaagcgcgcgaagccagacctggtcatcactcatccagccttagatggtcatccacagccccctaaagagttaatcagtactttctag

SEQ ID NO: 236200 - DNA, 2679 bp, Artificial Sequence
  derived and/or modified sequence
atggaccaacccgaggcaccctgctcatctacaggccctcgtctagccgtggcacgtgagctcctgctggccgctctcgaagagctttctcaggagcaactaaagcggtttaggcacaaactgagagatgtcggcccagacgggagaagtataccttggggccgactggagcgcgcagacgcagtcgatcttgccgagcagctggctcaattctacggccctgagcctgctctggaagtggccaggaagactctcaaacgcgctgacgccagagacgtcgcggcacagctgcaggagcgcagacttcagcggttgggcttggggtccggaacactgttatccgtgtctgagtataagaagaaataccgagagcatgtgctgcagttgcatgccagggtgaaagagcggaatgcccgatctgtgaagattaccaaaaggttcacaaagctgctcatcgcacctgaaagtgcagctcctgaagaggcgatgggtcctgctgaagaaccagagcccggtcgggcaaggcgcagtgatacgcatacctttaatcgccttttccgcagggatgaggaaggacgccgacccctgacagtggtgctgcaaggaccagctggtatcgggaaaactatggccgctaaaaagatactctacgattgggcggctgggaaactgtatcaggggcaggtggacttcgccttttttatgccgtgcggtgagctactggagcgtccagggacacgcagcttggcggacctcattctcgaccagtgtcccgaccggggagccccagtcccacagatgctagctcaacctcagcgattgttatttattctcgacggcgctgatgagctccccgcacttggaggcccagaggcagcaccttgtactgatccatttgaggctgccagtggtgctagggtcttgggaggcttattgagcaaggcgctcctacctaccgccctgctcttagtcaccacaagggccgcagccccagggaggctccaggggcgtctgtgctcaccccagtgcgccgaggtgcgtggtttcagtgacaaagataagaaaaaatacttttacaaatatttcagagatgagagaagagccgagagggcctacaggtttgtgaaggaaaatgaaactctgttcgccctctgtttcgtcccctttgtttgttggatcgtgtgcactgttctgagacaacagttggagctcggacgtgacctgtccagaacatctaagaccacaacgtctgtgtatctgttgtttataacatcagtactgtccagcgcccctgtggccgacgggcctcgcttacagggggacctccgaaacctgtgccggttggccagggaaggtgttctcggcagaagagcgcagttcgcggaaaaggagttagagcaactagagttacgcggatcgaaagtgcagaccctcttcctatccaaaaaggagttacctggggtccttgagactgaagttacttaccaattcatcgaccaaagcttccaggagttcttagcagcattgtcttacttactggaagatgggggagtccctcgcacagcagccggtggtgtagggacacttctgcggggagacgctcagccgcattctcacctggtcctgaccacccgcttcctttttggtctccttagtgctgaacgtatgagggatattgagcgccacttcggctgcatggtgtcggaacgggttaaacaggaagcacttcggtgggtgcagggccaggggcagggctgtcccggagttgcacctgaagtaactgagggcgctaagggtctcgaagacactgaggaacccgaggaggaagaagagggggaggagccaaactaccccctggagctcttgtactgcctgtatgagacacaggaggatgccttcgtcagacaagccctgtgccggttcccagaattggctctgcaacgggtgcgcttttgtaggatggacgttgccgtgctgtcatactgtgttcgctgttgccctgcaggccaggcactccgacttatctcgtgtcgtcttgtcgcagcacaggagaaaaaaaaaaaaagcttaggaaagaggctccaggccagcctcggcggaggttctagctcccagggaactacgaagcagctcccagcatccctgttgcatccactctttcaggcaatgactgaccccctgtgccatctctctagtctgaccttatctcattgcaaacttcctgacgccgtttgccgggacctgtctgaggccctccgggctgccccagccctgaccgaactaggtctgctgcacaaccgcctgagcgaggccggtttgagaatgttgagcgagggacttgcctggcctcagtgtcgcgtgcagaccgttcgggtgcaattgccagacccccagcggggactccaatatctggtaggaatgttgagacagtccccagcactgactacactcgatcttagtggatgccagttgccagcccctatggtcacgtatctttgtgcggtcctgcagcatcagggttgtgggcttcagaccctgagcctggctagtgtggagctttcagagcagagtctgcaggaattgcaggctgtgaagcgggcaaagcctgaccttgtgattactcatccggctttggatgggcacccccagccgccaaaggagttgatttccaccttctag

SEQ ID NO: 236201 - DNA, 2679 bp, Artificial Sequence
  derived and/or modified sequence
atggaccagccagaggccccctgctccagcacggggccgcgcctcgcggtggcccgcgagctgctcctggctgcgctggaggaactgagccaagagcagctgaagcgcttccgccacaagctgcgcgacgtgggcccggacggacgcagcatcccgtgggggcggctggagcgcgcggacgccgtggacctcgcggagcagctggcccagttctacggcccggagcctgccctggaggtggcccgcaagaccctcaagagggcggacgcgcgcgacgtggcggcgcagctccaggagcggcggctgcagcggctcgggctcggctccgggacgctgctctccgtgtccgagtacaagaagaagtaccgggagcacgtgctgcagctgcacgctcgggtgaaggagaggaacgcccgctccgtgaagatcaccaagcgcttcaccaagctgctcatcgcgcccgagagcgccgccccggaggaggcgatggggcccgcggaagagcctgagccggggcgcgcgcggcgctcggacacgcacactttcaaccgcctcttccgccgcgacgaggagggccggcggccgctgaccgtggtgctgcagggcccggcgggcatcggcaagaccatggcggccaaaaagatcctgtacgactgggcggcgggcaagctgtaccagggccaggtggacttcgccttcttcatgccctgcggcgagctgctggagaggccgggcacgcgcagcctggctgacctgatcctggaccagtgccccgaccgcggcgcgccggtgccgcagatgctggcccagccgcagcggctgctcttcatcctggacggcgcggacgagctgccggcgctggggggccccgaggccgcgccctgcacagaccccttcgaggcggcgagcggcgcgcgggtgctaggcgggctgctgagcaaggcgctgctgcccacggccctcctgctggtgaccacgcgcgccgccgcccccgggaggctgcagggccgcctgtgttccccgcagtgcgccgaggtgcgcggcttctccgacaaggacaagaagaagtatttctacaagtatttccgggatgagaggagggccgagcgcgcctaccgcttcgtgaaggagaacgagacgctgttcgcgctgtgcttcgtgcccttcgtgtgctggatcgtgtgcaccgtgctgcgccagcagctggagctcggtcgggacctgtcgcgcacgtccaagaccaccacgtcagtgtacctgcttttcatcaccagcgttctgagctcggctccggtagccgacgggccccggttgcagggcgacctgcgcaatctgtgccgcctggcccgcgagggcgtcctcggacgcagggcgcagtttgccgagaaggaactggagcaactggagcttcgtggctccaaagtgcagacgctgtttctcagcaaaaaggagctgccgggcgtgctggagacagaggtcacctaccagttcatcgaccagagcttccaggagttcctcgcggcactgtcctacctgctggaggacggcggggtgcccaggaccgcggctggcggcgttgggacactcctgcgtggggacgcccagccgcacagccacttggtgctcaccacgcgcttcctcttcggactgctgagcgcggagcggatgcgcgacatcgagcgccacttcggctgcatggtttcagagcgtgtgaagcaggaggccctgcggtgggtgcagggacagggacagggctgccccggagtggcaccagaggtgaccgagggggccaaagggctcgaggacaccgaagagccagaggaggaggaggagggagaggagcccaactacccactggagttgctgtactgcctgtacgagacgcaggaggacgcgtttgtgcgccaagccctgtgccggttcccggagctggcgctgcagcgagtgcgcttctgccgcatggacgtggctgttctgagctactgcgtgaggtgctgccctgctggacaggcactgcggctgatcagctgcagattggttgctgcgcaggagaagaagaagaagagcctggggaagcggctccaggccagcctgggtggcggcagcagttctcaaggcaccacaaaacaactgccagcctcccttcttcatccactctttcaggcaatgactgacccactgtgccatctgagcagcctcacgctgtcccactgcaaactccctgacgcggtctgccgagacctttctgaggccctgagggcagcccccgcactgacggagctgggcctcctccacaacaggctcagtgaggcgggactgcgtatgctgagtgagggcctagcctggccgcagtgcagggtgcagacggtcagggtacagctgcctgacccccagcgagggctccagtacctggtgggtatgcttcggcagagccctgccctgaccaccctggatctcagcggctgccaactgcccgcccccatggtgacctacctgtgtgcagtcctgcagcaccagggatgcggcctgcagaccctcagtctggcctctgtggagctgagcgagcagtcactacaggagcttcaggctgtgaagagagcaaagccggatctggtcatcacacacccagcgctggacggccacccacaacctcccaaggaactcatctcgaccttctga

SEQ ID NO: 236202 - DNA, 2679 bp, Artificial Sequence
  derived and/or modified sequence
atggaccagcccgaggccccctgcagcagcaccggccccagactggccgtggccagagagctgctgctggccgccctggaggagctgagccaggagcagctgaagagattcagacacaagctgagagacgtgggccccgacggcagaagcatcccctggggcagactggagagagccgacgccgtggacctggccgagcagctggcccagttctacggccccgagcccgccctggaggtggccagaaagaccctgaagagagccgacgccagagacgtggccgcccagctgcaggagagaagactgcagagactgggcctgggcagcggcaccctgctgagcgtgagcgagtacaagaagaagtacagagagcacgtgctgcagctgcacgccagagtgaaggagagaaacgccagaagcgtgaagatcaccaagagattcaccaagctgctgatcgcccccgagagcgccgcccccgaggaggccatgggccccgccgaggagcccgagcccggcagagccagaagaagcgacacccacaccttcaacagactgttcagaagagacgaggagggcagaagacccctgaccgtggtgctgcagggccccgccggcatcggcaagaccatggccgccaagaagatcctgtacgactgggccgccggcaagctgtaccagggccaggtggacttcgccttcttcatgccctgcggcgagctgctggagagacccggcaccagaagcctggccgacctgatcctggaccagtgccccgacagaggcgcccccgtgccccagatgctggcccagccccagagactgctgttcatcctggacggcgccgacgagctgcccgccctgggcggccccgaggccgccccctgcaccgaccccttcgaggccgccagcggcgccagagtgctgggcggcctgctgagcaaggccctgctgcccaccgccctgctgctggtgaccaccagagccgccgcccccggcagactgcagggcagactgtgcagcccccagtgcgccgaggtgagaggcttcagcgacaaggacaagaagaagtacttctacaagtacttcagagacgagagaagagccgagagagcctacagattcgtgaaggagaacgagaccctgttcgccctgtgcttcgtgcccttcgtgtgctggatcgtgtgcaccgtgctgagacagcagctggagctgggcagagacctgagcagaaccagcaagaccaccaccagcgtgtacctgctgttcatcaccagcgtgctgagcagcgcccccgtggccgacggccccagactgcagggcgacctgagaaacctgtgcagactggccagagagggcgtgctgggcagaagagcccagttcgccgagaaggagctggagcagctggagctgagaggcagcaaggtgcagaccctgttcctgagcaagaaggagctgcccggcgtgctggagaccgaggtgacctaccagttcatcgaccagagcttccaggagttcctggccgccctgagctacctgctggaggacggcggcgtgcccagaaccgccgccggcggcgtgggcaccctgctgagaggcgacgcccagccccacagccacctggtgctgaccaccagattcctgttcggcctgctgagcgccgagagaatgagagacatcgagagacacttcggctgcatggtgagcgagagagtgaagcaggaggccctgagatgggtgcagggccagggccagggctgccccggcgtggcccccgaggtgaccgagggcgccaagggcctggaggacaccgaggagcccgaggaggaggaggagggcgaggagcccaactaccccctggagctgctgtactgcctgtacgagacccaggaggacgccttcgtgagacaggccctgtgcagattccccgagctggccctgcagagagtgagattctgcagaatggacgtggccgtgctgagctactgcgtgagatgctgccccgccggccaggccctgagactgatcagctgcagactggtggccgcccaggagaagaagaagaagagcctgggcaagagactgcaggccagcctgggcggcggcagcagcagccagggcaccaccaagcagctgcccgccagcctgctgcaccccctgttccaggccatgaccgaccccctgtgccacctgagcagcctgaccctgagccactgcaagctgcccgacgccgtgtgcagagacctgagcgaggccctgagagccgcccccgccctgaccgagctgggcctgctgcacaacagactgagcgaggccggcctgagaatgctgagcgagggcctggcctggccccagtgcagagtgcagaccgtgagagtgcagctgcccgacccccagagaggcctgcagtacctggtgggcatgctgagacagagccccgccctgaccaccctggacctgagcggctgccagctgcccgcccccatggtgacctacctgtgcgccgtgctgcagcaccagggctgcggcctgcagaccctgagcctggccagcgtggagctgagcgagcagagcctgcaggagctgcaggccgtgaagagagccaagcccgacctggtgatcacccaccccgccctggacggccacccccagccccccaaggagctgatcagcaccttctag

SEQ ID NO: 236203 - protein, 154 aa, Artificial Sequence
  derived and/or modified sequence
MAPARAGCCPLLLLLLGLWVAEVLVRAKPKDMTSSQWFKTQHVQPSPQACNSAMSIINKYTERCKDLNTFLHEPFSSVAITCQTPNIACKNSCKNCHQSHGPMSLTMGELTSGKYPNCRYKEKHLNTPYIVACDPPQQGDPGYPLVPVHLDKVV

SEQ ID NO: 236204 - DNA, 465 bp, Artificial Sequence
  derived and/or modified sequence
atggccccagcccgggcaggctgctgccctctgctgctccttctcttagggctatgggtcgccgaggtgctggtccgtgccaaaccaaaagacatgaccagctcccaatggttcaagacacagcatgtccagccgtcaccacaggcctgcaattcggcaatgtccatcatcaacaaatatactgagaggtgcaaagacctgaatacatttttgcatgaacccttttcctccgtggccatcacctgtcagacgcccaatatagcgtgcaagaactcatgcaagaactgtcaccagtcgcacgggccgatgtccctgaccatgggagagctcacctccggaaaataccctaattgccgttataaagaaaagcacctgaataccccttatatagtcgcctgcgatcctccccagcagggagacccagggtatccgctggtacccgtgcaccttgataaggttgtgtag

SEQ ID NO: 236205 - DNA, 465 bp, Artificial Sequence
  derived and/or modified sequence
atggccccagcccgggccggctgctgccccctgctgctgctgctgctgggcctgtgggtggccgaggtgctggtgcgggccaagcccaaggacatgaccagcagccagtggttcaagacccagcacgtgcagcccagcccccaggcctgcaacagcgccatgagcatcatcaacaagtacacagagcgctgcaaggacctgaacaccttcctgcacgagcccttcagctctgtggccatcacctgccagacccccaacatcgcctgcaagaacagctgcaagaactgccaccagagccacggccccatgagcctgaccatgggagagctgaccagcggcaagtaccccaactgccgctacaaggagaagcacctgaacaccccctacatcgtggcctgtgaccccccccagcagggcgaccccggctaccccctggtgcctgtgcacctggacaaggtggtgtag

SEQ ID NO: 236206 - DNA, 465 bp, Artificial Sequence
  derived and/or modified sequence
atggcccccgcccgggccggctgctgccccctgctgctgctgctgcttggcctgtgggttgccgaggtgctcgttcgagcaaagcctaaagacatgacatcttctcaatggttcaaaacacagcatgtgcagcccagtccccaggcttgtaactcagcgatgtctatcataaacaaatatacggagagatgcaaagacttgaacacgtttcttcacgagcccttcagttcggtggctatcacttgtcagacaccaaacatcgcctgcaaaaactcctgtaagaattgtcaccaaagccatgggccaatgagcctaaccatgggtgaacttactagcgggaagtatcctaactgccgctataaggagaagcacctgaatacaccctacattgtggcatgcgacccaccacagcagggagacccagggtacccactggtccctgtacacttggacaaggtagtgtag

SEQ ID NO: 236207 - DNA, 465 bp, Artificial Sequence
  derived and/or modified sequence
atggctcctgccagagccggttgctgcccgctgttgcttctcctgttgggattgtgggttgcagaggtgctcgttcgcgcaaagccaaaggacatgaccagtagccagtggttcaagacccagcatgttcaacctagccctcaggcctgtaactctgccatgagtatcattaacaagtataccgagagatgtaaggatctgaacacattcctgcatgagcctttttcttcggtggccatcacctgtcagactcccaacatcgcatgtaaaaacagttgcaaaaactgtcatcagagccatggccctatgagcttaactatgggtgaactcacatccgggaaatacccaaactgtaggtacaaggaaaagcacctgaatacaccttacatcgttgcatgtgacccgccacaacagggtgaccctgggtatcctctggtgcctgtacacctggataaggttgtgtag

SEQ ID NO: 236208 - DNA, 634 bp, Artificial Sequence
  derived and/or modified sequence
caagactcccccatgatgacctattcatccacctacctcctcactctgttccactgtctcccttaagagagatggcaccggccagagcaggatgctgccccctgctgctgctgcttctggggctgtgggtggcagaggtcctagtcagagccaagcccaaggacatgacatcatctcagtggtttaaaactcagcatgtgcagcccagccctcaagcatgcaactcagccatgagcatcatcaataagtacacagaacggtgcaaagacctcaacaccttcctgcacgagcccttctccagtgtggccatcacctgccagacccccaacatagcctgcaagaatagctgtaaaaactgccaccagagccacgggcccatgtccctgaccatgggtgagctcacctcagggaagtacccaaactgcaggtacaaagagaagcacctgaacacaccttacatagtggcctgtgaccctccacaacagggtgacccagggtacccacttgttcctgtgcacttggataaagttgtctaagccctggtgcccacgttccacctcacactctgcagactgtatgctgctgcttttcctccctccagttcgttattaatccttgctccccactgcaaatg

SEQ ID NO: 236209 - DNA, 465 bp, Artificial Sequence
  derived and/or modified sequence
atggcccccgccagagccggctgctgccccctgctgctgctgctgctgggcctgtgggtggccgaggtgctggtgagagccaagcccaaggacatgaccagcagccagtggttcaagacccagcacgtgcagcccagcccccaggcctgcaacagcgccatgagcatcatcaacaagtacaccgagagatgcaaggacctgaacaccttcctgcacgagcccttcagcagcgtggccatcacctgccagacccccaacatcgcctgcaagaacagctgcaagaactgccaccagagccacggccccatgagcctgaccatgggcgagctgaccagcggcaagtaccccaactgcagatacaaggagaagcacctgaacaccccctacatcgtggcctgcgaccccccccagcagggcgaccccggctaccccctggtgcccgtgcacctggacaaggtggtgtag

SEQ ID NO: 236210 - protein, 276 aa, Artificial Sequence
  derived and/or modified sequence
MRLVILDNYDLASEWAAKYICNRIIQFKPGQDRYFTLGLPTGSTPLGCYKKLIEYHKNGHLSFKYVKTFNMDEYVGLPRNHPESYHSYMWNNFFKHIDIDPNNAHILDGNAADLQAECDAFENKIKEAGGIDLFVGGIGPDGHIAFNEPGSSLVSRTRLKTLAMDTILANAKYFDGDLSKVPTMALTVGVGTVMDAREVMILITGAHKAFALYKAIEEGVNHMWTVSAFQQHPRTIFVCDEDATLELRVKTVKYFKGLMHVHNKLVDPLFSMKDGN

SEQ ID NO: 236211 - protein, 259 aa, Artificial Sequence
  derived and/or modified sequence
MRLVILDNYDLASEWAAKYICNRIIQFKPGQDRYFTLGLPTGSTPLGCYKKLIEYHKNGHLSFKYVKTFNMDEYVGLPRNHPESYHSYMWNNFFKHIDIDPNNAHILDGNAADLQAECDAFENKIKEAGGIDLFVGGIGPDGHIAFNEPGSSLVSRTRLKTLAMDTILANAKYFDGDLSKVPTMALTVGVGTVMDAREVMILITGAHKAFALYKAIEEGVNHMWTVSAFQQHPRTIFVCDEDATLELRVKTVKYFKGEH

SEQ ID NO: 236212 - DNA, 831 bp, Artificial Sequence
  derived and/or modified sequence
atgcgcctcgtgatcttggataactacgatctcgccagcgaatgggccgccaaatatatatgtaatcgcattatccagttcaagcccggccaagacagatacttcacgctggggctgcccacaggaagcacgcccctcggatgttacaaaaaattaattgagtaccataagaatggccacctcagtttcaaatatgttaagaccttcaacatggacgagtacgttggactccccagaaaccatcctgagtcctaccattcctacatgtggaacaatttcttcaagcacattgacatcgacccgaataacgcgcatattctcgacggcaacgccgccgatctgcaagcagaatgtgatgcattcgaaaacaaaatcaaagaagcaggcggcatcgatctgttcgtaggtggaataggccctgatggacatattgcattcaacgaacctgggtctagcctcgtttctcgaacccgattgaagaccctggcgatggacacaatcctggccaatgcgaagtattttgacggcgacctgtctaaagtacccactatggccttgaccgttggcgtggggaccgtgatggacgcccgggaggtgatgatcctgatcactggtgcacataaagcctttgcgttgtataaagccatcgaggagggggttaaccatatgtggaccgttagcgcatttcagcaacacccgcggaccatcttcgtgtgcgacgaggacgccacactggaactcagggtaaagaccgtgaagtactttaaaggcctgatgcacgttcacaacaagctggtcgatcctctgttcagtatgaaagatggaaattag

SEQ ID NO: 236213 - DNA, 780 bp, Artificial Sequence
  derived and/or modified sequence
atgcgtctagttattttagataattatgacctcgcctccgagtgggcggccaagtacatttgtaacagaataattcagttcaaacctggacaagaccggtattttaccttgggcctgccaacaggctctactccccttgggtgttacaaaaagctgatagaataccacaaaaatgggcacttgtcctttaaatacgtaaagaccttcaacatggacgagtatgttgggctgccccgtaaccatccagaatcataccatagttacatgtggaataatttcttcaaacacattgatatcgatcctaacaacgcacatattcttgatggcaacgctgcagatctgcaggccgagtgcgatgcatttgagaataagatcaaggaggctggaggtattgacctcttcgtggggggaataggtcctgatgggcatattgcctttaatgagccaggcagcagcctggtgtcacggacgcggttgaaaactctggctatggacacaattctcgcaaacgccaaatacttcgatggtgatctgagtaaggtgcccaccatggcccttacagtaggggttggaacagtgatggacgcacgtgaggtgatgattctgattaccggtgcacacaaggcttttgcattgtataaggcaatcgaagagggagtcaatcacatgtggacagtaagcgcgtttcagcagcaccctagaacaatcttcgtgtgtgacgaggatgctactcttgagttgcgggttaagactgtgaaatattttaagggggaacactag

SEQ ID NO: 236214 - DNA, 1930 bp, Artificial Sequence
  derived and/or modified sequence
cgcctttatctgcatccgggtccgtgggattcgcgctccactggtcagctggggtcgctctcgggtggttgggtgttgcttgttcccgctgttccagcatcgaagaaccattgggtctgccggtttgaacttgttctggaagctgtgcgtcaccgtaatgaggcttgtaattcttgataactatgacttggctagtgaatgggcagccaaatacatctgtaatcgcatcattcagttcaaacctggacaggacagatattttacactgggtttaccaacagggagtacacctttaggatgctataaaaaactaatagaatatcataagaatggacacctttcttttaaatatgtgaagacctttaatatggatgaatatgtaggacttccaagaaatcatcctgaaagctaccattcttatatgtggaataatttttttaagcatatcgatatagatcctaataatgcacatatccttgacgggaatgctgcagatttacaagcagaatgtgatgcttttgaaaacaaaataaaagaagctggaggaatagatctttttgttggaggaattggtccagatggtcatatcgctttcaatgagcctggatccagtttagtgtcaaggacaagattaaagactctagcaatggataccatcttggcaaatgccaaatattttgatggagatttatcaaaagtgccaactatggctctaactgttggtgtggggacagtgatggatgctagagaagtaatgatccttataacaggggcacacaaggcatttgccctgtacaaagcaatagaagaaggagtcaatcacatgtggactgtttccgctttccagcagcatccccggactatttttgtatgcgatgaagatgctactttagaattaagagttaaaactgtgaaatactttaaaggtctaatgcatgtgcacaataaacttgtggatccactattcagtatgaaagatggaaactgaaggagactggagcaaaattcagcttgaatgaacagagcactttttactaagtagtagatgaattttcagctatgcaatatgacaaaacatggggaattttgaagattgtcattttttcattcgagtctctatgttaaacattccatattttgaatatttatatcttgtacttgggtttaagagaagtagctggctctcaagattgactggctatttattataaagtactgaagtcacatagccacctataaaacagcatagaaatgtctgcctgtttaaaaagtcattttaaaggtagagtgtccacatcaggcaccatttgtgatatgactccagtggcgtatatttcattttttaatgacaagacactccaaacctttcagataacaaactatcattgcagaccttcacttttggaatgcaatctttatattttctgtgcatcacacacatgcttttctgcacgtggttgccttagtcatcttcctacagcaccatctagacatcaaaaattgtgctatatatcattggtaaaggaaatttgaagagatgacagtgcctaaaagtacagtttacatccttttggaaagtatgtgtaagtgcatgttttttgtgcaccttcttctatagcacttttttacaaatatcttatttttatttaacgacttgggttcatgtccctaatataagtatcttgacaattatgagctttatacctagcaagccacttcaggaaattcttttggagaatattttctgattattgttaaacttaatatacaattagctttattccttataaaatgtctaaaagaataatacgaagtatatataaaaggaattactgtaaactacattgccatagcaatttacataaaagtatattgttttttatctttaactcaaataaagcgtgtaataaataagttatctaaatttcca

SEQ ID NO: 236215 - DNA, 5382 bp, Artificial Sequence
  derived and/or modified sequence
ggggtcgctctcgggtggttgggtgttgcttgttcccgctgttccagcatcgaagaaccattgggtctgccggtttgaacttgttctggaagctgtgcgtcaccgtaatgaggcttgtaattcttgataactatgacttggctagtgaatgggcagccaaatacatctgtaatcgcatcattcagttcaaacctggacaggacagatattttacactgggtttaccaacagggagtacacctttaggatgctataaaaaactaatagaatatcataagaatggacacctttcttttaaatatgtgaagacctttaatatggatgaatatgtaggacttccaagaaatcatcctgaaagctaccattcttatatgtggaataatttttttaagcatatcgatatagatcctaataatgcacatatccttgacgggaatgctgcagatttacaagcagaatgtgatgcttttgaaaacaaaataaaagaagctggaggaatagatctttttgttggaggaattggtccagatggtcatatcgctttcaatgagcctggatccagtttagtgtcaaggacaagattaaagactctagcaatggataccatcttggcaaatgccaaatattttgatggagatttatcaaaagtgccaactatggctctaactgttggtgtggggacagtgatggatgctagagaagtaatgatccttataacaggggcacacaaggcatttgccctgtacaaagcaatagaagaaggagtcaatcacatgtggactgtttccgctttccagcagcatccccggactatttttgtatgcgatgaagatgctactttagaattaagagttaaaactgtgaaatactttaaaggtgagcactgaatttcaaaagccgactgagataatctgttgtgagtgacaattaaaacttactgtgactgtggggttaaatctcacactgtgacctattgaaaagtggcaacacatagctagttctttcaagtaatggaaagttctcacctcagataatagtatcttcaaagtagtacctttttttttttttcatgaagagaatctcttcagtctctattttcagtaaacaatttttcttgaaatccaaggtttaataatttactttcatattgaatatacaagaccaaataacccaaaagaaaatgtatctttgtccattctggatttcttttcatgtttactagtcccacctcaatccctcttcctcactcccctctaaccttaatttagaacctaatcagtggataagagatctcccactatctaatttaatctttacaattttaagccaatttattcccatatattaaagttataatgtctaaatgttaaaatagtatggaataaactctgcaagtaagcaggagtttgattgcccagacttcatgttgattttcctttttcctgtagtctagttcagtaattcagaaaccttactctaccaggctgtgtattacaaaacacatatgcttgatataatggttttaagagattttcaagggacattttgcctatacccaatgtagaacctattctctgatttaagagtcagctccacatattacacatatgtaagcaaactgtacaaacaggtaattttcataaagcacctgtatttacatagctgatattaaaagttacatagttgatcatatagataggtcagtgattcactatgtagtatgtatgctacttttgctacatgattataccttttaatcttttttactctagtaactaggtatttattttaatgcctattggaaaatacactgaataaatcaaagctatattttttggatattattgcttaagacaaggtccaaaaaagctaccatatttgattggctctaatacacgttgatcttgctgatgttggactgtgtcttaaaactggtgtcagatcatagcttactgggtagcatttttttctcagtggtacataaaatggtgtgtcttacaatttatagcatctcatactcagaaataaagtatataatcttaaatttttaattcaatgcaaagaaaaccaactcatatttcatgtatatgtgtgaatatggcaaatatcttgaaggtgttatacaaataactgacatttggcaagcactgaaaatagtctatttttaaacaaaatgctgatcatgctttgtatatagttttgtatttgtacttatgtttcatgagcattttcctgttttactaaatatttggaagcattttaatggatagttaagtacataaatcataatttatttaaacatttccttattaacacttagattatttctagtcatttatatttttaccatttaaattactaatttaccaagccacaaatatatcaaactgaaaaactgaaaaactgaaaaatttctgatttgtgaataaaagagcatttgatggagttttaactctattttcccatgtaacccttcagatttcatcccaaataatagattccttgactacaaggaatcctcactatccacaaattttaattccagttttaaggagattcatttaacatggccattttctagtcctcattaagtcccagataaatccctgtactaatctaattttgtcacaattaggtttttatcagatttttatatcttggtgaatatttaataagatatttaataacagccagtatctctatgaccaggcactattctaaatgcattttacttattgatttacttatcacaaaaatgttatgaaatgggtattcatagtcccatttttaaattaataggcttaacagacagagacgttaagctacttacccaaagtcatacagcacatatttgggcagagctgggtaatagaaatcaaaatcaggctgatctctggagtatgcaggcttttgtctattctattatactgcctcccagaataaactctaggtatgataccatctacatcaaaaccatatttccatctgcttttttcccatatgataatcactgcttccaaaaaaggtatatcgacatatgttagataatttaaaatagaagggtggtagatgtttatatgtatttagttcttttagttcatctaattgtaagctcttctgaaaaattttgaaacagaccattcgtgagaggatagctgcactgcatcaagaggacacagtattttccactttggagctgtctgtatttctgaagaggtttcagggtatcagcctgttaggatacctccttcaatatgaagacagaatttagacattctgggctacatatgggcctcattttacagcattttagtaaagggtagagaaattgaatattcttaaataaacacatttcaaatgtagtttgtatacttttcatacctccattgagttactagtatatcaaaatactggaggatgtaaattcctataattgtcatccataactcttcaaattccattcacatcactaccctttcttctgtcatcactaaaaagtgctgaccagaatcttaaagggttttatttagtgcctagataagatctaggttaactagatccaaaacaataaaaattgtcagtaaatgcaagtttatttcaatatatacctatataacggtatataccttttgaaagatacaagttaatcacaagacaacaagtttagtacgtggggatttgttttattcattctcgcttttcatttttgctttttaaatagaacagctttgatttttagtatatgacatcatcatcatgaatttttttctcttactttgtatttaggctccacctcagtagtttgacaaaggtagaatgagttcattttgagtcaaaaccataaaagttactttgtatagacattggttagaatctgtgacatttaacctttcttctggtaacgtttcaggaagtctggtgcatttttatcagaagaattatttctgtttgacttaagtagcaattatttatttatataaaattcgtatgtagaaagttgtcagtttttacctaaagtcacagtaaatatttgacttaatatctaaaaagcaattaatagaattttcaaaataattatttctagtttggaagcagtcctatttgatgtataaaagatatatccaatgtaaagaaaaaaattttataaaggagttgaatttttaatatttactgatattttaatttgcatgtattttaaagctctgtgtattctttccgtaatcaaagttgttagcaaatgacagatgaatactatttaagtagaaaaacgatcctctacaaagtgatactctggaaaatgttgcatcttctaaatcatacagctgatattacccttatctttgttgtcccctctcctactggacatgaagtttcaggtgaccttcaagtaggctgttgagcagttgcaggactagtgaatggaatgcttcccccttccctcctttagagtcccattcttatggttagaatttctcctactacacaaacacttcccagtactctttgcttgtcccttaaaagtgggtctttctcaaagctgggattttagagtcctttttgcagcctttctgacaaggaacatctgtttactaacaagcaacctatctctccaatccagtaatcccatttcctgcaaaaccgcattaagtgcctttccccaccctcccatgttcttaatacctggaaaacttaactcatttctttaccctccaaaatataaaatctctggttcattaactgggtcagtctttttagaacttttttctccccaaagaaatatagtactgaggcattaaaacaggagtaactggaagatcagctatttcccaagcagcttccatagctaagagcagtctgcaagtatatgtaccaattacaaaatgaaagttataatctaccggatttaaaatcgtaatttctattctgaattaaatgatttaatacaggttgttttctgtcttgttttagtaaccctccctcagtgtagaatttgtaatcaacctttgtcataaatacacatgccaaactattggaaagtaatttaccagacgaatggatagggtaatgtattaagagtgagacagcagttctgagcccctggctggagtctagtagaggaactgccagaggatcaatatcaacatagacttttagatataattaaaacctattatctaagtcagtattcaaatttgtcatgcttaatctctttgaagacaagaaatgctcttctggttactcccaaagtacctgtacacattctagatctgcactgttacataattataaattggtatttgctaggtagataaaacttaagacattctgaaacatttctatttgtactttttcaataaacttgactatatcaagatgggaact

SEQ ID NO: 236216 - DNA, 831 bp, Artificial Sequence
  derived and/or modified sequence
atgaggctggtgatcctggacaactatgacctggccagcgagtgggccgccaagtacatctgcaaccgcatcatccagttcaagccaggccaggaccgctacttcaccctgggcctgcccaccggcagcacccccctgggctgctacaagaagctgattgagtaccacaagaatggccacctgtccttcaagtatgtgaagaccttcaacatggatgaatatgtgggcctgcccaggaaccaccctgagagctaccacagctacatgtggaacaacttcttcaagcacattgatattgaccccaacaatgcccacatcctggatggaaatgctgctgacctgcaggctgaatgtgatgcctttgagaacaagatcaaggaggccggcggcatcgacctgtttgtgggcggcatcggcccagatggccacatcgccttcaatgaacctggcagcagcctggtgtccaggacccggctgaagaccctggccatggacaccatcctggccaatgccaagtactttgatggagacctgagcaaggtgcccaccatggccctgactgtgggcgtgggcaccgtgatggatgcccgggaggtgatgatcctgatcaccggggcccacaaggcctttgccctgtacaaggccatcgaggagggcgtgaaccacatgtggacagtgtctgccttccagcagcaccccaggaccatctttgtgtgtgatgaagatgccaccctggagctgcgggtgaagacagtgaagtacttcaagggcctgatgcacgtgcacaacaagctggtggaccccctcttctccatgaaggatggcaactag

SEQ ID NO: 236217 - DNA, 780 bp, Artificial Sequence
  derived and/or modified sequence
atgaggctggtgatcctggacaactatgacctggccagcgagtgggccgccaagtacatctgcaaccgcatcatccagttcaagccaggccaggaccgctacttcaccctgggcctgcccaccggcagcacccccctgggctgctacaagaagctgattgagtaccacaagaatggccacctgtccttcaagtatgtgaagaccttcaacatggatgaatatgtgggcctgcccaggaaccaccctgagagctaccacagctacatgtggaacaacttcttcaagcacattgatattgaccccaacaatgcccacatcctggatggaaatgctgctgacctgcaggctgaatgtgatgcctttgagaacaagatcaaggaggccggcggcatcgacctgtttgtgggcggcatcggcccagatggccacatcgccttcaatgaacctggcagcagcctggtgtccaggacccggctgaagaccctggccatggacaccatcctggccaatgccaagtactttgatggagacctgagcaaggtgcccaccatggccctgactgtgggcgtgggcaccgtgatggatgcccgggaggtgatgatcctgatcaccggggcccacaaggcctttgccctgtacaaggccatcgaggagggcgtgaaccacatgtggacagtgtctgccttccagcagcaccccaggaccatctttgtgtgtgatgaagatgccaccctggagctgcgggtgaagacagtgaagtacttcaagggggagcactag

SEQ ID NO: 236218 - DNA, 831 bp, Artificial Sequence
  derived and/or modified sequence
atgcggctggtgatcctggacaactacgacctggccagcgagtgggccgccaagtacatttgtaaccgaattattcagtttaaaccagggcaggaccggtactttaccctgggactccctactggatctacgccgttaggatgctataaaaagctgattgaatatcacaagaatgggcatctaagttttaaatacgtaaaaaccttcaatatggacgaatatgtcggtttaccaaggaatcaccccgaatcctaccatagctatatgtggaataacttctttaagcacattgatattgaccctaacaatgcccatatcctcgatgggaatgccgcggacttacaggccgagtgtgatgcgttcgagaacaaaattaaggaggcgggcggtattgatttattcgtcgggggaatcgggccagatggtcatatcgcttttaacgagcccggctcgtcactggtttcaaggacacgtttgaagacacttgccatggatactattctcgctaacgcaaagtatttcgacggagatctgagcaaggtccctacaatggctcttaccgttggtgtaggcactgtgatggacgcacgtgaagtgatgattcttattactggagcacataaggcctttgcactgtacaaggccatcgaggaaggcgtgaaccatatgtggacagttagcgcattccagcagcacccccggacgatattcgtgtgcgacgaggacgctactcttgagctcagagtgaagacagtcaaatattttaaggggctgatgcacgtgcacaacaagctcgtggacccactgttctctatgaaggacggcaactag

SEQ ID NO: 236219 - DNA, 780 bp, Artificial Sequence
  derived and/or modified sequence
atgcggctggtgatcctggacaactacgacctggccagcgagtgggcagctaagtacatttgcaatcggattatccagtttaagccaggtcaggatagatattttaccttgggtttacccaccgggagtacgcccctagggtgttacaagaagcttattgagtaccacaaaaatggccatctgagcttcaaatacgtgaaaacattcaatatggatgaatacgtgggactgcctaggaaccatcctgagtcttaccattcttacatgtggaataatttcttcaaacatatagacatcgacccaaataacgcacacattttagacggtaacgccgccgatttgcaggcagagtgcgatgcattcgagaacaagatcaaggaggctggaggcatagatttattcgtgggaggcattggaccagatggccacatcgcttttaacgaaccggggagctccctggtgagcaggacaaggctcaaaaccctggctatggataccatcctggcgaatgcaaagtatttcgatggggatctgagcaaagtgcctaccatggctctgaccgtcggtgtgggaacagtgatggacgccagggaagtgatgatcctgattactggcgcccacaaggcatttgctctttacaaggccattgaggagggggtgaaccatatgtggacagttagcgcgtttcaacaacacccacgaaccatattcgtctgcgacgaggacgctaccctggagttgcgggtcaagacagtaaaatatttcaaaggcgaacattag

SEQ ID NO: 236220 - DNA, 831 bp, Artificial Sequence
  derived and/or modified sequence
atgagactcgtgatcctggacaattacgatctggccagcgaatgggctgctaaatacatttgcaatcggataatccaattcaagcctgggcaggaccggtactttactcttgggctgcctacaggcagtaccccgctcgggtgttataagaagttgattgaataccacaaaaatgggcacctctcatttaaatatgtcaagacttttaatatggatgagtacgtgggcctgcctaggaaccaccctgagagctaccattcatatatgtggaacaacttttttaaacatattgacatagatcctaacaatgcacacattctggatgggaacgcggcagatttacaggctgagtgtgacgctttcgagaataaaattaaggaagctggcggtatcgacctgttcgtgggaggtatcgggccagacggacatattgcattcaacgagcccggttcctcactggtcagccggaccagattgaaaaccctcgctatggatacaatccttgcgaatgctaagtactttgatggcgacctgtcgaaggtgcccacgatggcccttacagtgggcgtgggcacggtgatggatgctcgcgaggtaatgattctgattaccggagcacacaaagcgttcgctctgtataaggccattgaggaaggcgtgaaccatatgtggaccgtctccgcttttcagcagcacccgagaaccatcttcgtctgtgacgaggatgcaacactggaactacgggttaaaaccgttaaatactttaagggccttatgcacgtacataataagctggtcgatccactcttttcaatgaaagacggaaactag

SEQ ID NO: 236221 - DNA, 780 bp, Artificial Sequence
  derived and/or modified sequence
atgcggctcgtgatccttgataactacgacctcgcttctgagtgggccgcaaagtatatctgtaatcggatcatccaatttaagcccggacaggaccggtactttacgctgggcttaccaactgggtccacaccgctgggatgttataagaagctcatcgaataccacaagaatggccacctgtccttcaagtacgtcaagaccttcaatatggatgagtacgttgggttgcccagaaatcacccagagagctaccacagttacatgtggaataattttttcaagcatatcgacattgacccaaataacgcccacatactggacggcaatgctgcagatctacaagcagagtgtgacgctttcgaaaataagatcaaagaagctggcggtatagatttgttcgttggcggtattgggccagacgggcacattgcatttaatgaaccgggatcgagtctggtttctcggaccaggctgaagactttggctatggacaccatcctggccaacgccaagtacttcgatggtgatctgtcaaaggtgccaactatggctctaaccgtcggagtgggaacagtgatggatgccagggaggtgatgattttgataactggagcgcataaggcctttgccttatacaaggccatagaagaaggcgtcaaccatatgtggacagtgtcagcttttcagcagcatccaagaaccatattcgtatgcgacgaggacgctaccttggagctgagggtgaaaactgtgaagtatttcaaaggcgaacactag

SEQ ID NO: 236222 - DNA, 831 bp, Artificial Sequence
  derived and/or modified sequence
atgagactggtgatcctggacaactacgacctggccagcgagtgggccgccaagtacatctgcaacagaatcatccagttcaagcccggccaggacagatacttcaccctgggcctgcccaccggcagcacccccctgggctgctacaagaagctgatcgagtaccacaagaacggccacctgagcttcaagtacgtgaagaccttcaacatggacgagtacgtgggcctgcccagaaaccaccccgagagctaccacagctacatgtggaacaacttcttcaagcacatcgacatcgaccccaacaacgcccacatcctggacggcaacgccgccgacctgcaggccgagtgcgacgccttcgagaacaagatcaaggaggccggcggcatcgacctgttcgtgggcggcatcggccccgacggccacatcgccttcaacgagcccggcagcagcctggtgagcagaaccagactgaagaccctggccatggacaccatcctggccaacgccaagtacttcgacggcgacctgagcaaggtgcccaccatggccctgaccgtgggcgtgggcaccgtgatggacgccagagaggtgatgatcctgatcaccggcgcccacaaggccttcgccctgtacaaggccatcgaggagggcgtgaaccacatgtggaccgtgagcgccttccagcagcaccccagaaccatcttcgtgtgcgacgaggacgccaccctggagctgagagtgaagaccgtgaagtacttcaagggcctgatgcacgtgcacaacaagctggtggaccccctgttcagcatgaaggacggcaactag

SEQ ID NO: 236223 - DNA, 780 bp, Artificial Sequence
  derived and/or modified sequence
atgagactggtgatcctggacaactacgacctggccagcgagtgggccgccaagtacatctgcaacagaatcatccagttcaagcccggccaggacagatacttcaccctgggcctgcccaccggcagcacccccctgggctgctacaagaagctgatcgagtaccacaagaacggccacctgagcttcaagtacgtgaagaccttcaacatggacgagtacgtgggcctgcccagaaaccaccccgagagctaccacagctacatgtggaacaacttcttcaagcacatcgacatcgaccccaacaacgcccacatcctggacggcaacgccgccgacctgcaggccgagtgcgacgccttcgagaacaagatcaaggaggccggcggcatcgacctgttcgtgggcggcatcggccccgacggccacatcgccttcaacgagcccggcagcagcctggtgagcagaaccagactgaagaccctggccatggacaccatcctggccaacgccaagtacttcgacggcgacctgagcaaggtgcccaccatggccctgaccgtgggcgtgggcaccgtgatggacgccagagaggtgatgatcctgatcaccggcgcccacaaggccttcgccctgtacaaggccatcgaggagggcgtgaaccacatgtggaccgtgagcgccttccagcagcaccccagaaccatcttcgtgtgcgacgaggacgccaccctggagctgagagtgaagaccgtgaagtacttcaagggcgagcactag

SEQ ID NO: 236224 - protein, 265 aa, Artificial Sequence
  derived and/or modified sequence
MSEEVTYADLQFQNSSEMEKIPEIGKFGEKAPPAPSHVWRPAALFLTLLCLLLLIGLGVLASMFHVTLKIEMKKMNKLQNISEELQRNISLQLMSNMNISNKIRNLSTTLQTIATKLCRELYSKEQEHKCKPCPRRWIWHKDSCYFLSDDVQTWQESKMACAAQNASLLKINNKNALEFIKSQSRSYDYWLGLSPEEDSTRGMRVDNIINSSAWVIRNAPDLNNMYCGYINRLYVQYYHCTYKKRMICEKMANPVQLGSTYFREA

SEQ ID NO: 236225 - DNA, 798 bp, Artificial Sequence
  derived and/or modified sequence
atgagcgaagaggtgacgtacgctgacctacagttccaaaattcctcagaaatggagaagattcccgaaatcgggaaattcggagagaaagccccccccgccccatcacatgtgtggagacccgcggcgctgtttctgactcttctgtgcctgctgcttctcataggtctcggcgtacttgcttcaatgttccatgtgacattaaaaatcgagatgaagaagatgaacaaactgcagaacatctccgaagagttacagcggaatatatcccttcagctgatgagtaacatgaatatcagcaacaaaataaggaacctgtccactacccttcaaacaatcgcgacgaaactgtgcagggagttatattccaaggagcaggagcacaaatgtaaaccctgtccccggcggtggatttggcacaaagatagttgctacttcttatccgacgatgtgcagacctggcaagagtctaagatggcctgcgccgctcagaatgcttctttactgaagatcaataacaagaatgccctggaattcattaagagtcaatcacgatcatacgactactggctgggcctttccccagaggaggactctacaagagggatgcgggtcgataatataatcaatagcagtgcctgggtcatacggaatgcccctgacttgaacaatatgtactgcggttatatcaaccgcctgtatgttcagtattaccactgcacatataagaagcgaatgatctgcgagaaaatggccaacccagttcagcttggatctacctactttagggaagcttag

SEQ ID NO: 236226 - DNA, 798 bp, Artificial Sequence
  derived and/or modified sequence
atgtctgaggaggtgacctacgccgacctgcagttccagaacagcagcgagatggagaagatccctgagatcggcaagtttggagagaaggcccccccagcccccagccacgtgtggaggcctgctgccctcttcctgaccctgctgtgcctgctgctgctgattggcctgggcgtgctggcctccatgtttcatgtgaccctgaagattgagatgaagaagatgaacaagctgcagaacatcagcgaggagctgcagaggaacatcagcctgcagctgatgagcaacatgaacatcagcaacaagatccggaacctgagcaccaccctgcagaccatcgccaccaagctgtgccgggagctgtacagcaaggagcaggagcacaagtgcaagccctgcccccggcgctggatctggcacaaggacagctgctacttcctgagtgatgatgtgcagacctggcaggagagcaagatggcctgtgccgcccagaatgccagcctgctgaagatcaacaacaagaatgccctggagttcatcaagagccagagccgctcctatgactactggctgggcctgagccctgaggaggacagcacccggggcatgagggtggacaacatcatcaacagcagcgcctgggtgatcagaaatgccccagacctgaacaacatgtactgcggctacatcaaccggctgtatgtgcagtactaccactgcacctacaagaagaggatgatctgtgagaagatggccaaccctgtgcagctgggcagcacctacttccgggaggcctag

SEQ ID NO: 236227 - DNA, 798 bp, Artificial Sequence
  derived and/or modified sequence
atgagcgaggaggtgacctacgccgacctgcagttccagaacagctctgagatggagaagatccctgagatcgggaagtttggtgagaaagctccacccgcaccgtctcatgtatggcggccagccgcccttttcctgaccttattatgccttctgcttcttatcggtctgggcgtgcttgcgagtatgtttcatgtgacattgaagattgagatgaagaaaatgaataagctgcaaaacatctctgaggagttacagcgtaacatatcattgcaattgatgtccaatatgaacatctcaaacaagattcgtaatttatctactacattgcaaacaatcgccaccaaattgtgtcgggagctatattcaaaggagcaggagcacaaatgtaagccttgcccccggcgctggatatggcacaaggactcctgctatttcctgtccgacgacgtacagacttggcaggaaagcaaaatggcatgcgcagcgcagaacgcgtccctgttgaaaataaacaacaaaaacgcattggaattcatcaagtcacagtccaggagctacgattattggctgggcctttcgcctgaagaggacagcaccagaggcatgagggtggacaacatcatcaacagctcggcatgggtcatcagaaacgctcctgatcttaataacatgtactgtggctacatcaacagactctatgtgcagtactaccactgcacgtataagaaacggatgatatgtgaaaaaatggcaaaccctgtgcaactgggcagcacttattttcgggaggcctag

SEQ ID NO: 236228 - DNA, 798 bp, Artificial Sequence
  derived and/or modified sequence
atgtcggaagaagtcacctacgcagacttgcagtttcagaattctagcgagatggagaaaatcccagagatcgggaaattcggagagaaggcccctccagccccatcccatgtctggagaccggcagcattgtttctcactctgctttgtctccttctgcttattggcttgggagttctcgcatcaatgtttcacgtcactctcaaaattgagatgaaaaagatgaataagctccagaatatcagcgaagaattacagagaaatattagcctccaattgatgtcgaacatgaacatcagcaataagatacggaacctgtctacaacgctgcaaaccatcgccacaaaactgtgtcgagaactgtattccaaggagcaggagcacaaatgcaaaccctgcccaaggcgctggatatggcacaaggatagctgttatttcttgtcagacgatgtccaaacctggcaggagtccaagatggcatgtgccgctcagaacgccagtcttctgaaaatcaataataagaatgcgctggaattcattaagagccagtcacggtcttatgactattggttggggttatccccagaggaagacagcacaagggggatgcgtgtggacaatattatcaatagttccgcttgggtcattagaaacgcgcctgacctgaataatatgtattgcggctacattaaccggctttacgtccagtactatcactgcacttataagaaacgtatgatctgtgagaagatggctaatccagttcaactggggtccacttactttcgcgaagcctag

SEQ ID NO: 236229 - DNA, 798 bp, Artificial Sequence
  derived and/or modified sequence
atgagcgaggaggtgacctacgccgacctgcagttccagaacagcagcgagatggagaagatccccgagatcggcaagttcggcgagaaggccccccccgcccccagccacgtgtggagacccgccgccctgttcctgaccctgctgtgcctgctgctgctgatcggcctgggcgtgctggccagcatgttccacgtgaccctgaagatcgagatgaagaagatgaacaagctgcagaacatcagcgaggagctgcagagaaacatcagcctgcagctgatgagcaacatgaacatcagcaacaagatcagaaacctgagcaccaccctgcagaccatcgccaccaagctgtgcagagagctgtacagcaaggagcaggagcacaagtgcaagccctgccccagaagatggatctggcacaaggacagctgctacttcctgagcgacgacgtgcagacctggcaggagagcaagatggcctgcgccgcccagaacgccagcctgctgaagatcaacaacaagaacgccctggagttcatcaagagccagagcagaagctacgactactggctgggcctgagccccgaggaggacagcaccagaggcatgagagtggacaacatcatcaacagcagcgcctgggtgatcagaaacgcccccgacctgaacaacatgtactgcggctacatcaacagactgtacgtgcagtactaccactgcacctacaagaagagaatgatctgcgagaagatggccaaccccgtgcagctgggcagcacctacttcagagaggcctag

SEQ ID NO: 236230 - protein, 352 aa, Artificial Sequence
  derived and/or modified sequence
MSRGTMPQPEAWPGASCAETPAREAAATARDGGKAAASGQPRPEMQCPAEHEEDMYRAADEIEKEKELLIHERGASEPRLSVAPEMDIMDYCKKEWRGNTQKATCMKMGYEEVSQKFTSIRRVRGDNYCALRATLFQAMSQAVGLPPWLQDPELMLLPEKLISKYNWIKQWKLGLKFDGKNEDLVDKIKESLTLLRKKWAGLAEMRTAEARQIACDELFTNEAEEYSLYEAVKFLMLNRAIELYNDKEKGKEVPFFSVLLFARDTSNDPGQLLRNHLNQVGHTGGLEQVEMFLLAYAVRHTIQVYRLSKYNTEEFITVYPTDPPKDWPVVTLIAEDDRHYNIPVRVCEETSL

SEQ ID NO: 236231 - DNA, 1059 bp, Artificial Sequence
  derived and/or modified sequence
atgagcagaggcaccatgccccagcccgaggcctggcccggcgccagctgcgccgagacccccgccagagaggccgccgccaccgccagagacggcggcaaggccgccgccagcggccagcccagacccgagatgcagtgccccgccgagcacgaggaggacatgtacagagccgccgacgagatcgagaaggagaaggagctgctgatccacgagagaggcgccagcgagcccagactgagcgtggcccccgagatggacatcatggactactgcaagaaggagtggagaggcaacacccagaaggccacctgcatgaagatgggctacgaggaggtgagccagaagttcaccagcatcagaagagtgagaggcgacaactactgcgccctgagagccaccctgttccaggccatgagccaggccgtgggcctgcccccctggctgcaggaccccgagctgatgctgctgcccgagaagctgatcagcaagtacaactggatcaagcagtggaagctgggcctgaagttcgacggcaagaacgaggacctggtggacaagatcaaggagagcctgaccctgctgagaaagaagtgggccggcctggccgagatgagaaccgccgaggccagacagatcgcctgcgacgagctgttcaccaacgaggccgaggagtacagcctgtacgaggccgtgaagttcctgatgctgaacagagccatcgagctgtacaacgacaaggagaagggcaaggaggtgcccttcttcagcgtgctgctgttcgccagagacaccagcaacgaccccggccagctgctgagaaaccacctgaaccaggtgggccacaccggcggcctggagcaggtggagatgttcctgctggcctacgccgtgagacacaccatccaggtgtacagactgagcaagtacaacaccgaggagttcatcaccgtgtaccccaccgacccccccaaggactggcccgtggtgaccctgatcgccgaggacgacagacactacaacatccccgtgagagtgtgcgaggagaccagcctgtag

SEQ ID NO: 236232 - DNA, 1059 bp, Artificial Sequence
  derived and/or modified sequence
atgagccggggaacaatgccacagcctgaggcctggccgggagcaagctgtgcagaaacaccagccagggaggcagctgccaccgccagggatggggggaaggcagccgcctcaggccaaccccggcccgagatgcaatgtcccgctgagcacgaagaggacatgtacagggccgcagacgaaattgagaaggagaaggagcttctgattcacgagcgaggagcatctgagccccggctctccgtggcacccgaaatggatatcatggattattgtaaaaaggagtggcgaggaaacactcagaaagcaacatgtatgaaaatgggttatgaggaggtttctcagaaatttacaagcataagaagagtccggggcgataactactgtgccctgagagctaccctttttcaggccatgagccaagccgtgggactcccaccctggctccaagatccagagcttatgctgttaccagaaaagctgatttccaaatacaactggattaaacagtggaagctggggctaaagttcgacggaaaaaatgaggatctagtcgacaagattaaagagagccttacattgcttcggaagaaatgggcgggactcgcagagatgcgcacagccgaagcccgccagattgcttgcgatgagctctttacaaacgaggctgaagagtactcgttatacgaggccgtcaaatttctgatgctcaaccgcgccatcgaattatacaacgacaaagagaagggtaaggaggttccattcttttctgttctcctgttcgctcgggacacttcgaatgatccaggccagcttctccggaaccacttaaatcaagtaggccataccggcggactcgagcaagtcgagatgttcttgctggcttatgccgtgagacatacaattcaggtctatcgactgtccaagtataacaccgaagaatttatcaccgtctatcccacagatccccccaaagattggccggtggtgaccttgattgccgaagacgatcgccattacaatatccctgtccgcgtgtgcgaagaaaccagcctgtag

SEQ ID NO: 236233 - DNA, 7800 bp, Artificial Sequence
  derived and/or modified sequence
gccactgcctggcaccccgacgggaggggctccggatcgttcggagccggctgaaccccttcggccgcgagcgaccgcatgagtcgggggactatgccccagcccgaagcgtggccaggcgcgagctgcgccgagacgccggcgcgggaggcggcggccacggcgcgggacggcgggaaggcggcggccagcgggcagccgcggcccgagatgcagtgcccggccgagcatgaggaggacatgtaccgtgctgcagatgaaatagaaaaggagaaagaattgcttatacatgaaagaggggcatcagaaccgagattaagcgtagctcctgaaatggatatcatggactactgcaaaaaagaatggagaggaaatacacagaaagcaacgtgtatgaaaatgggctatgaagaggtttctcagaagttcacctccatacggcgagtccgtggtgataattactgtgcactgagggccacgctgttccaggccatgagccaggctgtggggctgccgccctggctgcaggacccggagctcatgctgttaccagaaaaactcataagcaaatacaactggatcaagcaatggaaacttggactgaaatttgatgggaagaatgaggacctggttgataaaattaaagagtcccttactctgctgaggaagaagtgggcaggcttggctgaaatgagaactgctgaagcaagacagatagcttgtgatgaactattcacaaatgaggcggaggaatatagcctctatgaagctgtaaaatttctaatgctaaacagagccattgaactatataatgataaagagaaaggaaaggaagtaccatttttctctgtgcttctgtttgctcgggacacatcaaatgacccaggacagcttctgaggaaccacctcaaccaggtgggacacactggtggtcttgaacaggttgaaatgttccttcttgcctatgctgtgcgccacaccatccaggtgtaccggctctccaagtacaacacggaagaattcatcacagtctaccccaccgacccacccaaggactggccagtggtaacgctcattgctgaggacgatcggcactataacatccccgtcagagtgtgtgaggagaccagtctatgagagacgcatgctcctgacagcctggcgacgtggcgaagatgcacaggtggctcctgggcttgggctgcaggtttgggggtctctaagaacaatctctgagaagaacccttgggcccctgggagccaagttggacaggatgtcctgaagactagcttttgataagagaaattaaccaagtctttcccctcatctatgatgcaatatatttcagtgggggccttcagagcacacctgttggacggtgcaaaccatatcttctccagaaggcaaatacttttgtatcagaggaaactcagttttggagaggaatatgttctttatgtctcaaatcaaaactctctctaatggtaaactggcttctaatttttttaagtacagtatttttttttcccctttagtagtaacgggtttctatagatcttcctatacagtctgctttaactcaggaccttgagattatgagactgacgtgctgcccactgcactgagggggcttctaacagtctgctttaagtggtataattctgggatagatctgttactggcatagtcatgacaacctctggtaatcttaccttctcctttttatgaagggaagagcaatggtttggacttacatcttaattaaggctattttaagcagattgttttgcaacagattaagaattgggtcccaaagtgggttatttcaaggcatttttgaagactggaggagcgtaggagggagtggtgagggaacctagaacttcttgctccttgtgactatgacagatgtctgatgcccccagcgcactggagtctggggcttggtgcaggtggtgccccatcagtgtggacagacactacttgcctttgtggtttagtgttggaagctttaattattctacagttccatagattcacaattttatagccaaacagtttgtatccacctgctttcagaggaggaaccaaaggccaaattactttgaggtagggcttagctggacctgggttttcctatgctcttttcatgctgtgttggagggtgtgtccactgccagatctgtgtaacccgtctgggtcaggggatgagtgacagcaaaccatcttaaaatttttcatgagtacatttaagcggaagcatacgggaatatgagtgcaaaagtgtggctgagccgcgtatgcccttgattggttttgggaagcctgagggaggcagccttcctggctatgagccatcgcctgcccaatcaggctaagggtggtgactggggtggtgaaggggcagctctgctgagcatggtctgccttatggcctgaattgtcctcaaggggtgtggactgcagatggtgttcacatgaaccggagacatcactctttaggattctactggcagcccctgaattggctcaacgtttgtggaggtggtatttccctgaagtactgagctttgttttataataattaaaatccttatttggtccaatttaatatagtttagaagctattttttttgaggcaaaccgtttttgaaaatgtaaattttgtttttaattaaaaataaagtcttagttaagaaaactcaggatgcacaaaactattcagactgttactttagctttctcccattacctcatcagtaatattcaccacattttgctaaatatttattgattagagtgttgaaatcaaattctgctctaaatgtgtgtgaatatgttggagaggctttgtgttcttcactgtgaaatgcaattgtgccttgaataagaaggtacctagaagccaaattaaagtaataatgacttcttattggctttgatttttcattgcagtatatgggattgtacagcaggaaatgcttatcattaatttctgatgttttttaaagcacaactcgaaacatttcgatcatacatacatagcagtagagatctgtgcccttcaggtacattgaatctgaccatcagtttatatatgtcattgaattttaagaatactcatgttaataatagtcatctatccttgcattttgaaactgttctaatcttagtgaacttgaattggatttctgggtaaaagaatgtgtttcttttatgttgcttatgtccgaaggccttgtcagaatctgtcagactcttgtttaggtttagtgtgatcatggcgtcagagaagcaaagctttcaaataaatagtacttcaggaaatagaaatgattgaccaactttaaaaataatttttttttaattgcaatatgcagcttcagttgcccagaatcttagttccgtttctcattcttggtcttgagctggtcaggtgacatcagcagattagaagttgaatggagattaagtggattcaggaggatgttccacttagagcagtcttcaaaatgataaggtgttctagaagaaaggaatgtagtaggaactatactatgcctaactttctatcccagagtgtcttgcaagagtttaggagttttggaccctgtgtattggcagaaaagttatctccatcttaagcaggcatgacttttatacctgtgagctcatttaaggtgcatttaaacctaaaataatttccctgtattatgcttcatgggattaacactgcttttccagaacattttcagattcccctccttacatcctgagctccttctgtatatacatctgttgattttatccatccacaaggaacaatgatagtcacattagagaacaagaaaccagtaatacatggtctctaactgatgattcgggcctggatttgattgaaagtgtttgcagttcctcttccgtagaatacagagtggatgaaaatgttttcaatgcacagaacaggatgaatccttttttctttatttagcgatttacacttttgttactctattatatattcagttagtgtctgataagattttctttgcttaaggagaacggacattgccttggtatgtttttttttttttttccctccacttttggagcttatcaggtaaaaatctcaagccacatgaattgttaacacctctgttgggaaaagcctttgtgagtttttatgtacttggtctttgtttttgttattcatcctgtgtcctccctcttcccgatgtgctgttttacctaggagttagtctgctttctgaggatcttttagagagaggctgtgaagtgctgaatcacctttaatgatacagcacttctgccatctcagcatctacataggacttacatagacttcctgaatgtgtcttcttcagatactaaagtacagttggatcattttcttatctccttttcttaagcagtactttgcaggtactcccctttgaaagccagaagcataaaccattggggaatcttaacttgtagacatgcagtaaaagaaatgcatttatgtaagatctgtgagtacttaaaaagaaagccctcagtgtgtgtgaagtgaatgtgaaatgtgtgtgaaatacatagaattcccaaatagtttagcaaaggcagggcgcaatatcaagtaatttaaaaatggtccaaggaactgtaagaaggaggaactaattctagaataaatgttaaaatgccattcaagaacaaaaccacagatgccatacagacctcctgtgcttaagttatagaagaataaaaatctgaatgaatggaaggccttacgtgtatacagtttacaaattcctatttctaaaatttaagtcccttatttaacagaagtatgtattttaatgcttaactgtctcgggaaacctcatttgtgacatcatctaaggggatgggaagactagggagccagtgccacgttgaacagaacagtggtttagtgaatgtgtgaggaaagacatgggcaactgattattaatgtttttgtaattcagtttataacttggaaccaatgaaaagcaacaaaactaaactggtttgacagcctgccacttctggcatttcctgtaagtcactagcagtaggtgtgaggtgggcttgcccatgaccaggaggggtgtgtgtgtgtgtgtgcatgtgtgtatatgcgtgttggtctgcagtcacagcatacctttatgtgcatgtgtcctcgcagcttgggactcagcagtattctgggagggtggaggtgaactgtcccatgtattgtattatatattttttgagatggggtcttgctctgttgcccaggctggagtgcagtggtgcgatctcagctcactgcaacttttgcctcctggttcaagcagttctcctgcctcagcctgccaaatagctgggattacaggtgtgtaccaccactcccagctaatttttgtatttttagtagagatggggttttaccatgttggccaggctggtctcgagctcctggcctcaggtgatccacctgctttggcctcccaaagtgctgagattacaggcgtgaactaccgcgcctggccccatgtattgtatttttttcaggttatattgaaatctactaccaggaatgtcggaatgggttttggtatgtataatggaaatagatagagtggttaagtctagaaacacatacattaattgtattgaaatgttatatcaatacatcatttatgatgtgtgtgtggtcccagacctcatggccaccagtttgtttaagcattgtgaatgctttttaatagcattcattagcattaatggaggaggacactgtgttttctcaattaatctcattgatttgtttggtataagtttgggtcagaaatgaaactgccaaaacatcgatcagtacaaggaagggacacagggcttaaaatgtccacagtcttggcagtggacttggcagttctcccagtaagcagaagtacttgagcttaattctgaacttcaaagtaatattttatacttaattttaggagttttcatttacatattgaaaaatgccttgactgtattcacataaatggtgctaaaacattgtaccccttataagaactgcagcaatccacagtaatgttggttacttctgagtatttgataaaggaacaaagtcaaaatgaatgtatttaataagcttctttctcatttccattgtttttataaaaatattttggtattgttgcctgcattttagccacttctaactttttgtattatgaatttggagaggataacaagccaactttagaccctctgccagtggcgatggtgtttttcttccatgggtaagccattgtgaatggaggctggtggagcagcacactgtgtgaacctggcagcgctcatcttggcttgtttagcagtgcctctgtttacaccataagatgttccgcatgtgtccaaaatttcgcctgctctgaaaaacatgcccccgaggctctgtgcagtttggggccttggttcccacctgcagatgcggtcagttgcctggctcctggggccagagtttcctctgttacttgttgagtctcttgtcttcactgtcagaagctgaactgacttgggggctttgctgttgatccactttagcaaaccctgctgcagaggactgtaaaaacaaataactaaaaataaacttagaaaatacaactcagaagcctggctctgttgctgtggtcaaatgcttgcctttgaggactttggcagattgtgctattacattgggctctaactttctggcacccgcaaggcagacctatgatgtccacatggctgactcttgacccctggccattgtgagcagaggaatcaagggtttagggaggcagtattgggcagtgtggaagagttagatgagatgaagcagttagcacagtgcttaacccatactaagtgcccccaaccctgccagccaaattaggtgcatagttttcagcttgggtctggattcaacagcattcccgctgcccactaaaagggtgggcttggacagttcctgaacctccctaaatctgtttcttcatctttaccacacacagtctgtctcagtggtggtgtggattaagtgaggtgctagcacttattaggggaagatcctccagacctgcaaagcagggctgcagccccaattctgacccagccctgctgtgtgtttgccgcaaagaggtttggtgtgtgcgagacatttctttatgaaccatttacactgctggaaatgtacccactaatgtgatggcaagaacttcaacaaattgcttatgaatcaggctctcaatggaagaagttaatcctctgaagagggggaagactggactttcagaagtatgttggggatagagaatgaagtttgagtcagcagagctctgccttcctgtttgtcaaagaactagagtctgggagtcttgcaagatggagctgggcttctgaagaacccagtgggtaggtactgggcatccattagacggcagtgctaagtcggtcatgtgcagcagaaagacctccccactgtgaacaacaaaccactttcctcctccagtggcccattcatttggattgatacactttttcagtgtcagaaatgcactttctccctctacttgtctgaattacgatgctctgctcaactctgtggacagtgtttcttgaatttccttttccaccgccttttcccactcaagaaagtggagagaaaaacagggatgcaggctgtgggtcttgtggaagccctttacaaccattaaataaagaacaccagctgc

SEQ ID NO: 236234 - DNA, 1059 bp, Artificial Sequence
  derived and/or modified sequence
atgagccggggcaccatgccccagcctgaggcctggccaggggccagctgtgccgagaccccagcccgggaggccgccgccacagccagagatggcggcaaggccgccgccagcggccagcccaggcctgagatgcagtgcccagctgagcacgaggaggacatgtacagagctgctgatgaaattgagaaggagaaggagctgctgattcatgagcggggggccagcgagccccggctgtctgtggcccctgagatggacatcatggactactgcaagaaggagtggaggggcaacacccagaaggccacctgcatgaagatgggctatgaggaggtgtcccagaagttcaccagcatcagaagagtgcggggggacaactactgtgccctgcgggccaccctcttccaggccatgagccaggccgtgggcctgcccccctggctgcaggaccctgagctgatgctgctgcctgagaagctgatcagcaagtacaactggatcaagcagtggaagctgggcctgaagtttgatggcaagaatgaagacctggtggacaagatcaaggagagcctgaccctgctgaggaagaagtgggccggcctggccgagatgaggacagctgaggcccggcagatcgcctgtgatgagctgttcaccaatgaagctgaggagtacagcctgtatgaagctgtgaagttcctgatgctgaacagagccatcgagctgtacaatgacaaggagaagggcaaggaggtgcccttcttctctgtgctgctgtttgcccgggacaccagcaatgaccccggccagctgctgaggaaccacctgaaccaggtgggccacactggaggcctggagcaggtggagatgttcctgctggcctatgctgtgcgccacaccatccaggtgtaccgcctgagcaagtacaacacagaggagttcatcaccgtgtaccccacagatcctcccaaggactggcctgtggtgaccctgattgctgaagatgacagacactacaacatccctgtgcgggtgtgtgaggagaccagcctgtag

SEQ ID NO: 236235 - DNA, 1059 bp, Artificial Sequence
  derived and/or modified sequence
atgagccggggcaccatgccccagcccgaggcctggcccggcgcctcctgcgccgagacccccgcccgggaggcagcggcaaccgcccgggacgggggcaaggcagcggcctctggacaacctcggcctgagatgcagtgccccgccgaacacgaggaggacatgtatcgcgctgcagatgagatcgagaaggaaaaagagttgctaattcatgagaggggagcctccgaaccacggctgagcgttgcccccgaaatggacatcatggactactgcaaaaaagaatggagaggcaacacccaaaaggcgacatgcatgaagatgggctatgaagaagtatcacaaaagttcacaagtataaggagggtaagaggcgacaattactgcgcactccgagcaaccctgttccaagccatgagccaggcagtgggcctccccccttggttgcaggaccccgagctgatgctgctgccggagaagctcatctccaaatataactggatcaaacagtggaaactcggtctaaagttcgacgggaagaatgaggacctggtggataagatcaaagaatctttaactctcttacgcaagaagtgggcaggattggcagagatgcgcacagcggaggcccggcagatcgcttgtgatgaactgtttaccaatgaggctgaggagtacagtctgtacgaggcggtgaaattcctaatgctgaatcgggcgatcgagctttataatgataaagaaaagggtaaagaagtgcccttctttagcgttttgttatttgctagagatacatctaatgacccgggccagctcctaagaaaccatttaaaccaggttgggcatacaggagggcttgagcaggtggagatgtttcttctggcatatgctgttcgccataccatccaggtgtataggctgagtaagtataacacagaggaatttataacggtgtatcctactgaccccccaaaggattggcccgtagtgacgctgatcgcagaggacgaccgacattataatattccagtaagagtgtgcgaggaaaccagcctatag

SEQ ID NO: 236236 - DNA, 1059 bp, Artificial Sequence
  derived and/or modified sequence
atgtccagagggaccatgcctcaacccgaagcatggccaggtgcatcttgcgctgagactcctgcgagagaggcagcagcgactgctagagacgggggaaaggcagcagcctctggacaaccgcgtcctgaaatgcaatgccctgccgagcatgaggaggatatgtatagagcagccgatgagatcgaaaaggaaaaggaactcttaatccacgaacggggagcatctgagcctcggttatcagtagcccctgaaatggatataatggactattgtaaaaaagagtggaggggcaacacacagaaagccacttgtatgaagatgggatacgaagaagtcagccagaaatttacctctattcggagagtgaggggcgacaactactgtgcgttacgtgccactctcttccaggccatgagtcaagccgtagggctgcctccctggcttcaagaccccgaactgatgttattacctgaaaaactgataagtaaatacaattggatcaagcagtggaaactggggctgaagttcgatgggaagaacgaggacctggtggacaaaatcaaagagagtcttacactgctgagaaaaaaatgggcaggactcgctgagatgcgcacagccgaggccagacagatcgcgtgcgatgagctcttcactaacgaagccgaggagtattcactatatgaagcggtgaagttcttgatgctcaaccgcgctatcgagctgtataatgacaaggaaaagggcaaagaagttccatttttctccgtgctgctctttgcccgagatacaagcaatgatccaggccaactgttgcggaaccaccttaaccaggtgggacatactgggggtctagagcaggtggagatgttcctcctggcctacgctgtgagacacacgattcaggtgtaccgcctcagtaagtacaataccgaggagtttatcactgtatatcccaccgaccccccaaaagactggccggtagttaccctgatcgccgaggatgatagacactacaatatacctgtcagggtgtgcgaggaaacctccttgtag

SEQ ID NO: 236237 - protein, 393 aa, Artificial Sequence
  derived and/or modified sequence
MAPPPPSPQLLLLAALARLLGPSEVMAGPAEEAGAHCPESLWPLPPQVSPRVTYTRVSPGQAEDVTFLYHPCAHPWLKLQLALLAYACMANPSLTPDFSLTQDRPLVLTAWGLALEMAWVEPAWAAHWLMRRRRRKQRKKKAWIYCESLSGPAPSEPTPGRGRLCRRGCVQALALAFALRSWRPPGTEVTSQGPRQPSSSGAKRRRLRAALGPQPTRSALRFPSASPGSLKAKQSMAGIPGRESNAPSVPTVSLLPGAPGGNASSRTEAQVPNGQGSPGGCVCSSQASPAPRAAAPPRAARGPTPRTEEAAWAAMALTFLLVLLTLATLCTRLHRNFRRGESIYWGPTADSQDTVAAVLKRRLLQPSRRVKRSRRRPLLPPTPDSGPEGESSE

SEQ ID NO: 236238 - protein, 137 aa, Artificial Sequence
  derived and/or modified sequence
AKQSMAGIPGRESNAPSVPTVSLLPGAPGGNASSRTEAQVPNGQGPRGLCLFKSGFPGPSRSSPRAARGPTPRTEEAAWAAMALTFLLVLLTLATLCTRLHRNFRRGESIYWGPTADSQDTTPPPAHDSGPEGESSE

SEQ ID NO: 236239 - DNA, 1182 bp, Artificial Sequence
  derived and/or modified sequence
atggccccccccccccccagcccccagctgctgctgctggccgccctggccagactgctgggccccagcgaggtgatggccggccccgccgaggaggccggcgcccactgccccgagagcctgtggcccctgcccccccaggtgagccccagagtgacctacaccagagtgagccccggccaggccgaggacgtgaccttcctgtaccacccctgcgcccacccctggctgaagctgcagctggccctgctggcctacgcctgcatggccaaccccagcctgacccccgacttcagcctgacccaggacagacccctggtgctgaccgcctggggcctggccctggagatggcctgggtggagcccgcctgggccgcccactggctgatgagaagaagaagaagaaagcagagaaagaagaaggcctggatctactgcgagagcctgagcggccccgcccccagcgagcccacccccggcagaggcagactgtgcagaagaggctgcgtgcaggccctggccctggccttcgccctgagaagctggagaccccccggcaccgaggtgaccagccagggccccagacagcccagcagcagcggcgccaagagaagaagactgagagccgccctgggcccccagcccaccagaagcgccctgagattccccagcgccagccccggcagcctgaaggccaagcagagcatggccggcatccccggcagagagagcaacgcccccagcgtgcccaccgtgagcctgctgcccggcgcccccggcggcaacgccagcagcagaaccgaggcccaggtgcccaacggccagggcagccccggcggctgcgtgtgcagcagccaggccagccccgcccccagagccgccgccccccccagagccgccagaggccccacccccagaaccgaggaggccgcctgggccgccatggccctgaccttcctgctggtgctgctgaccctggccaccctgtgcaccagactgcacagaaacttcagaagaggcgagagcatctactggggccccaccgccgacagccaggacaccgtggccgccgtgctgaagagaagactgctgcagcccagcagaagagtgaagagaagcagaagaagacccctgctgccccccacccccgacagcggccccgagggcgagagcagcgagtag

SEQ ID NO: 236240 - DNA, 414 bp, Artificial Sequence
  derived and/or modified sequence
gccaagcagagcatggccggcatccccggcagagagagcaacgcccccagcgtgcccaccgtgagcctgctgcccggcgcccccggcggcaacgccagcagcagaaccgaggcccaggtgcccaacggccagggccccagaggcctgtgcctgttcaagagcggcttccccggccccagcagaagcagccccagagccgccagaggccccacccccagaaccgaggaggccgcctgggccgccatggccctgaccttcctgctggtgctgctgaccctggccaccctgtgcaccagactgcacagaaacttcagaagaggcgagagcatctactggggccccaccgccgacagccaggacaccacccccccccccgcccacgacagcggccccgagggcgagagcagcgagtag

SEQ ID NO: 236241 - DNA, 1182 bp, Artificial Sequence
  derived and/or modified sequence
atggcacctccacccccctcgccacagctgcttcttctagcggcactcgcgcggctactgggcccctcagaggtgatggccggcccagcagaggaggctggcgctcactgccctgaatccctctggccgctgccacctcaggtcagccccagggtgacttacaccagggtgagcccagggcaggcagaggacgtgacatttctgtaccatccttgtgctcacccttggctgaaacttcagctagccctgctggcctatgcttgtatggcaaatcccagtctgaccccggattttagcctgacgcaggaccgccccctggtgctgactgcttggggcctagcacttgagatggcctgggtggagccagcgtgggccgctcactggctcatgcgacgccggaggagaaagcagagaaagaaaaaggcttggatttattgtgagagcctgagcggccctgctccttcagagcccacaccagggagggggcgcttatgccgccgtgggtgtgttcaagcactagccttggcttttgctcttcgttcatggaggcctcccggcacagaagtgacctcccagggacctcggcaaccaagttcttctggggccaagaggcgaagactcagagcggcactgggcccacagcctacccgatccgccctgcggttcccttcggccagtcccggctctctcaaggccaaacagagcatggccggaatcccgggccgagagagcaacgccccctccgttcccaccgtctcactgctgcccggcgctccgggcgggaacgcttcatcccgaactgaggcacaggttcccaacggacagggaagccctggcggctgcgtgtgcagttctcaggcttccccagcacctagggcagccgctcctccgcgcgcagcacgcggtccaacaccacggacggaggaagcagcatgggccgctatggccctgacgttcctactggtgttgctgacactcgcgaccctgtgcacccggctacatagaaatttccggcgtggggagagtatctattggggacccacagctgacagccaggacacggtggcagcagtgttgaaacgcaggcttctgcagccgtccagaagggtgaaacgctctcgccgtcggccgttgctgccaccaacaccagatagcggaccagagggcgagagctccgaatag

SEQ ID NO: 236242 - DNA, 414 bp, Artificial Sequence
  derived and/or modified sequence
gccaagcaatcaatggctggcatacctggcagggagagtaatgctccctccgtgccgacggtgagtctgctgcctggggcaccagggggcaatgcatccagtcgcacagaggctcaggtgccaaatggccagggaccccgtgggctttgcctgttcaagtccgggttccccgggccgagtcggagtagccctagagctgctaggggcccgacacctaggaccgaagaagccgcatgggccgccatggccctcactttcttgctcgtgcttttgactctggccaccctatgcacccggttgcatcgcaacttccggaggggcgaaagcatttactgggggcccaccgcagactctcaggataccacccctcctccagcccacgacagcggccctgaaggggaatcctccgaatag

SEQ ID NO: 236243 - DNA, 1182 bp, Artificial Sequence
  derived and/or modified sequence
atggcccctcctccacccagcccccagctgctgctgctggccgccctggcccggctgctgggccccagcgaggtgatggccggccctgctgaggaggccggggcccactgcccagagagcctgtggcccctgcccccccaggtgagcccccgggtgacctacaccagggtgtccccaggccaggctgaagatgtgaccttcctgtaccacccctgtgcccacccctggctgaagctgcagctggccctgctggcctatgcctgcatggccaaccccagcctgaccccagacttcagcctgacccaggaccggcccctggtgctgacagcctggggcctggccctggagatggcctgggtggagcccgcctgggccgcccactggctgatgagaagaagaagaaggaagcagaggaagaagaaggcctggatctactgtgagagcctgagcggccctgcccccagcgagcccaccccaggccggggccgcctgtgccggcggggctgtgtgcaggccctggccctggcctttgccctgcgctcctggaggcctcctggaacagaggtgaccagccagggcccccggcagcccagcagcagcggggccaagagaagaaggctgcgggccgccctgggcccccagcccaccaggtctgccctgcgcttccccagcgccagccctggcagcctgaaggccaagcagagcatggccggcatccctggccgggagagcaatgcccccagcgtgcccaccgtgtccctgctgcccggggcccctggaggaaatgccagcagcaggacagaggcccaggtgcccaacggccagggcagccctgggggctgtgtgtgcagcagccaggccagccctgcccccagggctgctgccccacccagggctgcccggggccccacccccaggacagaggaggccgcctgggccgccatggccctgaccttcctgctggtgctgctgaccctggccaccctgtgcacccggctgcacaggaacttccggcggggggagagcatctactggggccccacagctgacagccaggacacagtggccgctgtgctgaagaggcggctgctgcagcccagccggcgggtgaagaggagcagaagaagacccctgctgccccccaccccagattctggccctgagggggagagcagcgagtag

SEQ ID NO: 236244 - DNA, 414 bp, Artificial Sequence
  derived and/or modified sequence
gccaagcagagcatggccggcatccctggccgggagagcaatgcccccagcgtgcccaccgtgtccctgctgcccggggcccctggaggaaatgccagcagcaggacagaggcccaggtgcccaacggccagggcccccggggcctgtgcctcttcaagagcggcttccctggccccagccgcagcagcccccgggccgcccggggccccacccccaggacagaggaggccgcctgggccgccatggccctgaccttcctgctggtgctgctgaccctggccaccctgtgcacccggctgcacaggaacttcagaagaggagagagcatctactggggccccacagctgacagccaggacaccaccccacctccagcccatgattctggccctgagggggagagcagcgagtag

SEQ ID NO: 236245 - DNA, 1182 bp, Artificial Sequence
  derived and/or modified sequence
atggccccccccccccccagcccccagctgctgctgctggccgcccttgcacgtcttctcgggcctagcgaggtgatggcgggacctgcagaagaagcaggagcacactgtccagaatctctgtggcccctgccccctcaggtctcccctagagtgacgtacaccagggtgtctccgggccaagcggaggatgtgacctttctctaccatccttgcgcccacccatggctcaagctgcagctggcgctgctcgcatacgcctgtatggccaaccctagtctgacacccgatttttcattgacgcaagatagaccattagtactcaccgcttggggcctggctctggagatggcctgggtagaaccggcatgggccgctcattggcttatgagacgaagaagacgcaaacaaaggaaaaagaaggcatggatttattgcgagtccctgagtgggccagcccccagcgagccaactcctggtcgcgggcgtctgtgccgtaggggctgcgttcaggccctggccttagcatttgcactaagatcttggagacctccgggaactgaggttacctcccagggcccgcggcagccatccagctccggagccaagcgtcgaaggctcagagccgcattaggtccacagccaactagaagcgccctgaggttcccctccgcatctcctggatcccttaaagctaagcagtctatggctggcatccctggtcgagaaagcaatgccccctctgttcctacggtcagcctcctccctggggccccgggaggtaatgctagctcacgaactgaggcccaagtcccaaacggacagggctcccccgggggctgcgtttgctctagccaggcgtcacccgcccctagggcagcagccccacccagggccgcacggggccctacaccccgaaccgaggaggccgcctgggccgctatggctcttacgtttctgctggtgctgctgacactggccacactgtgcacgcgtctccacagaaacttccgacggggagagtctatctactggggcccaacagcagactcgcaggacacagttgccgcagtgttgaagcgacgacttttgcagccctcgcgacgggtgaaaagatccagaagaaggcctctgctcccgcccacacccgacagtggcccagagggcgagagctctgagtag

SEQ ID NO: 236246 - DNA, 414 bp, Artificial Sequence
  derived and/or modified sequence
gccaagcagagcatggccggcatccccggccgggagagcaacgccccgtctgtcccgactgtgagcctgctgcccggtgccccaggcggcaacgcaagtagcaggacggaggcacaggtgccaaacggccaggggccaagaggcctgtgtcttttcaagtctggctttccaggcccaagtagaagcagtccccgcgctgcaagaggccccaccccgcgcaccgaagaagccgcatgggctgccatggccttgacatttctgctagttcttctcactctggcaacactttgcacccgccttcacagaaattttcgcagaggtgagagcatatactgggggcccactgccgattctcaagatacaactccaccgcccgcccatgattccgggcccgagggcgagtccagcgagtag

SEQ ID NO: 236247 - DNA, 1182 bp, Artificial Sequence
  derived and/or modified sequence
atggctccccctccccctagccctcagctgctattgctagccgctttagctcggctcctgggaccgtccgaagtcatggccggacccgctgaagaggccggagcccactgcccggagtccctgtggcctctcccccctcaggtgagtcccagggtaacctacaccagggtctctcccggtcaggcggaggatgtcacgtttttgtaccatccctgcgcgcatccctggctaaaactgcaactagctctcctcgcctacgcgtgcatggctaacccctcccttacacccgatttttcgctgacccaggaccggcctcttgtattgaccgcatggggtctggcgctagaaatggcatgggtggagcctgcttgggcggcacattggttgatgcgtaggaggcgtcggaagcagagaaaaaaaaaggcctggatttactgcgaaagcctgagcgggcctgccccttctgagcccactcctggcagggggaggctgtgcagacgcggttgtgtacaggccctggctctggcgtttgccctacggtcctggcgcccaccaggcaccgaagtgacatcccagggcccaagacagccaagctcgagcggtgccaagcggaggaggctgcgcgctgcattgggtcctcaacctacaagatccgccctaaggtttccaagtgcgagcccagggtccctgaaggctaaacaatcaatggccggtatccccggtagggagagcaacgccccaagcgtcccaacagtgagcctgctacccggagctcccggaggtaatgcctctagtagaaccgaggcgcaagtgcctaatggtcaagggtcacctggtggatgcgtctgctctagtcaggcctcacccgctcccagagccgcagctcctccccgagccgctagaggcccaactccccgtacagaagaagccgcttgggccgcaatggcgctgacctttctcttagtgctcttgactctagccaccttgtgcactcgattgcatcggaattttcggagaggtgaatctatctactgggggccaaccgcggattcgcaggacactgttgccgcagtccttaagcggagactgctgcagcccagtcgcagggtaaagagatcccgcagaagacccctgctccctccaactcccgatagtggcccagagggcgaatcttcagagtag

SEQ ID NO: 236248 - DNA, 414 bp, Artificial Sequence
  derived and/or modified sequence
gctaaacagagcatggccggaatccctggcagggaatcaaatgcccctagcgtccccacggtgagtctattgcccggagccccagggggaaacgcttcatcgcgcaccgaggcccaggtgcccaatgggcagggccctcggggactgtgcttgtttaagtcaggatttccaggacccagccgtagctcaccacgggcagccagagggccaacccctcgaacggaagaggccgcttgggccgcaatggctctgacttttttgctggtactgttgactttagcaaccctgtgcacacgtttgcatcgaaatttcagaaggggggagagtatctactgggggccaaccgccgactcccaagatacaacaccacctcctgctcacgacagcgggcctgaaggcgagtctagcgagtag

SEQ ID NO: 236249 - DNA, 1450 bp, Artificial Sequence
  derived and/or modified sequence
agcggctgggcggcgggccgggcccggggccgcttggaatggcgcctcctccgccttcgccccaactgcttctcctggcagccctcgcgaggctcctgggtcccagcgaggtgatggctggaccggcggaggaggcgggagcccattgtcccgagagcctgtggcctctgcctccgcaggtgtcaccaagagtgacctacacacgagtgagcccagggcaggctgaggatgtcaccttcctctaccacccctgtgcccatccctggctgaagctccagcttgccctcctggcctatgcttgtatggctaacccttccctcacccctgacttcagcctcacgcaggatcggcccctggtgctgactgcatgggggctggcgctggagatggcctgggtagagccagcctgggctgcccactggctgatgaggaggcggaggaggaagcagaggaagaagaaggcatggatctactgtgaaagcctttcagggcctgctccctccgagccaactcccggtagagggaggctgtgccgaagagggtgtgtgcaggccctggctctggcctttgctctgcggagctggcggccccctggcacagaggtgacatctcaagggcccaggcagccctcttctagtggtgccaagaggcggaggctgcgggctgcccttggtccccagcccactcgctcagccctgaggtttccctctgcttccccagggagcttgaaggccaagcagtccatggcgggaatccctggtagggagagtaatgccccatctgtgcccactgtctccctgctgccgggggcgcctggaggcaatgccagctccaggacagaggctcaggtgcccaacgggcaaggcagcccagggggctgtgtctgttcaagtcaggcttccccggcccctcgcgcagcagcgcctccacgggcagcccggggccccaccccacgcactgaagaggccgcctgggctgccatggccctgaccttcctgctggtgctgctcaccctggccacgctctgcacacggctgcacagaaacttccgacgcggggagagcatctactgggggcccacagcggacagccaggacacagtggctgctgtgctgaagcggaggctgctgcagccctcgcgccgggtcaagcgctcgcgccggagacccctcctcccgcccacgccggacagcggcccggaaggcgagagctcggagtgacggcctgggacctgccactgtggcgtgcggctcctccccgcgccgcgaggccgcgacctctgccacgtggaccgcgcgcggggcgctccctggtggcgatggcgcggcactggccgagcactgcgggggctttcctccttgttggttgctgagtgggcggccaaggggagaaaaggagccgcttctgcctcccttgccaaaactccgtttctaattaaattatttttagt

SEQ ID NO: 236250 - DNA, 414 bp, Artificial Sequence
  derived and/or modified sequence
gccaagcagtccatggcgggaatccctggtagggagagtaatgccccatctgtgcccactgtctccctgctgccgggggcgcctggaggcaatgccagctccaggacagaggctcaggtgcccaacgggcaaggccccagggggctgtgtctgttcaagtcaggcttccccggcccctcgcgcagcagcccacgggcagcccggggccccaccccacgcactgaagaggccgcctgggctgccatggccctgaccttcctgctggtgctgctcaccctggccacgctctgcacacggctgcacagaaacttccgacgcggggagagcatctactgggggcccacagcggacagccaggacacaacccctcctcccgcccacgacagcggcccggaaggcgagagctcggagtga

SEQ ID NO: 236251 - DNA, 468 bp, Artificial Sequence
  derived and/or modified sequence
atgggaatccgacaacagctcaggctccccacccgtactgcacaaccactcactagcttgccttgtccaaggaaaacaagggcgcccagcagactggaggcagtcgccgcgattgccggcaccgagccggcctcttccagccccaccatgccactcccgctgatggccccaagcgagaagttgctttctcctcccgagacttcaagggactttagaagcccccctccactgccaccccgcctgcgtgagatcccccagccacaacagcatcggggaccggagagaggcgtcccagccccacgggctccttgtcacccaccctggctaagtcctggaaggcctcccagatcccctgatccagccctgcaccccctggccctgccgagccctctgtggggggacagcggtgttactggcaagaaggtgaaaggcgccggcggcggcgggtggggcaaggggttcttttag

SEQ ID NO: 236252 - DNA, 468 bp, Artificial Sequence
  derived and/or modified sequence
atgggcatccggcagcagctgcggctgcccaccaggacagcccagcccctgaccagcctgccctgccccaggaagacccgggcccccagccggctggaggccgtggccgccatcgccggcacagagcccgccagcagcagccccaccatgcccctgcccctgatggcccccagcgagaagctgctgagccccccagagaccagccgggacttccgcagccccccacccctgcccccccggctgcgggagatcccccagccccagcagcaccggggccctgagcggggcgtgcctgccccccgggccccctgccaccccccctggctgagccctggccggccccccaggagcccagaccctgccctgcaccccctggccctgcccagccccctgtggggagacagcggcgtgacaggcaagaaggtgaagggagctgggggcggcggctggggcaagggcttcttctag

SEQ ID NO: 236253 - DNA, 468 bp, Artificial Sequence
  derived and/or modified sequence
atgggcatccggcagcagctgcggctgcccacccggaccgcccagccattaacgagtctcccgtgtcccagaaagacaagagcgccgagtcgcttagaggctgtcgctgccatcgccggtaccgagccagctagttcatcacccaccatgccactcccgcttatggctccgagcgagaaactgctaagtccacccgagactagcagggactttcgaagtccaccacctcttcccccccggctaagggagattccccagcctcagcagcaccgcggccctgagagaggagtgccagcccctcgggccccatgccatcctccatggctgtctcccgggcgacctcctcgttccccagaccccgcgctgcatcccctggccctccccagccctctttggggagactcgggggtaactggcaaaaaagttaagggcgcaggcggcggaggctgggggaaggggttcttctag

SEQ ID NO: 236254 - DNA, 468 bp, Artificial Sequence
  derived and/or modified sequence
atgggcatccgccagcaactgcggctgcctactcgaaccgcgcagcctctaacatcactgccctgccctaggaagacgcgggctccttcgcgcctagaagccgtggctgccatcgcaggcactgagcccgctagctcttctcctacaatgccgctgcctctaatggccccaagtgagaagctgctttccccacccgaaactagcagggattttcggtcgcctccccctcttccccctcgtttgagagagatcccccagccccagcaacatagaggtccggagcgaggggtgcctgcacctagagccccatgccatccaccttggcttagccctggtcgccctccaagatcacccgacccagccctacacccactcgctttgccttctcctctatggggcgatagtggagtgactgggaagaaggtcaagggagccggaggcggtggctgggggaagggcttcttttag

SEQ ID NO: 236255 - DNA, 468 bp, Artificial Sequence
  derived and/or modified sequence
atgggcatcagacagcagctgagactgcccaccagaaccgcccagcccctgaccagcctgccctgccccagaaagaccagagcccccagcagactggaggccgtggccgccatcgccggcaccgagcccgccagcagcagccccaccatgcccctgcccctgatggcccccagcgagaagctgctgagcccccccgagaccagcagagacttcagaagccccccccccctgccccccagactgagagagatcccccagccccagcagcacagaggccccgagagaggcgtgcccgcccccagagccccctgccaccccccctggctgagccccggcagaccccccagaagccccgaccccgccctgcaccccctggccctgcccagccccctgtggggcgacagcggcgtgaccggcaagaaggtgaagggcgccggcggcggcggctggggcaagggcttcttctag

SEQ ID NO: 236256 - protein, 423 aa, Artificial Sequence
  derived and/or modified sequence
MQQEGGPVRSAPCRTGTLEGSRQGSPGHRKRASPKGSLSSAQPHSWMLTPSPLNSHCAHREPISSSPQPVANGPKQKKKSNWRSTTRLRIIRLRDRLEPRPLAILEDYADPFDVQETGEGSAGASGAPEKVPENDGYMEPYEAQKMMAEIRGSKETATQPLPLYDTPYEPEEDGATAEGEGAPWPRESRLPEDDERPPEEYDQPWEWKKERISKAFAVDIKVIKDLPWPPPVGQLDSSPSLPDGDRDISGPASPLPEPSLEDSSAQFEGPEKSCLSPGREEKGRLPPRLSAGNPKSAKPLSMEPSSPLGEWTDPALPLENQVWYHGAISRTDAENLLRLCKEASYLVRNSETSKNDFSLSLKSSQGFMHMKLSRTKEHKYVLGQNSPPFSSVPEIVHHYASRKLPIKGAEHMSLLYPVAIRTL

SEQ ID NO: 236257 - protein, 433 aa, Artificial Sequence
  derived and/or modified sequence
MVAQSLSDAHHALTIMLSERLWLGLELLNFTRRKISSDPPPYNFLEAREAALGHRWRMQQEGGPVRSAPCRTGTLEGSRQGSPGHRKRASPKGSLSSAQPHSWMLTPSPLNSHCAHREPISSSPQPVANGPKQKKKSNWRSTTRLRIIRLRDRLEPRPLAILEDYADPFDVQETGEGSAGASGAPEKVPENDGYMEPYEAQKMMAEIRGSKETATQPLPLYDTPYEPEEDGATAEGEGAPWPRESRLPEDDERPPEEYDQPWEWKKERISKAFAAQFEGPEKSCLSPGREEKGRLPPRLSAGNPKSAKPLSMEPSSPLGEWTDPALPLENQVWYHGAISRTDAENLLRLCKEASYLVRNSETSKNDFSLSLKSSQGFMHMKLSRTKEHKYVLGQNSPPFSSVPEIVHHYASRKLPIKGAEHMSLLYPVAIRTL

SEQ ID NO: 236258 - protein, 369 aa, Artificial Sequence
  derived and/or modified sequence
MQQEGGPVRSAPCRTGTLEGSRQGSPGHRKRASPKGSLSSAQPHSWMLTPSPLNSHCAHREPISSSPQPVANGPKQKKKSNWRSTTRLRIIRLRDRLEPRPLAILEDYADPFDVQETGEGSAGASGAPEKVPENDGYMEPYEAQKMMAEIRGSKETATQPLPLYDTPYEPEEDGATAEGEGAPWPRESRLPEDDERPPEEYDQPWEWKKERISKAFAVDIKVIKDLPWPPPVGQLDSSPSLPDGDRDISGPASPLPEPSLEDSSAQFEGPEKSCLSPGREEKGRLPPRLSAGNPKSAKPLSMEPSSPLGEWTDPALPLENQVWYHGAISRTDAENLSGCAKRPATWCATVRPARMTSPSPSRAARDSCT

SEQ ID NO: 236259 - DNA, 1272 bp, Artificial Sequence
  derived and/or modified sequence
atgcagcaggagggcggccccgtgagaagcgccccctgcagaaccggcaccctggagggcagcagacagggcagccccggccacagaaagagagccagccccaagggcagcctgagcagcgcccagccccacagctggatgctgacccccagccccctgaacagccactgcgcccacagagagcccatcagcagcagcccccagcccgtggccaacggccccaagcagaagaagaagagcaactggagaagcaccaccagactgagaatcatcagactgagagacagactggagcccagacccctggccatcctggaggactacgccgaccccttcgacgtgcaggagaccggcgagggcagcgccggcgccagcggcgcccccgagaaggtgcccgagaacgacggctacatggagccctacgaggcccagaagatgatggccgagatcagaggcagcaaggagaccgccacccagcccctgcccctgtacgacaccccctacgagcccgaggaggacggcgccaccgccgagggcgagggcgccccctggcccagagagagcagactgcccgaggacgacgagagaccccccgaggagtacgaccagccctgggagtggaagaaggagagaatcagcaaggccttcgccgtggacatcaaggtgatcaaggacctgccctggcccccccccgtgggccagctggacagcagccccagcctgcccgacggcgacagagacatcagcggccccgccagccccctgcccgagcccagcctggaggacagcagcgcccagttcgagggccccgagaagagctgcctgagccccggcagagaggagaagggcagactgccccccagactgagcgccggcaaccccaagagcgccaagcccctgagcatggagcccagcagccccctgggcgagtggaccgaccccgccctgcccctggagaaccaggtgtggtaccacggcgccatcagcagaaccgacgccgagaacctgctgagactgtgcaaggaggccagctacctggtgagaaacagcgagaccagcaagaacgacttcagcctgagcctgaagagcagccagggcttcatgcacatgaagctgagcagaaccaaggagcacaagtacgtgctgggccagaacagcccccccttcagcagcgtgcccgagatcgtgcaccactacgccagcagaaagctgcccatcaagggcgccgagcacatgagcctgctgtaccccgtggccatcagaaccctgtag

SEQ ID NO: 236260 - DNA, 1302 bp, Artificial Sequence
  derived and/or modified sequence
atggtggcccagagcctgagcgacgcccaccacgccctgaccatcatgctgagcgagagactgtggctgggcctggagctgctgaacttcaccagaagaaagatcagcagcgacccccccccctacaacttcctggaggccagagaggccgccctgggccacagatggagaatgcagcaggagggcggccccgtgagaagcgccccctgcagaaccggcaccctggagggcagcagacagggcagccccggccacagaaagagagccagccccaagggcagcctgagcagcgcccagccccacagctggatgctgacccccagccccctgaacagccactgcgcccacagagagcccatcagcagcagcccccagcccgtggccaacggccccaagcagaagaagaagagcaactggagaagcaccaccagactgagaatcatcagactgagagacagactggagcccagacccctggccatcctggaggactacgccgaccccttcgacgtgcaggagaccggcgagggcagcgccggcgccagcggcgcccccgagaaggtgcccgagaacgacggctacatggagccctacgaggcccagaagatgatggccgagatcagaggcagcaaggagaccgccacccagcccctgcccctgtacgacaccccctacgagcccgaggaggacggcgccaccgccgagggcgagggcgccccctggcccagagagagcagactgcccgaggacgacgagagaccccccgaggagtacgaccagccctgggagtggaagaaggagagaatcagcaaggccttcgccgcccagttcgagggccccgagaagagctgcctgagccccggcagagaggagaagggcagactgccccccagactgagcgccggcaaccccaagagcgccaagcccctgagcatggagcccagcagccccctgggcgagtggaccgaccccgccctgcccctggagaaccaggtgtggtaccacggcgccatcagcagaaccgacgccgagaacctgctgagactgtgcaaggaggccagctacctggtgagaaacagcgagaccagcaagaacgacttcagcctgagcctgaagagcagccagggcttcatgcacatgaagctgagcagaaccaaggagcacaagtacgtgctgggccagaacagcccccccttcagcagcgtgcccgagatcgtgcaccactacgccagcagaaagctgcccatcaagggcgccgagcacatgagcctgctgtaccccgtggccatcagaaccctgtag

SEQ ID NO: 236261 - DNA, 1110 bp, Artificial Sequence
  derived and/or modified sequence
atgcagcaggagggcggccccgtgagaagcgccccctgcagaaccggcaccctggagggcagcagacagggcagccccggccacagaaagagagccagccccaagggcagcctgagcagcgcccagccccacagctggatgctgacccccagccccctgaacagccactgcgcccacagagagcccatcagcagcagcccccagcccgtggccaacggccccaagcagaagaagaagagcaactggagaagcaccaccagactgagaatcatcagactgagagacagactggagcccagacccctggccatcctggaggactacgccgaccccttcgacgtgcaggagaccggcgagggcagcgccggcgccagcggcgcccccgagaaggtgcccgagaacgacggctacatggagccctacgaggcccagaagatgatggccgagatcagaggcagcaaggagaccgccacccagcccctgcccctgtacgacaccccctacgagcccgaggaggacggcgccaccgccgagggcgagggcgccccctggcccagagagagcagactgcccgaggacgacgagagaccccccgaggagtacgaccagccctgggagtggaagaaggagagaatcagcaaggccttcgccgtggacatcaaggtgatcaaggacctgccctggcccccccccgtgggccagctggacagcagccccagcctgcccgacggcgacagagacatcagcggccccgccagccccctgcccgagcccagcctggaggacagcagcgcccagttcgagggccccgagaagagctgcctgagccccggcagagaggagaagggcagactgccccccagactgagcgccggcaaccccaagagcgccaagcccctgagcatggagcccagcagccccctgggcgagtggaccgaccccgccctgcccctggagaaccaggtgtggtaccacggcgccatcagcagaaccgacgccgagaacctgagcggctgcgccaagagacccgccacctggtgcgccaccgtgagacccgccagaatgaccagccccagccccagcagagccgccagagacagctgcacctag

SEQ ID NO: 236262 - DNA, 1272 bp, Artificial Sequence
  derived and/or modified sequence
atgcagcaggagggtggacctgttcgctcggcgccatgccgaaccggcacactcgaaggcagccgccaagggagcccaggacataggaagcgtgcttctcctaaaggatcactctcaagtgcgcagccacatagctggatgcttaccccatcacctctgaacagccattgcgctcacagagagccaatctcaagttcacctcaacccgttgccaatgggcctaagcagaagaagaagtctaactggcgaagcacaacccgccttcgaattatccgcctgcgggaccgcttggagcctcggcccctcgccatactcgaggattacgccgatccgtttgatgttcaggagactggagaaggatcagcgggtgctagcggagctcccgaaaaggtccctgagaacgacggatacatggagccatacgaggctcagaagatgatggccgagatcagaggcagtaaggagaccgcaacgcagccacttccactgtatgacacaccctatgagcctgaggaagacggagctactgctgagggagaaggggcgccatggcctagggaatcacgcctcccggaggatgatgagcggcccccagaagaatatgaccagccatgggagtggaaaaaagaacgtattagtaaagcatttgcggtggatataaaggtgatcaaggatcttccttggccgccaccagtcggacagctagacagcagcccttcactgcctgatggtgacagagatatctcaggcccagcctctcctctgccagaaccaagtctagaggatagctccgcacaattcgagggccccgagaagagctgcctgtctcctgggcgggaagaaaagggcaggctgccccccagactttctgccgggaacccaaagtccgctaagccgctgtctatggaacccagctccccgttaggcgagtggacagatccggcactcccactggagaaccaggtctggtaccacggggctatctccaggaccgatgccgagaacttgctgcggctgtgcaaagaagcatcatacctcgtgcggaatagcgaaacatctaagaacgatttcagcctgtccctaaagagctcccaggggttcatgcatatgaagctctctcgtactaaagaacataagtatgtgctgggccagaattcccccccattcagcagcgtccctgaaatcgttcaccattatgcaagtcgcaaactgcctattaaaggcgcagaacatatgagccttttgtaccctgtcgccatccgaaccctgtag

SEQ ID NO: 236263 - DNA, 1302 bp, Artificial Sequence
  derived and/or modified sequence
atggtggcccagtccctgtctgacgctcaccacgctttaactatcatgctctcggagcgactttggctcgggctggagctgctaaattttaccagacgtaaaatctcttcggaccctccaccttataatttcctggaggctagagaggccgccctcggtcatcggtggagaatgcagcaagaaggcggcccagtgaggtcagctccgtgtagaacgggcacgctggagggttcaagacaaggatctccgggacataggaagcgggcttcccccaagggctcccttagcagtgcacaaccccatagctggatgcttaccccctctccattaaacagtcactgtgcccatcgcgagcccataagttcttccccacagcccgtcgctaacggccctaagcagaaaaagaagtccaactggagatccacaaccagacttcggataatccgcttgcgcgatcggctggagccaagaccactcgccatattggaggattacgcggatccgttcgacgtgcaggagactggcgagggaagtgcgggtgcaagcggtgcacctgaaaaggttcccgagaacgatgggtacatggaaccttacgaggcacagaagatgatggccgaaattcgcggcagcaaggagactgccacccagcctctacccttgtacgacaccccgtacgagcccgaggaagacggagcgacagcggagggcgagggggccccttggccaagggagagcaggctgcccgaggatgatgaaaggccacctgaggaatacgatcagccttgggagtggaaaaaggaacggatctctaaggcttttgcagcacagttcgaaggacccgaaaagtcttgcctgtcgcctgggagggaagaaaaggggaggttgccaccaaggctgtctgccggtaaccctaaatccgctaaacccctctctatggagccgagctcgccgctgggagagtggaccgatcccgccctgcctctggaaaaccaggtctggtaccatggtgctatttctagaacagatgccgaaaatttattgaggctgtgtaaggaagcctcttatttggtacggaactccgaaacttccaaaaacgatttctcactgagcctaaagagttcccaaggctttatgcatatgaagttgtcacggacaaaggagcacaagtacgtgcttggccagaacagtcctccattttcctccgtgcctgagattgttcaccattatgcaagtagaaagttgcccattaaaggtgctgaacacatgtctttgctttatccggtagccatccggacactttag

SEQ ID NO: 236264 - DNA, 1110 bp, Artificial Sequence
  derived and/or modified sequence
atgcagcaggaagggggccccgtgagatccgcaccgtgtagaacagggacactggagggctcacgccagggctctcctgggcaccgcaagcgggcgagccctaaaggcagtctatcctctgcccagccacattcgtggatgttgaccccctccccattaaactcccactgtgctcaccgagaacctatttccagcagccctcagccggttgcgaatggtccgaaacaaaagaagaagtccaactggcgtagtacaaccaggttgagaataatcagacttcgggatcgcctagaaccaaggcctctggctatcctggaggactatgccgacccatttgatgtccaggagaccggagagggttcagcaggggcatctggggccccagagaaggtgcccgagaatgatggatacatggagccgtacgaggcccagaagatgatggcagaaattcgaggctcaaaggagactgccacgcaacctctacccctgtatgacacgccttatgaacctgaagaggacggcgcaactgctgaaggggagggcgcgccatggccacgtgaatcacggctgcccgaggatgatgagcggccacccgaggagtacgaccagccctgggaatggaagaaagagcgcatcagcaaggcgtttgctgttgacattaaagtgattaaggatctgccatggcctccacctgtgggccagttggattcctcaccgtctctccccgatggtgaccgtgacatctctggaccagccagcccactgcctgaaccaagtctggaggatagctctgctcagttcgagggcccagaaaaatcatgtctgtctcccggaagagaagagaaaggccggttgccaccgaggctgtctgctggtaacccaaagagcgcaaagcccttgagtatggaaccctcctcccccctcggcgagtggacagatccggcactgccattggagaatcaggtttggtaccatggagcgatctcacgaacagatgcggagaacctaagcgggtgcgctaaaagacctgcaacttggtgtgctactgtgcggccggccaggatgacctccccttcaccgagtagggccgctcgggactcctgcacatag

SEQ ID NO: 236265 - DNA, 1272 bp, Artificial Sequence
  derived and/or modified sequence
atgcagcaggagggcggccctgtgcgcagcgccccctgcaggacaggcaccctggagggcagccggcagggcagccctggccacaggaagagggccagccccaagggcagcctgagcagcgcccagccccacagctggatgctgacccccagccccctgaacagccactgtgcccaccgggagcccatcagcagcagcccccagcctgtggccaacggccccaagcagaagaagaagagcaactggaggagcaccacccggctgcgcatcatccggctgcgggaccggctggagccccggcccctggccatcctggaggactatgctgacccctttgatgtgcaggagactggagagggcagcgctggggccagcggggcccctgagaaggtgcctgaaaatgatggctacatggagccctatgaggcccagaagatgatggccgagatccggggcagcaaggagacagccacccagcccctgcccctgtatgacaccccctatgagcctgaggaggatggagccacagctgagggggagggcgccccctggccccgggagagccggctgcctgaagatgatgagaggcctcctgaggagtatgaccagccctgggagtggaagaaggagcgcatcagcaaggcctttgctgtggacatcaaggtgatcaaggacctgccctggcccccacctgtgggccagctggacagcagccccagcctgcctgatggagaccgggacatcagcggccctgccagccccctgcctgagcccagcctggaggacagcagcgcccagtttgagggccctgagaagagctgcctgagccctggccgggaggagaagggccgcctgcccccccggctgtctgctggcaaccccaagagcgccaagcccctgtccatggagcccagcagccccctgggggagtggacagatcctgccctgcccctggagaaccaggtgtggtaccatggagccatcagcaggacagatgctgagaacctgctgcggctgtgcaaggaggccagctacctggtgaggaacagcgagaccagcaagaatgacttcagcctgagcctgaagagcagccagggcttcatgcacatgaagctgagcaggaccaaggagcacaagtatgtgctgggccagaacagcccccccttcagctctgtgcctgagatcgtgcaccactacgccagcaggaagctgcccatcaagggagctgagcacatgagcctgctgtaccctgtggccatccgcaccctgtag

SEQ ID NO: 236266 - DNA, 1302 bp, Artificial Sequence
  derived and/or modified sequence
atggtggcccagagcctgagtgatgcccaccacgccctgaccatcatgctgtctgagcggctgtggctgggcctggagctgctgaacttcaccaggaggaagatcagcagtgaccccccaccctacaacttcctggaggcccgggaggccgccctgggccaccgctggaggatgcagcaggagggcggccctgtgcgcagcgccccctgcaggacaggcaccctggagggcagccggcagggcagccctggccacaggaagagggccagccccaagggcagcctgagcagcgcccagccccacagctggatgctgacccccagccccctgaacagccactgtgcccaccgggagcccatcagcagcagcccccagcctgtggccaacggccccaagcagaagaagaagagcaactggaggagcaccacccggctgcgcatcatccggctgcgggaccggctggagccccggcccctggccatcctggaggactatgctgacccctttgatgtgcaggagaccggggagggcagcgctggggccagcggggcccctgagaaggtgcctgaaaatgatggctacatggagccctatgaggcccagaagatgatggccgagatccggggcagcaaggagacagccacccagcccctgcccctgtatgacaccccctatgagccagaagaagatggagccacagctgagggggagggcgccccctggccccgggagagccggctgcctgaagatgatgagcggcccccagaggagtatgaccagccctgggagtggaagaaggagcgcatcagcaaggcctttgctgcccagtttgagggccctgagaagagctgcctgagccctggccgggaggagaagggccgcctgcccccccggctgtctgctggcaaccccaagagcgccaagcccctgtccatggagcccagcagccccctgggggagtggacagatcctgccctgcccctggagaaccaggtgtggtaccatggagccatcagcaggacagatgctgagaacctgctgcggctgtgcaaggaggccagctacctggtgaggaacagcgagaccagcaagaatgacttcagcctgagcctgaagagcagccagggcttcatgcacatgaagctgagcaggaccaaggagcacaagtatgtgctgggccagaacagcccccccttcagctctgtgcctgagatcgtgcaccactacgccagcaggaagctgcccatcaagggagctgagcacatgagcctgctgtaccctgtggccatccgcaccctgtag

SEQ ID NO: 236267 - DNA, 1110 bp, Artificial Sequence
  derived and/or modified sequence
atgcagcaggagggcggccctgtgcgcagcgccccctgcaggacaggcaccctggagggcagccggcagggcagccctggccacaggaagagggccagccccaagggcagcctgagcagcgcccagccccacagctggatgctgacccccagccccctgaacagccactgtgcccaccgggagcccatcagcagcagcccccagcctgtggccaacggccccaagcagaagaagaagagcaactggaggagcaccacccggctgcgcatcatccggctgcgggaccggctggagccccggcccctggccatcctggaggactatgctgacccctttgatgtgcaggagactggagagggcagcgctggggccagcggggcccctgagaaggtgcctgaaaatgatggctacatggagccctatgaggcccagaagatgatggccgagatccggggcagcaaggagacagccacccagcccctgcccctgtatgacaccccctatgagcctgaggaggatggagccacagctgagggggagggcgccccctggccccgggagagccggctgcctgaagatgatgagaggcctcctgaggagtatgaccagccctgggagtggaagaaggagcgcatcagcaaggcctttgctgtggacatcaaggtgatcaaggacctgccctggcccccacctgtgggccagctggacagcagccccagcctgcctgatggagaccgggacatcagcggccctgccagccccctgcctgagcccagcctggaggacagcagcgcccagtttgagggccctgagaagagctgcctgagccctggccgggaggagaagggccgcctgcccccccggctgtctgctggcaaccccaagagcgccaagcccctgtccatggagcccagcagccccctgggggagtggacagatcctgccctgcccctggagaaccaggtgtggtaccatggagccatcagcaggacagatgctgagaacctgagcggctgtgccaagaggcctgccacctggtgtgccaccgtgcggcctgccaggatgaccagccccagccccagcagagctgcccgggacagctgcacctag

SEQ ID NO: 236268 - DNA, 1272 bp, Artificial Sequence
  derived and/or modified sequence
atgcagcaggagggcggccccgtgcggagcgccccctgccggaccggaactctggaggggagccgacagggaagcccaggacaccgcaagcgggcctccccaaaggggagcctgtcttctgcccagccccactcttggatgctgactcccagccccttgaattcacactgcgcccatagagagcctatttctagctcgccccaacccgtggctaatgggccaaagcaaaagaaaaaatccaattggaggtccactacaagactcaggattatccgcctcagagatcgcctggagccacgccccctcgccatactggaagactacgccgacccttttgatgttcaggaaaccggcgagggctcggcaggggctagtggggcaccggagaaagtaccggaaaacgacggatacatggagccttacgaggcgcagaagatgatggccgagattagaggtagcaaagagaccgccacccaacccctgcccctgtacgacactccttacgagccagaggaggacggggcgactgccgagggagagggggccccttggcctcgcgagtctcgactcccagaggacgatgaaaggccaccggaggagtacgatcaaccatgggaatggaaaaaggagagaatctctaaggccttcgccgtcgacattaaagtgatcaaagaccttccctggcccccaccagtcggccagcttgattcctccccaagcctccccgatggcgatcgcgacatatctgggcctgccagtccactgccagagccctctctcgaggattcatctgctcagtttgaaggtccagaaaagtcatgtctatctccgggcagagaagaaaaaggacgactgccccccaggctctccgccggcaatcctaaaagcgccaagcccctgagtatggaaccttcctctccactgggagagtggacagacccggctctgcctcttgagaaccaggtgtggtaccatggagcgatttcaaggacagacgccgagaacctgctacggctctgcaaggaggcatcttatctggtgaggaactctgagaccagcaaaaatgatttttctttgagtctgaagtcgagccaaggatttatgcatatgaaactcagccggacaaaggaacacaagtatgtcctgggccagaactcgccccccttcagcagcgtcccagaaatcgtccatcactacgcatcacgaaagttgccaatcaagggtgctgaacatatgtctttactctatccagtggcaatcagaaccctgtag

SEQ ID NO: 236269 - DNA, 1302 bp, Artificial Sequence
  derived and/or modified sequence
atggtggcccagagcctgagcgacgcccaccacgccctgaccatcatgctcagcgagagactctggctgggtcttgagctgctgaattttactcgacggaagatatcaagcgatccccctccctataacttcctggaggccagagaagccgcccttggtcatagatggagaatgcagcaggaaggcggcccagtgaggagtgcaccctgcagaaccggaacattggaaggttcccggcagggatctcccgggcaccgcaagcgcgcttcccctaagggaagcctgtcatccgcacagcctcattcctggatgcttaccccttcccctcttaacagtcactgcgcccaccgggaacccataagctcttcgcctcagcctgtggccaacgggccgaagcaaaagaaaaagtctaattggaggtccacgactaggcttaggattattaggctgagggaccgccttgagccgaggcccttggcaatcctagaggattacgctgatccattcgacgtgcaggagaccggggagggaagcgcgggagcttctggagcacctgagaaggtgcctgaaaatgacggatatatggagccatatgaggcccagaaaatgatggcagaaatcagggggtcaaaagaaacagctactcagcccctccctctgtacgataccccatacgagccagaggaggacggcgccaccgccgagggagagggcgctccatggcctagggaatcccgactgcctgaagatgatgagcggcccccagaggaatatgatcaaccatgggagtggaaaaaggagcggatctcgaaggctttcgctgcacaattcgaggggcccgagaaatcttgtttgagccccgggagggaggagaaagggagactaccacctaggttaagcgctggaaatccaaagagcgccaagccgctctctatggagccaagtagccctctcggagagtggacggatccagcccttcccctcgagaatcaggtttggtaccacggcgctatttccaggaccgacgctgagaatttattaaggctgtgcaaggaagcgagttatctggtgcgtaatagtgagacgtctaagaatgactttagtctatcgttaaagagcagtcagggttttatgcacatgaagctgagtcgaactaaggagcataaatatgtgttggggcagaactcaccaccctttagctctgtgcccgagatcgtgcaccactatgcaagtaggaagctacccatcaagggagccgagcacatgtccctgctgtaccctgtcgctatacgaaccctgtag

SEQ ID NO: 236270 - DNA, 1110 bp, Artificial Sequence
  derived and/or modified sequence
atgcagcaggagggcggccccgtgcggagcgccccctgccggaccggtacattagaggggtcaaggcagggatcccccggtcatcggaagagagcttcccccaaaggctccttatcttccgcacagcctcattcatggatgctgacgccctctccactcaacagccactgtgcacaccgggagcctatctcctcgtcaccacagccggtagctaacggcccaaaacagaaaaaaaagtcaaattggcgctccaccactagactccggataatacgacttagggacaggttggaaccccggccactggccatcttggaggattacgctgatcctttcgatgtgcaggagacaggcgaaggaagtgccggcgcaagcggcgcccccgaaaaggtcccagaaaatgatgggtacatggaaccatacgaggcccagaaaatgatggcagaaattcgagggagcaaagaaacagccacgcagccattgccgctgtacgacaccccatacgaacccgaagaagacggcgccactgctgaaggcgaaggggcgccatggccccgcgaatcgcgccttccagaggatgatgagcgcccgccagaggagtacgatcagccatgggagtggaagaaggagaggattagtaaagcgttcgccgttgatataaaggtcattaaggatctaccctggcccccgcccgttggtcaattggactctagtccatccttgcctgacggagaccgtgatatcagtgggcccgcatctcccctgcctgaaccatcgctggaagattcaagcgcccagtttgaaggaccagaaaagtcctgcctgagtccgggccgcgaagagaaaggaagactcccccctcgcctcagtgccggcaaccccaagagcgccaagcccttgtcgatggagccatccagtcctctgggggagtggactgatccagcgttgccactggagaatcaggtttggtaccacggcgctatctcacgaacagacgcggagaatctgtccgggtgtgcaaagcgcccagcaacatggtgcgcaactgtcaggcccgccagaatgacgtctccctctccttctagagccgcacgcgactcctgtacttag

SEQ ID NO: 236271 - DNA, 1272 bp, Artificial Sequence
  derived and/or modified sequence
atgcagcaggagggtggaccagtcaggtccgccccatgcaggacagggaccctggaaggttctagacaaggctccccaggccatcgtaagcgggcatctcccaagggatccctgtcttccgctcagccccactcctggatgttgacgccgtctccattgaatagccattgcgcccatcgcgagcctatttcaagctctccccagccagtcgccaatggacctaagcaaaagaaaaagtcgaactggaggtctaccacacgcctccgcattatccggttgcgagacaggttggagccaagacctctggccattctggaggactacgccgatccatttgatgtgcaggagactggtgaaggtagcgctggagcctctggcgctcccgagaaggtcccagagaatgacggatacatggagccttatgaagcccagaaaatgatggccgagatcagaggctcaaaggagacagcaacccaaccactgccgctgtacgacacaccctatgagccggaggaggacggagcaacagctgaaggagagggcgctccctggcccagagagagtaggctccccgaagatgacgagcggccaccagaggaatacgaccagccatgggagtggaagaaagaacggatctctaaggcatttgccgtggatatcaaggtcataaaagacctaccttggccccctcccgtgggacagctcgattcgtcccctagtttaccggatggagaccgagacatatcaggccctgccagtccgctccctgagccctcacttgaggactcttccgcccaattcgaaggacccgaaaaaagctgtcttagccctggaagggaagaaaaggggaggctaccccctagattgtctgcgggtaatccaaaaagcgccaagcctctctcaatggagccctcttcaccactcggagagtggactgatccagccctcccgctcgagaatcaggtctggtatcatggggctatctcccggacagatgctgagaaccttctcaggctctgcaaggaggcatcttacctcgtgaggaattccgaaacctcgaagaacgattttagcctgtccctgaaaagtagccaaggcttcatgcacatgaagctgtctcggacgaaggagcacaaatatgtcttagggcagaattcaccaccattcagtagtgttccagagatcgtgcaccattatgctagtcgcaaactgcccatcaagggcgctgagcatatgtcactcctatacccagttgctatccgaaccttatag

SEQ ID NO: 236272 - DNA, 1302 bp, Artificial Sequence
  derived and/or modified sequence
atggtcgctcaatccttatccgatgctcaccacgcgctgactattatgctttccgagaggctctggctgggcctagaacttttgaacttcacaagacgtaagatcagttcagatccccctccctataacttcctggaagccagggaggccgctcttggtcacaggtggaggatgcaacaggagggcggtcctgttcgtagtgccccttgccgcaccgggacacttgaggggagcaggcaggggagccccggacataggaagcgtgcgagccccaagggcagtctatccagcgcccagccgcatagttggatgctcacaccatcccccctcaattctcattgcgcccatcgggaacctatatcatctagccctcaacccgtggccaacggcccaaagcaaaagaagaaatcgaactggagatctactacgcggctcaggatcatccgtttgagagatcgactcgaaccccgacccctggcgattctagaggactacgccgatccatttgatgttcaagagacaggggaaggatcggctggcgctagcggcgcaccagagaaagtacctgagaatgacgggtacatggaaccctacgaagcgcagaaaatgatggcagagattcgaggatctaaggagacggccactcagccacttcctctttacgacactccatacgagccagaggaagatggcgctacggcagagggcgagggagccccatggcctcgggagtcccgactccccgaggacgacgagcgcccaccagaggaatacgaccagccttgggaatggaagaaagaacgaatttcgaaagctttcgcagcacagttcgaagggccagaaaagagttgcctatctcctgggagggaggagaagggtcggttgcccccacgcttgagcgcgggtaacccaaaaagtgctaaaccccttagtatggagccctccagccctttgggcgagtggaccgacccagctctccctctagagaaccaggtctggtaccatggcgcaatttccagaacagacgccgaaaatctgcttcggctgtgcaaggaagcctcctacctcgttaggaattctgagacctctaaaaacgatttcagtctgagcttaaagtcgagccaggggttcatgcatatgaagctgagcaggaccaaagaacataagtatgttttaggacagaacagtcctccctttagctcagtgccggagattgtccaccactatgcttcccgaaagcttccaatcaagggagccgagcacatgagccttctgtatccagttgccatccgcacactgtag

SEQ ID NO: 236273 - DNA, 1110 bp, Artificial Sequence
  derived and/or modified sequence
atgcagcaggagggagggcctgttcgttcagctccttgccggaccggtactctcgagggctctcggcaaggaagccccggacacaggaagagggccagtcctaagggttctctctctagcgctcaacctcattcctggatgctcactccctctccgctaaactctcactgtgcacacagagaacccattagctcatccccccagccagtagctaacggacccaaacagaagaagaagagtaactggcgcagtacaacccggctccgcatcatcaggttgcgagacagactggagccccgtcccctggccattctggaggattacgctgacccattcgacgttcaagaaaccggcgaaggctctgccggagcgagcggcgctcctgagaaagtccccgagaacgatggttacatggagccatatgaggctcagaagatgatggcggagattcgcggttccaaggaaactgctacacagccgttgcccctctacgacacaccgtatgagcctgaagaagacggcgctaccgcagagggcgaaggcgcaccttggcctagggaatcacgcctgcctgaagatgacgaaagaccaccagaagagtacgatcagccatgggagtggaagaaagagcgcataagcaaggcattcgccgtcgacatcaaggtaattaaggacctcccatggcccccacccgtgggccagctggatagctcacctagcctgcccgacggggatcgcgatattagtggccctgcgagcccacttcccgagccctccctggaagacagctcagcccagttcgaaggccctgagaaatcttgtctaagccccggtagggaggaaaaaggtcgcctccctcctagattgagcgctggcaacccaaagtccgccaagccactctccatggaaccaagcagcccgttaggtgaatggacagatcctgctctacccctggagaaccaggtgtggtaccacggtgcaatttcccgtactgacgctgagaacctgagcggctgcgccaagaggccagcaacatggtgtgcaaccgtccgtcccgcacgcatgacaagccccagtccatcacgtgcagctcgggactcctgcacttag

SEQ ID NO: 236274 - DNA, 2500 bp, Artificial Sequence
  derived and/or modified sequence
gtactaaccactatacgatcacggcgagctaccgggacgccacgacgagcagctgacccagtgttgcccttctcgtctagatggcggccattccagctttcctaagcgtccattatctaccaggttcctcccgcacccacgttcacccgcaagagcagccgggagcgctgtggactccctagcccgaagtctcctcttggctgtacgcacggaccgcaaaagaagggacatgaaagtgctttgcaaccaaaggattcctatgaggccgggcctgcaatgatgtgaagcccctgaggacgcccgaatggtggcccaaagtctctctgacgctcaccatgccctgactatcatgctatctgaacgactttggctgggactggagctcttaaattttacaagaaggaaaatcagttctgacccaccaccatacaacttccttgaggcgcgagggtgtccacaatctccacagaggcggcattgggtcaccgctggaggatgcagcaggagggaggacccgtgaggagcgccccctgtaggaccggaaccctggagggttcgcggcaagggtctccggggcataggaaacgggcatcccccaagggtagtctgagttccgcccagccccattcctggatgctcacgccgtctcccctaaactcccactgcgctcaccgggagcccatctcatcatcaccacagcccgtggctaatgggccaaaacagaagaagaaaagcaactggcggagtacaacgcgcctgcgcattatcagactcagggacaggctggaacctcgccccctagctatcctagaagactatgcggacccgtttgatgttcaggagactggcgaaggctcagcaggagcttcaggagccccagagaaggtccctgaaaatgatggctacatggagccctatgaggctcaaaagatgatggccgagatccggggctccaaggagacagcaactcagcccttgcctctgtatgacacaccctatgagccagaggaggatggggccaccgcggaaggtgagggggccccctggccccgggagtcccgcctgccagaggatgatgagaggccccctgaggagtatgaccagccctgggagtggaagaaggagcggatttccaaagcctttgcagttgacattaaggtcatcaaagacctaccttggcctccacctgtgggacagctggacagcagcccctccctgcctgatggggacagggacatctccggtccagcctcgcccctccctgagcccagcctggaggacagcagcgcccagtttgaaggaccggagaagagctgcctgtcacctggccgggaggagaaggggcggctacctccccgactctctgcagggaaccccaagtcagccaaacccctaagcatggagcccagcagccccctgggggagtggacagatccagcactgcctctggaaaaccaggtctggtatcacggggccatcagccgaaccgacgccgagaacctgctccggctgtgcaaagaggccagctacctggtgcgcaacagtgagaccagcaagaatgacttctccctctccctcaagagcagccagggattcatgcacatgaagctgtcccgaaccaaggaacacaaatatgtgctgggccagaacagcccgcccttcagcagcgtccctgaaattgtgcaccactatgccagccgcaagctacccattaagggagccgaacacatgtccctgctctaccctgtggccatccggactctttagatgtgaagccagggcactgtgatagacctgtacccagccctgtgcccatcacctggctgagggctgtggctcttgccagggacgtgatctttcaaacctttcttctcctgggatccagtagaagctggagattccttaatttattctaaagggaaagggctcctggggccttggagtaaggggttgtctggagctggggaaagaggaatccctggagagaaaggatagcccctggaggaagggggttccagagctactgggatggtagggagtttcagactggcagctccggctcctttccgaccttagggcagaggtggtgacctccaccaccaccaccctctccccactgggtccgtgcgaggtagtgcagaattcggccccttggggcgccttaccacctctctgcctccgtccccgacttccaccccagaccgtcggagggctccgcccagagtctggtaagaggtttggggaagacaggcccctgggaagcagccggctttggggggtggggagagaaggggaggggctcgggcagagggaactgtgcagtccccaggccgccccggctccgggccagaggcaataaataaacccgatcctgccgggcacagccgcgcccgcgcctccggcgccgtccccgggctgacgggggagggagcggagaagcgagcgcagattctgcgtataaatcagctctggagcagacacagcccggctgtgaaaagca

SEQ ID NO: 236275 - DNA, 2019 bp, Artificial Sequence
  derived and/or modified sequence
atggtggcccaaagtctctctgacgctcaccatgccctgactatcatgctatctgaacgactttggctgggactggagctcttaaattttacaagaaggaaaatcagttctgacccaccaccatacaacttccttgaggcgcgagaggcggcattgggtcaccgctggaggatgcagcaggagggaggacccgtgaggagcgccccctgtaggaccggaaccctggagggttcgcggcaagggtctccggggcataggaaacgggcatcccccaagggtagtctgagttccgcccagccccattcctggatgctcacgccgtctcccctaaactcccactgcgctcaccgggagcccatctcatcatcaccacagcccgtggctaatgggccaaaacagaagaagaaaagcaactggcggagtacaacgcgcctgcgcattatcagactcagggacaggctggaacctcgccccctagctatcctagaagactatgcggacccgtttgatgttcaggagactggcgaaggctcagcaggagcttcaggagccccagagaaggtccctgaaaatgatggctacatggagccctatgaggctcaaaagatgatggccgagatccggggctccaaggagacagcaactcagcccttgcctctgtatgacacaccctatgagccagaggaggatggggccaccgcggaaggtgagggggccccctggccccgggagtcccgcctgccagaggatgatgagaggccccctgaggagtatgaccagccctgggagtggaagaaggagcggatttccaaagcctttgcagcccagtttgaaggaccggagaagagctgcctgtcacctggccgggaggagaaggggcggctacctccccgactctctgcagggaaccccaagtcagccaaacccctaagcatggagcccagcagccccctgggggagtggacagatccagcactgcctctggaaaaccaggtctggtatcacggggccatcagccgaaccgacgccgagaacctgctccggctgtgcaaagaggccagctacctggtgcgcaacagtgagaccagcaagaatgacttctccctctccctcaagagcagccagggattcatgcacatgaagctgtcccgaaccaaggaacacaaatatgtgctgggccagaacagcccgcccttcagcagcgtccctgaaattgtgcaccactatgccagccgcaagctacccattaagggagccgaacacatgtccctgctctaccctgtggccatccggactctttagatgtgaagccagggcactgtgatagacctgtacccagccctgtgcccatcacctggctgagggctgtggctcttgccagggacgtgatctttcaaacctttcttctcctgggatccagtagaagctggagattccttaatttattctaaagggaaagggctcctggggccttggagtaaggggttgtctggagctggggaaagaggaatccctggagagaaaggatagcccctggaggaagggggttccagagctactgggatggtagggagtttcagactggcagctccggctcctttccgaccttagggcagaggtggtgacctccaccaccaccaccctctccccactgggtccgtgcgaggtagtgcagaattcggccccttggggcgccttaccacctctctgcctccgtccccgacttccaccccagaccgtcggagggctccgcccagagtctggtaagaggtttggggaagacaggcccctgggaagcagccggctttggggggtggggagagaaggggaggggctcgggcagagggaactgtgcagtccccaggccgccccggctccgggccagaggcaataaataaacccgatcctgccgggcacagccgcgcccgcgcctccggcgccgtccccgggctgacgggggagggagcggagaagcgagcgcagattctgcgtataaatcagctctggagcagacacagc

SEQ ID NO: 236276 - DNA, 2500 bp, Artificial Sequence
  derived and/or modified sequence
gtactaaccactatacgatcacggcgagctaccgggacgccacgacgagcagctgacccagtgttgcccttctcgtctagatggcggccattccagctttcctaagcgtccattatctaccaggttcctcccgcacccacgttcacccgcaagagcagccgggagcgctgtggactccctagcccgaagtctcctcttggctgtacgcacggaccgcaaaagaagggacatgaaagtgctttgcaaccaaaggattcctatgaggccgggcctgcaatgatgtgaagcccctgaggacgcccgaatggtggcccaaagtctctctgacgctcaccatgccctgactatcatgctatctgaacgactttggctgggactggagctcttaaattttacaagaaggaaaatcagttctgacccaccaccatacaacttccttgaggcgcgagggtgtccacaatctccacagaggcggcattgggtcaccgctggaggatgcagcaggagggaggacccgtgaggagcgccccctgtaggaccggaaccctggagggttcgcggcaagggtctccggggcataggaaacgggcatcccccaagggtagtctgagttccgcccagccccattcctggatgctcacgccgtctcccctaaactcccactgcgctcaccgggagcccatctcatcatcaccacagcccgtggctaatgggccaaaacagaagaagaaaagcaactggcggagtacaacgcgcctgcgcattatcagactcagggacaggctggaacctcgccccctagctatcctagaagactatgcggacccgtttgatgttcaggagactggcgaaggctcagcaggagcttcaggagccccagagaaggtccctgaaaatgatggctacatggagccctatgaggctcaaaagatgatggccgagatccggggctccaaggagacagcaactcagcccttgcctctgtatgacacaccctatgagccagaggaggatggggccaccgcggaaggtgagggggccccctggccccgggagtcccgcctgccagaggatgatgagaggccccctgaggagtatgaccagccctgggagtggaagaaggagcggatttccaaagcctttgcagttgacattaaggtcatcaaagacctaccttggcctccacctgtgggacagctggacagcagcccctccctgcctgatggggacagggacatctccggtccagcctcgcccctccctgagcccagcctggaggacagcagcgcccagtttgaaggaccggagaagagctgcctgtcacctggccgggaggagaaggggcggctacctccccgactctctgcagggaaccccaagtcagccaaacccctaagcatggagcccagcagccccctgggggagtggacagatccagcactgcctctggaaaaccaggtctggtatcacggggccatcagccgaaccgacgccgagaacctgtccggctgtgcaaagaggccagctacctggtgcgcaacagtgagaccagcaagaatgacttctccctctccctcaagagcagccagggattcatgcacatgaagctgtcccgaaccaaggaacacaaatatgtgctgggccagaacagcccgcccttcagcagcgtccctgaaattgtgcaccactatgccagccgcaagctacccattaagggagccgaacacatgtccctgctctaccctgtggccatccggactctttagatgtgaagccagggcactgtgatagacctgtacccagccctgtgcccatcacctggctgagggctgtggctcttgccagggacgtgatctttcaaacctttcttctcctgggatccagtagaagctggagattccttaatttattctaaagggaaagggctcctggggccttggagtaaggggttgtctggagctggggaaagaggaatccctggagagaaaggatagcccctggaggaagggggttccagagctactgggatggtagggagtttcagactggcagctccggctcctttccgaccttagggcagaggtggtgacctccaccaccaccaccctctccccactgggtccgtgcgaggtagtgcagaattcggccccttggggcgccttaccacctctctgcctccgtccccgacttccaccccagaccgtcggagggctccgcccagagtctggtaagaggtttggggaagacaggcccctgggaagcagccggctttggggggtggggagagaaggggaggggctcgggcagagggaactgtgcagtccccaggccgccccggctccgggccagaggcaataaataaacccgatcctgccgggcacagccgcgcccgcgcctccggcgccgtccccgggctgacgggggagggagcggagaagcgagcgcagattctgcgtataaatcagctctggagcagacacagcccggctgtgaaaagcac

SEQ ID NO: 236277 - protein, 351 aa, Artificial Sequence
  derived and/or modified sequence
MAAAAGRSLLLLLSSRGGGGGGAGGCGALTAGCFPGLGVSRHRQQQHHRTVHQRIASWQNLGAVYCSTVVPSDDVTVVYQNGLPVISVRLPSRRERCQFTLKPISDSVGVFLRQLQEEDRGIDRVAIYSPDGVRVAASTGIDLLLLDDFKLVINDLTYHVRPPKRDLLSHENAATLNDVKTLVQQLYTTLCIEQHQLNKERELIERLEDLKEQLAPLEKVRIEISRKAEKRTTLVLWGGLAYMATQFGILARLTWWEYSWDIMEPVTYFITYGSAMAMYAYFVMTRQEYVYPEARDRQYLLFFHKGAKKSRFDLEKYNQLKDAIAQAEMDLKRLRDPLQVHLPLRQIGEKD

SEQ ID NO: 236278 - DNA, 1056 bp, Artificial Sequence
  derived and/or modified sequence
atggctgcagccgctggtcggtcgctactgctgctcctcagcagtcgcggcggtggcggcggcggtgccggggggtgtggcgcacttacagcgggctgtttccctgggctgggggtctcaaggcaccgccaacagcagcatcacagaacggttcatcagagaattgccagctggcagaatctgggcgctgtgtattgcagcacagtcgtcccctcagacgatgtaaccgtggtgtatcaaaacggacttccggtgattagcgtgcggctgccttctcggagggaacggtgtcagttcactctgaaacctatctcagattcagttggcgtgtttctgcgccagctgcaggaggaggataggggtatcgaccgggtggcaatctatagccccgacggagtgcgggtagccgcctcgacaggaattgatctgttgttactagatgatttcaagctcgtgataaacgatctgacctaccacgttaggccacccaagcgggatctgctatcacacgaaaacgcagcgacactcaacgatgtcaagacactggtccaacagctgtacacgactctgtgtattgagcaacaccaattaaacaaagagcgggagcttatcgagagactcgaggatttaaaggaacagttggcacctctggaaaaagtccggatagagatatctcgaaaggctgagaaacgcaccacactcgtgctttggggcggactggcctacatggccacacaattcgggattctggctagacttacgtggtgggagtatagctgggacattatggagcccgtgacatacttcatcacatacggatcagccatggctatgtatgcttacttcgtcatgacgcgtcaagaatatgtgtaccctgaggcgcgagacagacaatatctgttattttttcataagggggccaagaagtccagattcgacctggaaaagtacaatcagcttaaggatgcgatcgcgcaggctgaaatggacctgaagagactgcgagatcccctgcaggtgcacctgcccctgcgccagattggcgaaaaggactag

SEQ ID NO: 236279 - DNA, 1056 bp, Artificial Sequence
  derived and/or modified sequence
atggctgctgctgctggccgcagcctgctgctgctgctgagcagcagaggaggcggcggcggcggggccggcggctgtggggccctgacagctggctgcttccctggcctgggcgtgagccgccaccggcagcagcagcaccacaggacagtgcaccagagaattgcctcctggcagaacctgggcgctgtgtactgcagcacagtggtgcccagtgatgatgtgacagtggtgtaccagaatggcctgcccgtcatctctgtgcggctgcccagcagaagagagcgctgccagttcaccctgaagcccatcagtgacagcgtgggcgtcttcctgcggcagctgcaggaggaggaccggggcatcgacagagtggccatctacagcccagatggagtgcgggtggccgccagcactggaattgacctgctgctgctggatgacttcaagctggtgatcaatgacctgacctaccacgtgcggccccccaagagggacctgctgagccatgaaaatgctgccaccctgaatgatgtgaagaccctggtgcagcagctgtacaccaccctgtgcatcgagcagcaccagctgaacaaggagcgggagctgattgaaaggctggaggacctgaaggagcagctggcccccctggagaaggtgcgcatcgagatcagcaggaaggccgagaagaggaccaccctggtgctgtggggcggcctggcctacatggccacccagtttggcatcctggcccggctgacctggtgggagtacagctgggacatcatggagcctgtgacctacttcatcacctacggcagcgccatggccatgtatgcctactttgtgatgacccggcaggagtatgtgtacccagaggcccgggaccggcagtacctgctcttcttccacaagggggccaagaagagcagatttgacctggagaagtacaaccagctgaaggatgccatcgcccaggccgagatggacctgaagaggctgcgggaccccctgcaggtgcacctgcccctgcggcagattggagagaaggactag

SEQ ID NO: 236280 - DNA, 2949 bp, Artificial Sequence
  derived and/or modified sequence
ggcgccgtttccagttgagagatggcggccgccgcaggtagatcgctcctgctgctcctctcctctcggggcggcggcggcgggggcgccggcggctgcggggcgctgactgccggctgcttccctgggctgggcgtcagccgccaccggcagcagcagcaccaccggacggtacaccagaggatcgcttcctggcagaatttgggagctgtttattgcagcactgttgtgccctctgatgatgttacagtggtttatcaaaatgggttacctgtgatatctgtgaggctaccatcccggcgtgaacgctgtcagttcacactcaagcctatctctgactctgttggtgtatttttacgacaactgcaagaagaggatcggggaattgacagagttgctatctattcaccagatggtgttcgcgttgctgcttcaacaggaatagacctcctcctccttgatgactttaagctggtcattaatgacttaacataccacgtacgaccaccaaaaagagacctcttaagtcatgaaaatgcagcaacgctgaatgatgtaaagacattggtccagcaactatacaccacactgtgcattgagcagcaccagttaaacaaggaaagggagcttattgaaagactagaggatctcaaagagcagctggctcccctggaaaaggtacgaattgagattagcagaaaagctgagaagaggaccactttggtgctatggggtggccttgcctacatggccacacagtttggcattttggcccggcttacctggtgggaatattcctgggacatcatggagccagtaacatacttcatcacttatggaagtgccatggcaatgtatgcatattttgtaatgacacgccaggaatatgtttatccagaagccagagacagacaatacttactatttttccataaaggagccaaaaagtcacgttttgacctagagaaatacaatcaactcaaggatgcaattgctcaggcagaaatggaccttaagagactgagagacccattacaagtacatctgcctctccgacaaattggtgaaaaagattgatctgcaaaaagcctctgaatcctggcagaaggaacacctgtttgcctttttaattaaagcattgcaggtggaagctgggagccatgtggggggtagagcgtttttacctttaattataaaacaaaaacagaaaggatctgagggaagaagggaatgttaaaacctgaggatcaggcattgtggaatataagctcaaagggcttagtgaatattgtcttaaccaagtatctcagtttctggatgaaaatgatgcagttatatagttgagagattcataaagagaaaacaatgctgggggtgttcgtttcttgcatcttctttgcagagtcagcaaaagagtaacacaccagcaccccactcgactctatttgtttttaatttaactgtccctatttttgacataggagtaaataaatatactagaaaagcaaattctcatgatatgctaaaatatcattagcatttattttaaattggacccagtctctgcagagttaccaggaatctttccttccagcatccctttactgaccacctacctgtacctcttggttacactcattttttccatttgataattggaaccaacttataactgtttaataattgacactttagattatctcttaataccttcttaaatgtctatatatcccagtgctctggatcagtgtctaaaaatcactggcaacactgcatgaggttgttggttttgttttgttttattaattagtctttcacaggaggaataattgccctcctttatatacttatctattgataatcccctctccctccagaacacaaatcagagggaaagggggtgttcagctgtactaccaaatcaggaagatgtaaggtttacaaattggctaagaatcatggctctgtagccatttcaaccagaataattttattgctaatctgctttgtgtgacagcattccaggccagccagatgggactgccttgtctggaggctttgttcatctcgaaggacacacacttccacactgtttgtgagccctcccacctccacaacttcagttgtaaatcaagtgtgtggatctcaaagggtgcaatttatctttatataggaatacatttctagggcttccttcaagcccactctcttcaccctattttttcttatcttaaattgagagaaagagaattaatcttatactttgtcaaaacattttctaccatatttccagatgacatctgcgcttgaagagtcaaaggaatctgtgtctaatatcctgtttttaactgctgtaggggcaggatggaaaggatgatgggggctgccacaccactgattggccttttctttcacgtgattcatccttcctcattgtggcaaggagtttctttctctttttcttcctcctttgggatcattgtgtatgaaaagaaaaactttaaatgacaaacccagactccaggtgccttgcaaaggttgaaggccagccaggattgctgctgctgctgctactcctgccaacacccctttcattggcatgacggaatgaaaggatgcatgtctccacttcctgaccctccgcccacttccttctccctccaccacccccagtcgtcagctccttccctcatttatttttgttaagttgtgtgaattatttttaacccatttatcctgtttgtgcatagggtttttaagaagaaacagcacagtgcaacgagcaaatctttttggggtgtgtgggaagcaagggagggaggacatggagaaaagttctttaaacaaatagcaaactattgaacatgtgtaaaatcctgtatcatttatgaaatatgtataaaaagcaatgtaccttctggaacaataaatacttattcaatttttgaa

SEQ ID NO: 236281 - DNA, 1056 bp, Artificial Sequence
  derived and/or modified sequence
atggccgccgccgccggccggagcctgctgctgctgctgagcagcagaggcggcggcgggggcggggccggaggctgtggtgctctgacggccggctgttttccaggtttgggcgtctcacgacatcggcagcagcagcaccatcgaaccgtccaccagcgaatcgccagttggcagaatctgggcgctgtctattgtagtaccgtagtgccaagcgacgatgtaacagtcgtgtatcaaaacggcttgccggttatatctgtcaggctacccagcagaagagagcggtgccagtttacactgaagcccatatcagacagcgtgggggtgtttttgcggcagcttcaggaggaagatcgcggcatcgatagagtggcgatatactcaccggatggtgtccgcgtcgctgcctcaaccgggattgatctgctgctgctggatgactttaaactggttatcaatgatcttacctatcatgtgaggccccccaaacgagatctgctctcacatgaaaatgctgctaccctcaacgacgtgaagacgctggtccagcagctttacacaaccctgtgcattgaacaacaccagctgaataaagaacgggaactcattgaacggctggaggatctgaaggaacagctggcccccctcgaaaaagtccgaatcgagattagcagaaaagctgaaaagagaactactctggtgctatggggtggtttagcatacatggcaacccagtttgggatccttgccagactaacctggtgggaatattcctgggacatcatggagcctgtaacctattttattacttacggctccgccatggctatgtatgcttacttcgtcatgacaaggcaagaatatgtttatcccgaggctcgagaccggcagtatctgctcttcttccataagggtgcaaagaaaagcaggttcgatctagaaaaatataatcagctgaaggacgccatcgcccaggccgagatggacctcaaaagattgagagacccacttcaggtgcacctaccattaaggcagatcggcgagaaagactag

SEQ ID NO: 236282 - DNA, 1056 bp, Artificial Sequence
  derived and/or modified sequence
atggccgctgctgcaggacggtcgctgctcctgttgctgagttcacgcggaggcggtggcggaggagccggaggttgtggcgcacttaccgcgggatgtttcccaggtctcggcgtctcacgtcacaggcaacaacagcaccatcgaaccgttcaccagcggatcgcctcttggcaaaacctgggcgctgtctactgttccaccgttgtgccgtctgacgacgtcacggtggtttatcagaatggcctgcctgtgatctccgtcagactgcctagtcggcgagaacggtgccagtttacgctgaagcccatcagtgattccgtgggggtgtttctgagacaactccaggaggaggaccggggaatcgatcgggtcgctatttattctcctgatggagtgcgtgtggctgcctccactggtatcgatttgctgttgctcgatgacttcaaattagtgattaatgatctgacgtaccacgttaggccacctaaaagggatctcctctctcatgaaaacgctgctactctgaatgatgtgaagacactggtccagcaattgtataccactttgtgcattgagcagcaccagctgaacaaagaacgcgaactgatcgaaaggctcgaggacctcaaagagcagctcgcacccctagaaaaggtgagaatcgaaatctctcgtaaggcagaaaagagaacaacgctggtgctgtggggaggcctggcttacatggccacccagtttgggatcctggcaaggctcacttggtgggaatatagttgggacataatggaacccgtcacctactttataacctatggatcggctatggcaatgtacgcctactttgtgatgactcgccaggagtacgtttatcccgaagcccgagatcgacaatatcttttgtttttccacaaaggtgcaaagaaatctcggttcgatctcgaaaaatacaatcagctgaaggacgctattgcccaggctgaaatggacctgaagcgcttgagagaccctctgcaggtccatctgccactgaggcagatcggagagaaggactag

SEQ ID NO: 236283 - DNA, 1056 bp, Artificial Sequence
  derived and/or modified sequence
atggccgccgccgccggcagaagcctgctgctgctgctgagcagcagaggcggcggcggcggcggcgccggcggctgcggcgccctgaccgccggctgcttccccggcctgggcgtgagcagacacagacagcagcagcaccacagaaccgtgcaccagagaatcgccagctggcagaacctgggcgccgtgtactgcagcaccgtggtgcccagcgacgacgtgaccgtggtgtaccagaacggcctgcccgtgatcagcgtgagactgcccagcagaagagagagatgccagttcaccctgaagcccatcagcgacagcgtgggcgtgttcctgagacagctgcaggaggaggacagaggcatcgacagagtggccatctacagccccgacggcgtgagagtggccgccagcaccggcatcgacctgctgctgctggacgacttcaagctggtgatcaacgacctgacctaccacgtgagaccccccaagagagacctgctgagccacgagaacgccgccaccctgaacgacgtgaagaccctggtgcagcagctgtacaccaccctgtgcatcgagcagcaccagctgaacaaggagagagagctgatcgagagactggaggacctgaaggagcagctggcccccctggagaaggtgagaatcgagatcagcagaaaggccgagaagagaaccaccctggtgctgtggggcggcctggcctacatggccacccagttcggcatcctggccagactgacctggtgggagtacagctgggacatcatggagcccgtgacctacttcatcacctacggcagcgccatggccatgtacgcctacttcgtgatgaccagacaggagtacgtgtaccccgaggccagagacagacagtacctgctgttcttccacaagggcgccaagaagagcagattcgacctggagaagtacaaccagctgaaggacgccatcgcccaggccgagatggacctgaagagactgagagaccccctgcaggtgcacctgcccctgagacagatcggcgagaaggactag

SEQ ID NO: 236284 - protein, 425 aa, Artificial Sequence
  derived and/or modified sequence
MAIKKQKRCRKIRPVSAFISGSPQDMESQLGNLGIPPGWFSGLGGSQPTASGSWEGLSELPTHGYKLRHQTQGRPRPPRTTPPGPGRPSMPAPGTRQENGMATRLDEGLEDFFSRRVLEESSSYPRTLRTVRPGLSEAPLPPLQKKRRRGLFHFRRPRSFKGDRGPGSPTTGLLLPPPPPPPPTQESPPSPDPPSLGNNSSPCWSPEEESSLLPGFGGGRGPSFRRKMGPGPDQEGSTQAWQKRRSSDDAGPGSWKPPPPPQSTKPSFSAMRRAEATWHIAEESAPNHSCQSPSPASQDGEEEKEGTLFPERTLPARNAKLQDPALAPWPPKPVAVPRGRQPPQEPGVREEAEAGDAAPGVNKPRLRLSSQQDQEEPEVQGPPDPGRRTAPLKPKRTRRAQSCDKLEPDRRRPPDPTGTSEPGTD

SEQ ID NO: 236285 - protein, 1372 aa, Artificial Sequence
  derived and/or modified sequence
MAKPSVELTRELQDSIRRCLSQGAVLQQHHVKLETKPKKFEDRVLALTSWRLHLFLLKVPAKVESSFNVLEIRAFNTLSQNQILVETERGMVSMRLPSAESVDQVTRHVSSALSKVCPGPGCLIRRGNADTPEGPRDTSPNSETSTSTTHSVCGGFSETYAALCDYNGLHCREEVQWDVDTIYHAEDNREFNLLDFSHLESRDLALMVAALAYNQWFTKLYCKDLRLGSEVLEQVLHTLSKSGSLEELVLDNAGLKTDFVQKLAGVFGENGSCVLHALTLSHNPIEDKGFLSLSQQLLCFPSGLTKLCLAKTAISPRGLQALGQTFGANPAFASSLRYLDLSKNPGLLATDEANALYSFLAQPNALVHLDLSGTDCVIDLLLGALLHGCCSHLTYLNLARNSCSHRKGREAPPAFKQFFSSAYTLSHVNLSATKLPLEALRALLQGLSLNSHLSDLHLDLSSCELRSAGAQALQEQLGAVTCVGSLDLSDNGFDSDLLTLVPALGKNKSLKHLFLGKNFNVKAKTLEEILHKLVQLIQEEDCSLQSLSVADSRLKLRTSILINALGSNTCLAKVDLSGNGMEDIGAKMLSKALQINSSLRTILWDRNNTSALGFLDIARALESNHTLRFMSFPVSDISQAYRSAPERTEDVWQKIQWCLVRNNHSQTCPQEQAFRLQQGLVTSSAEQMLQRLCGRVQEEVRALRLCPLEPVQDELLYARDLIKDAKNSRALFPSLYELGHVLANDGPVRQRLESVASEVSKAVDKELQVILESMVSLTQELCPVAMRVAEGHNKMLSNVAERVTVPRNFIRGALLEQAGQDIQNKLDEVKLSVVTYLTSSIVDEILQELYHSHKSLARHLTQLRTLSDPPGCPGQGQDLSSRGRGRNHDHEETTDDELGTNIDTMAIKKQKRCRKIRPVSAFISGSPQDMESQLGNLGIPPGWFSGLGGSQPTASGSWEGLSELPTHGYKLRHQTQGRPRPPRTTPPGPGRPSMPAPGTRQENGMATRLDEGLEDFFSRRVLEESSSYPRTLRTVRPGLSEAPLPPLQKKRRRGLFHFRRPRSFKGDRGPGSPTTGLLLPPPPPPPPTQESPPSPDPPSLGNNSSPCWSPEEESSLLPGFGGGRGPSFRRKMGTEGSEPGEGGPAPGTAQQPRVHGVALPGLERAKGWSFDGKREGPGPDQEGSTQAWQKRRSSDDAGPGSWKPPPPPQSTKPSFSAMRRAEATWHIAEESAPNHSCQSPSPASQDGEEEKEGTLFPERTLPARNAKLQDPALAPWPPKPVAVPRGRQPPQEPGVREEAEAGDAAPGVNKPRLRLSSQQDQEEPEVQGPPDPGRRTAPLKPKRTRRAQSCDKLEPDRRRPPDPTGTSEPGTD

SEQ ID NO: 236286 - DNA, 1278 bp, Artificial Sequence
  derived and/or modified sequence
atggccatcaagaagcagaagagatgcagaaagatcagacccgtgagcgccttcatcagcggcagcccccaggacatggagagccagctgggcaacctgggcatcccccccggctggttcagcggcctgggcggcagccagcccaccgccagcggcagctgggagggcctgagcgagctgcccacccacggctacaagctgagacaccagacccagggcagacccagaccccccagaaccaccccccccggccccggcagacccagcatgcccgcccccggcaccagacaggagaacggcatggccaccagactggacgagggcctggaggacttcttcagcagaagagtgctggaggagagcagcagctaccccagaaccctgagaaccgtgagacccggcctgagcgaggcccccctgccccccctgcagaagaagagaagaagaggcctgttccacttcagaagacccagaagcttcaagggcgacagaggccccggcagccccaccaccggcctgctgctgccccccccccccccccccccccccacccaggagagcccccccagccccgacccccccagcctgggcaacaacagcagcccctgctggagccccgaggaggagagcagcctgctgcccggcttcggcggcggcagaggccccagcttcagaagaaagatgggccccggccccgaccaggagggcagcacccaggcctggcagaagagaagaagcagcgacgacgccggccccggcagctggaagccccccccccccccccagagcaccaagcccagcttcagcgccatgagaagagccgaggccacctggcacatcgccgaggagagcgcccccaaccacagctgccagagccccagccccgccagccaggacggcgaggaggagaaggagggcaccctgttccccgagagaaccctgcccgccagaaacgccaagctgcaggaccccgccctggccccctggccccccaagcccgtggccgtgcccagaggcagacagcccccccaggagcccggcgtgagagaggaggccgaggccggcgacgccgcccccggcgtgaacaagcccagactgagactgagcagccagcaggaccaggaggagcccgaggtgcagggcccccccgaccccggcagaagaaccgcccccctgaagcccaagagaaccagaagagcccagagctgcgacaagctggagcccgacagaagaagaccccccgaccccaccggcaccagcgagcccggcaccgactag

SEQ ID NO: 236287 - DNA, 4119 bp, Artificial Sequence
  derived and/or modified sequence
atggccaagcccagcgtggagctgaccagagagctgcaggacagcatcagaagatgcctgagccagggcgccgtgctgcagcagcaccacgtgaagctggagaccaagcccaagaagttcgaggacagagtgctggccctgaccagctggagactgcacctgttcctgctgaaggtgcccgccaaggtggagagcagcttcaacgtgctggagatcagagccttcaacaccctgagccagaaccagatcctggtggagaccgagagaggcatggtgagcatgagactgcccagcgccgagagcgtggaccaggtgaccagacacgtgagcagcgccctgagcaaggtgtgccccggccccggctgcctgatcagaagaggcaacgccgacacccccgagggccccagagacaccagccccaacagcgagaccagcaccagcaccacccacagcgtgtgcggcggcttcagcgagacctacgccgccctgtgcgactacaacggcctgcactgcagagaggaggtgcagtgggacgtggacaccatctaccacgccgaggacaacagagagttcaacctgctggacttcagccacctggagagcagagacctggccctgatggtggccgccctggcctacaaccagtggttcaccaagctgtactgcaaggacctgagactgggcagcgaggtgctggagcaggtgctgcacaccctgagcaagagcggcagcctggaggagctggtgctggacaacgccggcctgaagaccgacttcgtgcagaagctggccggcgtgttcggcgagaacggcagctgcgtgctgcacgccctgaccctgagccacaaccccatcgaggacaagggcttcctgagcctgagccagcagctgctgtgcttccccagcggcctgaccaagctgtgcctggccaagaccgccatcagccccagaggcctgcaggccctgggccagaccttcggcgccaaccccgccttcgccagcagcctgagatacctggacctgagcaagaaccccggcctgctggccaccgacgaggccaacgccctgtacagcttcctggcccagcccaacgccctggtgcacctggacctgagcggcaccgactgcgtgatcgacctgctgctgggcgccctgctgcacggctgctgcagccacctgacctacctgaacctggccagaaacagctgcagccacagaaagggcagagaggccccccccgccttcaagcagttcttcagcagcgcctacaccctgagccacgtgaacctgagcgccaccaagctgcccctggaggccctgagagccctgctgcagggcctgagcctgaacagccacctgagcgacctgcacctggacctgagcagctgcgagctgagaagcgccggcgcccaggccctgcaggagcagctgggcgccgtgacctgcgtgggcagcctggacctgagcgacaacggcttcgacagcgacctgctgaccctggtgcccgccctgggcaagaacaagagcctgaagcacctgttcctgggcaagaacttcaacgtgaaggccaagaccctggaggagatcctgcacaagctggtgcagctgatccaggaggaggactgcagcctgcagagcctgagcgtggccgacagcagactgaagctgagaaccagcatcctgatcaacgccctgggcagcaacacctgcctggccaaggtggacctgagcggcaacggcatggaggacatcggcgccaagatgctgagcaaggccctgcagatcaacagcagcctgagaaccatcctgtgggacagaaacaacaccagcgccctgggcttcctggacatcgccagagccctggagagcaaccacaccctgagattcatgagcttccccgtgagcgacatcagccaggcctacagaagcgcccccgagagaaccgaggacgtgtggcagaagatccagtggtgcctggtgagaaacaaccacagccagacctgcccccaggagcaggccttcagactgcagcagggcctggtgaccagcagcgccgagcagatgctgcagagactgtgcggcagagtgcaggaggaggtgagagccctgagactgtgccccctggagcccgtgcaggacgagctgctgtacgccagagacctgatcaaggacgccaagaacagcagagccctgttccccagcctgtacgagctgggccacgtgctggccaacgacggccccgtgagacagagactggagagcgtggccagcgaggtgagcaaggccgtggacaaggagctgcaggtgatcctggagagcatggtgagcctgacccaggagctgtgccccgtggccatgagagtggccgagggccacaacaagatgctgagcaacgtggccgagagagtgaccgtgcccagaaacttcatcagaggcgccctgctggagcaggccggccaggacatccagaacaagctggacgaggtgaagctgagcgtggtgacctacctgaccagcagcatcgtggacgagatcctgcaggagctgtaccacagccacaagagcctggccagacacctgacccagctgagaaccctgagcgacccccccggctgccccggccagggccaggacctgagcagcagaggcagaggcagaaaccacgaccacgaggagaccaccgacgacgagctgggcaccaacatcgacaccatggccatcaagaagcagaagagatgcagaaagatcagacccgtgagcgccttcatcagcggcagcccccaggacatggagagccagctgggcaacctgggcatcccccccggctggttcagcggcctgggcggcagccagcccaccgccagcggcagctgggagggcctgagcgagctgcccacccacggctacaagctgagacaccagacccagggcagacccagaccccccagaaccaccccccccggccccggcagacccagcatgcccgcccccggcaccagacaggagaacggcatggccaccagactggacgagggcctggaggacttcttcagcagaagagtgctggaggagagcagcagctaccccagaaccctgagaaccgtgagacccggcctgagcgaggcccccctgccccccctgcagaagaagagaagaagaggcctgttccacttcagaagacccagaagcttcaagggcgacagaggccccggcagccccaccaccggcctgctgctgccccccccccccccccccccccccacccaggagagcccccccagccccgacccccccagcctgggcaacaacagcagcccctgctggagccccgaggaggagagcagcctgctgcccggcttcggcggcggcagaggccccagcttcagaagaaagatgggcaccgagggcagcgagcccggcgagggcggccccgcccccggcaccgcccagcagcccagagtgcacggcgtggccctgcccggcctggagagagccaagggctggagcttcgacggcaagagagagggccccggccccgaccaggagggcagcacccaggcctggcagaagagaagaagcagcgacgacgccggccccggcagctggaagccccccccccccccccagagcaccaagcccagcttcagcgccatgagaagagccgaggccacctggcacatcgccgaggagagcgcccccaaccacagctgccagagccccagccccgccagccaggacggcgaggaggagaaggagggcaccctgttccccgagagaaccctgcccgccagaaacgccaagctgcaggaccccgccctggccccctggccccccaagcccgtggccgtgcccagaggcagacagcccccccaggagcccggcgtgagagaggaggccgaggccggcgacgccgcccccggcgtgaacaagcccagactgagactgagcagccagcaggaccaggaggagcccgaggtgcagggcccccccgaccccggcagaagaaccgcccccctgaagcccaagagaaccagaagagcccagagctgcgacaagctggagcccgacagaagaagaccccccgaccccaccggcaccagcgagcccggcaccgactag

SEQ ID NO: 236288 - DNA, 1278 bp, Artificial Sequence
  derived and/or modified sequence
atggccatcaagaagcagaagcggtgcaggaagatccggcccgtctctgcgtttatcagcggcagccctcaggatatggagtcgcagttgggaaatttggggataccccctgggtggttctccggtctcgggggctcgcagcctaccgcctccggctcctgggagggcttgagtgagctgcccacccatggctacaaactccggcatcagacccagggtagacccaggcctccaagaacaacaccaccagggcctggaaggccatccatgcctgcccccgggacacggcaggagaacggcatggccacaaggctggacgagggcttagaagattttttctctcggagggtacttgaagagtcaagctcatatccccgcacgcttcgaacagttcggcccggattatcagaagccccactaccacctctgcagaagaagaggcgaaggggtctgttccatttcagacggccacgaagtttcaaaggcgacagaggaccaggatctccgactacaggcctgctcttgcctcctcccccaccacctcctcctacacaggagagcccgcccagcccggacccaccaagcctgggtaataattcttctccttgctggagtccagaggaggagagcagcttgctccctggtttcggaggagggcgtggcccaagcttcaggaggaaaatgggccccggacccgaccaggaaggttccacccaagcctggcagaagagacggagctcagacgatgccggaccaggctcttggaaacctcctcccccacctcagagtacaaagccgagtttttccgccatgagaagagctgaggctacatggcacattgcagaagagagtgcccctaatcatagctgtcagagtccttcccccgcttcacaggacggcgaggaagagaaagaggggactctcttccccgaacggacgcttcccgcgcggaatgcaaagcttcaagatcccgccctggcaccctggcctcccaagcccgttgccgtgccccgaggccggcagccgccccaagaaccaggggtgagggaggaggcagaggcaggagacgccgcacccggggtgaataaacctaggctacgattgtcgtcacagcaggaccaagaagagcccgaggtgcagggtccacccgaccctggtcgccgaaccgcacctctgaagcccaaaaggaccagaagagctcagtcatgcgacaagctggagccagatcgacgtaggccaccagatcccactggtaccagtgaaccaggcacagactag

SEQ ID NO: 236289 - DNA, 4119 bp, Artificial Sequence
  derived and/or modified sequence
atggccaaaccttcggtagaactaacgcgggagttgcaggattctatcaggcgatgtctgtctcagggcgccgtgcttcagcagcaccacgtgaaactcgaaacaaagccgaaaaaattcgaggatcgagtactggcactgacatcatggcggttgcacctgttcttgttaaaggtgccagccaaggtcgaatctagtttcaacgtgctcgagatccgcgcatttaacactctttcacagaatcagattctagtagagacagaacgcggtatggtttccatgagactgcctagtgctgaatctgtggatcaagtgaccagacacgtgtcgagcgcgctttccaaggtctgtcctggtcccgggtgtctcatcagacgtgggaacgccgacaccccggagggaccaagggacacttctcccaattccgaaacctctacttcaacaactcatagcgtgtgcggggggttcagcgagacgtacgccgccctgtgcgattacaacggcctgcactgcagagaggaggtgcaatgggacgtcgataccatttatcatgctgaggacaaccgtgaattcaacctccttgacttctcacatcttgaaagccgggatttagcgctgatggtggctgcattggcctacaaccagtggtttaccaaactgtactgcaaagatttgcgactggggtctgaagtgttggagcaggttttgcataccctgtccaagagcgggagtcttgaggagcttgttctggacaatgccggtctgaaaacagactttgtccagaagcttgccggggtgttcggcgagaatggctcatgtgtactacacgcgctaaccttatcacacaacccaatcgaggataaaggcttcctctccctctcccaacagctgctgtgcttcccttccggattaacgaaactctgtctcgccaagactgcgatctcacctaggggcctgcaggccctcggccaaacatttggcgccaacccggcttttgcttcatcattgaggtatctcgacctcagtaagaaccccggtttgctggctactgacgaggcgaacgctctctattccttcctggcccaacccaacgccttagtccatctggatctatcggggactgattgcgtaatcgatctgctgttgggcgcactattgcacggctgttgctcccatttgacctacctcaatctcgctcgtaattcctgtagccatagaaagggaagagaggctcccccggcgttcaagcagttcttttcctccgcgtatacactgagccatgttaacctgagcgccaccaaactgccattggaggccttacgggccttactccaggggctgagtttaaattcccacctgtctgatctgcatctcgacctttctagctgcgagcttaggtcagcgggtgctcaggcactgcaggaacagttaggggcagtgacctgcgtcggcagtcttgatctgagcgataatggcttcgattctgacctgctgacactcgtccctgccctgggtaaaaataaaagtctcaagcacctgtttctagggaaaaacttcaatgttaaagccaaaacgcttgaggaaatcctgcacaagctggtccagctgatccaagaggaggattgctccctccagagcttatctgtggctgactcacgactcaagttacggaccagcattttgataaatgcgctgggctcaaatacctgcctggccaaagttgatctttcaggaaacggcatggaggacatcggtgcaaagatgctgtccaaggctctccagatcaacagctcattacgcaccatcctctgggatcgcaacaatacatccgcgctggggttcctagacatagccagagctctggaaagtaaccacactctgaggtttatgagcttccccgtctccgacatttcccaggcttaccggtctgctcctgagcgaaccgaagatgtgtggcagaagatccagtggtgtctggtgcggaataatcactcacagacttgcccacaggaacaggccttccgtctccagcagggcttggttacaagttctgcagagcagatgttacagcggctgtgcggccgcgtccaagaggaggtgcgagcgcttcggctctgccccctggaaccagtgcaggatgagctcctgtacgcaagggatctgatcaaagatgccaagaattctagggctctttttccaagcctatatgaactgggacacgtgctggccaacgatgggcctgttcgacagcgactggaatcggttgcgtctgaggtgagcaaggcggttgacaaggaactccaagtcatcctggagtccatggtaagcttaacccaggaactgtgccctgtggccatgcgcgtcgctgaaggtcataataagatgctgagtaatgtggctgagcgcgtcacagtgccaagaaattttataaggggggctctcctagaacaggcgggccaggatatccagaacaagcttgatgaggtcaagctgtctgtcgtgacatacttgacgagcagtattgtagacgagattctgcaggaactgtatcattctcacaagtctctggctcggcacctgacgcaactgcggactctgagtgacccaccagggtgccctggccagggccaggacttgagctccagaggcagggggagaaaccatgaccacgaggagaccaccgatgacgagctgggcactaacatcgacaccatggcaatcaaaaagcagaagagatgcaggaagattaggccagtgtccgctttcatttcggggagcccccaggacatggaaagtcaattgggcaatctgggtattcctccagggtggtttagcggcctaggtggtagtcagcccactgcttctggttcatgggaaggcctgtccgagctgccgactcacgggtacaaactcaggcaccagacccagggtagaccacgtccaccgaggaccaccccacctggaccgggccgccccagcatgccggcgccaggaacccggcaagagaacggaatggctacaagactagatgagggactggaagacttcttttcaaggcgcgtgcttgaggagagttccagctatcctcgcactctgagaacagtacgacccgggctctctgaagcgcccctgcccccactgcagaaaaagcggcgccgcggactcttccatttccggcggcctcggtcctttaaaggcgatagaggtcctggatcccctaccaccggcctgctcctgccgccaccaccgccgccgcctcctacacaagagagtcccccaagtcccgatcccccatctctgggcaacaattcctcaccatgctggtcccctgaggaagagagttccctgttaccagggtttggcggtggaagagggccatccttcaggcggaaaatgggaacagaaggatcagaacctggggagggagggcccgcccccggtaccgcccaacagccccgcgtacatggagtagcactcccagggctcgaaagggctaaaggctggtccttcgacgggaagcgggagggccccggccctgatcaagagggaagcacacaagcttggcagaagaggcggtcttctgacgacgccggccctggcagctggaagccaccacctcctcctcagagtactaagccttcattttctgcaatgcggagagccgaagctacgtggcacattgcagaggagagtgcgcctaatcactcctgtcaatctccttcacctgccagccaggatggggaagaggagaaagagggaaccctgtttcccgagcgaactctccctgcacgaaatgccaagctgcaagatccagccttagccccttggccgcccaagcccgtcgcggtgccacgtgggagacagcctcctcaggagcctggggtgagggaggaagccgaagctggagacgccgcccctggcgtgaacaaacctcgtctccgactctcctcccagcaagaccaggaggagccagaggtgcagggccctcctgacccagggagacgcactgcgccattgaagccaaagcgtactcgcagagcccagtcttgcgacaaacttgagccagacagacgtcgtccaccagacccaaccggcaccagcgaacctgggaccgactag

SEQ ID NO: 236290 - DNA, 1278 bp, Artificial Sequence
  derived and/or modified sequence
atggccatcaagaagcagaagcgctgcaggaagatccggcctgtgtctgccttcatcagcggcagcccccaggacatggagagccagctgggcaacctgggcatccccccaggctggttcagcggcctgggcggcagccagcccacagccagcggctcctgggagggcctgtctgagctgcccacccacggctacaagctgcggcaccagacccagggccggcccaggcctcccaggaccaccccacctggccctggccggcccagcatgcctgcccctggcacccggcaggagaatggcatggccacccggctggatgagggcctggaggacttcttcagcagaagagtgctggaggagagcagcagctaccccaggaccctgaggacagtgcggcccggcctgtctgaggcccccctgccccccctgcagaagaagagaagaagaggcctcttccacttcagaagacccaggagcttcaagggggaccggggccctggcagccccaccaccggcctgctgctgcccccacctcctcctcctccacccacccaggagagcccccccagcccagacccccccagcctgggcaacaacagcagcccctgctggagccctgaggaggagagcagcctgctgcccggctttggaggcggccggggccccagcttccggaggaagatgggccctggccctgaccaggagggcagcacccaggcctggcagaagaggaggagcagtgatgatgctggccctggctcctggaagcccccacctccaccccagagcaccaagcccagcttcagcgccatgagaagagctgaggccacctggcacatcgccgaggagagcgcccccaaccacagctgccagagccccagccctgccagccaggatggagaggaggagaaggagggcaccctcttccctgagaggaccctgcctgccagaaatgccaagctgcaggaccctgccctggccccctggccacccaagcctgtggccgtgccccggggccggcagcccccccaggagcccggggtgcgggaggaggccgaggccggagatgctgcccctggggtgaacaagccccggctgcggctgagcagccagcaggaccaggaggagcctgaggtgcagggccccccagaccctggaagaagaacagcccccctgaagcccaagaggacccggcgggcccagagctgtgacaagctggagccagacagaagaagacctccagaccccaccggcaccagcgagcccggcacagactag

SEQ ID NO: 236291 - DNA, 4119 bp, Artificial Sequence
  derived and/or modified sequence
atggccaagcccagcgtggagctgacccgggagctgcaggacagcatccgccgctgcctgagccagggcgctgtgctgcagcagcaccacgtgaagctggagaccaagcccaagaagtttgaagatagagtgctggccctgacctcctggaggctgcacctgttcctgctgaaggtgcctgccaaggtggagagcagcttcaacgtgctggagatccgggccttcaacaccctgagccagaaccagatcctggtggagacagagcggggcatggtgtccatgaggctgcccagcgctgagagcgtggaccaggtgaccaggcatgtgtcctctgccctgagcaaggtgtgccccggccctggctgcctgatcagaagaggaaatgctgacaccccagagggcccccgggacaccagccccaacagcgagaccagcaccagcaccacccacagcgtgtgtggcggcttcagcgagacctatgctgccctgtgtgactacaacggcctgcactgccgggaggaggtgcagtgggatgtggacaccatctaccacgccgaggacaaccgggagttcaacctgctggacttcagccacctggagagccgggacctggccctgatggtggccgccctggcctacaaccagtggttcaccaagctgtactgcaaggacctgcggctgggcagcgaggtgctggagcaggtgctgcacaccctgagcaagagcggcagcctggaggagctggtgctggacaatgccggcctgaagacagactttgtgcagaagctggccggcgtgtttggagaaaatggcagctgtgtgctgcacgccctgaccctgagccacaaccccatcgaggacaagggcttcctgagcctgagccagcagctgctgtgcttccccagcggcctgaccaagctgtgcctggccaagacagccatcagcccccggggcctgcaggccctgggccagaccttcggggccaacccagcctttgccagcagcctgcgctacctggacctgagcaagaaccctggcctgctggccacagatgaggccaatgccctgtacagcttcctggcccagcccaatgccctggtgcacctggacctgagcggcacagactgtgtgattgacctgctgctgggcgccctgctgcacggctgctgcagccacctgacctacctgaacctggccaggaacagctgcagccacaggaagggccgggaggcccccccagccttcaagcagttcttcagcagcgcctacaccctgagccacgtgaacctgagcgccaccaagctgcccctggaggccctgcgggccctgctgcagggcctgagcctgaacagccacctgagtgacctgcacctggacctgagcagctgtgagctgcggtctgctggggcccaggccctgcaggagcagctgggcgctgtgacctgtgtgggcagcctggacctgagtgacaatggatttgacagcgacctgctgaccctggtgcctgccctgggcaagaacaagagcctgaagcacctgttcctgggcaagaacttcaacgtgaaggccaagaccctggaggagatcctgcacaagctggtgcagctgatccaggaggaggactgcagcctgcagagcctgtctgtggccgacagccggctgaagctgcggaccagcatcctgatcaatgccctgggcagcaacacctgcctggccaaggtggacctgtctggaaatggcatggaggacatcggggccaagatgctgagcaaggccctgcagatcaacagcagcctgcggaccatcctgtgggacaggaacaacaccagcgccctgggcttcctggacatcgcccgggccctggagagcaaccacaccctgcgcttcatgtccttccctgtgtctgacatcagccaggcctacagaagtgcccctgagaggacagaagatgtgtggcagaagatccagtggtgcctggtgaggaacaaccacagccagacctgcccccaggagcaggccttccggctgcagcagggcctggtgaccagcagcgctgagcagatgctgcagaggctgtgtggccgggtgcaggaggaggtgcgggccctgcggctgtgccccctggagcctgtgcaggatgagctgctgtatgcccgggacctgatcaaggatgccaagaacagccgggccctcttccccagcctgtatgagctgggccacgtgctggccaatgatggccctgtgcggcagaggctggagagcgtggccagcgaggtgtccaaggctgtggacaaggagctgcaggtgatcctggagagcatggtgtccctgacccaggagctgtgccctgtggccatgagggtggccgagggccacaacaagatgctgagcaatgtggccgagcgggtgacagtgcccaggaacttcatccggggggccctgctggagcaggccggccaggacatccagaacaagctggatgaggtgaagctgtctgtggtgacctacctgaccagcagcatcgtggatgagatcctgcaggagctgtaccacagccacaagagcctggcccggcacctgacccagctgcggaccctgagtgaccccccaggctgccccggccagggccaggacctgagcagccggggccggggcaggaaccacgaccacgaggagaccacagatgatgagctgggcaccaacatcgacaccatggccatcaagaagcagaagcgctgcaggaagatccggcctgtgtctgccttcatcagcggcagcccccaggacatggagagccagctgggcaacctgggcatccccccaggctggttcagcggcctgggcggcagccagcccacagccagcggctcctgggagggcctgtctgagctgcccacccacggctacaagctgcggcaccagacccagggccggcccaggcctcccaggaccaccccacctggccctggccggcccagcatgcctgcccctggcacccggcaggagaatggcatggccacccggctggatgagggcctggaggacttcttcagcagaagagtgctggaggagagcagcagctaccccaggaccctgaggacagtgcggcccggcctgtctgaggcccccctgccccccctgcagaagaagagaagaagaggcctcttccacttcagaagacccaggagcttcaagggggaccggggccctggcagccccaccaccggcctgctgctgcccccacctcctcctcctccacccacccaggagagcccccccagcccagacccccccagcctgggcaacaacagcagcccctgctggagccctgaggaggagagcagcctgctgcccggctttggaggcggccggggccccagcttccggaggaagatgggcacagagggcagcgagcctggagagggcggccctgcccctggaacagcccagcagccccgggtgcatggagtggccctgcccggcctggagcgggccaagggctggagctttgatggcaagcgggagggccctggccctgaccaggagggcagcacccaggcctggcagaagagaagaagcagtgatgatgctggccctggctcctggaagcccccacctccaccccagagcaccaagcccagcttcagcgccatgagaagagctgaggccacctggcacatcgccgaggagagcgcccccaaccacagctgccagagccccagccctgccagccaggatggagaggaggagaaggagggcaccctcttccctgagaggaccctgcctgccagaaatgccaagctgcaggaccctgccctggccccctggccacccaagcctgtggccgtgccccggggccggcagcccccccaggagcccggggtgcgggaggaggccgaggccggagatgctgcccctggggtgaacaagccccggctgcggctgagcagccagcaggaccaggaggagcctgaggtgcagggccccccagaccccggccgcaggacagcccccctgaagcccaagaggacccggcgggcccagagctgtgacaagctggagccagacagaagaagacctccagaccccaccggcaccagcgagcctggaacagactag

SEQ ID NO: 236292 - DNA, 4450 bp, Artificial Sequence
  derived and/or modified sequence
ggaggagcgctcaagcagccgcccctgaccggagcgggctcggccgctgctgcagcgctcagcgcccgggccctgctgaagccgggtctagcatgtgccgcggctccccggcggcggcggcggctcctctgcagcagcctcagcagcagcggccgccatggccaagcccagcgtggagctcacccgcgagttgcaagacagcatccggaggtgcctgagccaaggggccgtgctccaacaacatcatgtgaagttggagacaaagcccaagaagtttgaggaccgagtgctggccctgacctcctggcgcctccacctcttcctccttaaagtcccggccaaggtggagagctccttcaatgtcctggagatccgtgccttcaacacgctcagtcagaatcagatcctggtggagacggagcgtggcatggtgagcatgcgactgccatcagctgaaagtgtggaccaggtgacacgacatgtgagctctgccctgtccaaggtctgccctggccctgggtgtttgatccggcgtggaaacgcagacaccccagaggggccccgagatacatcccccaactctgagacttccacatctaccacccacagtgtctgcggtggcttctctgagacctacgctgctctgtgtgactacaatgggctacactgccgtgaggaggttcaatgggatgtggacaccatctaccatgctgaagataaccgggagttcaatcttttggatttcagccacttggagagccgagacttggccctaatggtagcagccctggcctacaaccagtggttcaccaaactctactgcaaggacttgcggctgggctctgaagtgctagaacaggtgctacataccctaagcaagtcggggagcctcgaagagctggtgctggacaacgccgggcttaagacggactttgtccagaagctggccggggtgtttggggagaacgggagctgtgtgctgcatgccctcactctgtcccacaaccccatcgaggacaagggttttctcagtctgagccagcagctcctctgcttcccctctggcctcaccaaactgtgcctggccaagactgccatttcccctcgagggctccaggcactcggccagaccttcggggcaaacccagcatttgccagctcccttcgatacctggacctgagcaagaatcctgggctcctcgccacggatgaggccaatgccctctacagtttcctggcccaacccaacgccctggtgcacctggacctgtcaggaactgactgcgtcatcgacttgcttctcggtgccctgctccacggctgctgctcccacctcacctacctcaacctggctcgcaacagctgctcccacaggaagggtcgagaggccccgccggccttcaagcagttcttcagcagcgcctacacactgagccacgtcaatctgtcggccacaaagctgcccctggaggccctcagggcgctgcttcagggcctctccctcaacagtcacctcagtgacctgcacctggatctcagcagctgcgagctccgttcagcgggagcccaagccttgcaggagcagctgggagctgtcacctgtgtaggcagcctggatctgtcagacaatgggttcgactcggacctcctgacactggtgcctgcacttggcaagaacaagtccctcaagcacctgtttttgggcaagaacttcaatgtcaaggccaagaccctggaggagatcctccacaagctggtgcagctgatccaggaagaggactgttccctgcagtcactgtcggtggcagactcccggctgaagcttcgcaccagcatcctcatcaatgccctgggcagcaacacctgcctggccaaggtggatctgagcggcaatggcatggaggacatcggggccaagatgctgtctaaggccctgcagataaactcctccctcagaactatcctatgggatcggaacaatacatctgccctgggcttcctggacatcgcaagggccctggagagcaaccacacgctgcgcttcatgtccttccccgtgagcgacatctcccaagcctatcgcagcgcgcctgagcgcaccgaggacgtctggcagaagatccaatggtgcttagtgaggaacaaccactcccagacgtgcccccaggagcaggccttcaggttgcagcagggcctggtgaccagcagcgccgagcaaatgctgcagcggctgtgtggacgagtgcaggaggaggtgcgggccctgagactatgccccctggagcctgtgcaggatgagctactctacgctcgggacctcatcaaagatgccaagaactcccgggcgctgtttcccagcctctatgagctgggccacgtgctggccaatgatgggcctgtgcggcagaggctggaatcagtagcaagtgaggtgtccaaagctgtggacaaggagctgcaggtgatcctggagtccatggtcagcctgacacaggagttatgccctgtggccatgcgggtggccgagggacacaacaagatgctgagcaatgtggcggagcgtgtcactgtgccccggaacttcatccgaggggcactgctggagcaagcaggacaggacattcagaacaagctggatgaagtgaagctctcagtcgtcacctacctaaccagctccatagtggatgagatcctgcaagagctctaccattcccacaagagcctggcccggcacctgacccagctaaggacgctgtcagatccaccagggtgcccaggccaagggcaggatctgtcctcccggggccgaggccggaaccatgaccatgaggagaccacagatgatgaacttgggaccaacattgacaccatggccatcaaaaagcagaaacgctgccgcaagattcggccggtgtctgccttcatcagcgggagccctcaggacatggaaagccaactggggaatctggggatcccccctggctggttctcaggacttgggggcagccagcccacagctagtggctcctgggaaggtctatctgagctgcccactcatggttacaaactaaggcatcaaacacaagggaggccccgcccccccaggaccacacctccaggacctggtcgacccagtatgccagcacctgggactcgtcaggagaatgggatggccacccgcctggatgaagggctggaggacttcttcagccgaagggtcctggaggaaagttctagctacccccggactctgaggaccgtgcggccaggactctcggaggcaccgctgcctccactccagaagaagaggcgccggggcctgtttcactttcgccggccccggagcttcaagggggacagggggccggggtcccctaccactggactcctcctccctccacccccaccccctcccccgactcaggagagcccccctagcccagaccccccaagcctcggcaataactcctctccctgctggagcccagaggaggagagcagcctcctccctggatttggtgggggccggggaccttccttccgccggaagatgggcccaggcccagaccaggagggcagcacccaggcctggcagaaacggcgctcttcagacgacgcagggcctggatcctggaagcccccaccaccgccccaaagcaccaaaccaagcttcagcgccatgcgcagagcagaggccacatggcacatagctgaagagagtgcccccaaccacagctgccagagtcccagcccagcctcccaagatggggaagaggagaaggaggggaccctcttcccagagaggacacttccagctaggaatgccaagctacaggaccccgctctagctccatggcctcccaagccagtggctgtgcccaggggccgccagcctccccaggagccaggggtcagggaggaggctgaggctggagatgcagctccaggagtcaacaaaccccggctgaggctgagctcacagcaagaccaagaggagcccgaagtccaagggccccctgatccaggccggcggactgcccccctgaagcccaagaggacacggcgggcacagtcctgtgacaagctggaacctgatagaagacggcctcctgaccccacaggaaccagtgagccaggaacagactgacaactgccacaacaccctcctcagccctcgacatgtgcctcgcaaggactcagacccctatccacccccagtccccagggccccctgccagcccctgtcctacaggggcaagacggcaggaccaggcatgggggagctggaggcagggactagaacagagggagccacctggagagacggaggctgtcagtgcctgcctcgatacctctctctgcagagagcttctgggtgggggcttatctcctcccccaggagggtggatctctgtccctctatccccagggactctctcccctcttgtat

SEQ ID NO: 236293 - DNA, 4597 bp, Artificial Sequence
  derived and/or modified sequence
ggagcgctcaagcagccgcccctgaccggagcgggctcggccgctgctgcagcgctcagcgcccgggccctgctgaagccgggtctagcatgtgccgcggctccccggcggcggcggcggctcctctgcagcagcctcagcagcagcggccgccatggccaagcccagcgtggagctcacccgcgagttgcaagacagcatccggaggtgcctgagccaaggggccgtgctccaacaacatcatgtgaagttggagacaaagcccaagaagtttgaggaccgagtgctggccctgacctcctggcgcctccacctcttcctccttaaagtcccggccaaggtggagagctccttcaatgtcctggagatccgtgccttcaacacgctcagtcagaatcagatcctggtggagacggagcgtggcatggtgagcatgcgactgccatcagctgaaagtgtggaccaggtgacacgacatgtgagctctgccctgtccaaggtctgccctggccctgggtgtttgatccggcgtggaaacgcagacaccccagaggggccccgagatacatcccccaactctgagacttccacatctaccacccacagtgtctgcggtggcttctctgagacctacgctgctctgtgtgactacaatgggctacactgccgtgaggaggttcaatgggatgtggacaccatctaccatgctgaagataaccgggagttcaatcttttggatttcagccacttggagagccgagacttggccctaatggtagcagccctggcctacaaccagtggttcaccaaactctactgcaaggacttgcggctgggctctgaagtgctagaacaggtgctacataccctaagcaagtcggggagcctcgaagagctggtgctggacaacgccgggcttaagacggactttgtccagaagctggccggggtgtttggggagaacgggagctgtgtgctgcatgccctcactctgtcccacaaccccatcgaggacaagggttttctcagtctgagccagcagctcctctgcttcccctctggcctcaccaaactgtgcctggccaagactgccatttcccctcgagggctccaggcactcggccagaccttcggggcaaacccagcatttgccagctcccttcgatacctggacctgagcaagaatcctgggctcctcgccacggatgaggccaatgccctctacagtttcctggcccaacccaacgccctggtgcacctggacctgtcaggaactgactgcgtcatcgacttgcttctcggtgccctgctccacggctgctgctcccacctcacctacctcaacctggctcgcaacagctgctcccacaggaagggtcgagaggccccgccggccttcaagcagttcttcagcagcgcctacacactgagccacgtcaatctgtcggccacaaagctgcccctggaggccctcagggcgctgcttcagggcctctccctcaacagtcacctcagtgacctgcacctggatctcagcagctgcgagctccgttcagcgggagcccaagccttgcaggagcagctgggagctgtcacctgtgtaggcagcctggatctgtcagacaatgggttcgactcggacctcctgacactggtgcctgcacttggcaagaacaagtccctcaagcacctgtttttgggcaagaacttcaatgtcaaggccaagaccctggaggagatcctccacaagctggtgcagctgatccaggaagaggactgttccctgcagtcactgtcggtggcagactcccggctgaagcttcgcaccagcatcctcatcaatgccctgggcagcaacacctgcctggccaaggtggatctgagcggcaatggcatggaggacatcggggccaagatgctgtctaaggccctgcagataaactcctccctcagaactatcctatgggatcggaacaatacatctgccctgggcttcctggacatcgcaagggccctggagagcaaccacacgctgcgcttcatgtccttccccgtgagcgacatctcccaagcctatcgcagcgcgcctgagcgcaccgaggacgtctggcagaagatccaatggtgcttagtgaggaacaaccactcccagacgtgcccccaggagcaggccttcaggttgcagcagggcctggtgaccagcagcgccgagcaaatgctgcagcggctgtgtggacgagtgcaggaggaggtgcgggccctgagactatgccccctggagcctgtgcaggatgagctactctacgctcgggacctcatcaaagatgccaagaactcccgggcgctgtttcccagcctctatgagctgggccacgtgctggccaatgatgggcctgtgcggcagaggctggaatcagtagcaagtgaggtgtccaaagctgtggacaaggagctgcaggtgatcctggagtccatggtcagcctgacacaggagttatgccctgtggccatgcgggtggccgagggacacaacaagatgctgagcaatgtggcggagcgtgtcactgtgccccggaacttcatccgaggggcactgctggagcaagcaggacaggacattcagaacaagctggatgaagtgaagctctcagtcgtcacctacctaaccagctccatagtggatgagatcctgcaagagctctaccattcccacaagagcctggcccggcacctgacccagctaaggacgctgtcagatccaccagggtgcccaggccaagggcaggatctgtcctcccggggccgaggccggaaccatgaccatgaggagaccacagatgatgaacttgggaccaacattgacaccatggccatcaaaaagcagaaacgctgccgcaagattcggccggtgtctgccttcatcagcgggagccctcaggacatggaaagccaactggggaatctggggatcccccctggctggttctcaggacttgggggcagccagcccacagctagtggctcctgggaaggtctatctgagctgcccactcatggttacaaactaaggcatcaaacacaagggaggccccgcccccccaggaccacacctccaggacctggtcgacccagtatgccagcacctgggactcgtcaggagaatgggatggccacccgcctggatgaagggctggaggacttcttcagccgaagggtcctggaggaaagttctagctacccccggactctgaggaccgtgcggccaggactctcggaggcaccgctgcctccactccagaagaagaggcgccggggcctgtttcactttcgccggccccggagcttcaagggggacagggggccggggtcccctaccactggactcctcctccctccacccccaccccctcccccgactcaggagagcccccctagcccagaccccccaagcctcggcaataactcctctccctgctggagcccagaggaggagagcagcctcctccctggatttggtgggggccggggaccttccttccgccggaagatgggcactgaggggtcagagccaggggaggggggcccagcccctgggacagcacagcagccaagggttcacggtgttgcccttcccgggttggaaagagccaagggttggagcttcgatgggaaacgagagggcccaggcccagaccaggagggcagcacccaggcctggcagaaacggcgctcttcagacgacgcagggcctggatcctggaagcccccaccaccgccccaaagcaccaaaccaagcttcagcgccatgcgcagagcagaggccacatggcacatagctgaagagagtgcccccaaccacagctgccagagtcccagcccagcctcccaagatggggaagaggagaaggaggggaccctcttcccagagaggacacttccagctaggaatgccaagctacaggaccccgctctagctccatggcctcccaagccagtggctgtgcccaggggccgccagcctccccaggagccaggggtcagggaggaggctgaggctggagatgcagctccaggagtcaacaaaccccggctgaggctgagctcacagcaagaccaagaggagcccgaagtccaagggccccctgatccaggccggcggactgcccccctgaagcccaagaggacacggcgggcacagtcctgtgacaagctggaacctgatagaagacggcctcctgaccccacaggaaccagtgagccaggaacagactgacaactgccacaacaccctcctcagccctcgacatgtgcctcgcaaggactcagacccctatccacccccagtccccagggccccctgccagcccctgtcctacaggggcaagacggcaggaccaggcatgggggagctggaggcagggactagaacagagggagccacctggagagacggaggctgtcagtgcctgcctcgatacctctctctgcagagagcttctgggtgggggcttatctcctcccccaggagggtggatctctgtccctctatccccagggactctctcccctcttgtatagaataaaaaaacaaaatcat

SEQ ID NO: 236294 - DNA, 1278 bp, Artificial Sequence
  derived and/or modified sequence
atggccatcaagaagcagaagcggtgccggaagatccggcccgtgagcgcctttatttcagggagtccccaggatatggaaagccagctcgggaaccttggaattccccccggttggttttctgggttaggcggctcacagcccactgcctcaggcagttgggaaggcctgagcgaactaccaacgcacggatacaaactgaggcatcagactcaggggcgtcccagacctcccaggactacccccccagggccaggtcgaccctccatgccggcccccgggactcggcaggagaatggcatggccacacgattggacgagggactcgaagacttcttcagcaggcgggttcttgaggaaagttcttcataccctcgaaccttgcgcaccgtcagaccagggctctcagaggccccacttccacctctgcagaagaagagaaggcgcgggctattccactttcgccggcctaggtctttcaagggtgatagaggtcctggatcccccacaaccggactactcctaccgcctccccctccacctcccccaactcaagagtctcctccatctcccgaccctcctagcctgggcaacaattcctcaccctgttggagcccagaagaggagtcctctctgttacccggattcggggggggtcggggcccctccttcaggaggaagatggggcctggccccgaccaggaaggctcaacacaagcctggcagaaaaggcggtctagcgacgatgctggtcctggatcttggaagcccccgccccccccgcagagcaccaagccttctttctctgcaatgcggcgagctgaggcgacttggcacatcgccgaggagagtgctcccaaccattcctgccagagtccctccccagctagccaggacggtgaggaggagaaggagggaactctttttcccgaaagaacactgccagctagaaatgccaaactgcaagacccggccctggccccttggccccccaagcctgtcgctgtcccacggggtcgtcagccccctcaggagcccggggtgagggaagaagcagaggcaggagacgctgcccccggagtgaacaagcctcgcttgcggttgagtagtcaacaggatcaggaggagcctgaggttcagggccctcctgaccccggaagacgaacagcaccgttaaagcccaagcgtacccggcgcgcacagtcctgtgacaaattggaacctgacaggagacggccgccagatcctaccggcacatccgaacctgggactgactag

SEQ ID NO: 236295 - DNA, 4119 bp, Artificial Sequence
  derived and/or modified sequence
atggccaagcccagcgtggagctgacccgggagctgcaggacagcatccgaaggtgtctttcccagggcgccgtgctgcagcaacatcacgtgaaactggaaaccaagcccaagaagtttgaggaccgtgtgctcgcacttacctcttggcgcctgcatctgtttctcctgaaagtccctgccaaggtggagagctcgttcaatgtgctagagatccgcgcatttaatacactcagccagaatcagatcttggtcgaaaccgagcgcggcatggtgtctatgaggttgccctctgcagagtccgttgatcaagtaacccggcacgtgtcaagtgctctgagtaaggtatgtccgggccccggctgtcttatcaggagaggtaatgccgacaccccagaagggccccgtgatacgagcccaaattctgagacgagcaccagtacaacgcatagtgtatgtggggggttctcagagacctacgccgccctgtgcgactacaacggactgcactgcagagaagaggtccagtgggatgtcgacacaatttaccatgcagaggataaccgggagttcaacctgctggatttctcccatctggagtcgcgcgaccttgcactgatggtagctgccttggcatacaaccaatggttcaccaaactctactgtaaagatctgcgactgggtagcgaggtcctggagcaggtgctccatactcttagtaaatcaggcagccttgaggaattagtactcgataatgccggactcaagacggatttcgtccaaaagctggccggggtgttcggcgagaacggttcatgcgtacttcacgccctcactctgtcccacaaccccattgaggataaggggttcttaagcttgagccagcaactcctctgtttcccatctggcctgacgaagctctgcctggccaagaccgccatctccccacgagggttgcaggcccttggccagacattcggcgccaaccctgctttcgcaagctcgctgcggtacctcgacctgtctaagaaccctggccttttggcaaccgatgaagccaatgccctttattccttcctggcgcagccgaacgcacttgttcatttggacctgtccgggaccgattgcgtcatagatctgctcctgggcgcgctgctgcacgggtgctgttcacacttaacttatctgaatctggctcgaaatagctgctcccacagaaaaggcagagaggcgcccccggcattcaaacaattctttagcagcgcttatacgctgtcgcacgtcaacctgtctgctactaagttgcccctagaagcattgcgggccctgctgcagggactaagtttgaacagccatttgtccgaccttcacttggacctgagctcctgcgagctgcgatctgccggggctcaggctctgcaggagcagttgggcgccgtaacctgtgttggctcccttgacctcagcgataatgggttcgactcagacctcctaaccctggtgccagccctcgggaagaacaaaagtctgaagcacctgttcctgggtaaaaatttcaacgtcaaggccaaaacactggaggaaattctccataagttagttcaacttattcaagaggaagattgctccttgcagtccttaagcgtggcggattcaaggctgaagttgcgcacaagtattctgatcaacgcacttggatcgaatacttgcctcgccaaggtggatttgagtggcaacgggatggaggacatcggtgctaaaatgctgtctaaggcccttcaaattaacagttcccttaggacaattctgtgggaccggaataatacctccgctctcggcttcctggacatagcccgggccttggagtcaaaccacacacttaggtttatgtcgtttccagtgtcagacatcagccaagcttatagatcagcaccggagcgaactgaagatgtctggcagaagatccaatggtgcctggtccgaaataaccactcccagacctgcccccaagagcaggcttttcggctccagcaggggctggtgacaagctcagcagagcagatgctgcaaaggctatgcggacgcgtacaggaggaggtgagggccctgcggctgtgtccattagagccagtccaggacgagcttctctatgcacgagacctgatcaaagacgcaaagaactcacgggcattgtttcctagtctgtacgaacttggtcatgtgctggccaacgacgggccggtaaggcagaggctggagagcgttgcctccgaggtgagtaaagccgtggataaagagttgcaagtaattctcgaaagcatggtgtccttaacacaggagttatgtcctgtcgctatgagagtggctgaggggcataataagatgctgagcaatgttgctgagcgcgtcacagtcccccggaatttcatcagaggggctctcctggagcaggcaggacaggacatccaaaataagttagatgaagtgaagctatccgtcgtgacctacctcaccagctcgatagtcgacgagattttacaggaactgtaccacagccacaagtctcttgctcgccacctcactcagctgaggaccctgtccgatccccccggatgccccgggcaggggcaggatttatcttccaggggcagaggtaggaaccatgaccatgaggagacaacagacgatgagttgggaactaatatcgacaccatggcgatcaagaaacagaaaaggtgtcggaagatacggcccgtgtcagcttttattagtgggtccccacaggacatggaaagccagctaggaaacctgggaatccccccaggctggttttcagggctcggtgggagccagcctacggcgtcgggctcttgggaaggccttagcgagctgcccacacatggctataagttaaggcaccaaactcagggaagacccaggccgcctcgcaccactccgcctggcccgggaagaccttcaatgccagcccccggcactcgacaggagaacggcatggcaaccaggctggatgaggggttggaggactttttttcccggcgtgtgctcgaggagtctagcagttatcctcggaccctgcgaaccgttcgccctggcctgtcggaagcgccactgccaccattacagaagaaacgaagacgtgggctctttcattttaggagacctcggagtttcaagggcgatcgcgggcctggtagcccaacaaccgggctgctcctaccaccacccccacctccaccacccacgcaggagagtccgcccagtcccgacccgccatctcttggtaataatagctcgccctgttggtcacctgaggaggagagctccttactgcctggattcggcggcggccgtggacccagtttccgacggaagatgggtactgagggcagcgaaccaggtgagggagggcctgcaccaggcacagcccagcaaccacgcgtccacggtgtggccctgccgggtcttgagcgtgcaaagggctggtcttttgacggtaaacgagaaggtcccggcccggaccaggaaggtagcacgcaggcttggcagaagaggcgtagcagtgacgacgcagggcctggctcttggaagccaccgccccccccgcagtctactaagccctccttctcagcgatgagaagagccgaagccacctggcacattgcagaagaaagtgcccccaatcattcctgccagtcaccgtccccggcctctcaggatggcgaggaggagaaggagggcacccttttcccagagagaacccttcctgccagaaacgctaaactgcaggacccagccttggccccctggcctccgaagcccgtcgctgtgccaaggggacggcagcctcctcaggagccaggagtacgggaagaagctgaggcgggggacgccgctcccggcgttaacaaacctagactcaggctcagttctcagcaagatcaggaggagcctgaggtgcagggcccaccggatcccggtagacggactgcccccctgaaacctaaaagaacgcgcagggcacagagctgtgataaattggagccggatagacgtaggccacctgatccaaccgggacctctgaacctgggactgactag

SEQ ID NO: 236296 - DNA, 1278 bp, Artificial Sequence
  derived and/or modified sequence
atggcaattaaaaaacagaaacgatgtcgcaagatacggccagtgtccgcttttatatctggcagcccacaggatatggagagccagctggggaacctggggattccccctggctggttctccggactggggggtagtcagcctaccgcctctggcagctgggaagggctgagcgagttgcccacccacggatacaaattgagacaccagacacagggaaggccgaggccacccaggaccaccccccctgggccaggcaggcctagtatgcctgctccagggacccggcaagaaaacgggatggctactagactggatgaagggctcgaagacttcttcagcaggcgggtgcttgaggaatcctctagctatcctcggacccttcgcaccgtgaggccagggctgagtgaggcccctttacccccactgcagaagaagcgtcgcagaggtctattccatttccgcagaccgagatcgttcaaaggcgatagaggccctggatcccctaccactggtctgttgctgccaccccctccacctccaccaccgactcaagagtcacctccatctcccgaccctccaagtcttgggaacaactctagcccatgttggagccctgaggaggagagctcacttttgcctggcttcgggggaggtcgcggacctagctttcgtagaaaaatgggtccgggtccggaccaggagggaagtacccaggcatggcagaagcggagatcctccgatgatgctggacctgggtcttggaagccacctcctcctccgcaaagtaccaaaccctcatttagcgccatgagaagagcggaggcaacctggcatatcgctgaggagtcagcgcctaaccactcgtgccagagtcctagccctgcttctcaagacggagaggaagaaaaggagggtaccctcttccccgaaaggacacttcccgcacgaaacgcaaagcttcaggaccccgcattggccccatggccacctaagcctgttgccgtgcctaggggtcggcagcctcctcaggagcccggtgttcgtgaggaggctgaggccggagatgctgccccaggcgtgaacaagcctcggctccgactatcttcccagcaggatcaagaggagcctgaagtgcagggtccgccagatccaggtagaaggacggcaccattgaaaccaaaaaggactcgccgagcccagagctgtgataaacttgagcctgaccggagacgcccacctgaccctacgggaacaagtgagccaggcacagattag

SEQ ID NO: 236297 - DNA, 4119 bp, Artificial Sequence
  derived and/or modified sequence
atggctaaaccctcagtcgagttgaccagggaattgcaggactccatcaggagatgcttatcacagggcgcagttctccagcagcaccacgtgaagttagagaccaaacctaaaaagttcgaggacagggtgttagcattaaccagttggcggcttcatctctttctgctcaaggtcccagcaaaagtggaatcatcattcaacgtactggagattcgcgctttcaacacactcagccaaaatcagattctggtggagacagagcgcggaatggtgtctatgaggctgccttccgctgaatccgtcgaccaagtcactagacacgtgagcagcgcgctttcgaaagtttgcccgggacctggctgtctgatccggagagggaacgctgatacccccgaaggtcctagggataccagtcctaacagtgagacttctaccagtaccacccactctgtttgcggagggttctcagagacatatgcggctctgtgcgattataatggtctccactgtagagaagaagtgcagtgggacgtcgacaccatatatcacgccgaggataaccgtgagtttaatctgctcgacttttcacatcttgaatctcgggatcttgcccttatggtggcggctctggcctataatcagtggtttaccaagctatattgtaaagatctgcggctgggttctgaagttttggagcaggtgttgcatacactttctaagtccgggtcgctggaggaactcgtcctcgacaacgcaggattgaaaactgatttcgtccagaaactagctggggtttttggcgagaacgggtcttgtgtgttgcatgcactcaccctctcacacaatcccatcgaggataagggctttctaagcctgagtcagcagctgctctgttttccctcaggactcacaaaactgtgtcttgccaaaactgctatcagccctagggggcttcaggctctcggccagacattcggcgctaatcccgctttcgcctcgagccttcgctatctggatctgtcaaaaaaccccggtctgctcgccactgatgaagccaatgctttgtacagcttcctggcgcagcctaatgcgttagtccacctggatctgtcgggaacggactgtgttatcgacctactcctgggagctttgctgcatggatgttgctctcacctcacctaccttaacttagcacggaacagctgcagccatagaaaaggccgagaggcgccaccagccttcaaacagttctttagtagtgcatatactttgtcacatgtcaatttaagcgctaccaagctcccccttgaggcactccgggctctgctccaggggttgtccctgaattcccatctaagcgaccttcacctggatttgtctagctgtgagctgagaagtgcaggcgctcaagctttacaagagcagctcggagctgtcacatgtgtgggaagcctggacttgtcagataacggcttcgacagcgatcttctaaccttggtacccgcactgggaaagaacaagtcactgaagcacctcttcctcggaaagaatttcaacgtcaaagcaaagaccctcgaggaaattctccacaaactcgttcaactgattcaggaggaggattgtagcctgcagtcactgtccgtcgcagattctaggttaaagctgaggacctcgatacttatcaacgccctgggttccaatacgtgcttggccaaagtggacctgtccggaaacggcatggaagacataggtgctaagatgctgtcaaaagctctccagatcaacagtagcttgaggaccatcctgtgggacaggaataacacgtctgccctggggttcttggatatcgcccgtgctctggagtcaaaccacaccctgcggtttatgtcatttccagtctccgacatttcccaagcgtatcgctccgctcccgaacgaacagaagacgtctggcagaagatccagtggtgtcttgtgaggaataaccattctcaaacatgccctcaggagcaggcgttccgactgcagcaagggctggtgactagctccgctgagcagatgctgcaacggctctgcggtagagtgcaagaagaagtgagagctctgcggttgtgcccccttgagcctgtgcaggatgagttactttacgcaagagatcttattaaggacgctaagaactctagagcgctgttcccctcattgtatgagcttggtcacgttctggctaatgacggtccagttaggcagaggctcgaaagtgtggcgtctgaggtgtccaaggctgttgataaagaactgcaggtgattcttgagtccatggtatccttgacgcaggagctttgtcctgtcgccatgagggtcgccgaaggacataacaagatgctcagtaacgtggcggagagagtgactgttccacggaatttcattcgcggtgctctgctcgaacaagccggtcaggatattcagaataagctggacgaggtgaaactaagcgtggtgacctaccttacaagctccatagtggacgaaattttgcaagagctgtatcacagccataaaagtctggcccgtcacctgacccagctgcgtacattgtctgacccaccaggttgtccgggacagggccaggatctcagcagtaggggaagaggccgaaatcatgaccatgaggaaacaaccgacgacgaactcggaaccaacattgatactatggctatcaagaagcaaaaaaggtgtaggaagattagacctgttagcgcatttataagtgggtcgcctcaggacatggagagccagctgggtaaccttggcattccccctgggtggttctctggcttgggaggaagtcaaccgacagcgtcagggtcttgggagggattaagcgagttgcctacacacggctataaactgcgccatcagacacaggggagaccaagaccgccaaggacgactcctccaggaccaggaaggcccagcatgcccgcacctggcacccggcaagagaacggcatggcaacgcgcctagatgaaggcctggaagactttttcagccgaagagtcttggaagagtccagttcctatccccgtaccctccggacagtgcggccaggtctgagcgaggcacctttgccccctctgcagaaaaaacgccgaaggggactttttcattttcgcagaccgaggagctttaagggagacagaggcccaggatctccaactactggactgctgctacccccacccccaccgccaccccctacacaagagtcgccgccatcgcccgacccaccgagcctgggcaacaattcaagtccctgctggtctcccgaagaggagtcctccttgctgcctgggttcggcggtggacgaggccctagctttagacggaagatgggaaccgaaggatcagagcccggtgagggaggccctgcgcctggcacagcccagcagcctcgcgtgcacggcgtggctctccccggattggagagggcaaaggggtggagctttgacggtaagagagagggcccagggcctgaccaggagggttcaacccaggcatggcagaaacggagaagtagcgatgacgcaggaccaggcagctggaagcctccacctccaccccagtcaactaaacctagcttcagcgctatgaggcgagccgaggctacctggcatatcgccgaagagtctgcccctaaccactcatgccaatcaccatccccagccagtcaggacggggaggaagagaaggaaggcacactgtttcccgaaaggacactcccggcacggaacgccaagctgcaggatccagctctggcaccatggcctcctaagcctgttgccgttccacggggtcgacagcctcctcaagaaccgggagttcgggaggaagccgaggctggtgacgccgcacccggagtcaacaagccaagactgcgcctctcttctcagcaggatcaagaggagcctgaagtgcaggggcctcccgacccaggccgtcggaccgcacctcttaagccaaagaggactcgacgcgctcagtcgtgcgacaagctcgagccggataggaggcgccctcctgacccaacagggacttccgaacccggtacagactag

SEQ ID NO: 236298 - protein, 723 aa, Artificial Sequence
  derived and/or modified sequence
MPLFFRKRKPSEEARKRLEYQMCLAKEAGADDILDISKCELSEIPFGAFATCKVLQKKVLIVHTNHLTSLLPKSCSLLSLATIKVLDLHDNQLTALPDDLGQLTALQVLNVERNQLMQLPRSIGNLTQLQTLNVKDNKLKELPDTVGELRSLRTLNISGNEIQRLPQMLAHVRTLEMLSLDASAMVYPPREVCGAGTAAILQFLCKESGLEYYPPSQYLLPILEQDGIENSRDSPDGPTDRFSREELEWQNRFSDYEKRKEQKMLEKLEFERRLELGQREHTQLLQQSSSQKDEILQTVKEEQSRLEQGLSEHQRHLNAERQRLQEQLKQTEQNISSRIQKLLQDNQRQKKSSEILKSLENERIRMEQLMSITQEETESLRRRDVASAMQQMLTESCKNRLIQMAYESQRQNLVQQACSSMAEMDERFQQILSWQQMDQNKAISQILQESAMQKAAFEALQVKKDLMHRQIRSQIKLIETELLQLTQLELKRKSLDTESLQEMISEQRWALSSLLQQLLKEKQQREEELREILTELEAKSETRQENYWLIQYQRLLNQKPLSLKLQEEGMERQLVALLEELSAEHYLPIFAHHRLSLDLLSQMSPGDLAKVGVSEAGLQHEILRRVQELLDAARIQPELKPPMGEVVTPTAPQEPPESVRPSAPPAELEVQASECVVCLEREAQMIFLNCGHVCCCQQCCQPLRTCPLCRQDIAQRLRIYHSS

SEQ ID NO: 236299 - DNA, 2172 bp, Artificial Sequence
  derived and/or modified sequence
atgcctcttttttttcgcaaaagaaagccctctgaagaggcccgcaagcgcctagagtaccagatgtgtctggctaaggaagccggtgcagatgacatcctcgacatctctaaatgtgaactgtccgagataccgtttggtgcctttgccacatgcaaagttttgcaaaaaaaagtactgattgtccataccaatcacctcacgtcactgctcccaaagagttgcagcttactctctctggctaccatcaaagtcctggaccttcacgacaatcaactaacggccctgcccgatgacctggggcagctgaccgcccttcaggttctgaatgtggaacgaaaccagctgatgcagctgcctagaagtatcgggaatctgacacaactgcagacgttaaacgtcaaggacaataagttgaaggagctgcctgatacagtcggagagcttcgatccctaagaacgctgaacattagcggtaatgaaatccagcgtctgccacagatgctggctcacgttagaacccttgagatgctctcccttgatgcttccgcgatggtgtatccgcctagggaggtatgtggggctggaactgccgctattctgcagttcctttgtaaggaatcagggctcgaatactatccaccctctcagtatctgctgccaatcttggagcaggatggcatcgagaattccagagattccccggatggacccactgacagattctctcgcgaggagctggagtggcagaatcggtttagcgactacgaaaaacggaaggaacaaaaaatgctggagaaactggagtttgagagacggcttgagctaggccagcgagaacacacccagctgctgcagcaatcaagcagtcaaaaagacgagattcttcaaaccgtgaaagaagagcagagccggttggaacagggtctaagcgagcaccagaggcatctcaacgccgagcggcagagactgcaggagcagctgaagcagactgagcagaacattagcagtcggatccagaagctcctgcaggataatcaaagacagaagaagagctccgagattctcaaatctctagaaaatgaaaggataagaatggaacagctcatgagcatcacacaggaggaaaccgagtcccttaggagacgggacgtggcctccgcaatgcagcagatgctgactgagagttgtaaaaatcgcctgatccagatggcttatgaaagccagagacagaatcttgtgcaacaggcgtgctcatcgatggccgagatggatgagcgatttcagcagattctcagctggcaacaaatggatcagaataaggctataagccagattttacaggagagcgccatgcagaaggcagcattcgaggctctacaagtgaagaaggatcttatgcatagacagattaggtctcagattaaactaatagaaaccgaacttcttcagcttactcagctcgaactgaagaggaagtcattggacactgaaagcttacaggaaatgatcagtgagcagagatgggccctgtccagtcttctgcaacagttgctgaaggagaagcagcagagagaagaggagttacgcgaaattcttactgagctggaggccaagtcagaaacacgacaggaaaattattggctgattcaatatcaaaggctgctcaaccagaaacctctgagtctgaagctccaagaggagggcatggagcgtcagctcgtggccctactcgaggagctatccgctgaacactacctgcctatcttcgcgcaccacagactgagtcttgacctcctttcacagatgtcaccaggagacttagcaaaagtgggggtatccgaagccgggctgcagcacgagatcctaagacgagtccaagaattacttgacgccgcccgcatccagccagagcttaaaccccccatgggggaagttgtaacgcccactgcgccccaggagccccccgaaagtgtgcgaccttccgccccgccggccgagctggaggtccaggcgagtgaatgtgtagtttgcctcgaacgggaagctcagatgatctttttgaactgtggccatgtctgttgttgtcagcaatgttgtcaacctctgcgtacgtgtccactttgccgccaggacattgcccagcgactgagaatctaccacagttcttag

SEQ ID NO: 236300 - DNA, 2172 bp, Artificial Sequence
  derived and/or modified sequence
atgcccctgtttttccgaaagagaaaaccatctgaagaggcccgaaagagactggagtaccagatgtgcctggcaaaggaggccggcgccgacgatattttagatatatctaagtgtgagttgtccgagatcccgttcggtgccttcgccacctgtaaggtgcttcagaagaaagtcctgattgtgcacacgaaccacctgactagcctgctgcccaagagctgttccctgctgagtctagcgacgatcaaggttctggacctccatgataaccagctgacagctctgcccgatgatttaggacagctcactgccctgcaggtgttgaatgtggagcgcaatcaactgatgcagctgcctagatccatcgggaacctgactcaactgcagaccttgaatgtgaaagacaacaagctcaaagagttgcccgatactgtcggtgaattacgctctttacggactctgaacatttctggaaacgaaatccagaggctgcctcagatgctggctcatgttcgcaccctagaaatgctaagtctcgacgcgagtgcaatggtgtatccaccacgtgaagtctgcggagctggtaccgctgccatattgcagttcctatgcaaggaatcaggcctcgaatactacccccccagccaatatctgctccctatccttgaacaggacgggattgagaactccagagattctcccgacggcccaactgaccgcttttctcgggaggagctagagtggcagaataggttctctgactacgaaaaaagaaaggaacaaaagatgttggagaaactagagttcgaaaggcgcctcgaactgggacagcgggaacacacacagctgctgcagcagtcaagttctcaaaaggacgaaattctccaaactgttaaagaggaacagtcgaggttagaacaggggctgtctgagcatcaacggcatcttaatgccgagcgccagcggcttcaagaacaactgaagcaaaccgagcagaatatatccagtcggatccagaagttgctgcaggataatcagagacagaagaaatccagcgagattctgaaatcccttgagaatgagcggattcgcatggagcaattaatgagcatcacccaggaggagacagaaagccttcgtagacgcgacgtggcctctgccatgcagcaaatgctgacagagtcttgtaagaatcgcctcatccagatggcctatgaatctcagcggcagaatctcgtacagcaagcgtgctcctcgatggcagaaatggatgagcgctttcagcagatcttgtcatggcaacagatggaccagaataaagccatctcccagatcctccaggaaagcgccatgcaaaaagccgcattcgaagcactgcaggtgaagaaggatcttatgcacagacagatccgctcccagatcaaactgatagagaccgaactcctgcaactgacacaacttgagttgaagcggaaatcccttgataccgaatccctccaggagatgatttccgaacagagatgggccctctcttcgcttctacagcaactcttaaaagagaagcaacagcgcgaagaggagcttagagagattttaacagagctggaggccaaatcagaaactcgccaagagaactactggctgattcaataccagagattgctaaatcaaaagccactctcactaaaactccaagaagaaggtatggagcggcaattagtggctttgctagaagagctttccgctgagcactacctgcctatatttgcccaccacagactaagccttgacttgctatcacagatgagccctggggacctggctaaagtcggagttagcgaagccggcctccagcatgagatccttcgcagagtccaggagctgttggacgccgccaggatccaaccggagttgaagccaccaatgggcgaagtcgtaacaccgacggcaccacaggagcctccagagtctgtaagacccagtgcgccccctgcagaactggaggtgcaagcctctgagtgtgtcgtctgcctcgaaagggaagctcaaatgatttttctgaactgtgggcatgtttgttgttgtcagcagtgttgccagccgctccgcacttgtccactgtgccgccaggacatcgcacagagattgcgtatatatcacagtagttag

SEQ ID NO: 236301 - DNA, 2172 bp, Artificial Sequence
  derived and/or modified sequence
atgcccttgttcttccggaagagaaaacctagcgaggaggcccgcaagcggttggagtatcagatgtgtctcgcaaaggaggccggtgctgacgatatcttggacataagtaagtgcgagttatcagaaattccttttggagctttcgctacctgtaaggttctgcaaaaaaaggtcctcatcgtccacaccaatcatttgacaagtctgttgcccaagtcctgctcactgctttccctggccaccatcaaagttctggatctgcacgacaaccagttaacagcccttccagatgaccttggacagcttacagcactacaggtgttaaatgtagagcgtaatcagttgatgcagctgccacggtccattgggaacctgactcaactgcagacacttaatgtcaaggataacaaactaaaagaattgcctgataccgtcggggaactgaggagtcttcgtacattgaatatcagcggaaacgagattcaacgactcccacaaatgctcgcccatgtgaggacgctggagatgctgtctctggatgcatccgctatggtctacccacctcgagaggtgtgcggggcgggcaccgccgccattcttcagtttctttgcaaagagtccggactcgagtactaccctccttctcagtatttgctaccaatactagaacaagatggtatcgaaaacagcagagactcccccgacggacctacagatcgtttctcccgggaagagctggaatggcagaaccggttctcggactatgaaaagcgcaaagagcagaagatgttagaaaaactggaatttgaacggagactggagcttggacagcgggagcatactcaactgctgcagcagtcatctagtcagaaagacgaaattttgcagacagtgaaagaagagcagtctcgcctagaacaaggcttatctgagcaccagagacaccttaacgccgaacggcagcgtctgcaggagcaattaaagcagaccgagcaaaatatttcctctcgcatccaaaaacttctgcaggataaccaacgtcagaaaaaatccagtgaaattctgaagtcccttgaaaacgaaaggatccgcatggaacagctgatgagtatcacgcaggaggagaccgagtcactcagaagacgggacgtggccagcgcaatgcagcaaatgctgacagagtcctgcaaaaatcgcctgatccaaatggcctatgaatcacagagacagaacttagtccagcaggcctgttcctccatggcagaaatggacgaacgattccagcagatcttgagctggcaacaaatggatcagaataaagccatctcccagatcctgcaggagtctgccatgcagaaagccgcctttgaggctctgcaagtaaagaaggacctaatgcaccgacagatacgctcccaaatcaaactgatagagacagagctgttgcagctgacccagctggagctgaagcgcaagagcctggataccgaaagcctgcaggagatgatcagcgagcagcgttgggccctgagctcgttgctccaacagctcctcaaggagaagcagcagcgcgaagaggaactacgcgagatcctgaccgaactggaagccaagagcgaaaccaggcaggagaactattggctaatacagtatcagaggctgcttaatcagaaaccactgtcgctcaagctccaggaagaagggatggagcggcaactcgttgctctgctcgaggaactgagcgccgagcactacctgccaattttcgctcatcaccgactgagtcttgacctgttgagccagatgagtccaggggatctcgcaaaagtgggcgtctccgaagctggattgcagcatgaaatcctgcgccgtgtccaggaactgctggacgccgctcgaattcagccagaactcaaacccccgatgggagaagtggtcacgcctacagcaccgcaggaaccccccgaaagcgtacgcccatcggcacctcctgccgaactggaggtccaggcaagcgaatgtgtggtttgcctggaaagagaggctcaaatgatattcctgaactgtggtcacgtgtgttgctgccaacaatgttgccagcctctccgcacatgccccctttgtagacaggatatagcccagcggcttagaatttatcacagtagctag

SEQ ID NO: 236302 - DNA, 2172 bp, Artificial Sequence
  derived and/or modified sequence
atgcccctcttcttcaggaagaggaagcccagcgaggaggccaggaagaggctggagtaccagatgtgcctggccaaggaggccggggctgatgacatcctggacatcagcaaatgtgagctgtctgagatcccctttggagcctttgccacctgcaaggtgctgcagaagaaggtgctgattgtgcacaccaaccacctgaccagcctgctgcccaagagctgcagcctgctgagcctggccaccatcaaggtgctggacctgcatgacaaccagctgacagccctgcctgatgacctgggccagctgacagccctgcaggtgctgaatgtggagaggaaccagctgatgcagctgcccaggagcatcggcaacctgacccagctgcagaccctgaatgtgaaggacaacaagctgaaggagctgcctgacacagtgggggagctgcggagcctgcggaccctgaacatctctggaaatgagatccagaggctgccccagatgctggcccacgtgaggaccctggagatgctgagcctggatgccagcgccatggtgtacccaccccgggaggtgtgtggggccggcacagctgccatcctgcagttcctgtgcaaggagagcggcctggagtactacccacccagccagtacctgctgcccatcctggagcaggacggcatcgagaacagccgggacagcccagatggccccacagaccgcttcagccgggaggagctggagtggcagaaccgcttcagtgactatgagaagaggaaggagcagaagatgctggagaagctggagtttgagcggcggctggagctgggccagcgggagcacacccagctgctgcagcagagcagcagccagaaggatgagatcctgcagacagtgaaggaggagcagagccggctggagcagggcctgtctgagcaccagaggcacctgaatgctgagcggcagaggctgcaggagcagctgaagcagacagagcagaacatcagcagccgcatccagaagctgctgcaggacaaccagaggcagaagaagagcagcgagatcctgaagagcctggagaatgaaagaatccgcatggagcagctgatgagcatcacccaggaggagacagagagcctgcggaggagagatgtggccagcgccatgcagcagatgctgacagagagctgcaagaacagactcatccagatggcctatgagagccagaggcagaacctggtgcagcaggcctgcagctccatggccgagatggatgagcgcttccagcagatcctgtcctggcagcagatggaccagaacaaggccatcagccagatcctgcaggagagcgccatgcagaaggccgcctttgaggccctgcaggtgaagaaggacctgatgcaccggcagatccgcagccagatcaagctgattgaaacagagctgctgcagctgacccagctggagctgaagaggaagagcctggacacagagagcctgcaggagatgatcagcgagcagcgctgggccctgagcagcctgctgcagcagctgctgaaggagaagcagcagcgggaggaggagctgcgggagatcctgacagagctggaggccaagtctgagacccggcaggagaactactggctgatccagtaccagaggctgctgaaccagaagcccctgagcctgaagctgcaggaggagggcatggagcggcagctggtggccctgctggaggagctgtctgctgagcactacctgcccatctttgcccaccaccggctgagcctggacctgctgagccagatgagccctggggacctggccaaggtgggcgtgtctgaggccggcctgcagcacgagatcctgcggcgggtgcaggagctgctggatgctgcccgcatccagcctgagctgaagccacccatgggagaggtggtgacccccacagccccccaggagcccccagagagcgtgcggcccagcgcccccccagctgagctggaggtgcaggcctctgaatgtgtggtgtgcctggagcgggaggcccagatgatcttcctgaactgtggccacgtgtgctgctgccagcagtgctgccagcccctgcggacctgccccctgtgccggcaggacatcgcccagaggctgcgcatctaccacagcagctag

SEQ ID NO: 236303 - DNA, 3146 bp, Artificial Sequence
  derived and/or modified sequence
agagacgcccttgtcgccatgtttgttgtgggcaggcgcctgaggctgacggctggcaagcagggcaccgcggtgcgctgaagctagagattccgaaagggggttcgggtagttcgctccggagaagtctgagaagggtggctccggtgatcccagccctagctgtttcccatattcctttatccacctgcctttgaaggagaccagactccggctccgcccggcccgtgccgggtggtctgcggccccgagtccgtgaccaagccctccgagtgatcggcctgccctcgggtgcacccgcgggtcccaacgtgggggatccctccatccgcaaagccagggtcctaaagatcgctctgggaaaagggaaggatgccgctcttcttccggaagcggaaacccagtgaggaggctcggaaacgcctggagtaccagatgtgtttggcaaaagaagctggggcagatgacattctcgacatctctaaatgtgagctctcagagattccatttggagcttttgcaacatgcaaagttctgcagaagaaggtgctgatcgtccacacgaatcacctcacttccctgcttcccaaatcctgcagcctcctgagtctggcaaccatcaaggttctagatctccacgataatcagctgacagcccttcctgacgatctggggcagctgactgccctccaggtcttaaacgtggaaaggaatcaactgatgcagctcccacgttccattgggaacctgacccagctccagactctcaatgttaaagacaacaagctgaaggagcttccagacaccgtgggggagcttcgaagcctgcgtaccctcaacatcagtggaaacgagatccagagattgccgcagatgctggctcacgttcgaaccctggagatgctgagccttgacgcctcggccatggtctacccgccgcgggaggtgtgtggtgccggcactgcggccatcttgcagttcctctgcaaagagtcagggctggaatactaccccccttctcagtacttgctgccaattctggagcaagatggaatcgagaactctcgggacagccctgatgggcccacggacagattctcaagggaggagttagagtggcagaacaggttctcagactatgagaagaggaaggaacagaagatgctggagaaactcgagtttgaacggcgcctggaactggggcagcgggagcacacccagctccttcagcagagcagcagccagaaggatgagatccttcagacggtcaaggaggagcagtcccggctggagcagggcctgagtgagcaccagcgccacctcaacgcagagcggcagcggctgcaggagcagctgaagcagacggaacagaacatttccagccggatccagaagctgctgcaggacaatcagagacaaaagaaaagctccgagattttgaaatcgctggaaaatgaaagaataagaatggaacagttgatgtccataacccaggaggagactgagagcctgcggcgacgtgacgttgcctccgccatgcagcagatgctgactgagagctgtaagaaccggctcatccagatggcctacgaatctcagaggcagaacttggtccagcaggcctgttccagcatggccgaaatggatgaacgattccagcagattctgtcgtggcagcaaatggatcagaacaaagccatcagccagatcctgcaggagagcgcgatgcagaaggctgcgttcgaggcactccaggtgaagaaagacctgatgcatcggcagatcaggagccagattaagttaatagaaactgagttattgcagctgacacagctggagttaaagaggaagtccctggacacagagtcactccaggagatgatctcggagcagcgctgggccctcagctccctgctccagcagctgctcaaagagaagcagcagcgagaggaagagctccgggaaatcctgacggagttagaagccaaaagtgaaaccaggcaggaaaattactggctgattcagtatcaacggcttttgaaccagaagcccttgtccttgaagctgcaagaagaggggatggagcgccagctggtggccctcctggaggagctgtcggctgagcactacctgcccatctttgcgcaccaccgcctctcactggacctgctgagccaaatgagcccaggggacctggccaaggtgggcgtctcagaagctggcctgcagcacgagatcctccggagagtccaggaactgctggatgcagccaggatccagccagagctgaaaccaccaatgggtgaggtcgtcacccctacggccccccaggagcctcctgagtctgtgaggccatccgctccccctgcagagctggaggtgcaggcctcagagtgtgtcgtgtgcctggaacgggaggcccagatgatcttcctcaactgtggccacgtctgctgctgccagcagtgctgccagccactgcgcacctgcccgctgtgccgccaggacatcgcccagcgcctccgcatctaccacagcagctgagtgctgcccgcccacctgggcctggtcctagccctgcctcggccactgtgagccccgggctcctgctcagccttgtgccagccagactcgtatgaggctcccccctgccctgggccccttccccactgcccaggagcccccatcctaagctccaagcatgtctgggccaggcagaggtgctcctcatccatgacaccaccagtctgaatggtcctgggggctggggctggagaggccgctgcaccaccacccgagcctgggagccagcgtcccagcctaatcacggatctgctgcctcccagctgtcttgactgaaggccaccgcccctgcaggagcttgggtcctcatctgggggccatgcacaggcccgtcccaccctgcatgtgggaagggagcaggagggcctggctgggtgaggggaggccttcctgggaaggcgtgtggtgcaggcctgtgctcacagtggcaccagcaaccctgggtctccctctctgctgctccccagaaccccggggccctcctgctctccacaactgtccctccttaccccatgtagctcgatccgaagcaggagtgtcaataaacctgtcttcagtgcgct

SEQ ID NO: 236304 - DNA, 3376 bp, Artificial Sequence
  derived and/or modified sequence
gtgggcaggcgcctgaggctgacggctggcaagcagggcaccgcggtgcgctgaagctagagattccgaaagggggttcgggtagttcgctccggagaagtctgagaagggtggctccggtgatcccagccctagctgtttcccatattcctttatcgtgagtgtcaccccggtccccgtcacccaatcccagagccccgcccctcccctgaggggtccgtagtcccattccgagaccccagtaccgcggcgacccctgctccctcgagcacttgttgtgtgcactttagttatcaaaacagtctatgtggaaatccagtcccgctcttcattcggagagtccgcgattcctagagcctcagacttcgtcatcccggtctgcgtgactttatgagattctgagtttctgttcccagcacctgcctttgaaggagaccagactccggctccgcccggcccgtgccgggtggtctgcggccccgagtccgtgaccaagccctccgagtgatcggcctgccctcgggtgcacccgcgggtcccaacgtgggggatccctccatccgcaaagccagggtcctaaagatcgctctgggaaaagggaaggatgccgctcttcttccggaagcggaaacccagtgaggaggctcggaaacgcctggagtaccagatgtgtttggcaaaagaagctggggcagatgacattctcgacatctctaaatgtgagctctcagagattccatttggagcttttgcaacatgcaaagttctgcagaagaaggtgctgatcgtccacacgaatcacctcacttccctgcttcccaaatcctgcagcctcctgagtctggcaaccatcaaggttctagatctccacgataatcagctgacagcccttcctgacgatctggggcagctgactgccctccaggtcttaaacgtggaaaggaatcaactgatgcagctcccacgttccattgggaacctgacccagctccagactctcaatgttaaagacaacaagctgaaggagcttccagacaccgtgggggagcttcgaagcctgcgtaccctcaacatcagtggaaacgagatccagagattgccgcagatgctggctcacgttcgaaccctggagatgctgagccttgacgcctcggccatggtctacccgccgcgggaggtgtgtggtgccggcactgcggccatcttgcagttcctctgcaaagagtcagggctggaatactaccccccttctcagtacttgctgccaattctggagcaagatggaatcgagaactctcgggacagccctgatgggcccacggacagattctcaagggaggagttagagtggcagaacaggttctcagactatgagaagaggaaggaacagaagatgctggagaaactcgagtttgaacggcgcctggaactggggcagcgggagcacacccagctccttcagcagagcagcagccagaaggatgagatccttcagacggtcaaggaggagcagtcccggctggagcagggcctgagtgagcaccagcgccacctcaacgcagagcggcagcggctgcaggagcagctgaagcagacggaacagaacatttccagccggatccagaagctgctgcaggacaatcagagacaaaagaaaagctccgagattttgaaatcgctggaaaatgaaagaataagaatggaacagttgatgtccataacccaggaggagactgagagcctgcggcgacgtgacgttgcctccgccatgcagcagatgctgactgagagctgtaagaaccggctcatccagatggcctacgaatctcagaggcagaacttggtccagcaggcctgttccagcatggccgaaatggatgaacgattccagcagattctgtcgtggcagcaaatggatcagaacaaagccatcagccagatcctgcaggagagcgcgatgcagaaggctgcgttcgaggcactccaggtgaagaaagacctgatgcatcggcagatcaggagccagattaagttaatagaaactgagttattgcagctgacacagctggagttaaagaggaagtccctggacacagagtcactccaggagatgatctcggagcagcgctgggccctcagctccctgctccagcagctgctcaaagagaagcagcagcgagaggaagagctccgggaaatcctgacggagttagaagccaaaagtgaaaccaggcaggaaaattactggctgattcagtatcaacggcttttgaaccagaagcccttgtccttgaagctgcaagaagaggggatggagcgccagctggtggccctcctggaggagctgtcggctgagcactacctgcccatctttgcgcaccaccgcctctcactggacctgctgagccaaatgagcccaggggacctggccaaggtgggcgtctcagaagctggcctgcagcacgagatcctccggagagtccaggaactgctggatgcagccaggatccagccagagctgaaaccaccaatgggtgaggtcgtcacccctacggccccccaggagcctcctgagtctgtgaggccatccgctccccctgcagagctggaggtgcaggcctcagagtgtgtcgtgtgcctggaacgggaggcccagatgatcttcctcaactgtggccacgtctgctgctgccagcagtgctgccagccactgcgcacctgcccgctgtgccgccaggacatcgcccagcgcctccgcatctaccacagcagctgagtgctgcccgcccacctgggcctggtcctagccctgcctcggccactgtgagccccgggctcctgctcagccttgtgccagccagactcgtatgaggctcccccctgccctgggccccttccccactgcccaggagcccccatcctaagctccaagcatgtctgggccaggcagaggtgctcctcatccatgacaccaccagtctgaatggtcctgggggctggggctggagaggccgctgcaccaccacccgagcctgggagccagcgtcccagcctaatcacggatctgctgcctcccagctgtcttgactgaaggccaccgcccctgcaggagcttgggtcctcatctgggggccatgcacaggcccgtcccaccctgcatgtgggaagggagcaggagggcctggctgggtgaggggaggccttcctgggaaggcgtgtggtgcaggcctgtgctcacagtggcaccagcaaccctgggtctccctctctgctgctccccagaaccccggggccctcctgctctccacaactgtccctccttaccccatgtagctcgatccgaagcaggagtgtcaataaacctgtcttcagtgcg

SEQ ID NO: 236305 - DNA, 2849 bp, Artificial Sequence
  derived and/or modified sequence
atcaggaagggggtgcaagagggttagtgattggggagcagaaggggtcctaaagatcgctctgggaaaagggaaggatgccgctcttcttccggaagcggaaacccagtgaggaggctcggaaacgcctggagtaccagatgtgtttggcaaaagaagctggggcagatgacattctcgacatctctaaatgtgagctctcagagattccatttggagcttttgcaacatgcaaagttctgcagaagaaggtgctgatcgtccacacgaatcacctcacttccctgcttcccaaatcctgcagcctcctgagtctggcaaccatcaaggttctagatctccacgataatcagctgacagcccttcctgacgatctggggcagctgactgccctccaggtcttaaacgtggaaaggaatcaactgatgcagctcccacgttccattgggaacctgacccagctccagactctcaatgttaaagacaacaagctgaaggagcttccagacaccgtgggggagcttcgaagcctgcgtaccctcaacatcagtggaaacgagatccagagattgccgcagatgctggctcacgttcgaaccctggagatgctgagccttgacgcctcggccatggtctacccgccgcgggaggtgtgtggtgccggcactgcggccatcttgcagttcctctgcaaagagtcagggctggaatactaccccccttctcagtacttgctgccaattctggagcaagatggaatcgagaactctcgggacagccctgatgggcccacggacagattctcaagggaggagttagagtggcagaacaggttctcagactatgagaagaggaaggaacagaagatgctggagaaactcgagtttgaacggcgcctggaactggggcagcgggagcacacccagctccttcagcagagcagcagccagaaggatgagatccttcagacggtcaaggaggagcagtcccggctggagcagggcctgagtgagcaccagcgccacctcaacgcagagcggcagcggctgcaggagcagctgaagcagacggaacagaacatttccagccggatccagaagctgctgcaggacaatcagagacaaaagaaaagctccgagattttgaaatcgctggaaaatgaaagaataagaatggaacagttgatgtccataacccaggaggagactgagagcctgcggcgacgtgacgttgcctccgccatgcagcagatgctgactgagagctgtaagaaccggctcatccagatggcctacgaatctcagaggcagaacttggtccagcaggcctgttccagcatggccgaaatggatgaacgattccagcagattctgtcgtggcagcaaatggatcagaacaaagccatcagccagatcctgcaggagagcgcgatgcagaaggctgcgttcgaggcactccaggtgaagaaagacctgatgcatcggcagatcaggagccagattaagttaatagaaactgagttattgcagctgacacagctggagttaaagaggaagtccctggacacagagtcactccaggagatgatctcggagcagcgctgggccctcagctccctgctccagcagctgctcaaagagaagcagcagcgagaggaagagctccgggaaatcctgacggagttagaagccaaaagtgaaaccaggcaggaaaattactggctgattcagtatcaacggcttttgaaccagaagcccttgtccttgaagctgcaagaagaggggatggagcgccagctggtggccctcctggaggagctgtcggctgagcactacctgcccatctttgcgcaccaccgcctctcactggacctgctgagccaaatgagcccaggggacctggccaaggtgggcgtctcagaagctggcctgcagcacgagatcctccggagagtccaggaactgctggatgcagccaggatccagccagagctgaaaccaccaatgggtgaggtcgtcacccctacggccccccaggagcctcctgagtctgtgaggccatccgctccccctgcagagctggaggtgcaggcctcagagtgtgtcgtgtgcctggaacgggaggcccagatgatcttcctcaactgtggccacgtctgctgctgccagcagtgctgccagccactgcgcacctgcccgctgtgccgccaggacatcgcccagcgcctccgcatctaccacagcagctgagtgctgcccgcccacctgggcctggtcctagccctgcctcggccactgtgagccccgggctcctgctcagccttgtgccagccagactcgtatgaggctcccccctgccctgggccccttccccactgcccaggagcccccatcctaagctccaagcatgtctgggccaggcagaggtgctcctcatccatgacaccaccagtctgaatggtcctgggggctggggctggagaggccgctgcaccaccacccgagcctgggagccagcgtcccagcctaatcacggatctgctgcctcccagctgtcttgactgaaggccaccgcccctgcaggagcttgggtcctcatctgggggccatgcacaggcccgtcccaccctgcatgtgggaagggagcaggagggcctggctgggtgaggggaggccttcctgggaaggcgtgtggtgcaggcctgtgctcacagtggcaccagcaaccctgggtctccctctctgctgctccccagaaccccggggccctcctgctctccacaactgtccctccttaccccatgtagctcgatccgaagcaggagtgtcaataaacctgtcttcagtgcg

SEQ ID NO: 236306 - DNA, 2172 bp, Artificial Sequence
  derived and/or modified sequence
atgcccctgttcttccggaagcggaagcccagcgaggaggcccggaaaagactggaataccaaatgtgccttgccaaagaggccggcgccgatgacatactcgatatctccaagtgcgagttgagcgaaattccgtttggtgccttcgccacctgcaaagtgcttcaaaaaaaggtgctgatcgtgcacacaaaccatttgactagtttgcttcccaagagctgcagtcttctttcattagcaactatcaaggttctggatttgcacgacaaccagctgaccgctcttcctgatgacctgggacagcttaccgctctgcaggtgttaaatgtcgaaaggaaccagcttatgcagctgccaagaagcatcggcaacctcacccagctgcagacactaaatgtgaaggataacaagttgaaggagctccctgacacagtcggcgagctgcgcagtttacggactcttaacattagcggaaacgagatccagagactgccccaaatgctagcccatgtgcgtacgctggaaatgttaagtctggatgcgtctgccatggtgtatcccccaagggaggtctgcggagccggtacagctgctatcctgcaattcctgtgcaaggagtccggtctggaatattatcccccctcccaatatctgcttcccatccttgaacaagacggtatcgagaactcccgggactcgcctgacgggcctactgaccgattcagcagagaggagctggagtggcagaatagattctccgactacgagaagagaaaggagcagaaaatgcttgaaaagctggagttcgaaagaaggctcgaactcggtcagcgagaacacacgcagctcctgcagcagtcaagctcgcagaaggatgagatcctgcaaactgttaaggaggagcaatctcgtttggagcagggcctaagcgagcatcagcgtcatctgaatgccgaaagacaacgcctgcaggagcagcttaaacagacggagcagaacatttcctcccggatccaaaagctgctccaggataatcaaagacagaaaaagtctagcgagatcctaaaaagcttggaaaacgaacgaattaggatggagcagctgatgagcattactcaagaagagaccgagtcgcttaggaggagggacgtggccagcgcaatgcagcagatgctgactgaatcctgcaaaaaccggctgatccagatggcatacgagagccaacgccagaacttggttcagcaggcttgtagtagtatggccgaaatggacgagagattccaacagatcctatcctggcaacagatggatcagaacaaggccattagccagatcctgcaggaatctgcaatgcagaaggccgctttcgaggcgctgcaggttaagaaggacctgatgcacaggcagattcggtctcagattaaactgatcgagacggaactgctccagcttacccagctggaactaaagaggaaaagcctcgacactgagtcactgcaagaaatgatctctgagcagcgatgggccctgtcatcacttctgcagcagctgttaaaggaaaagcagcagcgggaagaagagctccgagaaattctgactgaacttgaagcaaaaagcgagacgcgccaggagaattactggttgatccaatatcagcggctgttgaaccagaaacctcttagcctcaaattgcaggaagaaggaatggaacggcaactcgtcgcactcctggaagaattaagcgcagaacactatttaccaatattcgcccatcaccgactcagtctcgatttgctgagtcaaatgtctcccggcgatctggctaaagtcggagtaagtgaagccggcctgcagcacgagatcttgaggagggtgcaggaactgctggacgccgcaaggattcagcctgagctgaagcctcctatgggggaggtggttactccaaccgctccgcaggaacctcccgaaagtgtgcggccatccgccccacctgccgagctggaagtgcaggcctccgaatgtgtcgtgtgccttgaacgggaggctcaaatgatctttctgaactgtggccacgtatgctgctgtcaacagtgctgccagcccctccgaacttgccccctgtgccggcaggacatcgcccagaggctccgcatctaccattcatcttag

SEQ ID NO: 236307 - DNA, 2172 bp, Artificial Sequence
  derived and/or modified sequence
atgcccctgttcttccggaagcggaagcccagcgaggaggcccggaagaggctcgaatatcagatgtgtctggcaaaagaggctggagctgatgacattctggacatctccaaatgtgagttgagcgagattccgtttggcgctttcgcaacgtgtaaggttcttcagaagaaggtcttgatcgtgcacaccaaccatctcactagcctcttgcctaaatcttgttccctgctgagtctggctaccatcaaggtgcttgatctgcacgacaatcagttaactgccttgcctgacgacctgggacagctgacggcgctccaggttcttaatgtagaacggaaccagctgatgcaacttcccaggtcaattgggaatctgacccagcttcagaccctgaacgtgaaggacaacaaactgaaggagctgcccgatactgtgggtgaactcagaagtctcaggaccttgaatatctctggaaacgaaattcagcggttgccgcagatgctggcccatgtcaggactctggagatgctatccctggatgcttccgctatggtctacccaccgcgcgaagtctgtggtgccggaactgcagcaatacttcaattcttgtgcaaagagagtggcctggagtattacccgccaagtcagtatctgctgcccatcctggaacaggacggaatcgaaaactcccgtgattctcctgacggccctacagacagattcagccgcgaagagctcgagtggcagaacagattttccgactatgagaagcgcaaagagcaaaaaatgctggaaaaacttgagttcgaacgcaggctcgagcttggccagcgcgaacacactcaactgctccagcaaagttcctcccaaaaagacgagattttgcagaccgtgaaagaggagcaaagtcgtctggaacaaggactatcagagcatcagcggcatcttaacgcggagaggcagagactccaagagcaattaaaacaaacagagcagaatatttcatctagaatccagaagctgctccaggataaccagagacagaaaaaaagttccgagatcttgaaaagcttagaaaatgaaagaatcagaatggaacagttgatgtcaatcacacaggaggagactgagagtctgcgcaggcgcgacgtggcatcagctatgcaacagatgctgaccgagtcgtgtaagaatcgactgattcagatggcttacgagagtcagcggcagaacctagtgcagcaagcatgcagctcaatggccgagatggatgaacgcttccaacagatcctcagctggcagcagatggatcagaataaagcaattagtcaaatcctgcaagagagtgctatgcaaaaggctgcattcgaagctctgcaggtgaagaaggatttgatgcaccgtcaaatacggtctcagatcaagctaattgagaccgaattgctgcagctcactcagttggaactgaagaggaagtcacttgataccgagtccctgcaagagatgattagcgagcaacggtgggcactgtcctcacttctccagcaactgcttaaagaaaagcagcagcgggaggaggagctccgagaaatacttacagaactggaagcgaagtctgaaacacgccaggagaactattggttgatccaataccagaggcttcttaaccagaagcctctgagcctgaagttgcaagaagagggcatggaaaggcagctggtggcacttttggaagagctcagcgcagaacactacctccccatcttcgctcaccaccgactctccttggacctgctttctcaaatgtcccccggcgatttggccaaagtcggagtgagcgaggccgggttacaacatgagatcttacggagggtgcaggaactgctggacgcagcaagaatacagccagaactgaaaccacctatgggcgaggtcgtgactccaacagcgccacaggagccgcctgagtctgtgagaccatccgcaccacctgccgagttggaggtgcaagcaagtgaatgcgtagtttgtctcgagagagaggcacagatgatctttctcaactgcggccacgtgtgctgctgtcagcagtgctgtcaaccactccgtacgtgccctctttgcaggcaagatatcgcccagagactccgaatttatcactccagttag

SEQ ID NO: 236308 - DNA, 2172 bp, Artificial Sequence
  derived and/or modified sequence
atgcccctgttcttccggaagcggaagcccagcgaggaggcccggaaaagactagagtaccagatgtgtctggcaaaagaggctggcgcagacgacatattagacatttctaagtgtgagttgtctgaaatcccgttcggcgcgttcgctacctgcaaggttctccagaagaaggtgcttatcgttcatactaaccatctgacctccttgctcccaaaatcatgcagcctcttgtcactggcgaccatcaaggtcctggatctgcatgataaccagctgaccgcactcccagacgatctcgggcaactcactgccctccaggtgctgaatgttgagcgaaatcagcttatgcagcttccgaggagtatcggcaacctaacccagctccaaacactaaatgtcaaagacaacaagctcaaggaattacccgacaccgtcggcgagctcaggtctttgcgaaccctgaatatatctgggaacgaaatccaacggcttcctcagatgctggctcatgtgcgcaccctggagatgctgtcattagacgcctctgccatggtctacccacctcgcgaagtgtgtggcgccggaactgcggccatccttcagttcctttgcaaagaatcaggcctggagtattatcccccctcccagtacctcctaccgatcttagaacaagatggtatcgaaaactcgagggattctccagacgggcccacggacagatttagccgggaggagctggagtggcagaaccgctttagtgattacgaaaaaaggaaagagcagaagatgctcgaaaagctagaatttgagcgtcggcttgaactgggacagagggagcatacacagctcttacagcagagctcatctcagaaggatgagatcctgcaaacggtgaaggaggaacaatccaggctagaacagggcctgtccgagcaccagcgccatctcaatgccgagaggcagcggctgcaggaacagctgaagcagaccgagcagaacatcagttcaaggatccagaaattgttacaggataatcagcgtcaaaaaaagtcttccgaaattttgaaatccctcgagaacgaacggattagaatggagcagctcatgtctataacgcaggaggagacagagagcttgagacgtagagatgtggcaagcgccatgcagcagatgctgacagagtcctgcaagaataggctgatacaaatggcctacgaaagccagcgacaaaaccttgtccaacaggcatgcagctccatggctgaaatggacgagaggtttcagcagatcctctcatggcagcagatggaccagaacaaagccataagccagattctgcaagagtctgcaatgcagaaagctgcattcgaggcgttacaggtgaaaaaggacttgatgcacagacaaatccggtcccaaatcaaactcattgagactgaactattgcaactgacccaactggaactcaagcgcaagtcgctagataccgagtccctccaagaaatgatcagcgagcaaagatgggctctgagtagtctccttcagcaactcctgaaagagaagcagcaaagggaagaggaactgcgagagattttgaccgaactcgaggccaaaagcgagacgcgacaggagaattattggttaattcagtatcagcgcttactgaatcaaaaaccactgtccctgaagctgcaagaagagggcatggaacgacagctggtcgcattactggaagaactgagtgctgaacattatctgccgatttttgcgcaccatcggttaagtctggacttgttatctcaaatgtccccgggagacctggccaaagtgggcgtcagcgaggccggcctccagcacgaaatcctgcggcgggtgcaagaactgctcgacgccgccagaatacagccggaactgaagccacccatgggggaggtcgtgactcctaccgccccccaagagcctcctgaatccgtccgaccatctgcacctccagcagagctggaagtccaagcttctgagtgcgttgtgtgtctcgagcgcgaagctcaaatgatcttcctcaattgtgggcatgtgtgctgttgccagcaatgctgtcagccactcagaacctgccccctctgcaggcaggacatagcgcagaggctccggatataccacagcagctag

SEQ ID NO: 236309 - DNA, 2172 bp, Artificial Sequence
  derived and/or modified sequence
atgccactcttctttcggaaacggaaaccgtctgaggaagcaaggaaacggcttgaataccagatgtgtctggcaaaagaagccggtgcggacgatatactcgatatttctaagtgcgagttgtctgaaattccttttggcgctttcgcgacctgcaaagtgctgcagaagaaggtgcttattgtccacaccaatcacctgactagcctgttacccaagagctgcagcctgctatctctcgccacaatcaaggttctcgacttgcacgacaaccagctgacggcccttcctgatgatttagggcaactcacagcccttcaagtgctcaatgttgagagaaatcaactcatgcagcttccacgttccataggcaacctgacccaattgcagaccctgaacgttaaagacaataaactgaaggagctgcccgacactgttggcgaactgagatctttaaggacacttaatatctcgggaaacgaaatccagaggctgccacagatgttagcacacgttagaaccctggaaatgctgagccttgacgccagcgctatggtgtacccccctcgggaggtgtgcggcgcaggcacggccgctattctacagttcctttgtaaggagtccggcctagaatattaccctccgtcccagtacctcctccccattctagaacaggatggaatagagaattcacgggatagccccgatggccctacagatcgtttttcacgagaggagttagagtggcagaaccgtttttctgactacgagaagagaaaggagcagaagatgctggagaagctggaatttgaaaggcgtctcgagcttggtcagagggaacatacgcagttgctgcaacagagtagctcccagaaggatgaaattctccagacagtcaaggaagagcagagcaggttagagcagggactctccgaacaccagcgccacttgaacgccgaaaggcaaagactgcaggaacagcttaaacagaccgagcagaacatcagctcccggatccaaaagctactgcaagacaatcagaggcagaaaaaatcttctgagatcctaaaatcgttggaaaacgagagaattcggatggaacagctaatgtcaataactcaggaggaaactgaatccttgcgcaggcgagacgttgcatccgctatgcagcagatgctcaccgaaagctgtaagaatcggctcattcagatggcttacgagtcccagcggcagaacctcgtgcaacaagcttgttcgtcaatggccgagatggatgaacgctttcagcagatcttatcatggcagcaaatggatcagaataaggcaattagccagatcctgcaggaatcggccatgcaaaaggctgccttcgaggcactccaggtaaaaaaagatctcatgcataggcagatacgatcacagattaagttaatagagacagagctcctccaactgacccagctcgagctcaagagaaaaagtctggacactgaaagcttgcaggagatgatcagtgagcagaggtgggccttatcttcccttctgcagcaattactaaaggaaaaacagcagcgcgaggaagagctgcgagagatcctcacagaactggaagccaagagcgagactagacaggagaactattggttaatccaatatcagaggctgctgaatcagaagccactgagcttgaaactgcaagaggaaggtatggagaggcagctggtggcgctcctggaagagttgagcgccgaacactatttacctattttcgcgcaccaccgcctgagcttggatttgctgtctcagatgagtccaggcgatcttgccaaggttggagtgagcgaagccggactgcaacacgaaatcttgcgacgagtgcaggagttgctcgacgccgctcgaatccagcccgaactgaagccacctatgggggaagtcgtgaccccaactgcacctcaggaacctccggagtcggttcggcctagcgcgcctcctgcagaacttgaggtgcaggcaagcgaatgcgttgtgtgcctcgaacgcgaagcacaaatgatcttccttaactgcggacatgtgtgttgctgccaacagtgttgccagcctttaaggacatgcccactgtgccggcaggatattgcccagagactgaggatctaccattcctcctag

SEQ ID NO: 236310 - DNA, 2172 bp, Artificial Sequence
  derived and/or modified sequence
atgccactgtttttcagaaagcgcaaacccagcgaggaggccaggaagagactagagtatcagatgtgccttgccaaggaggccggtgccgacgatatcctggatattagcaaatgtgaacttagtgagatcccatttggggctttcgctacttgtaaggtcctccaaaagaaagtcttaattgtgcacaccaatcacctgactagtctcctgcccaagagctgcagcctcctgtctctggccaccataaaggtgttggacttgcatgataaccaactgactgccctcccagacgatctgggccaacttaccgcccttcaggttctcaacgtggagcgcaaccaactgatgcagctcccacgcagcatcggaaacttgacccagctgcagactttgaatgtgaaagataataagcttaaagagctgcctgacacagtcggcgagctcaggagcttgagaaccttgaacatttctggcaacgagatccaacggctgccccagatgttggctcatgtgaggaccctagaaatgctgagcctggacgcctccgccatggtctatccaccccgagaagtgtgcggagcgggaaccgccgcaatcttgcagtttctgtgcaaggagtctggcctggagtattacccccctagccagtaccttttgccaatactcgagcaggacggtatcgaaaattctagagatagtcccgacgggcctaccgaccggttcagccgcgaggagctggaatggcagaataggttttctgattacgagaaacgaaaggagcagaagatgctcgaaaaactcgaattcgagcgacgacttgagcttggccagagggaacacacgcagcttcttcagcagtcaagctctcagaaggacgaaatcttgcagacagtgaaggaggaacaaagtcgcctggaacagggcctctctgaacaccagcgccatctgaatgccgagcgccagcgcctgcaagagcagctgaagcagaccgaacagaatatctccagccggattcaaaaactcttgcaggacaatcaaagacagaagaaatcctcagaaatactgaagtccctcgagaatgagcgcatacgtatggagcagttaatgtctattacacaggaggagaccgaaagcctcagacgccgagacgtggcatccgcaatgcagcagatgctgactgagtcctgtaagaaccgcctgatccagatggcgtatgagtcacagcgacagaatctggtgcagcaggcctgtagctctatggccgagatggatgagcgttttcaacagattctctcatggcagcagatggaccagaataaagcaataagtcaaatattacaggaaagcgctatgcagaaagctgcgttcgaggcattacaagtgaaaaaggatctgatgcatagacaaatcagaagccagatcaaattgattgaaaccgagctgttacagctcacccagctagaactgaaacgcaaatctctggacacagagtctctacaggagatgatatctgagcaacgctgggccctctcctctctgctccagcagctcctcaaggagaaacagcaaagagaagaagagctgcgagaaatcttgactgagttagaggctaaatcagagactagacaggagaattactggctgattcaatatcagagactgctgaaccagaagccgctgtctctgaagctacaggaggagggcatggagcgacagctggtcgcgctcctggaagaattgagcgccgagcactacctgcccattttcgcccaccacaggctgagcctcgacctcctgtcacagatgtccccaggcgacctagcaaaagtgggagtgtcagaggccggattgcaacatgagatccttcgcagggtacaagaactcttagacgcggctagaattcagcccgaattaaagccaccgatgggcgaggtggtgacaccaaccgccccacaggagcctcctgagagtgtgcggccaagcgcccctccagctgagttagaggtgcaggcttctgagtgtgtggtgtgcttggaacgggaagcacagatgatctttctcaattgcggccacgtatgttgttgtcagcagtgttgtcagccacttaggacttgtcctctgtgccggcaggatattgcgcaacggctgaggatctaccattcatcttag

SEQ ID NO: 236311 - DNA, 2172 bp, Artificial Sequence
  derived and/or modified sequence
atgcccttgtttttcaggaagaggaaacccagtgaggaggcccgtaagaggttagagtatcagatgtgcctcgctaaggaagctggagccgacgacatccttgatatctctaaatgcgaactctccgaaattccgtttggggcattcgccacatgtaaggttctccagaagaaagtgcttatcgtacacacgaaccacctcacatcactgctgcctaagtcatgtagtctcttaagcttggcaactatcaaggtgcttgacctgcatgacaatcagttgacagcccttcccgatgatctggggcagcttactgctctccaggtgttaaatgttgagaggaaccagcttatgcagttgccgcgaagcattggaaatcttacgcagctgcagacgctgaacgtgaaggacaacaaactgaaagagctccctgatactgtaggggaactccgcagtttgcggacacttaatatttcgggtaacgaaattcagcggttgccgcagatgctcgcacacgtgcggactcttgaaatgctctcactggatgcatccgccatggtttatccaccacgggaggtgtgcggcgcaggtacggctgctattctccaattcctctgtaaagaatctggtctcgagtattaccctcctagtcaatacctcctccccattctggagcaggacggcattgaaaactcccgggactccccggatggtcctaccgatcgattttcaagagaggagttggaatggcagaaccggttcagcgactacgaaaagcggaaagagcaaaagatgctggaaaagttagaattcgagcgccgactggagctgggtcagcgggagcacactcagctcttacagcagtcatctagtcagaaagacgagatcctccagactgtaaaagaggaacagtcacggctggaacagggactttcggagcatcagagacatctcaacgccgagcggcagagactgcaggaacagctgaaacagactgaacagaatatttctagcaggattcaaaaactgctccaggacaatcaacgccaaaaaaagtcctccgaaattctgaaaagtttggaaaacgaacgaatccgaatggagcagctgatgtccattacccaggaggaaaccgaatcgctcaggcgaagagatgtagccagcgccatgcagcagatgttgactgagagttgtaaaaacaggttgatccagatggcttatgagtctcagcgacagaacctggtccagcaagcttgtagcagcatggccgaaatggatgagcggttccagcagattctgagttggcagcagatggaccagaataaagcaatctcccaaatactccaggagagtgctatgcagaaagcagccttcgaggctctccaggtgaaaaaggacctgatgcaccgccagattagatcacagatcaaactgatagagaccgagcttttgcagctgacacagcttgaactgaagaggaagagcttggatacagaatcgctgcaagagatgattagcgagcagagatgggccctgagctccctactgcagcaacttcttaaagaaaaacagcagcgggaagaagaactgcgcgagattttgacagagctggaagcaaagagcgagacacgacaggaaaattactggctgattcagtatcagagactgctgaaccagaagcctttatctttgaagctccaggaagagggaatggaaaggcagctcgtggcactccttgaggagctgtcagctgagcactatctgcccatttttgcccatcaccgtctctctcttgacctgttgtcccaaatgtctcccggagacctggccaaagtgggtgtctctgaggccggattgcagcacgaaatcttacgccgtgtgcaggaattactggatgcagctagaattcaaccagaattaaagccacctatgggtgaagttgtaacccccaccgcgcctcaggaacccccagaatccgtccgaccctccgcgccacctgctgagctcgaggtgcaggcatctgaatgtgtggtctgcctagaacgagaagcacagatgatcttcctaaactgcggccacgtgtgctgttgtcagcaatgctgtcagccactccgaacatgccccctgtgcaggcaggacatcgctcagagactcaggatctatcatagcagctag

SEQ ID NO: 236312 - DNA, 2172 bp, Artificial Sequence
  derived and/or modified sequence
atgcccctgttcttcagaaagagaaagcccagcgaggaggccagaaagagactggagtaccagatgtgcctggccaaggaggccggcgccgacgacatcctggacatcagcaagtgcgagctgagcgagatccccttcggcgccttcgccacctgcaaggtgctgcagaagaaggtgctgatcgtgcacaccaaccacctgaccagcctgctgcccaagagctgcagcctgctgagcctggccaccatcaaggtgctggacctgcacgacaaccagctgaccgccctgcccgacgacctgggccagctgaccgccctgcaggtgctgaacgtggagagaaaccagctgatgcagctgcccagaagcatcggcaacctgacccagctgcagaccctgaacgtgaaggacaacaagctgaaggagctgcccgacaccgtgggcgagctgagaagcctgagaaccctgaacatcagcggcaacgagatccagagactgccccagatgctggcccacgtgagaaccctggagatgctgagcctggacgccagcgccatggtgtacccccccagagaggtgtgcggcgccggcaccgccgccatcctgcagttcctgtgcaaggagagcggcctggagtactacccccccagccagtacctgctgcccatcctggagcaggacggcatcgagaacagcagagacagccccgacggccccaccgacagattcagcagagaggagctggagtggcagaacagattcagcgactacgagaagagaaaggagcagaagatgctggagaagctggagttcgagagaagactggagctgggccagagagagcacacccagctgctgcagcagagcagcagccagaaggacgagatcctgcagaccgtgaaggaggagcagagcagactggagcagggcctgagcgagcaccagagacacctgaacgccgagagacagagactgcaggagcagctgaagcagaccgagcagaacatcagcagcagaatccagaagctgctgcaggacaaccagagacagaagaagagcagcgagatcctgaagagcctggagaacgagagaatcagaatggagcagctgatgagcatcacccaggaggagaccgagagcctgagaagaagagacgtggccagcgccatgcagcagatgctgaccgagagctgcaagaacagactgatccagatggcctacgagagccagagacagaacctggtgcagcaggcctgcagcagcatggccgagatggacgagagattccagcagatcctgagctggcagcagatggaccagaacaaggccatcagccagatcctgcaggagagcgccatgcagaaggccgccttcgaggccctgcaggtgaagaaggacctgatgcacagacagatcagaagccagatcaagctgatcgagaccgagctgctgcagctgacccagctggagctgaagagaaagagcctggacaccgagagcctgcaggagatgatcagcgagcagagatgggccctgagcagcctgctgcagcagctgctgaaggagaagcagcagagagaggaggagctgagagagatcctgaccgagctggaggccaagagcgagaccagacaggagaactactggctgatccagtaccagagactgctgaaccagaagcccctgagcctgaagctgcaggaggagggcatggagagacagctggtggccctgctggaggagctgagcgccgagcactacctgcccatcttcgcccaccacagactgagcctggacctgctgagccagatgagccccggcgacctggccaaggtgggcgtgagcgaggccggcctgcagcacgagatcctgagaagagtgcaggagctgctggacgccgccagaatccagcccgagctgaagccccccatgggcgaggtggtgacccccaccgccccccaggagccccccgagagcgtgagacccagcgccccccccgccgagctggaggtgcaggccagcgagtgcgtggtgtgcctggagagagaggcccagatgatcttcctgaactgcggccacgtgtgctgctgccagcagtgctgccagcccctgagaacctgccccctgtgcagacaggacatcgcccagagactgagaatctaccacagcagctag

SEQ ID NO: 236313 - protein, 493 aa, Artificial Sequence
  derived and/or modified sequence
MRRRRAAVAAGFCASFLLGSVLNVLFAPGSEPPRPGQSPEPSPAPGPGRRGGRGELARQIRARYEEVQRYSRGGPGPGAGRPERRRLMDLAPGGPGLPRPRPPWARPLSDGAPGWPPAPGPGSPGPGPRLGCAALRNVSGAQYMGSGYTKAVYRVRLPGGAAVALKAVDFSGHDLGSCVREFGVRRGCYRLAAHKLLKEMVLLERLRHPNVLQLYGYCYQDSEDIPDTLTTITELGAPVEMIQLLQTSWEDRFRICLSLGRLLHHLAHSPLGSVTLLDFRPRQFVLVDGELKVTDLDDARVEETPCAGSTDCILEFPARNFTLPCSAQGWCEGMNEKRNLYNAYRFFFTYLLPHSAPPSLRPLLDSIVNATGELAWGVDETLAQLEKVLHLYRSGQYLQNSTASSSTEYQCIPDSTIPQEDYRCWPSYHHGSCLLSVFNLAEAVDVCESHAQCRAFVVTNQTTWTGRQLVFFKTGWSQVVPDPNKTTYVKASG

SEQ ID NO: 236314 - DNA, 1482 bp, Artificial Sequence
  derived and/or modified sequence
atgagacgacggagggcggcagtagctgccggattctgtgccagttttctccttggcagtgtgctcaacgtcctgttcgctccagggtccgaacctccaaggcctggtcagagccctgaaccctctccggcccctggccctggccggcgcggcgggcggggggaattggcaaggcaaattagggcaagatacgaggaggtgcaaaggtatagccgggggggccccggacctggcgcaggaaggcccgaaagaagacgcctcatggatctggcacccggaggtcccggactgccacggccacgtcccccctgggcacggccactttctgatggggcgcccggctggcctccagcccccgggcctggcagccctggcccggggccaaggttagggtgtgcagctctgcggaacgtcagtggggctcagtatatgggctccgggtatactaaagcagtgtacagagtgcgtctgcccgggggcgctgcagtggcgctcaaagctgtggatttcagcggacatgatttggggtcctgtgtgcgtgagttcggtgttagaaggggatgttatagactagcagcacataagctcctcaaagagatggtgctgctggaacggctgcgtcaccccaatgtgctgcagttatatggttattgttatcaggatagtgaggacatcccggatactttgactaccatcactgaactgggagcacctgtggagatgatccagctgctgcagacctcatgggaggatcgatttaggatttgtttgagtctaggcaggcttctgcaccaccttgcccactcccctctcggttccgtgacactgctggacttccggccgcgtcagtttgtactggtcgacggagaactgaaagtgacagatctcgatgatgctcgggtcgaggagacgccgtgcgcaggaagcacagattgtattctcgagttccccgcaaggaatttcacactgccctgctcagcacaagggtggtgtgagggtatgaatgagaaaagaaatttgtacaacgcctaccggttcttttttacctacctcctgcctcactccgcccctccctcacttcgtccactgctggactccattgtcaacgccactggggagctcgcctggggcgtagatgagacccttgcccagctggaaaaagtacttcacctgtatcggagcggccagtatctgcagaactcaactgcatcctctagcacggaataccagtgcatcccagactcgacaatccctcaggaggattaccgctgttggccctcataccatcatggatcctgtctcctcagcgtgtttaatttggctgaggcagttgatgtctgtgagagccacgcccagtgtcgcgcattcgtggtgactaatcagacaacatggacgggacgacagctggtctttttcaagacaggatggtctcaagtggtgcccgatcctaataagacaacctatgtgaaagcaagcggatag

SEQ ID NO: 236315 - DNA, 1482 bp, Artificial Sequence
  derived and/or modified sequence
atgagaagaagaagagctgctgtggccgccggcttctgtgccagcttcctgctgggctctgtgctgaatgtgctgtttgcccctggcagcgagccccccaggcctggccagagccctgagcccagccctgcccctggccctggaagaagaggaggccgcggggagctggcccggcagatccgggcccgctatgaggaggtgcagcgctacagcagaggaggccctggccctggagctggccggcctgagcggcggcggctgatggacctggcccctgggggccctggcctgccccggccccggcccccctgggcccggcccctgagtgatggagcccctggctggcccccagcccctggccctggcagccctggccctggcccccggctgggctgtgccgccctgagaaatgtgtctggggcccagtacatgggcagcggctacaccaaggctgtgtacagagtgcggctgcccggcggcgctgctgtggccctgaaggctgtggacttcagcggccatgacctgggcagctgtgtgcgggagtttggagtgagaagaggctgctaccgcctggccgcccacaagctgctgaaggagatggtgctgctggagcggctgcggcaccccaacgtgctgcagctgtatggctactgctaccaggacagcgaggacatcccagacaccctgaccaccatcacagagctgggcgcccctgtggagatgatccagctgctgcagacctcctgggaggaccgcttccgcatctgcctgagcctgggccgcctgctgcaccacctggcccacagccccctgggctctgtgaccctgctggacttccggccccggcagtttgtgctggtggatggagagctgaaggtgacagacctggatgatgcccgggtggaggagaccccctgtgccggcagcacagactgcatcctggagttccctgccaggaacttcaccctgccctgcagcgcccagggctggtgtgagggcatgaatgagaagaggaacctgtacaatgcctaccgcttcttcttcacctacctgctgccccacagcgccccacccagcctgcggcccctgctggacagcatcgtgaatgccactggagagctggcctggggcgtggatgagaccctggcccagctggagaaggtgctgcacctgtaccgcagcggccagtacctgcagaacagcacagccagcagcagcacagagtaccagtgcatcccagacagcaccatcccccaggaggactaccgctgctggcccagctaccaccacggcagctgcctgctgagcgtcttcaacctggccgaggccgtggatgtgtgtgagagccacgcccagtgccgggcctttgtggtgaccaaccagaccacctggacaggccggcagctggtgttcttcaagacaggctggagccaggtggtgcctgaccccaacaagaccacctacgtgaaggccagcggctag

SEQ ID NO: 236316 - DNA, 1482 bp, Artificial Sequence
  derived and/or modified sequence
atgcggcggcggcgggccgccgtggccgccggcttctgcgccagctttttgctagggagcgtgctgaacgttctctttgcgccagggtcagagccacctcgccccggccagtcccctgaaccaagccccgcccctggtccggggagaagggggggacgcggcgaactggcaagacagataagagccagatacgaagaagtgcaacgatatagcagggggggccccggccccggcgcgggtcgacccgagcgcagaaggttgatggacctcgccccaggtggtcccgggctgccaagacctcgtcctccttgggctcggccactgtccgacggggcacctggctggccgcctgcccctgggccgggctcaccaggccccgggcccagactgggctgtgcagcattgagaaatgtctcgggcgctcagtacatgggcagtggctacacaaaagctgtgtatagagtgagactccctggaggcgcggccgtggctctgaaagctgtggacttttccggacacgatctgggatcctgcgtaagagagttcggtgtccggaggggctgttacagactggcggcacacaagctgcttaaagaaatggtcttgctggagcggcttaggcatcctaatgtcctacagttgtatgggtattgttatcaggactcagaggatatccccgacactttgaccacgatcactgagctgggagcccccgtcgagatgattcagttgctgcagaccagctgggaggacagattcaggatctgtctgtcactgggtagactgctgcatcatttagcccattcaccacttggatcggtgacactgttagatttccgcccacgacagttcgtgcttgtggatggcgagctgaaggtgactgatctcgatgacgctcgagtcgaagaaacaccgtgtgcaggctctacggactgcatcttggagttccccgctcggaactttacactgccttgctcagcccagggctggtgtgaggggatgaatgaaaaacgcaacctctataacgcttaccggttcttttttacttacctgctccctcactccgcccctccctccttgcgacctctgctcgatagtatagtgaacgctacaggggagcttgcctggggggtcgacgagacacttgcacagctggagaaggtgctgcatctgtatagaagtgggcagtatctgcagaatagtacggcctcctctagtactgagtatcagtgtatcccagactccactattcctcaagaggattaccgatgttggccgtcctatcatcatggaagctgcctcctttccgtgttcaatctggcggaggccgtcgatgtttgcgaatcacatgctcagtgcagagcttttgtcgtgacaaaccagaccacttggactgggagacagctggtctttttcaaaaccggttggagtcaggtcgtgccagatccaaataagactacctatgtcaaggcctcggggtag

SEQ ID NO: 236317 - DNA, 1482 bp, Artificial Sequence
  derived and/or modified sequence
atgaggagaagacgcgcagctgtagcggctggcttctgcgcttctttcttgctcgggtctgtgctcaatgtgctgtttgccccaggcagcgagccaccaaggcctgggcagtcaccagaaccaagccctgcccctgggcctgggagacgcggaggacgcggagagctggcacgtcagattcgtgccaggtacgaagaggtccagcgatactcccggggtggcccaggtccaggcgcagggcgtccagaacggaggcgcctgatggacctcgcacccggtggcccaggcttgcctagacctaggcctccgtgggctcggccactcagtgacggtgctcctggttggccaccggctcctggaccaggaagtcccggaccagggccaaggctgggttgcgcggctctgagaaatgtctcgggggctcagtatatgggatccggatacacgaaggccgtttatcgcgtgcgcctgcccggtggcgctgcagtcgcactgaaggcagtggacttctctggccacgacctggggagctgtgtcagagagttcggcgtgcggagaggctgctacaggttggctgctcataagctcctcaaagagatggtccttttggagcgcctgcggcatcctaacgttctacaattgtatggctactgctaccaggattccgaagacatcccggacaccctaactacaattaccgaattaggggcaccagtggagatgattcaattgctgcaaacttcttgggaggatcggttccgcatctgtctgagtctcgggagattgctgcaccacttggctcactctcccttgggcagtgtcactctgctggatttccgccctcggcagttcgtgctcgtggacggcgagctcaaagtcacagatctggacgatgcgagggtggaggagaccccttgtgcaggcagcaccgactgcatcctcgaattccccgcacggaactttacgctgccctgctccgcgcagggttggtgcgaaggaatgaatgaaaagaggaacctctacaatgcctaccgcttcttttttacgtacctgctgccccattccgccccaccttcactacggcctttgctggatagcattgtcaacgcaactggggagttggcctggggggtggacgagacactggcacagttagagaaggtgctacacctatatcgatcggggcagtacttgcagaactctaccgcttcctcatctactgagtaccagtgcattccagattctacaatcccacaggaagactatcgatgctggccttcttatcaccacgggtcttgcctgttatcggtgttcaatttggccgaggccgtagacgtttgtgaatcccatgctcaatgtagagcattcgttgtaaccaaccagaccacttggaccggtaggcagctcgtgttcttcaaaacaggttggtctcaggttgtaccggacccgaataagacaacttacgtcaaggcgagcggatag

SEQ ID NO: 236318 - DNA, 2502 bp, Artificial Sequence
  derived and/or modified sequence
gaggcaagtgtcaggccgatgtgtcgcccgcgaggggccggggtcggggccgccggggccatgcgcgcgggctgggcagggggccggcggggcgcagagcggagccgcctcggagcctgagccgcccggggccggggccggggagccgcgcggggccggccggccggggggaggggagcgatgcggcgccggcgggcggcagtggccgcgggtttctgcgcctccttcctgctgggctccgtcctcaacgtgctcttcgctccgggctcggagcctccgaggccaggccagtcccctgagccttcgccggccccgggtccgggccgtcgcgggggccgcggggagctggcccggcagatccgggcgcgctacgaggaggtgcagcgctattcccgcgggggccccgggcccggggcgggccggccggagcggcggcgcctgatggacctggctccgggcgggcccggcctgccgcgcccccggcccccttgggcccggcccctgtccgacggcgccccaggctggcccccggctcccggcccaggctcccccggcccgggcccgcgcctgggctgcgccgcgcttcgcaacgtgtccggcgcgcagtacatgggctcaggctacaccaaggccgtgtaccgggtccgcctgcccggcggtgccgcggtggcgctcaaggcggtggactttagcggccacgatctgggcagctgcgtgcgcgagttcggggtacggaggggctgctatcggctggcggcccacaagctgcttaaggagatggtgctgctggagcggctgcggcaccccaacgtgctgcagctctatggctactgctaccaggacagcgaggacatcccagacaccctgaccaccatcacggagctgggcgcccctgtagaaatgatccagctgctgcaaacttcctgggaggatcgattccgaatctgcctgagcctgggccgcctcctccaccacctggcccactccccactgggctccgtcactctgctggacttccgccctcggcagtttgtgctggtggatggggagctcaaagtgacggacctggatgacgcacgtgtggaggagacgccgtgtgcaggcagcaccgactgcatactcgagtttccggccaggaacttcaccctgccctgctcagcccagggctggtgcgagggcatgaacgagaagcggaacctctataatgcctacaggtttttcttcacatacctcctgcctcacagtgccccgccttcactgcgtcctctgctggacagcatcgtcaacgccacaggagagctcgcctggggggtggacgagaccctggcccagctggagaaggtgctgcacctgtaccggagcgggcagtatctgcagaactccacggcaagcagcagtaccgagtaccagtgtatcccagacagcaccatcccccaggaagactaccgctgctggccatcctaccaccacgggagctgcctcctttcagtgttcaacctggctgaggctgtggatgtctgtgagagccatgcccagtgtcgggcctttgtggtcaccaaccagaccacctggacaggtcggcagctggtctttttcaagactggatggagccaagtggtccctgatcccaacaagaccacatatgtgaaggcctctggctgacctatctgagggctcggctgaccagctgactatcctcagcagctgggcttgcctgtggagggagtgacttgcactggcagcactgcatgtcacctgggaacccctgcagacaaagctaacatcccagacagacagatgtgaccaggacaaacgtgcaataatgccaaatgttaaaatgtgagtttaccagcctagctatgggactgctggctcctagtccaggaatcatgggggtatgactgcctctccaaccctgtgggctgtaagcaagctcaggctagtctccccactgggggctgtgcccctccctgggacggttccgtgggcagccccatcactgtgttcaatagtgtgagaatgtagctaaagcccctgctgctgctgctgcacatgccacagcaggcggtgggggctgcgtggggacaatccatcgtggagtgttctctcagcttaggtctggacaggagacttggcgggagatgctccaggatgtgggtgattctgtacctggggaggctatctctgacctcccgacaggggacactcccaggccagcccaggggtcaggggcagaggtgcacacctcagcatgagccaagactggggtcagggagcaggtgtggtttgagccaggacctggggcgggggtggggccggggcctttctgcctcatttgctttcaatgaaagcctcaaagcagccaaaaccaggctttcccccttcctcgagtttgaatatccagaatcttttgtacttcttgttggttaaattgtttatttttgtaaaaaataaaataaaattagttaataaaatgatgtttcacagcaaactcttccctaa

SEQ ID NO: 236319 - DNA, 1482 bp, Artificial Sequence
  derived and/or modified sequence
atgagaagaagaagagccgccgtggccgccggcttctgcgccagcttcctgctgggcagcgtgctgaacgtgctgttcgcccccggcagcgagccccccagacccggccagagccccgagcccagccccgcccccggccccggcagaagaggcggcagaggcgagctggccagacagatcagagccagatacgaggaggtgcagagatacagcagaggcggccccggccccggcgccggcagacccgagagaagaagactgatggacctggcccccggcggccccggcctgcccagacccagacccccctgggccagacccctgagcgacggcgcccccggctggccccccgcccccggccccggcagccccggccccggccccagactgggctgcgccgccctgagaaacgtgagcggcgcccagtacatgggcagcggctacaccaaggccgtgtacagagtgagactgcccggcggcgccgccgtggccctgaaggccgtggacttcagcggccacgacctgggcagctgcgtgagagagttcggcgtgagaagaggctgctacagactggccgcccacaagctgctgaaggagatggtgctgctggagagactgagacaccccaacgtgctgcagctgtacggctactgctaccaggacagcgaggacatccccgacaccctgaccaccatcaccgagctgggcgcccccgtggagatgatccagctgctgcagaccagctgggaggacagattcagaatctgcctgagcctgggcagactgctgcaccacctggcccacagccccctgggcagcgtgaccctgctggacttcagacccagacagttcgtgctggtggacggcgagctgaaggtgaccgacctggacgacgccagagtggaggagaccccctgcgccggcagcaccgactgcatcctggagttccccgccagaaacttcaccctgccctgcagcgcccagggctggtgcgagggcatgaacgagaagagaaacctgtacaacgcctacagattcttcttcacctacctgctgccccacagcgccccccccagcctgagacccctgctggacagcatcgtgaacgccaccggcgagctggcctggggcgtggacgagaccctggcccagctggagaaggtgctgcacctgtacagaagcggccagtacctgcagaacagcaccgccagcagcagcaccgagtaccagtgcatccccgacagcaccatcccccaggaggactacagatgctggcccagctaccaccacggcagctgcctgctgagcgtgttcaacctggccgaggccgtggacgtgtgcgagagccacgcccagtgcagagccttcgtggtgaccaaccagaccacctggaccggcagacagctggtgttcttcaagaccggctggagccaggtggtgcccgaccccaacaagaccacctacgtgaaggccagcggctag

SEQ ID NO: 236320 - protein, 368 aa, Artificial Sequence
  derived and/or modified sequence
MLSKRGCHARIYADFPIRRLISQRSSLETLEDIEENAPLRRCRTLSGSPRPKNFKKIHFIKNMRQHDTRNGRIVLISGRRSFCSIFSVLPYRDSTQVGDLKLDGGRQSTGAVSLKEIIGLEGVELGADGKTVSYTQFLLPTNAFGARRNTIDSTSSFSQFRNLSHRSLSIGRASGTQGSLDTGSDLGDFMDYDPNLLDDPQWPCGKHKRVLIFPSYMTTVIDYVKPSDLKKDMNETFKEKFPHIKLTLSKIRSLKREMRKLAQEDCGLEEPTVAMAFVYFEKLALKGKLNKQNRKLCAGACVLLAAKIGSDLKKHEVKHLIDKLEEKFRLNRRELIAFEFPVLVALEFALHLPEHEVMPHYRRLVQSS

SEQ ID NO: 236321 - DNA, 1107 bp, Artificial Sequence
  derived and/or modified sequence
atgctgagcaagagaggctgccacgccagaatctacgccgacttccccatcagaagactgatcagccagagaagcagcctggagaccctggaggacatcgaggagaacgcccccctgagaagatgcagaaccctgagcggcagccccagacccaagaacttcaagaagatccacttcatcaagaacatgagacagcacgacaccagaaacggcagaatcgtgctgatcagcggcagaagaagcttctgcagcatcttcagcgtgctgccctacagagacagcacccaggtgggcgacctgaagctggacggcggcagacagagcaccggcgccgtgagcctgaaggagatcatcggcctggagggcgtggagctgggcgccgacggcaagaccgtgagctacacccagttcctgctgcccaccaacgccttcggcgccagaagaaacaccatcgacagcaccagcagcttcagccagttcagaaacctgagccacagaagcctgagcatcggcagagccagcggcacccagggcagcctggacaccggcagcgacctgggcgacttcatggactacgaccccaacctgctggacgacccccagtggccctgcggcaagcacaagagagtgctgatcttccccagctacatgaccaccgtgatcgactacgtgaagcccagcgacctgaagaaggacatgaacgagaccttcaaggagaagttcccccacatcaagctgaccctgagcaagatcagaagcctgaagagagagatgagaaagctggcccaggaggactgcggcctggaggagcccaccgtggccatggccttcgtgtacttcgagaagctggccctgaagggcaagctgaacaagcagaacagaaagctgtgcgccggcgcctgcgtgctgctggccgccaagatcggcagcgacctgaagaagcacgaggtgaagcacctgatcgacaagctggaggagaagttcagactgaacagaagagagctgatcgccttcgagttccccgtgctggtggccctggagttcgccctgcacctgcccgagcacgaggtgatgccccactacagaagactggtgcagagcagctag

SEQ ID NO: 236322 - DNA, 1107 bp, Artificial Sequence
  derived and/or modified sequence
atgctcagcaagcgggggtgccacgcaagaatctacgcagactttccaatccgcagacttatcagccagcgcagctctcttgaaacactggaagatattgaggagaacgctccactccggcgctgcagaacattaagcggatcccccaggcctaagaactttaaaaaaatacacttcatcaaaaatatgcgccagcacgatacccgaaacgggcgtatcgtgttgatttcgggccggagaagcttttgctcgatttttagcgttttgccatacagagatagcactcaggtgggggacctcaagctggatggaggtagacagagcaccggcgctgtttcccttaaagagatcataggtctggaaggcgtcgagctaggtgcggatggcaagactgtttcatacacgcagttcttactccctaccaatgccttcggcgccaggagaaacacgatcgactccacctcctcattttcgcagtttcgcaacttgtcgcatcgaagccttagcataggccgggcttccggcacacagggcagcctcgacactggaagtgacctcggggatttcatggattatgaccccaatctgcttgacgatccacaatggccttgcgggaagcataaacgagtacttatcttccccagctatatgactacagtgatagactacgtcaagccaagcgacctaaaaaaggacatgaacgaaactttcaaggaaaagttcccccacatcaaactgactctttctaaaatcaggtctctgaagagagaaatgagaaagctcgcccaggaagattgtgggctagaggagccaactgtcgccatggcatttgtttattttgaaaagctcgcactcaagggcaagctgaataaacagaaccgtaaactttgcgctggggcatgcgtgttgcttgcggccaaaatcggttccgatctgaaaaagcacgaggtcaagcacttgattgataaactcgaagagaagtttaggttgaacagacgcgagctgatcgctttcgaattccccgtgttggtcgcccttgagtttgccctccatctcccagaacacgaggtgatgccccattacagacgcttggtccagagcagctag

SEQ ID NO: 236323 - DNA, 1107 bp, Artificial Sequence
  derived and/or modified sequence
atgctgagcaagaggggctgccacgcccgcatctatgctgacttccccatccggcggctcatcagccagaggagcagcctggagaccctggaggacattgaagaaaatgcccccctgcggcgctgcaggaccctgagcggcagcccccggcccaagaacttcaagaagatccacttcatcaagaacatgaggcagcacgacaccagaaatggaagaattgtgctgatctctggaagaagaagcttctgcagcatcttctctgtgctgccctacagagacagcacccaggtgggggacctgaagctggatggcggccggcagagcactggagctgtgtccctgaaggagatcatcggcctggagggcgtggagctgggcgcagatggcaagacagtgtcctacacccagttcctgctgcccaccaatgccttcggggcccggaggaacaccatcgacagcaccagcagcttcagccagttcaggaacctgagccacaggagcctgagcatcggccgggccagcggcacccagggcagcctggacaccggcagtgacctgggggacttcatggactatgaccccaacctgctggatgacccccagtggccctgtgggaagcacaagagggtgctgatcttccccagctacatgaccaccgtgattgattatgtgaagcccagcgacctgaagaaggacatgaatgagaccttcaaggagaagttcccccacatcaagctgaccctgagcaagatccgcagcctgaagcgggagatgaggaagctggcccaggaggactgtggcctggaggagcccaccgtggccatggcctttgtgtactttgagaagctggccctgaagggcaagctgaacaagcagaacaggaagctgtgtgccggggcctgtgtgctgctggccgccaagattggaagtgacctgaagaagcatgaggtgaagcacctgattgacaagctggaggagaagttccggctgaacagaagagagctgattgcctttgagttccctgtgctggtggccctggagtttgccctgcacctgcctgagcacgaggtgatgccccactaccgccgcctggtgcagagcagctag

SEQ ID NO: 236324 - DNA, 1107 bp, Artificial Sequence
  derived and/or modified sequence
atgctgagcaagcggggctgccacgcccggatctacgccgacttccccatccgcaggttgatctcccagcggagttccctggagaccctggaagatatcgaagagaacgctcctctccggcgatgtcggactctgtccggatccccaagacccaagaactttaagaagattcattttattaagaacatgcgccaacacgacactcgcaacggtaggattgtgcttatttctggcaggaggtctttttgcagtatcttctcagtactgccttacagggattctacccaggtcggagatctgaaactggacggcggtagacaaagcactggagcagtctccctcaaggagataatcgggctggagggggtggagctaggggcagatggcaagaccgtcagctacacccagtttctgctccctaccaacgcatttggcgcgcggcgcaataccatagatagcacatcatccttcagtcagttccgaaatctatcccatcgttcactgagcattgggagggcaagcggcacccagggaagtttggataccgggagcgatctcggagactttatggactacgaccctaacctactggatgacccacagtggccatgcggaaagcacaagcgcgtcctgatcttcccatcttacatgacaacagtcatcgattacgtgaagcccagcgatctgaagaaggacatgaatgaaacctttaaggaaaaattcccgcacatcaagctcacactgagcaagataagatcacttaagagggagatgcgcaagctcgctcaggaagattgtggtctcgaagagcctaccgtggcgatggcgttcgtgtatttcgagaagttggccctgaagggaaagctgaataaacaaaacagaaagctgtgcgcgggcgcctgtgtcctgctggcagctaagatcggctcagacttaaagaaacatgaagtgaaacatcttattgacaaactggaagagaagtttcgcctgaatcggagggagttaatagcctttgagttcccagtgctagtggcgttagagtttgcactccaccttcccgagcatgaggtgatgcctcactatagacggctcgtgcagagcagctag

SEQ ID NO: 236325 - DNA, 1544 bp, Artificial Sequence
  derived and/or modified sequence
gtgcttatgagataaacgacagggtaactgtccacattggtcccagtttatgagggagaagagatcataatctacaaaaatttgcaaggtgaccaggggaaaagagtacggcgcctcatctcccagagatcttccttggagaccctggaagatattgaggagaacgcccctctccggagatgtcgaactctctcaggttcacccagaccaaagaattttaagaagattcattttatcaagaacatgcggcaacacgataccaggaatggcagaatagtccttatcagtggcagaagatccttctgtagtatattttcagtgctgccgtatcgcgacagtacccaagtcggggacttgaagttggacggaggaagacaatcaactggtgcagtgagtttgaaagagatcattggtctggaaggtgtggagctgggtgctgatgggaagactgtttcctatacccaatttctgttacccacaaatgcctttggagcccggagaaataccatagactccacctcctctttctcccagttccgtaacctgagccaccgcagcctctccataggccgggcaagcggcacccaggggagcctcgacacaggtagtgacctgggagactttatggactatgacccaaatctcttggatgacccccagtggccttgtggcaaacacaaacgcgttctgatcttcccttcctacatgacaacagtgattgactacgtgaagccctcggatctcaagaaggacatgaacgagaccttcaaggagaagtttcctcacattaagctgacactcagcaaaattaggagtctgaaacgagagatgcggaagcttgcgcaggaggactgtggccttgaggagcccacggtggccatggccttcgtctactttgaaaagctcgccctcaaggggaaactcaacaaacagaaccggaagctgtgtgctggggcatgtgtgctgttagcagccaaaattggaagtgacctcaaaaaacacgaagtcaagcatttaattgacaaactggaagagaagttccggctgaacaggcgagaactgattgcctttgaattcccggtgttagtggccttggaattcgccctccacttgcccgagcacgaagtcatgccccactacagacggctggtccagagttcctagcactggccccgaggacagccaagggccatttcttctcagcttggtggagcagcacttacttactactggaaatgaaaaaaagtagaactcagaataccagacttttcttcctctcgacatagtttggggagaagcagtactagaaactttccaaggagtcttgggtgtgtagccaagaggagccatgagctatggactcctcaagcacgggaagaggaggtgtgtgctgagaacagagaggccctgccctctgtccactagcgagaatccctagctgccccagcccagtctttctccccggcattcacaaactttgcaagcgtggtccagggccttctccagatctgttccaacttggagtgtgaagggcttgagcatac

SEQ ID NO: 236326 - DNA, 4288 bp, Artificial Sequence
  derived and/or modified sequence
ggccatttttcttcctggtgtttgaatgactcataaaatgagtttggagtggtctgaagcctctgcctccttccttgaatgctttctaagaggggctgccatgcaagaatatatgctgattttcccatacggcgcctcatctcccagagatcttccttggagaccctggaagatattgaggagaacgcccctctccggagatgtcgaactctctcaggttcacccagaccaaagaattttaagaagattcattttatcaagaacatgcggcaacacgataccaggaatggcagaatagtccttatcagtggcagaagatccttctgtagtatattttcagtgctgccgtatcgcgacagtacccaagtcggggacttgaagttggacggaggaagacaatcaactggtgcagtgagtttgaaagagatcattggtctggaaggtgtggagctgggtgctgatgggaagactgtttcctatacccaatttctgttacccacaaatgcctttggagcccggagaaataccatagactccacctcctctttctcccagttccgtaacctgagccaccgcagcctctccataggccgggcaagcggcacccaggggagcctcgacacaggtagtgacctgggagactttatggactatgacccaaatctcttggatgacccccagtggccttgtggcaaacacaaacgcgttctgatcttcccttcctacatgacaacagtgattgactacgtgaagccctcggatctcaagaaggacatgaacgagaccttcaaggagaagtttcctcacattaagctgacactcagcaaaattaggagtctgaaacgagagatgcggaagcttgcgcaggaggactgtggccttgaggagcccacggtggccatggccttcgtctactttgaaaagctcgccctcaaggggaaactcaacaaacagaaccggaagctgtgtgctggggcatgtgtgctgttagcagccaaaattggaagtgacctcaaaaaacacgaagtcaagcatttaattgacaaactggaagagaagttccggctgaacaggcgagaactgattgcctttgaattcccggtgttagtggccttggaattcgccctccacttgcccgagcacgaagtcatgccccactacagacggctggtccagagttcctagcactggccccgaggacagccaagggccatttcttctcagcttggtggagcagcacttacttactactggaaatgaaaaaaagtagaactcagaataccagacttttcttcctctcgacatagtttggggagaagcagtactagaaactttccaaggagtcttgggtgtgtagccaagaggagccatgagctatggactcctcaagcacgggaagaggaggtgtgtgctgagaacagagaggccctgccctctgtccactagcgagaatccctagctgccccagcccagtctttctccccggcattcacaaactttgcaagcgtggtccagggccttctccagatctgttccaacttggagtgtgaagggcttgagcatacgggggaagagagtctgcagaagttgggggaaaacttttaaaagataccctcattgtgtcaaagagtgtgccaatctatttttgtatcagcattggaagtgcactttcccctggggcgtgtgggtgtgtgaatgtgcaagtgtctgagagatactgcatcagccctagacccccagagccagtcccgccctttacagagcagcccttagcctggggccatgggtcaggctgaccttcaacaattatttctagatgatttctggataagaattgctctctcggtaccagacagtttgacatcctccacccttagaaaatgactgacattgttttgttactgctcctacccaccaaggggataaagaaggcgagttctgagtgttggatgagtcagtcgcgtggaaggacgtggagcgtggcgctctgtaacttcctgccgtctgccaccccgccacgtgtatttaaccctcgcactttctccactgtggagatggctggggcggcgccccacagtgtgtattcctgtcctctatgttagagtgcatcagaagcacatttactgtgctatctatatcgctatataaaagtgttttataaaaacccagaataggagcacgacgcatgattggtgtttgaggcgtttgccagctgggacaaactgcgtttggagctgtggttaagctgactaaggaggcggtggctctttcttaacattcccacgtgcccagggctgttcatgcaagattttaatggtgacttgtcctggcttactgggacagtctgtatgaggcatgtcaccacactgtcgcctcatagctgcaagagagaggcaccagctgaagttcccctgactgaagagagcctgtggccatgtaaaaagagaattaaactcttgttgctttttgtatacctgtatgcgtttgtgtagacgtgtgtctcaccagtcacctttgccctgcattgctgatccccttgcgcacactgattctagtgaggtcacagattcggagcttcacacaccagcccagagaaagggcgatggaaccgaaccgagggtctgcagctttcgttagcagagctgtcagattcttgacagtcttggaggatggagaaattcaagcagcagctggtgagggccaaaacagaatacttggcttcttcagaatcttagattgcactgagtttagtcctaaatattttgctaacaaatttccttggccagaatcagttgtaagacagtgatttgggtggtggggggagggaggagggagaggatatgattaatgtggtctctttggctgatcgaaagctagatcaactggtacttagggcacttgctgtttataaagcaaaattgagaaaatattcaaggtgcctccatcgcctgaactacaaaatgcccttggccttcctcacatggggtctgtcaccttgcatctctgataagccatccaccttcctggtcagtgcctacagggggagagcctttctgagaagcaggtcctgtggtatctgagaatggtctagagagctccccactgcccatctgcccccgaatttcctgccaagctctggggagtggggtggggggagggacgtccgatggatgacaggccgccagcccagacgtggggagagaagcctgagtcctttcctgtgtgataaaatcaggctaatttacttggatttggggtgatttgtttggtttttagcatttatgaggtgagcccatgaagttagtggtccattactttttaaagatgcattttcattttaaactgtctcctggcctgtggatttgtggaatggacagttttgtgggttttaatttatttgtgaggagtcggggctgagaaggcattttatcaggaggtctccttttgcacgtccatgacatgagcttttcggaggcaaaggaagtggaggagggtgagagatgcaggtcactgccagaggcacctctgtgacacggaacattccagacacgtcgcagccttgggcttcggcgaggaggaagtctgagcctgtgaagcgagaaggccaggcagtagactggctctgaggttttgccctttgacctcctccacagagggcagcttcagccccttgtaagccctgccccctctcaggactgccctgaggcctctccagtcctccccacactcagagatctgtggggaagctccgcccagccacactccttgggataatactagccggttctgcctgattccttttcccccggagccagcctagggggcccgggactcctctagtgagccttgactgttaggtaagagacaggaagcagacaagccaagaggttgctgcagctgcccccaggaggaaacgggcagcagggagtgtggcccagcccccactgtacccctccaggggcccgagcccttgccagcccaatgacaccttgaagtcaccacttttcctttcttgcccgctaataaaacctatttaaacaggaaattcataccaaatgcaaatgggttttgttttccttggcattttgttgttccgatcacagatttccctgccagggtgtctgtggttatcagctgcaggctcagcttggggcggccgcttcacacaagccactctgtaccacgtgccctaccttagtgacgggagtaaggagcttccttcccctccatgtcattccttcctgttcccttcattccccaacagcaaataaaactgttgaatgctctg

SEQ ID NO: 236327 - DNA, 1107 bp, Artificial Sequence
  derived and/or modified sequence
atgttgtccaaacgagggtgtcacgccaggatctacgctgacttccccattaggcgactcatcagccagcgaagcagcctggagaccttggaagatatcgaggagaatgctcccctgagaagatgcaggacactttctggcagccctcggcctaaaaattttaaaaaaattcattttataaagaatatgcgtcagcatgataccagaaatggtaggatcgtgctcatttccgggaggcgatcgttttgcagcatattttctgttcttccttacagagattctacacaagtcggagatctgaaactggacggcggacgtcaatcgacgggagctgtgagtctgaaggagattattgggctggaaggggtggagttgggggctgacggtaagacagtcagctatacccagtttcttttgccaacgaatgcatttggcgctagacgcaatacaattgactcaaccagcagtttttcgcagttcaggaacctgtcgcaccgtagcctttcaattggcagggcctcaggtacccagggcagtctggacaccggatctgacctaggagatttcatggattatgatcctaacctgctggacgacccacaatggccctgcggtaagcacaagagggtcctcattttccctagctacatgactacagtcatagattatgttaagccttccgacctgaagaaagatatgaacgagacttttaaagaaaagtttccgcatatcaagctgaccctttcaaagataaggagtctgaagagagagatgagaaagttagcccaggaggattgtggactcgaagagcctaccgtcgctatggcatttgtctacttcgaaaagcttgccctgaagggcaagttaaacaagcagaatcggaaactgtgcgctggtgcctgtgtgctgcttgcagccaagattggctcagacttaaagaagcatgaggtgaagcacctgatcgacaaactggaggagaagttcagactcaaccgtcgtgagttgattgcttttgaattcccggtgctggtcgccttagaatttgccttacatttacccgaacacgaggttatgccacattatagacgcttagtccagtcctcgtag

SEQ ID NO: 236328 - protein, 440 aa, Artificial Sequence
  derived and/or modified sequence
MMADEEEEVKPILQKLQELVDQLYSFRDCYFETHSVEDAGRKQQDVQKEMEKTLQQMEEVVGSVQGKAQVLMLTGKALNVTPDYSPKAEELLSKAVKLEPELVEAWNQLGEVYWKKGDVAAAHTCFSGALTHCRNKVSLQNLSMVLRQLRTDTEDEHSHHVMDSVRQAKLAVQMDVHDGRSWYILGNSYLSLYFSTGQNPKISQQALSAYAQAEKVDRKASSNPDLHLNRATLHKYEESYGEALEGFSRAAALDPAWPEPRQREQQLLEFLDRLTSLLESKGKVKTKKLQSMLGSLRPAHLGPCSDGHYQSASGQKVTLELKPLSTLQPGVNSGAVILGKVVFSLTTEEKVPFTFGLVDSDGPCYAVMVYNIVQSWGVLIGDSVAIPEPNLRLHRIQHKGKDYSFSSVRVETPLLLVVNGKPQGSSSQAVATVASRPQCE

SEQ ID NO: 236329 - DNA, 1323 bp, Artificial Sequence
  derived and/or modified sequence
atgatggccgatgaagaagaggaagtaaagcctattctccagaaactgcaagaactggtggaccagctgtatagcttccgtgactgctactttgaaactcactcagtggaggacgctggcagaaaacagcaggatgtacagaaggagatggaaaagaccttgcagcagatggaggaagtggtggggtccgttcagggaaaggcccaggtgctgatgttgaccggcaaagcactgaatgtcacacctgactactctcccaaggccgaagaacttttgagtaaggccgtaaaattggaacccgaattagtcgaggcctggaaccagttgggggaagtctattggaaaaagggagatgtcgctgctgcccatacctgcttcagcggagccctcactcactgcagaaacaaagtatctctgcagaacctgtccatggtcttacggcaactgaggacagatacggaggacgaacattcacatcatgtgatggatagcgtgagacaggcaaagctagctgtacagatggacgtacatgacggccgctcatggtatatcctggggaactcttatctcagtctctatttcagcactggtcagaacccaaaaatttcacaacaggcactgagtgcctacgcacaggccgaaaaggtggatagaaaggcgtcttcaaaccctgatctgcatctcaaccgagcaacactgcataagtatgaagagagctacggtgaagctctggaaggcttcagccgagccgccgctctcgaccctgcttggcccgaacctagacaaagggagcagcaattactggaattcttggatcgacttacttcgcttttggagtccaagggcaaggtcaagactaagaaactccagtcgatgcttggatccctcagaccggcacaccttggaccctgcagcgatgggcactatcagtcagcatcagggcaaaaagttactctagaactaaagccgttgagcaccctacagccgggcgtcaattccggtgccgtcatcctggggaaggtggtcttttcactgacaacagaggaaaaggtgccatttacatttggcctcgtggattcagatggcccatgttacgctgtgatggtttacaacattgtgcagtcatggggtgtactgatcggcgacagcgttgctatacctgaaccaaaccttcggctgcacaggatccagcacaaaggaaaggattattctttcagctcagtccgcgtggaaactcccctgctgttggtggtgaacggcaagcctcaagggtctagtagccaggctgtggccacggtggcaagtagaccccagtgcgaatag

SEQ ID NO: 236330 - DNA, 1323 bp, Artificial Sequence
  derived and/or modified sequence
atgatggctgatgaggaggaggaggtgaagcccatcctgcagaagctgcaggagctggtggaccagctgtacagcttccgggactgctactttgagacccacagcgtggaggatgctggcaggaagcagcaggatgtgcagaaggagatggagaagaccctgcagcagatggaggaggtggtgggctctgtgcagggcaaggcccaggtgctgatgctgaccgggaaggccctgaatgtgaccccagactacagccccaaggccgaggagctgctgagcaaggctgtgaagctggagcctgagctggtggaggcctggaaccagctgggggaggtgtactggaagaagggagatgtggccgccgcccacacctgcttcagcggggccctgacccactgcaggaacaaggtgtccctgcagaacctgtccatggtgctgcggcagctgaggacagacacagaagatgagcacagccaccacgtgatggacagcgtgcggcaggccaagctggccgtgcagatggatgtgcatgatggccgctcctggtacatcctgggcaacagctacctgagcctgtacttcagcacaggccagaaccccaagatcagccagcaggccctgagcgcctatgcccaggccgagaaggtggacaggaaggccagcagcaacccagacctgcacctgaacagagccaccctgcacaagtatgaggagagctatggagaggccctggagggcttcagcagagctgctgccctggaccctgcctggccagagccccggcagcgggagcagcagctgctggagttcctggaccggctgaccagcctgctggagagcaagggcaaggtgaagaccaagaagctgcagagcatgctgggcagcctgcggcctgcccacctgggcccctgcagtgatggccactaccagagcgccagcggccagaaggtgaccctggagctgaagcccctgagcaccctgcagcccggggtgaacagcggggctgtgatcctgggcaaggtggtgttcagcctgaccacagaggagaaggtgcccttcaccttcggcctggtggacagtgatggcccctgctatgctgtgatggtgtacaacatcgtgcagagctggggcgtgctgattggagacagcgtggccatccctgagcccaacctgcggctgcaccgcatccagcacaagggcaaggactacagcttcagctctgtgcgggtggagacccccctgctgctggtggtgaatggcaagccccagggcagcagcagccaggccgtggccaccgtggccagccggccccagtgtgagtag

SEQ ID NO: 236331 - DNA, 1323 bp, Artificial Sequence
  derived and/or modified sequence
atgatggccgacgaggaggaggaggtgaagcccatcctgcagaagttacaggagctcgtcgaccagctatattcctttagggattgctactttgaaactcactcagtggaagatgcaggcaggaagcagcaggacgtgcagaaggaaatggagaagaccctccagcagatggaagaggtggttgggagcgtacaaggaaaggcacaggttctgatgctcactggaaaagcattaaacgttacacctgattattctcccaaagctgaagagctgctttccaaggctgtgaaactcgaaccggagttagtggaggcttggaaccagctcggagaagtgtattggaagaagggcgatgttgctgctgcccacacatgttttagtggcgccctcacacactgtcgtaataaggtcagtttgcagaatttatcaatggtgctgcgccagctacgtaccgatacggaagatgagcacagccaccacgtgatggactccgtgaggcaggcaaagcttgccgtgcaaatggacgtgcacgatggaagatcctggtatatccttggaaactcctatctttctctatactttagcacaggacagaaccccaagatttcccaacaggcccttagcgcatacgcccaggcggaaaaggtagaccgaaaggcttcaagtaaccccgaccttcatttaaaccgggccacacttcacaagtatgaggaaagttacggagaggcactggaaggcttcagtagagccgccgctcttgaccccgcctggcctgagccaaggcagagggagcagcagttgctagaatttttggatcggttaacttccctgctggagagcaaaggaaaagtcaagacaaagaagctacaaagcatgctgggctccctccgacctgcacacctggggccttgcagcgatggccactaccagtctgcaagcgggcagaaagtgacccttgagctgaaacccctgtctaccttgcagcccggcgtaaactccggtgccgttattcttggaaaagtcgtattctccttaactactgaagagaaggtccctttcacctttggcctcgtggatagcgatggcccatgctacgcagtaatggtgtataatatcgtccagagttggggagtgttaatcggggatagtgttgctatccctgagcccaacctgcgtttgcaccgcattcagcacaaagggaaagactacagcttcagctcagtgagagtcgaaacaccactgctgttggttgtgaacggcaagccccagggctctagcagccaggctgtggccacagtggcctctcgcccacaatgcgagtag

SEQ ID NO: 236332 - DNA, 1323 bp, Artificial Sequence
  derived and/or modified sequence
atgatggctgacgaagaggaggaagttaaacccatccttcagaagctgcaggagcttgtcgaccagttatattccttccgggactgttacttcgaaacgcattctgtcgaggacgcagggcgtaagcagcaggatgttcagaaggagatggaaaagaccctacagcagatggaagaggtcgttggatcggttcaaggcaaagctcaggttctgatgttgaccgggaaggccctgaacgtaactcctgactacagtccaaaagccgaggaacttctgtcaaaggcggtgaaactggagcccgaactggtggaggcctggaaccagctcggcgaggtctattggaagaaaggagatgtggccgcagctcacacgtgcttttcaggggctttgactcattgtagaaataaagtgagtttacagaacctgagtatggtgctgcggcagctccgtaccgacaccgaagacgaacattctcaccacgtgatggattccgtgcgtcaggcaaagttggctgtgcagatggacgtccacgatggaagaagctggtatattctcggtaatagttatttgtctctgtatttctccactggtcaaaatcctaaaatttcccagcaagccctctccgcgtacgcacaggctgagaaagtggaccggaaggccagctcaaatccagaccttcatctcaaccgcgcaacactgcataaatacgaggaatcatacggtgaagcattagaaggctttagccgagccgctgcactcgacccagcatggccagaaccacggcagcgggaacagcagctgctcgagtttcttgatagactgacttccctactggaaagtaaaggcaaggtgaaaacaaagaagctgcagtcgatgctgggctcccttaggcccgcacacctaggcccttgctccgatggtcattatcagagcgcatccggccagaaagtcaccctggagcttaagcctttgtcaaccctccagcctggcgtgaactccggcgctgtaatcctcggaaaagtggttttctccttaaccactgaggagaaggtgcctttcacattcgggctcgtggattccgacggaccatgttatgccgtaatggtgtacaacatcgtgcagtcctggggcgtattaataggggattcagtggcaatccctgaaccaaacctgaggctacaccgcattcagcacaagggcaaggattactcgttcagcagcgtgcgggtagaaaccccattgctacttgtagtcaacggcaaacctcaggggtcatcctcgcaggctgttgccaccgtggccagcagacctcaatgcgagtag

SEQ ID NO: 236333 - DNA, 4779 bp, Artificial Sequence
  derived and/or modified sequence
ggtgagagagggcgtgcgtctctgtggttataaagttgggggtggagtggccgggagatgatggctgatgaagaggaagaagtcaagccgatcttgcagaaattgcaggaactcgtggatcagctctactcatttcgagactgctatttcgagacacatagtgttgaggatgctgggaggaagcaacaggatgtgcagaaggagatggagaaaaccctacagcagatggaagaagtagtgggttctgtccagggcaaggcacaagttctaatgctaactgggaaagcactaaatgtgactcctgactatagccctaaggctgaggagcttctgtcaaaggctgtgaagctggagcccgagctggtggaagcctggaaccagctgggtgaggtgtactggaaaaaaggggatgttgcagctgcccacacctgcttctcaggagccctcacccattgcaggaacaaagtctccttgcaaaacctgtcaatggtgcttcgtcagctgcggactgacactgaagatgaacattctcaccatgtcatggacagtgtccgacaggctaagttggctgttcagatggatgtccatgatggccgctcctggtatattcttgggaattcatatctttccctttacttctctactggccagaaccctaagatctcccagcaagccctcagtgcctatgcccaagcagagaaagttgacagaaaagcttctagcaatcctgaccttcatctgaacagggcgacgttgcataaatatgaagagagttatggggaggccctggagggcttctctcgggctgcagccctggaccctgcctggccagagccccggcaacgagagcaacaacttctggaattcctggatagattaaccagcctccttgagagtaagggaaaggtgaagaccaaaaagctgcagagcatgctgggaagcttgcgcccagcccatctaggcccttgcagtgatgggcactatcagtcagcctctgggcagaaagtgaccctggagctcaagccactgagtacgcttcagcctggggtgaacagcggtgccgtcatcctgggaaaggtggtatttagcctcaccacagaggagaaagtcccctttacatttggcctggtagattcagatggaccttgctatgcagtgatggtgtacaatatagtgcagagctggggagtgctcattggagactctgtagccattcctgagcccaacctgcggcttcaccgaattcagcacaaaggaaaggactattccttttccagtgttcgagtggagacgcccctcctgctagtggtgaatgggaagcctcagggatccagcagccaggctgttgccacagtggcatcgcgaccacagtgtgaatgacctttgacttgcatgctcaacagggagtggaggagaggagacaaggctctggacagccggtccagccacatccagtgattcagcagggatgggaggaatgttttaaatgaagactttctctttccctgcctgtattacacttcgtatctcttctctctcctctgtcctcatcatgttccagctctctacagggccacatactcttctggcatatctctcctgtctcttccactgctctctatgttttaagcaaagagcatggaattggtagaagtcttgggatcttgccatgggacagagtccccaaggttcctgttgttgcctccttcctaagcctcatatgtatatatcagttcagtatttattgctaaaggagggggcttaattttgtaatggcttttatttttagcaatttttatttttatttttgaactttaggtccttcctcttctttggggctggaacagaattaaatttgtttggaaaaaaaaaaaaacaccacgtagtttggcctgctttattctccctaggcctgtattctttgttttaggatcacttcaatttattggagtaatacccccatttttttctttatacaaagcagtttatttctctcccagttaaaagaattccgacaatagacagccccaggcaggaatggcaactccacaaagttgctagagaccagctttcttccattttcccattctgtcattccctaggggtggtcttcactatggtccaagatgacagagcaatactgttctaatagtgttactaggctgaaggaccagagagagttagataaatcctcagtttctttagagtctagtgacatgttttataacagtttatcttaatatccttgtggtaaaatggagaaatgtgagtgaggattaataaccaattgaattggcctggcacggtggctcagcctgtaatcccaccactttgggagtccaaggcgggtggatcacgaggtcaggagttcaagatcagcctggccaagatggtgaaactccgtctctactaaaaatacaaaaattagctgggcgtggtggcaggcacctgtaatcacagctactggggaggctgaggcagagaattgcttgaacctgggaagtggaggttgcagtgagccgatatcatgccactgcactccagcatgggcgacagagcgagactccgtctcaaacagcaacaacaactgaatggctgtaatacattaatgtatacagatgaattgagaagtcttctagtgaaatggctcagatctttgttcttggtccagtcctgttcagtttttgatcagtgccttgaatatcattgatgactcattaaatttataaagagtgcagaggcctcctcagagaatggatggtagaaatgcattgatgagagaagttttatctatctatctgtctatctatctatctatctatctgtctctatctaagaagtcataaaggctgagtctaataagataaaattttcagtccattcttttggtccaaaaaggcttacattctcaggtatagcttcaacatcatatatgaatattactaagaatcttagtagataagctaaagtcagtatgagtaaccagtctgatatagtttgcaagaacactcttcatggactgcaccaaaaaaacctatggtagcaagagacagtttttattagaagtactgtctgttataccacatatggagtcttaaattagttttgggtgtcattttgaggcctagagtcatagaagagtgattaggagcttgtggggtataaaaataacttgagaattggctgaaagcaactagggaagatgggggtagtagtatgtgtaaacatttgaggcagtagagatgtgggacccaaatactgttccccttttactcaaattctgagatgagttgacatgttctgtgtagggctagagagtagaaaaatggccagtaggtggtagccacagagaagcagtgcgtacaaacaagtaagtatgcaaaatttgtacatacggtttcaggaataactagaatacccataaaatatccacctgccttaaaaactagaacatcattgataacttggaagcccttgcatacctctccatgatctcatttgtcttcacagctatataaatctcattgtatgattataccataatttattcatcctgttgttaaaggatatttgggtttccagtttttctttttttactaccaaagcactacattattaatattcttgtatatgtcctgatatgtaagtgcaaaagtttcttttacagcaatggctcttgaagagtggttcccagaccagcagcatcagcatcccttggaacttctttgaaatgcaaattctcaagccccctacccagacttactgaattcaaaactatgtgggaggagcccagcaatctgtgtttcgcaaaccctccaggtgactctgatgcacagtaaaatttgagaaccactgtttaagagtattgacatagaatggaattgctggatcatagagtatatacatgttcaacttttttgagaagcactaaacatttccaaagtgcttatattagtttatgtctctactatcaatagatgagtcaccccaatgctccccatcctcttctgtgcttggtattatcttttaggtattgcaaatacaggagatttgagtattatttccttgtggccttaatttgcatttctgattattaatgagcttgagcatcttttcatatatttagaagccactaatattttctctcggtaaaatgcctattcgagtctttgcacactgctgtattggatgtcaaattgatttatatattccctgtactaatcgtttgtctacatacagttttatcctgtttttttttttattctattgggtcttttgctgaacagaagttcttaatttcaatgtcattgaatttatccatcttttatgataatgctttttgtgttttaagaggttcttagctctcctaaagtcataaggacattttccctctactgctttatgaagttattttgtccttttcttacagtatgactttattttatgttatgtacggatataatttttttcataatgagtaaatagcccagcaccttttattaaagaatcaatcctttccctactgatctttaaagcccagtctgtctttttctttttttgaaattgtctagctttttaatttttaccaaccagatgattataaaatatcacatagtaggcataaattacatttctttgtccattcctgtttctttttctatgaaatctctgttttcttttgtccaatttttattgggttgtcttcttattgattccttacatgttctggatactaatccattataaattatgtttttcaaatatatttatccaaatcgc

SEQ ID NO: 236334 - DNA, 1323 bp, Artificial Sequence
  derived and/or modified sequence
atgatggccgacgaggaggaggaggtgaagcccatcctgcagaagctgcaggagctggtggaccagctgtacagcttcagagactgctacttcgagacccacagcgtggaggacgccggcagaaagcagcaggacgtgcagaaggagatggagaagaccctgcagcagatggaggaggtggtgggcagcgtgcagggcaaggcccaggtgctgatgctgaccggcaaggccctgaacgtgacccccgactacagccccaaggccgaggagctgctgagcaaggccgtgaagctggagcccgagctggtggaggcctggaaccagctgggcgaggtgtactggaagaagggcgacgtggccgccgcccacacctgcttcagcggcgccctgacccactgcagaaacaaggtgagcctgcagaacctgagcatggtgctgagacagctgagaaccgacaccgaggacgagcacagccaccacgtgatggacagcgtgagacaggccaagctggccgtgcagatggacgtgcacgacggcagaagctggtacatcctgggcaacagctacctgagcctgtacttcagcaccggccagaaccccaagatcagccagcaggccctgagcgcctacgcccaggccgagaaggtggacagaaaggccagcagcaaccccgacctgcacctgaacagagccaccctgcacaagtacgaggagagctacggcgaggccctggagggcttcagcagagccgccgccctggaccccgcctggcccgagcccagacagagagagcagcagctgctggagttcctggacagactgaccagcctgctggagagcaagggcaaggtgaagaccaagaagctgcagagcatgctgggcagcctgagacccgcccacctgggcccctgcagcgacggccactaccagagcgccagcggccagaaggtgaccctggagctgaagcccctgagcaccctgcagcccggcgtgaacagcggcgccgtgatcctgggcaaggtggtgttcagcctgaccaccgaggagaaggtgcccttcaccttcggcctggtggacagcgacggcccctgctacgccgtgatggtgtacaacatcgtgcagagctggggcgtgctgatcggcgacagcgtggccatccccgagcccaacctgagactgcacagaatccagcacaagggcaaggactacagcttcagcagcgtgagagtggagacccccctgctgctggtggtgaacggcaagccccagggcagcagcagccaggccgtggccaccgtggccagcagaccccagtgcgagtag

SEQ ID NO: 236335 - protein, 378 aa, Artificial Sequence
  derived and/or modified sequence
MSKEPLILWLMIEFWWLYLTPVTSETVVTEVLGHRVTLPCLYSSWSHNSNSMCWGKDQCPYSGCKEALIRTDGMRVTSRKSAKYRLQGTIPRGDVSLTILNPSESDSGVYCCRIEVPGWFNDVKINVRLNLQRASTTTHRTATTTTRRTTTTSPTTTRQMTTTPAALPTTVVTTPDLTTGTPLQMTTIAVFTTANTCLSLTPSTLPEEATGLLTPEPSKEGPILTAESETVLPSDSWSSVESTSADTVLLTSKESKVWDLPSTSHVSMWKTSDSVSSPQPGASDTAVPEQNKTTKTGQMDGIPMSMKNEMPISQLLMIIAPSLGFVLFALFVAFLLRGKLMETYCSQKHTRLDYIGDSKNVLNDVQHGREDEDGLFTL

SEQ ID NO: 236336 - DNA, 1137 bp, Artificial Sequence
  derived and/or modified sequence
atgagcaaggagcccctgatcctgtggctgatgatcgagttctggtggctgtacctgacccccgtgaccagcgagaccgtggtgaccgaggtgctgggccacagagtgaccctgccctgcctgtacagcagctggagccacaacagcaacagcatgtgctggggcaaggaccagtgcccctacagcggctgcaaggaggccctgatcagaaccgacggcatgagagtgaccagcagaaagagcgccaagtacagactgcagggcaccatccccagaggcgacgtgagcctgaccatcctgaaccccagcgagagcgacagcggcgtgtactgctgcagaatcgaggtgcccggctggttcaacgacgtgaagatcaacgtgagactgaacctgcagagagccagcaccaccacccacagaaccgccaccaccaccaccagaagaaccaccaccaccagccccaccaccaccagacagatgaccaccacccccgccgccctgcccaccaccgtggtgaccacccccgacctgaccaccggcacccccctgcagatgaccaccatcgccgtgttcaccaccgccaacacctgcctgagcctgacccccagcaccctgcccgaggaggccaccggcctgctgacccccgagcccagcaaggagggccccatcctgaccgccgagagcgagaccgtgctgcccagcgacagctggagcagcgtggagagcaccagcgccgacaccgtgctgctgaccagcaaggagagcaaggtgtgggacctgcccagcaccagccacgtgagcatgtggaagaccagcgacagcgtgagcagcccccagcccggcgccagcgacaccgccgtgcccgagcagaacaagaccaccaagaccggccagatggacggcatccccatgagcatgaagaacgagatgcccatcagccagctgctgatgatcatcgcccccagcctgggcttcgtgctgttcgccctgttcgtggccttcctgctgagaggcaagctgatggagacctactgcagccagaagcacaccagactggactacatcggcgacagcaagaacgtgctgaacgacgtgcagcacggcagagaggacgaggacggcctgttcaccctgtag

SEQ ID NO: 236337 - DNA, 1137 bp, Artificial Sequence
  derived and/or modified sequence
atgtcaaaggaaccattgatcctttggctaatgatcgaattttggtggctgtatttaacccctgtcaccagtgaaaccgttgtaactgaggtgctagggcacagggtgaccctgccctgcctatattcttcatggagccacaatagtaattccatgtgttggggaaaggaccagtgcccctatagcgggtgcaaagaggccctgattaggactgacggtatgagagtaacttctagaaaaagcgcaaaatacagactgcaaggaaccattccgcggggcgatgtgtcgctgaccattctgaacccttccgagtccgacagtggggtctactgttgcagaatagaagtgcccggctggttcaatgatgtcaaaatcaacgtgcggctgaatcttcagcgggcatcgactaccacacaccgcaccgctactactactactagacggaccacaaccacctcgcctaccacaactcggcagatgaccacaacacctgcagctttgcccaccaccgtagtgaccacccccgacctcaccacgggcactcctctacagatgacaaccattgcggtgttcaccaccgccaacacttgtctctctcttaccccttcaacattgcccgaggaggcaaccggcctgctgacacccgagccctccaaggaggggccgatcttaaccgcggagtccgagactgtgcttccgtcagattcctggagctctgtggagtccacttctgcagataccgttttgctcacctcaaaggaatctaaggtctgggacctgccttccacttcgcacgtctcaatgtggaaaacgtctgactctgtgagttctcctcagcccggcgcttctgacaccgccgtgccggagcagaacaaaacgactaaaaccggccaaatggacgggatccccatgagtatgaagaacgaaatgccgatttctcagctcctcatgattatcgcaccttcacttggctttgtcctgttcgcattgttcgtggcttttttgttgcgtggaaagttgatggaaacttactgcagccagaagcacaccagactggactacatcggtgactctaaaaatgttttgaacgatgtgcagcatggccgagaggacgaggatggcctcttcactttatag

SEQ ID NO: 236338 - DNA, 1137 bp, Artificial Sequence
  derived and/or modified sequence
atgagcaaggagcccctcatcctgtggctgatgattgagttctggtggctgtacctgacccctgtgaccagcgagaccgtggtgacagaggtgctgggccaccgggtgaccctgccctgcctgtacagctcctggagccacaacagcaacagcatgtgctggggcaaggaccagtgcccctacagcggctgcaaggaggccctgatcagaacagatggcatgagggtgaccagcaggaagagcgccaagtaccgcctgcagggcaccatccccagaggagatgtgtccctgaccatcctgaaccccagcgagagtgacagcggcgtgtactgctgccgcatcgaggtgcccggctggttcaatgatgtgaagatcaacgtgcggctgaacctgcagagggccagcaccaccacccacaggacagccaccaccaccaccaggaggaccaccaccaccagccccaccaccacccggcagatgaccaccaccccagctgccctgcccaccaccgtggtgaccaccccagacctgaccaccggcacccccctgcagatgaccaccatcgctgtgttcaccacagccaacacctgcctgagcctgacccccagcaccctgcctgaggaggccaccggcctgctgaccccagagcccagcaaggagggccccatcctgacagctgagagcgagaccgtgctgcccagcgacagctggagctctgtggagagcaccagcgctgacacagtgctgctgaccagcaaggagagcaaggtgtgggacctgcccagcaccagccacgtgtccatgtggaagaccagtgacagcgtgagcagcccccagcccggggccagtgacacagctgtgcctgagcagaacaagaccaccaagacaggccagatggatggcatccccatgtccatgaagaatgagatgcccatcagccagctgctgatgatcatcgcccccagcctgggctttgtgctgtttgccctgtttgtggccttcctgctgcggggcaagctgatggagacctactgcagccagaagcacacccggctggactacatcggggacagcaagaatgtgctgaatgatgtgcagcacggccgggaggatgaagatggcctcttcaccctgtag

SEQ ID NO: 236339 - DNA, 1137 bp, Artificial Sequence
  derived and/or modified sequence
atgagcaaggagcccctgatcctgtggctgatgatcgagttctggtggctgtatttaacacctgtcacatcagagaccgttgtgaccgaggtgctgggccacagggttactctgccttgtctctacagcagttggagccataatagcaacagtatgtgctggggaaaggatcagtgcccgtacagcggatgcaaggaggccttgatccgtaccgacgggatgagggtcacaagccggaaaagcgccaagtacaggctccaaggtactatccccaggggcgacgtctcccttactattcttaatcctagcgagagcgacagtggtgtgtactgttgccgaattgaggtccccggatggtttaacgatgttaagattaacgtccgcctgaatctgcaaagagcctctaccacaacccaccgcacagccacaaccacaacccgccgcactactaccacgagcccaacgacaactagacagatgacgacgacgccagctgccctcccgaccacagtggtgacgaccccagatctgacaacgggtacacccctccaaatgactactatcgctgtgttcacgaccgcaaatacatgcctgtctctgacgccatctacattgccagaggaggcaaccggcttgctaacccccgagccgagcaaagaaggtcccatcctcacagctgaatcggaaactgttctgcctagtgacagttggagcagcgtggagtccacctctgctgacactgtgttgctcaccagcaaggagtcaaaggtgtgggatctgcctagtactagccatgtgtcaatgtggaaaacgagcgactccgtgagctctccacagcctggcgcatcagacaccgcggttccggagcagaataagaccacaaagaccggccagatggacggcatccccatgagcatgaaaaacgagatgcccattagtcagctgctgatgataattgcccccagcctgggattcgtcctgtttgccctgtttgtggccttcctgcttcgcgggaagctgatggaaacatactgctcgcagaagcatactcgacttgactacatcggcgactccaagaacgtgctgaatgacgtgcagcacggtagagaggatgaagatgggctcttcactctgtag

SEQ ID NO: 236340 - DNA, 1137 bp, Artificial Sequence
  derived and/or modified sequence
atgtccaaagaaccactaattctatggttgatgatcgaattttggtggttgtatctcacccctgtcaccagtgagaccgttgtaacagaagtactggggcatagggttaccttgccatgtctatattctagttggagccacaactccaacagcatgtgctgggggaaggatcagtgcccctacagtgggtgcaaggaagctctcatccggacggatggaatgcgggttacttccagaaagtcagcaaaatataggctgcagggtaccatcccaagaggggacgtgagtttgaccatactgaacccttcagaaagtgacagcggtgtttactgttgtcggattgaggtccctggttggtttaacgatgttaagatcaacgttcgcctgaacctccaaagagcttcgacaaccacccaccgcactgccaccaccacgacccgtcgcacgactacgaccagtcccacaaccacccgacagatgaccaccacacctgctgcactacccacaacggtcgtgacaacccctgacttgacgaccggcactccattgcagatgaccaccatagccgtgttcacaacagctaatacctgcctcagcctcactccctcaaccctgcccgaggaggcaactggactgctgaccccagagccctcaaaagaaggaccaattctgactgcggaatcagagactgtccttcctagtgactcgtggagttccgtggagagtacttccgcagatacggtgctcctaaccagcaaagagtccaaagtgtgggacctcccctccacaagccacgtgagcatgtggaagacctctgacagcgtgagctctccacagcccggagccagcgatactgccgtacccgaacaaaacaagactactaagacaggccagatggacggcatcccaatgtctatgaagaatgaaatgcccatctcacagttgttgatgattatagcaccatccctcggtttcgtgctgttcgctctgttcgtagcttttttactaagaggaaaattgatggagacctattgctctcagaagcatacaaggctcgactatattggcgactctaagaatgtgttaaacgatgttcagcacggcagagaggatgaggacggactgtttacactgtag

SEQ ID NO: 236341 - DNA, 1369 bp, Artificial Sequence
  derived and/or modified sequence
ataagaggttgggctttggatagatagacagactcctgggtccggtcaaccgtcaaaatgtccaaagaacctctcattctctggctgatgattgagttttggtggctttacctgacaccagtcacttcagagactgttgtgacggaggttttgggtcaccgggtgactttgccctgtctgtactcatcctggtctcacaacagcaacagcatgtgctgggggaaagaccagtgcccctactccggttgcaaggaggcgctcatccgcactgatggaatgagggtgacctcaagaaagtcagcaaaatatagacttcaggggactatcccgagaggtgatgtctccttgaccatcttaaaccccagtgaaagtgacagcggtgtgtactgctgccgcatagaagtgcctggctggttcaacgatgtaaagataaacgtgcgcctgaatctacagagagcctcaacaaccacgcacagaacagcaaccaccaccacacgcagaacaacaacaacaagccccaccaccacccgacaaatgacaacaaccccagctgcacttccaacaacagtcgtgaccacacccgatctcacaaccggaacaccactccagatgacaaccattgccgtcttcacaacagcaaacacgtgcctttcactaaccccaagcacccttccggaggaagccacaggtcttctgactcccgagccttctaaggaagggcccatcctcactgcagaatcagaaactgtcctccccagtgattcctggagtagtgttgagtctacttctgctgacactgtcctgctgacatccaaagagtccaaagtttgggatctcccatcaacatcccacgtgtcaatgtggaaaacgagtgattctgtgtcttctcctcagcctggagcatctgatacagcagttcctgagcagaacaaaacaacaaaaacaggacagatggatggaatacccatgtcaatgaagaatgaaatgcccatctcccaactactgatgatcatcgccccctccttgggatttgtgctcttcgcattgtttgtggcgtttctcctgagagggaaactcatggaaacctattgttcgcagaaacacacaaggctagactacattggagatagtaaaaatgtcctcaatgacgtgcagcatggaagggaagacgaagacggcctttttaccctctaacaacgcagtagcatgttagattgaggatgggggcatgacactccagtgtcaaaataagtcttagtagatttccttgtttcataaaaaagactcacttattccatggatgtcattgatccaggcttgctttagtttcatgaatgaagggtactttagagaccacaacttctctgtc

SEQ ID NO: 236342 - protein, 334 aa, Artificial Sequence
  derived and/or modified sequence
MRLTPRALCSAAQAAWRENFPLCGRDVARWFPGHMAKGLKKMQSSLKLVDCIIEVHDARIPLSGRNPLFQETLGLKPHLLVLNKMDLADLTEQQKIMQHLEGEGLKNVIFTNCVKDENVKQIIPMVTELIGRSHRYHRKENLEYCIMVIGVPNVGKSSLINSLRRQHLRKGKATRVGGEPGITRAVMSKIQVSERPLMFLLDTPGVLAPRIESVETGLKLALCGTVLDHLVGEETMADYLLYTLNKHQRFGYVQHYGLGSACDNVERVLKSVAVKLGKTQKVKVLTGTGNVNIIQPNYPAAARDFLQTFRRGLLGSVMLDLDVLRGHPPAETLP

SEQ ID NO: 236343 - protein, 283 aa, Artificial Sequence
  derived and/or modified sequence
MRLTPRALCSAAQAAWRENFPLCGRDVARWFPGHMAKGLKKMQSSLKLVDCIIEVHDARIPLSGRNPLFQETLGLKPHLLVLNKMDLADLTEQQKIMQHLEGEGLKNVIFTNCVKDENVKQIIPMVTELIGRSHRYHRKEVSERPLMFLLDTPGVLAPRIESVETGLKLALCGTVLDHLVGEETMADYLLYTLNKHQRFGYVQHYGLGSACDNVERVLKSVAVKLGKTQKVKVLTGTGNVNIIQPNYPAAARDFLQTFRRGLLGSVMLDLDVLRGHPPAETLP

SEQ ID NO: 236344 - protein, 226 aa, Artificial Sequence
  derived and/or modified sequence
MQSSLKLVDCIIEVHDARIPLSGRNPLFQETLGLKPHLLVLNKMDLADLTEQQKIMQHLEGEGLKNVIFTNCVKDENVKQIIPMVTELIGRSHRYHRKENLEYCIMVIGVPNVGKSSLINSLRRQHLRKGKATRVGGEPGITRAVMSKIQVESSGARPSTLSRALQASGTCRPLCGFRLLTTLPSPPLSVPAEHPRGRHCPCPYSTVVIVFAPNLWGRHAVFPISR

SEQ ID NO: 236345 - DNA, 1005 bp, Artificial Sequence
  derived and/or modified sequence
atgagactgacccccagagccctgtgcagcgccgcccaggccgcctggagagagaacttccccctgtgcggcagagacgtggccagatggttccccggccacatggccaagggcctgaagaagatgcagagcagcctgaagctggtggactgcatcatcgaggtgcacgacgccagaatccccctgagcggcagaaaccccctgttccaggagaccctgggcctgaagccccacctgctggtgctgaacaagatggacctggccgacctgaccgagcagcagaagatcatgcagcacctggagggcgagggcctgaagaacgtgatcttcaccaactgcgtgaaggacgagaacgtgaagcagatcatccccatggtgaccgagctgatcggcagaagccacagataccacagaaaggagaacctggagtactgcatcatggtgatcggcgtgcccaacgtgggcaagagcagcctgatcaacagcctgagaagacagcacctgagaaagggcaaggccaccagagtgggcggcgagcccggcatcaccagagccgtgatgagcaagatccaggtgagcgagagacccctgatgttcctgctggacacccccggcgtgctggcccccagaatcgagagcgtggagaccggcctgaagctggccctgtgcggcaccgtgctggaccacctggtgggcgaggagaccatggccgactacctgctgtacaccctgaacaagcaccagagattcggctacgtgcagcactacggcctgggcagcgcctgcgacaacgtggagagagtgctgaagagcgtggccgtgaagctgggcaagacccagaaggtgaaggtgctgaccggcaccggcaacgtgaacatcatccagcccaactaccccgccgccgccagagacttcctgcagaccttcagaagaggcctgctgggcagcgtgatgctggacctggacgtgctgagaggccacccccccgccgagaccctgccctag

SEQ ID NO: 236346 - DNA, 852 bp, Artificial Sequence
  derived and/or modified sequence
atgagactgacccccagagccctgtgcagcgccgcccaggccgcctggagagagaacttccccctgtgcggcagagacgtggccagatggttccccggccacatggccaagggcctgaagaagatgcagagcagcctgaagctggtggactgcatcatcgaggtgcacgacgccagaatccccctgagcggcagaaaccccctgttccaggagaccctgggcctgaagccccacctgctggtgctgaacaagatggacctggccgacctgaccgagcagcagaagatcatgcagcacctggagggcgagggcctgaagaacgtgatcttcaccaactgcgtgaaggacgagaacgtgaagcagatcatccccatggtgaccgagctgatcggcagaagccacagataccacagaaaggaggtgagcgagagacccctgatgttcctgctggacacccccggcgtgctggcccccagaatcgagagcgtggagaccggcctgaagctggccctgtgcggcaccgtgctggaccacctggtgggcgaggagaccatggccgactacctgctgtacaccctgaacaagcaccagagattcggctacgtgcagcactacggcctgggcagcgcctgcgacaacgtggagagagtgctgaagagcgtggccgtgaagctgggcaagacccagaaggtgaaggtgctgaccggcaccggcaacgtgaacatcatccagcccaactaccccgccgccgccagagacttcctgcagaccttcagaagaggcctgctgggcagcgtgatgctggacctggacgtgctgagaggccacccccccgccgagaccctgccctag

SEQ ID NO: 236347 - DNA, 681 bp, Artificial Sequence
  derived and/or modified sequence
atgcagagcagcctgaagctggtggactgcatcatcgaggtgcacgacgccagaatccccctgagcggcagaaaccccctgttccaggagaccctgggcctgaagccccacctgctggtgctgaacaagatggacctggccgacctgaccgagcagcagaagatcatgcagcacctggagggcgagggcctgaagaacgtgatcttcaccaactgcgtgaaggacgagaacgtgaagcagatcatccccatggtgaccgagctgatcggcagaagccacagataccacagaaaggagaacctggagtactgcatcatggtgatcggcgtgcccaacgtgggcaagagcagcctgatcaacagcctgagaagacagcacctgagaaagggcaaggccaccagagtgggcggcgagcccggcatcaccagagccgtgatgagcaagatccaggtggagagcagcggcgccagacccagcaccctgagcagagccctgcaggccagcggcacctgcagacccctgtgcggcttcagactgctgaccaccctgcccagcccccccctgagcgtgcccgccgagcaccccagaggcagacactgcccctgcccctacagcaccgtggtgatcgtgttcgcccccaacctgtggggcagacacgccgtgttccccatcagcagatag

SEQ ID NO: 236348 - DNA, 1005 bp, Artificial Sequence
  derived and/or modified sequence
atgaggctaacaccacgcgccttatgctctgccgcgcaggccgcatggagagaaaactttcccctgtgtggacgggatgttgctcgctggtttcctggacacatggccaagggcctgaagaaaatgcagtcgagcttaaagctcgtggactgtatcattgaggttcacgatgcccgcatcccattgagcgggaggaatcctctgtttcaggaaacactcgggctgaagccgcacttgctagtcctgaacaagatggacctggccgacctcacagaacagcagaagatcatgcagcacctggaaggggagggcttaaagaacgtgatttttacaaattgtgttaaggacgaaaatgtgaagcaaatcatccccatggtgaccgagctcattggccgctctcacaggtaccacaggaaggagaatctggaatactgcataatggttataggtgtgcctaatgtggggaaatcctctctgatcaacagcctgagaaggcagcatctgaggaaaggcaaagctacacgcgttggcggcgagcctgggatcaccagggccgttatgtccaaaattcaggtgtccgagcgacccctgatgttcctccttgacaccccaggggtgctggccccacggatcgagtccgtggagactgggctgaaactcgccctgtgcggcaccgtgctcgaccaccttgtgggggaagagaccatggctgactaccttctgtacactctgaataaacaccagaggttcggatatgtgcagcattacgggcttggttcggcatgcgataacgtcgagagagtcctgaaaagcgtcgctgtcaaactcgggaaaacccagaaggtcaaagtcctgacaggaacgggcaatgtcaatattatccagccaaattaccctgctgccgccagagatttccttcaaacctttcggcgcggactactaggctcagtgatgctggatttggacgtccttcgtgggcatcccccggctgaaaccctgccatag

SEQ ID NO: 236349 - DNA, 852 bp, Artificial Sequence
  derived and/or modified sequence
atgcggctgacgccaagggccctatgctccgctgcccaagcggcctggagggagaatttcccgctgtgcggacgggacgtcgcaagatggtttcctggccatatggccaaaggattaaagaaaatgcagagctcactcaagctcgtggactgtatcatcgaggtgcacgatgcgcggatcccactgagcggtcgaaatccactattccaagaaacactcggcctgaagccccatcttttagtgttgaacaagatggaccttgcagacctgacggaacaacagaaaataatgcagcacttggagggcgaaggccttaagaacgtgatctttacaaattgtgtgaaagacgagaacgtcaaacaaattattccaatggtcacggagttgatcggacgttcccacagatatcataggaaggaggtttcagagcggcctcttatgttcctgctggatacgccgggcgttctcgcccctcgaatagagagtgtggagactggactgaagctcgctctatgtggtacagtgttagaccacctggtgggtgaagagactatggctgattacttgttatacactctgaacaagcatcagcgctttggatatgtacagcactatggactggggtctgcctgcgacaacgttgaacgagtgctgaaatccgtcgcagtcaaacttgggaagacacaaaaagtgaaggtgctgaccggcaccggcaacgtcaatataatacagcctaactatccagccgccgcaagagactttttacagacattcaggcgcgggctgctgggaagcgtaatgctcgaccttgacgtcttgcgagggcaccctcccgcagagacactcccatag

SEQ ID NO: 236350 - DNA, 681 bp, Artificial Sequence
  derived and/or modified sequence
atgcagtcaagcctcaaattggtcgactgtattattgaagtgcatgacgcacgaattcctctctctggacgcaaccctctgttccaggagactctgggcctgaagccacacctactggtgctgaataagatggacctggctgacctgacagagcagcagaagataatgcagcacctggagggcgaagggttaaagaacgtcatatttactaactgtgtcaaagacgagaatgtgaaacagattatccccatggtaactgagcttattggtaggtcccatagataccaccggaaagagaacttagagtactgcattatggtcataggagtcccgaacgtgggaaagtccagtcttatcaacagcctcagaaggcagcatctcaggaaggggaaggccacacgggtcgggggcgagcccggaatcacaagagccgtgatgtccaagattcaggtggaaagctctggggcccggccctccactctcagccgtgccctccaggcatctggcacctgccgcccattgtgcggtttcagactgctgacgactctcccatcaccgcccctgagcgtgcctgccgaacatccccgaggtagacattgtccctgcccctattctaccgtcgtgatcgttttcgcgcccaatttgtggggacgccatgcagtttttcctatcagcagatag

SEQ ID NO: 236351 - DNA, 1005 bp, Artificial Sequence
  derived and/or modified sequence
atgaggctgaccccccgggccctgtgcagcgctgcccaggccgcctggagggagaacttccccctgtgtggcagagatgtggcccgctggttccctggccacatggccaagggcctgaagaagatgcagagcagcctgaagctggtggactgcatcatcgaggtgcatgatgcccgcatccccctgtctggaagaaaccccctcttccaggagaccctgggcctgaagccccacctgctggtgctgaacaagatggacctggccgacctgacagagcagcagaagatcatgcagcacctggagggggagggcctgaagaatgtcatcttcaccaactgtgtgaaggatgaaaatgtgaagcagatcatccccatggtgacagagctgattggccgcagccaccgctaccacaggaaggagaacctggagtactgcatcatggtgattggagtgcccaacgtgggcaagagcagcctcatcaacagcctgcggcggcagcacctgaggaagggcaaggccaccagggtgggcggggagcccggcatcaccagggctgtgatgagcaagatccaggtgtctgagcggcccctgatgttcctgctggacaccccaggagtgctggcccccagaattgaatctgtggagaccggcctgaagctggccctgtgtggcaccgtgctggaccacctggtgggggaggagaccatggctgactacctgctgtacaccctgaacaagcaccagcgcttcggctacgtgcagcactacggcctgggcagcgcctgtgacaacgtggagcgggtgctgaagtctgtggccgtgaagctgggcaagacccagaaggtgaaggtgctgaccggcactggaaatgtgaacatcatccagcccaactacccagctgctgcccgggacttcctgcagaccttccggcggggcctgctgggctctgtgatgctggacctggatgtgctgcggggccaccccccagctgagaccctgccctag

SEQ ID NO: 236352 - DNA, 852 bp, Artificial Sequence
  derived and/or modified sequence
atgaggctgaccccccgggccctgtgcagcgctgcccaggccgcctggagggagaacttccccctgtgtggcagagatgtggcccgctggttccctggccacatggccaagggcctgaagaagatgcagagcagcctgaagctggtggactgcatcatcgaggtgcatgatgcccgcatccccctgtctggaagaaaccccctcttccaggagaccctgggcctgaagccccacctgctggtgctgaacaagatggacctggccgacctgacagagcagcagaagatcatgcagcacctggagggggagggcctgaagaatgtcatcttcaccaactgtgtgaaggatgaaaatgtgaagcagatcatccccatggtgacagagctgattggccgcagccaccgctaccacaggaaggaggtgtctgagcggcccctgatgttcctgctggacaccccaggagtgctggccccccgcatcgagagcgtggagaccggcctgaagctggccctgtgtggcaccgtgctggaccacctggtgggggaggagaccatggctgactacctgctgtacaccctgaacaagcaccagagatttggctacgtgcagcactacggcctgggcagcgcctgtgacaacgtggagcgggtgctgaagtctgtggccgtgaagctgggcaagacccagaaggtgaaggtgctgactggaactggaaatgtgaacatcatccagcccaactacccagctgctgcccgggacttcctgcagaccttcagaagaggcctgctgggctctgtgatgctggacctggatgtgctgcggggccaccccccagctgagaccctgccctag

SEQ ID NO: 236353 - DNA, 681 bp, Artificial Sequence
  derived and/or modified sequence
atgcagagcagcctgaagctggtggactgcatcatcgaggtgcatgatgcccgcatccccctgagcggcaggaaccccctcttccaggagaccctgggcctgaagccccacctgctggtgctgaacaagatggacctggccgacctgacagagcagcagaagatcatgcagcacctggagggggagggcctgaagaatgtcatcttcaccaactgtgtgaaggatgaaaatgtgaagcagatcatccccatggtgacagagctgattggccgcagccaccgctaccacaggaaagaaaacctggagtactgcatcatggtgattggagtgcccaacgtgggcaagagcagcctcatcaacagcctgcggcggcagcacctgaggaagggcaaggccaccagggtgggcggggagcccggcatcaccagggctgtgatgagcaagatccaggtggagagcagcggggcccggcccagcaccctgagccgggccctgcaggccagcggcacctgccggcccctgtgtggcttccggctgctgaccaccctgcccagcccccccctgtctgtgcctgctgagcacccccggggccgccactgcccctgcccctacagcacagtggtgattgtgtttgcccccaacctgtggggcagacatgctgtgttccccatcagcaggtag

SEQ ID NO: 236354 - DNA, 1560 bp, Artificial Sequence
  derived and/or modified sequence
gcggcgcagaggaggtcagctgcgggagcgtttccggggacggtgccgccatgagattgaccccgcgcgcgctgtgcagcgccgcccaggccgcctggcgggagaacttccccctgtgcggtcgcgacgtggcgcgctggttcccgggccacatggccaaggggctgaagaagatgcagagcagcctgaagctggtggactgtatcatcgaggtccacgatgcccggatcccactttcaggccgcaaccctctgtttcaggaaacccttgggcttaagcctcacttgctggtcctcaacaagatggacttggcggatcttacagagcagcagaaaattatgcaacacttagaaggagaaggcctaaaaaatgtcatttttaccaactgtgtaaaggatgaaaatgtcaagcagatcatcccgatggtcactgaactgattgggagaagccaccgctaccaccgaaaagagaacctggagtactgtatcatggtcattggggtccccaacgtgggcaagtcctccctcatcaactccctccggaggcagcacctcaggaaagggaaagccaccagggtgggtggcgagcctgggatcaccagagctgtgatgtccaaaattcaggtctctgagcggcccctgatgttcctgttggacactcctggcgtgctggctcctcggattgaaagtgtggagacaggcctgaagctggccctgtgtggaacggtgctggaccacctggtcggggaggagaccatggctgactacctgctgtacaccctcaacaaacaccagcgctttgggtacgtgcagcactacggcctgggcagtgcctgtgacaacgtagagcgcgtgctgaagagtgtggctgtgaagctggggaagacgcagaaggtgaaggtgctcacgggcacgggtaacgtgaacattattcagcctaactatcctgcggcagcccgtgacttcctgcagactttccgccgtgggctgctgggttccgtgatgctggacctcgacgtcctgcggggccaccccccggctgagactttgccctgaacttgtccgggtagggagggccggaggcatgtggcctcccagacctcctgacctgggtggttgaggctcaagacagctcacccggtccagaagctccatgctggtcactagggtgctgtgctctctggcgccccacagcctggccagctccagggaccccagttgcagggcccaagcaggtgggagtggacaccaggcttcccagtggacgtccctgagcagctccgcatgcttggttctcccggagcttcctgctcaggcctcttgagaaatggatgctgtctcagaaggagttaaagctataacctgtaacctttaaaatctccagttaaagggcctgtttcttactggcctgtgaggtgcaccgtagtgccttgggcctgtgtgttaaagctgctctcaccagtgaaacctaagaaatgagcaggttggcagctagggtttgtgttggaggctttcggtccagtgtcttgcagtcctacaacaagtgagaggcttgctgcca

SEQ ID NO: 236355 - DNA, 918 bp, Artificial Sequence
  derived and/or modified sequence
gacggtgccgccatgagattgaccccgcgcgcgctgtgcagcgccgcccaggccgcctggcgggagaacttccccctgtgcggtcgcgacgtggcgcgctggttcccgggccacatggccaaggggctgaagaagatgcagagcagcctgaagctggtggactgtatcatcgaggtccacgatgcccggatcccactttcaggccgcaaccctctgtttcaggaaacccttgggcttaagcctcacttgctggtcctcaacaagatggacttggcggatcttacagagcagcagaaaattatgcaacacttagaaggagaaggcctaaaaaatgtcatttttaccaactgtgtaaaggatgaaaatgtcaagcagatcatcccgatggtcactgaactgattgggagaagccaccgctaccaccgaaaagaggtctctgagcggcccctgatgttcctgttggacactcctggcgtgctggctcctcggattgaaagtgtggagacaggcctgaagctggccctgtgtggaacggtgctggaccacctggtcggggaggagaccatggctgactacctgctgtacaccctcaacaaacaccagcgctttgggtacgtgcagcactacggcctgggcagtgcctgtgacaacgtagagcgcgtgctgaagagtgtggctgtgaagctggggaagacgcagaaggtgaaggtgctcacgggcacgggtaacgtgaacattattcagcctaactatcctgcggcagcccgtgacttcctgcagactttccgccgtgggctgctgggttccgtgatgctggacctcgacgtcctgcggggccaccccccggctgagactttgccctgaacttgtccgggtagggagggccggaggcatgtggcctcccagacctcctgacct

SEQ ID NO: 236356 - DNA, 2271 bp, Artificial Sequence
  derived and/or modified sequence
aaggtcatgcctacggccgcggcgcctctgcttccctcccaccccggtttcggccgtcgcctgcttctcccggtcgttctgggctggccccgcccctcctcccttgtctcccctccttccccgctctcacccgctcccggagccgccgggaccccttcccctgcgcagctgcgggagaggcccgttcccgcgagtgcccccgcggcgcagcctcggacccagggcctgcttgacctcctacctctggcccgccgcccctgtcctctgttcccagcaagttccttctgcccttttaatcccccgaagcctccgtttccacatgttcttgacaagatagacttttctgagtcttttggggactaaatgaaacagtggacctctggggccagcccagcccgtctaggtgttgtgatggccactcctgcgtcggctccgcgtgtactgggggccgagggggaagaagggcccgtgtgggtgactgaggctgtgtcctcggtcttcggggctgaagaagatgcagagcagcctgaagctggtggactgtatcatcgaggtccacgatgcccggatcccactttcaggccgcaaccctctgtttcaggaaacccttgggcttaagcctcacttgctggtcctcaacaagatggacttggcggatcttacagagcagcagaaaattatgcaacacttagaaggagaaggcctaaaaaatgtcatttttaccaactgtgtaaaggatgaaaatgtcaagcagatcatcccgatggtcactgaactgattgggagaagccaccgctaccaccgaaaagagaacctggagtactgtatcatggtcattggggtccccaacgtgggcaagtcctccctcatcaactccctccggaggcagcacctcaggaaagggaaagccaccagggtgggtggcgagcctgggatcaccagagctgtgatgtccaaaattcaggtggagtcctcaggggccaggcccagcactctgtcaagagctctgcaggcgtctggcacctgccgacctctgtgtggcttccggctgctgaccacgcttccctcccctccactcagtgtccccgctgagcacccccggggcaggcactgcccctgcccttattccacagtcgtcatagtctttgcgccaaacctttggggaaggcacgctgttttccccatttccagatgaggaggccactgtccagggccatgcagtggtcaggacagacctgagtgtggcgccccccgccccaccctccactcccttccttgtgttctccttgggagcagaagacaagctgttgggacctgacgcttttatttattctccaaattaagtgggaattagatcctctggggaaccctggagcttggtgagagtgacgctgccatggggttgggtccctgaggccttcctcggagcattgggtgccaggggctgcccaggcttcctgagtggcccacctgggtgggaggctgccaccgcggcctgatcatgccctctgtgcccacacaggtctctgagcggcccctgatgttcctgttggacactcctggcgtgctggctcctcggattgaaagtgtggagacaggcctgaagctggccctgtgtggaacggtgctggaccacctggtcggggaggagaccatggctgactacctgctgtacaccctcaacaaacaccagcgctttgggtacgtgcagcactacggcctgggcagtgcctgtgacaacgtagagcgcgtgctgaagagtgtggctgtgaagctggggaagacgcagaaggtgaaggtgctcacgggcacgggtaacgtgaacattattcagcctaactatcctgcggcagcccgtgacttcctgcagactttccgccgtgggctgctgggttccgtgatgctggacctcgacgtcctgcggggccaccccccggctgagactttgccctgaacttgtccgggtagggagggccggaggcatgtggcctcccagacctcctgacctgggtggttgaggctcaagacagctcacccggtccagaagctccatgctggtcactagggtgctgtgctctctggcgccccacagcctggccagctccagggaccccagttgcagggcccaagcaggtgggagtggacaccaggcttcccagtggacgtccctgagcagctccgcatgcttggttctcccggagcttcctgctcaggcctcttgagaaatggatgctgtctcagaaggagttaaagctataacctgtaaccttt

SEQ ID NO: 236357 - DNA, 1005 bp, Artificial Sequence
  derived and/or modified sequence
atgcggctgaccccccgggccctgtgcagcgccgcccaggccgcctggagggagaatttccctctctgtggccgtgacgtggccaggtggtttccaggtcacatggctaagggcctcaaaaagatgcagtcctccctcaagctggtggattgcattattgaggtacacgatgctagaatccctctcagcggcaggaatcctctctttcaggaaactctggggttgaagccccaccttctggtactgaataagatggacctggccgacctgacagagcaacagaagatcatgcagcatcttgaaggggaagggttgaaaaatgtcatcttcacaaattgtgtgaaggacgaaaatgtgaaacagatcatccctatggttacagaattaatcgggcggagccaccgttaccacaggaaggagaatttggagtactgtattatggtcattggggtgccaaacgtcggaaaatcatcattgatcaatagtctccggcgtcagcacctgcgaaaaggaaaagctacacgtgtgggtggcgaaccaggaatcacgcgtgcggtcatgtccaagattcaggtcagtgaaagacctctcatgttcctgctcgatacacctggcgtcctcgcccccaggatcgagagcgtggagaccggtctgaagctggctctgtgcggtaccgtgcttgaccatttagtgggtgaggaaactatggccgattacctactatataccttaaataagcaccaacggtttggctacgtccagcattatgggttggggagcgcttgcgacaacgtggaacgggttctcaagtcagtcgcagtgaagctcggaaaaacacaaaaggtcaaggtgcttaccggaacaggaaatgtgaacatcatccaacccaattatcctgctgctgcaagagacttcctgcagacctttcgacgcggcctcttgggatctgtgatgctcgacctcgatgttctgcggggtcatccgccagcagagaccctaccttag

SEQ ID NO: 236358 - DNA, 852 bp, Artificial Sequence
  derived and/or modified sequence
atgcggctgaccccccgggccctgtgcagcgccgcccaggccgcctggagagagaacttccctctttgcggccgggacgtcgctaggtggttccccggccacatggccaaaggcctgaaaaagatgcaatctagcctcaaactagtggactgcatcatagaagtgcatgacgcccgaatccccctgtctggaagaaacccactttttcaggagaccctgggcctgaagcctcacttactggtcttgaacaagatggacctggctgaccttacagaacagcagaagatcatgcagcacctcgagggagaaggactcaaaaatgtcatctttaccaattgtgtgaaggatgaaaacgtcaagcaaattatccccatggtcactgagctcattggacgaagccacaggtatcacagaaaagaggtgagcgaacgccctttgatgttcctattagacacccctggcgtgctagcacctaggattgagtctgttgagacaggtctgaagttagcgctgtgtggcacagtgctcgatcaccttgtgggggaggaaacaatggccgattatcttctgtacactctgaacaagcaccagcggttcggctatgtccagcactacggacttggctccgcctgtgataatgtggagcgggttctcaagtcagttgcggttaaattgggcaagacccagaaggtgaaggtactaactggtactgggaacgtgaacatcattcagccaaactatcccgcagctgccagagactttctgcagacatttcgtagggggttattggggtctgtcatgctggacctggacgtacttcgaggccatccacccgctgagacacttccgtag

SEQ ID NO: 236359 - DNA, 681 bp, Artificial Sequence
  derived and/or modified sequence
atgcagagcagcctgaagctggtggactgcatcatcgaggtgcacgatgcaagaatcccactctctggcaggaacccattatttcaggagacgctaggtctcaaacctcatctgctcgtgttaaacaagatggacttggctgatcttacagagcagcagaagatcatgcagcacttagagggggaaggtctgaaaaatgtgatattcaccaattgcgtaaaggacgagaatgtgaaacagatcatcccaatggttacggagttgattggtagatctcaccggtatcatcgaaaagaaaatttggagtactgcatcatggtgataggtgttcctaatgttgggaagtcctctttgatcaactcgctacgcagacagcatctgaggaaaggcaaagccacgcgggtgggcggcgagcctggcattaccagagctgttatgagcaaaattcaagtggagtcttccggggctagacctagtactctatcccgggctttgcaggccagcgggacgtgcagacctctgtgcgggtttcgactgttgacaacactgccaagccctccgctgtctgtccctgccgagcatccacgagggcgccattgcccctgtccttactccaccgtggtaattgtctttgcaccaaacctctggggacgccacgccgtttttcctatctcaagatag

SEQ ID NO: 236360 - DNA, 1005 bp, Artificial Sequence
  derived and/or modified sequence
atgaggctgactcctcgcgctctgtgttcagctgcccaggcagcttggagagaaaactttcctctgtgtggacgggatgttgccaggtggttcccgggtcacatggccaagggactgaagaagatgcagtcatccctcaagttggtggattgcatcatcgaagtgcacgacgccagaatacccctgagtggaaggaacccgctgttccaagagacgctcggactcaaaccccatctcctcgttctgaacaaaatggatctggcggacctgacagagcagcaaaaaataatgcagcacttagaaggagaggggcttaagaatgtgatttttacaaattgcgtgaaggacgagaatgttaagcaaatcattcccatggtgactgaattgattggccgttcccaccgctaccaccgaaaagagaatctggagtactgcattatggtgatcggggtgcccaacgtaggcaagtctagtcttatcaactccttgcggagacagcacctgaggaagggaaaggccaccagggtgggaggcgaacccggaataactcgcgctgtgatgtccaagattcaggtatcggaaagaccgttaatgtttctactcgataccccaggtgtattagcaccgcgtatcgaatccgtggaaacggggctaaagctcgcactgtgtggaactgttttagatcacctggtgggggaagaaaccatggctgattatctcttatacacattgaacaaacatcagaggtttggctatgtgcaacactatgggcttggttctgcttgcgacaatgtggaacgggttctgaagtccgttgcggtgaagctcggtaaaacccaaaaggtaaaggtcctgaccggcacaggtaacgttaacattattcagcctaactatcccgcagccgcaagagacttcttacaaacttttcgcagaggactgctgggctcagtcatgcttgacctagacgtgctgcgcggacatcctcccgctgaaactctcccatag

SEQ ID NO: 236361 - DNA, 852 bp, Artificial Sequence
  derived and/or modified sequence
atgcgactgaccccaagggcgctgtgctctgcagcccaggccgcatggagagagaacttccccctgtgcggaagagatgtcgcaaggtggtttccagggcacatggcaaaaggactgaagaagatgcaatcatcactcaagctcgttgattgcatcatagaagtacacgacgccaggattccattgtccgggaggaatcccttatttcaggagacgcttggtctcaagcctcatctgttagtcttgaacaaaatggatctggcggacctcactgaacaacagaaaattatgcagcacctggagggcgagggtcttaaaaatgtgatttttaccaattgcgtgaaggacgaaaatgtcaagcagatcatccccatggtcaccgaattgataggcaggtcccacagatatcatcgtaaagaggtgtccgagcgcccattaatgtttctgcttgacacaccaggagttttggcccctagaattgaatccgtggaaaccggactcaagctggccctatgcggaacggtcctcgatcatcttgtcggcgaggagactatggctgactacctcctgtacactctgaataaacaccagcgtttcggatatgtccagcactacgggctgggctctgcctgtgacaacgtggaacgggtgcttaagtccgtcgccgtgaagctgggcaaaactcaaaaggttaaagtgctgaccggcacaggaaatgtcaacatcatccagccaaactatcccgctgccgcaagggactttctgcagaccttccgcagaggtctcctcgggtctgtgatgctggatctggacgtgctccgcggacaccctccagctgagactctaccttag

SEQ ID NO: 236362 - DNA, 681 bp, Artificial Sequence
  derived and/or modified sequence
atgcagagcagtttgaaactggttgactgtatcattgaagtgcacgacgccaggatccctctcagcggacggaacccactgtttcaggaaactctgggacttaagcctcacctactagtgttgaacaaaatggatctggccgacttgaccgagcaacagaagatcatgcaacatcttgagggagagggcctgaaaaatgttatcttcacgaattgtgtgaaggatgaaaatgtcaaacaaataattcctatggtgactgaactgatcggtaggagtcatcggtatcacagaaaagagaacctggagtattgcattatggtcatcggagttccaaacgtgggtaagtccagcctgatcaattcgctgaggaggcagcatctgaggaaaggtaaagccacacgagttggaggagaacccggaattacccgtgcagtgatgtctaagatccaggtggaaagctccggggctaggccctccaccctgtctcgagctctgcaggcaagtggtacttgtcgcccactttgcgggtttagactccttactactctccctagcccacctctttctgtgccagccgagcacccaagaggcagacactgcccgtgcccctacagtactgtggttattgtttttgcccctaacctctggggaagacacgccgtatttccaattagtaggtag

SEQ ID NO: 236363 - protein, 494 aa, Artificial Sequence
  derived and/or modified sequence
MEVVEAAAAQLETLKFNGTDFGVGEGPAAPSPGSAPVPGTQPPLQSFEGSPDAGQTVEVKPAGEQPLQPVLNAVAAGTPAPQPQPPAESPACGDCVTSPGAAEPARAPDSLETSDSDSDSDSETDSDSSSSSSSSSSSSSSSSSSCISLPPVLSDGDDDLQIEKENKNFPLKTKDELLLNELPSVEELTIILPEDIELKPLGMVSSIIEQLVIIESMTNLPPVNEETVIFKSDRQAAGKIFEIFGPVAHPFYVLRFNSSDHIESKGIKIKETMYFAPSMKDFTQYIFTEKLKQDKGSDASWKNDQEPPPEALDFSDDEKEKEAKQRKKSQIQGRKKLKSEFNEPGEDFTEVHQNWNAHSSASEHAKGYRNREFTRGFSRARYPRSCHGRPPPQHFYNSEHMVSQETSGFPSQRQNNPIMPQYPFPLPVFDMHNFPLRPPPPPPPPPVNMGWATPNMAAHPLLNLPYSLPPPPPPPPLPPPPSSGDSNSHFGPYY

SEQ ID NO: 236364 - DNA, 1485 bp, Artificial Sequence
  derived and/or modified sequence
atggaggtggtggaagcggcagcggctcagctcgagactctgaagttcaacggtaccgacttcggggtgggcgagggaccagctgccccatctcccggctctgccccggtgccggggacacagccacctctccagtcttttgaagggtctccagatgcgggtcaaactgtcgaagtgaaacccgcaggggaacagcccctgcagcctgtgctcaacgcagtcgcagctggaacgcctgcaccacagccacagccacccgcagagagtccagcctgtggtgactgtgtgactagccccggtgctgctgagcctgctcgtgcacccgactctctggagactagtgactccgattccgactctgacagtgagaccgacagcgattcatcgagtagctccagcagtagctcctcaagcagcagtagcagttcgtcttcatgtatctcactgccacctgtgttgtctgacggtgatgacgatctccagattgaaaaggagaacaagaatttccctctgaaaaccaaggacgagctcctgctaaacgagttgccgtcagtggaggagctgacaattatcctccctgaagatatcgagttgaagcccctgggtatggtgtcttctatcatcgaacagctcgtgattatcgagtctatgaccaatctgccccccgttaatgaggagacagttatttttaagagcgaccgccaggctgccggaaaaatattcgagatttttggtcccgtagctcaccccttctacgttctcaggtttaatagttctgaccatatcgagagtaaaggtattaaaattaaagaaacaatgtactttgcacccagtatgaaggattttactcagtacatttttactgagaaactcaagcaggataagggcagtgacgccagctggaagaatgatcaggagcctcctccagaagccctagattttagcgatgacgagaaggaaaaagaagcaaaacaaaggaaaaaatctcagattcaggggagaaagaagctaaagtccgaattcaacgaaccaggggaagatttcacagaggtccatcagaactggaatgcccactcctcggcttccgaacatgctaaaggctacagaaaccgggagtttaccagaggctttagtagagctcgttacccccgaagctgccacggtagaccacctcctcagcacttctataactctgaacatatggtgagtcaggagacctcaggttttccttctcaaagacagaacaacccaatcatgcctcaatatccctttcccctcccggttttcgacatgcataacttcccgctgcggccccctccaccacctccacctcctcctgtgaacatgggctgggccacgccaaacatggcagcccacccactactgaatcttccgtattcgctgccaccccccccaccgcccccaccacttccccccccccctagctccggagatagtaactcccacttcgggccctactactag

SEQ ID NO: 236365 - DNA, 1485 bp, Artificial Sequence
  derived and/or modified sequence
atggaggtggtggaggccgccgccgcccagctggagaccctgaagttcaatggaacagactttggagtgggggagggccctgctgcccccagccctggcagcgcccctgtgcccggcacccagccccccctgcagagctttgagggcagcccagatgctggccagacagtggaggtgaagccagctggggagcagcccctgcagcctgtgctgaatgctgtggccgccggcaccccagccccccagccccagcccccagctgagagccctgcctgtggggactgtgtgaccagccctggagctgctgagcccgcccgggccccagacagcctggagaccagtgacagcgacagcgacagcgacagcgagacagacagcgacagcagcagcagcagcagcagcagcagcagcagcagcagcagcagcagcagcagctgcatcagcctgccccctgtgctgagtgatggagatgatgacctgcagatcgagaaggagaacaagaacttccccctgaagaccaaggatgagctgctgctgaatgagctgcccagcgtggaggagctgaccatcatcctgcctgaggacatcgagctgaagcccctgggcatggtgagcagcatcatcgagcagctggtgatcatcgagagcatgaccaacctgccccctgtgaatgaggagaccgtcatcttcaagagtgaccggcaggccgccggcaagatctttgagatcttcggccctgtggcccaccccttctacgtgctgcgcttcaacagcagtgaccacatcgagagcaagggcatcaagatcaaggagaccatgtactttgcccccagcatgaaggacttcacccagtacatcttcacagagaagctgaagcaggacaagggcagtgatgcctcctggaagaatgaccaggagcccccacctgaggccctggacttcagtgatgatgagaaggagaaggaggccaagcagaggaagaagagccagatccagggcaggaagaagctgaagtctgagttcaatgagcccggggaggacttcacagaggtgcaccagaactggaatgcccacagcagcgccagcgagcacgccaagggctacagaaaccgggagttcacccggggcttcagccgggcccgctaccccaggagctgccacggccggcccccaccccagcacttctacaacagcgagcacatggtgtcccaggagaccagcggcttccccagccagaggcagaacaaccccatcatgccccagtaccccttccccctgcctgtgtttgacatgcacaacttccccctgcggcccccacctcctcctcctcctcctcctgtgaacatgggctgggccacccccaacatggccgcccaccccctgctgaacctgccctacagcctgcccccacctcctcctcctccacccctgcccccaccacccagcagcggggacagcaacagccacttcggcccctactactag

SEQ ID NO: 236366 - DNA, 1485 bp, Artificial Sequence
  derived and/or modified sequence
atggaggtggtggaggccgccgccgcccagctggagaccctgaagttcaacgggacagacttcggcgtgggcgagggccctgcagccccctctcctgggtccgctcccgtgcccggcacacagccccccctgcagtcttttgagggatccccagatgccggacagactgtggaagtgaaacccgccggcgaacaacccctccagcccgttctcaacgccgtggccgccgggacccccgctcctcagccacagcctcctgcggagagccctgcatgtggggactgcgtcacgtcccccggcgccgctgagccggccagagccccagattccctcgaaacctccgactctgattccgattcagacagtgaaaccgactctgactcctcttcgtcttcttcgagttcctcttcctcttccagtagtagcagtagttcgtgcatatcactgccccccgttctgagcgacggcgacgacgacctgcagattgagaaagagaacaaaaacttccctctgaagacaaaagatgagctgttgctgaacgaattaccttcagtggaggagctgaccatcatcctgcccgaagatattgaattaaagcccttgggaatggtcagcagcatcatcgagcaactggtgatcattgaatctatgactaatctgcctccagtaaatgaagaaacagtgattttcaaatccgatagacaggccgccggaaaaatatttgaaatttttggtcctgttgcccaccccttctacgtgttaaggttcaatagttccgaccacattgagtctaaagggattaagattaaagagactatgtactttgccccaagcatgaaggattttacccagtatatttttacagaaaagctcaagcaagataagggcagcgacgccagctggaagaacgatcaagagcctcctccggaggccctggacttctcagatgacgagaaggaaaaagaggccaagcagaggaaaaaaagccagatccaggggcgcaaaaagttgaaatctgaattcaatgaacctggagaagattttaccgaggtgcaccagaactggaacgcacactcttcagccagcgaacacgccaagggctaccgcaatagggagtttacccgcggcttcagtcgtgcaaggtacccaaggagctgtcatggtcgtccaccgcctcaacacttctacaattctgaacatatggtgtcccaggagacgtctgggttcccatctcagagacagaacaacccaattatgcctcagtatcctttccccctgcccgtctttgatatgcataactttccgctccgaccgccccctccccctcccccgccaccggtgaacatgggctgggctaccccgaacatggccgcacaccctcttctcaacttgccctattccttgcctcctcccccgcctcccccacccttacctccccctccttcgtctggagatagcaactcccattttggaccttattactag

SEQ ID NO: 236367 - DNA, 1907 bp, Artificial Sequence
  derived and/or modified sequence
cggaaagcgttgctgcgtaaatggcgggggcgtgtcttttggctcctccgcgtgtagttacctgagaaacgcgggaagttgggcccaggcagtgttgctgcggttgcctaagttgtttttctatttctggagagagccgtgagcttgtccaggggccccaatcctgaggccgacccggtttctggcgcggtgcgatggaggtagtggaggccgccgccgctcagctggaaactctgaaattcaatggcaccgactttggagttggggaaggtccggcggctccgtctccgggctctgcccctgtgccagggacacagccgccgctacagtcgtttgaggggtccccggacgctgggcagaccgtggaggttaagcctgccggggagcagcctctgcagcccgttctgaacgccgtcgcggccgggaccccggcgccgcagccacagccaccggctgaatcgccggcctgcggagactgcgtcacctccccaggagccgcagagcctgcgcgggcgccggactccttggagacctcggactcggattcggactcggacagtgaaacagattcagatagttcaagttcatcgtcttcctcttcatcttcctcatcgtcgtcttcttcctcttgtatatcacttcctccagtgctgtcagatggagatgatgatttacaaattgagaaggaaaataagaattttcctcttaaaacaaaagatgaattacttcttaatgaactgccttctgttgaagaactcactattattctgcctgaagatattgagttaaagcctcttgggatggtttcaagtattattgaacaactagtaataattgaatctatgactaacctacctccagttaatgaggagactgtaatttttaaaagtgatcgacaagcagcaggaaagatattcgagatatttggacctgttgcacatccattttatgtgttacggtttaattcttcagatcacattgagagtaaaggtattaaaataaaggagactatgtattttgctccatcaatgaaagatttcactcaatatatattcacagaaaaactaaaacaggataagggatcagatgcatcatggaagaatgatcaggaaccaccaccagaggccttagattttagtgatgatgaaaaagagaaggaagccaaacagaggaaaaaatctcagattcaaggccggaaaaaactcaaatctgaatttaatgagcctggtgaagattttactgaagtacatcagaattggaatgctcatagctctgcttcagagcatgcaaaaggatatcgtaacagagaattcacacgaggattttccagggccagataccctcgatcttgccatggcaggcctccacctcagcatttctataactcagaacatatggtatctcaggagacttcaggatttccttctcagagacaaaataatcccattatgccacaatacccctttcctcttccagtgtttgacatgcataattttcccctccgccctccacccccaccaccacccccacctgtaaacatgggttgggctacaccaaacatggctgctcatccattacttaacttaccatactccctacccccaccccctccccctccaccactgcctcctccaccctcttctggagatagtaattctcattttggaccttactattaggtgactatgcatttccagagaaatgtggacttttcatattatgtggtaaggatttttttttttcaagagtgattatggagctagatttttaaaaacactgtaaaatactaaatgattccttctgttgtaagttgatatatatttgtaacctttgtgaaattgtattcatatgaaaatgtcagctcaaattcttgggagaacattaaattatgtaatatttaattaaaa

SEQ ID NO: 236368 - DNA, 1485 bp, Artificial Sequence
  derived and/or modified sequence
atggaagtcgtcgaggctgctgcagcccaactggagacgcttaaattcaacggcactgattttggcgtcggcgaggggccagcggctccttctccagggtcagcccctgtcccaggaacacagcctcccctgcagagtttcgaggggtccccggacgcgggacagacagtagaagttaaaccagctggcgagcagcctctgcagcctgtgctcaacgcggtggctgctggcactcctgcccctcagccccaaccaccggctgagtctcctgcatgtggagattgcgttacaagtccgggtgcagcagaacctgcacgggcacctgacagtctggagacgagcgactccgactcagatagcgatagcgagaccgattctgatagctcttcttcttcatcctcctccagtagctcaagcagctcaagcagcagttcctgcatctctcttcccccagttttgtctgatggggacgatgacctgcagatcgagaaggaaaataagaatttcccacttaaaaccaaggatgaactccttttaaatgagctgccatccgttgaggagttgacaatcatcttaccagaggacattgagctgaaaccgctgggaatggtgagctctattattgagcagctcgtaattatcgaaagcatgacaaacctgccccctgttaacgaggagacggtaatattcaagtctgacagacaggctgcaggcaagattttcgagatctttggaccagtggcccaccccttctatgtgctgaggttcaactcctcagaccacatagaaagtaaaggaatcaagatcaaggagacgatgtatttcgctccctcgatgaaggatttcactcagtatatcttcaccgagaagctgaagcaggacaagggaagcgatgcttcttggaagaatgaccaggagccccctccagaagctcttgacttctctgacgatgagaaagagaaagaagctaagcaacggaaaaagtcacagatacagggaaggaagaaacttaaatcagagttcaacgagcccggagaagattttaccgaggtgcatcagaactggaacgcccacagctccgcctccgagcacgcaaagggctaccgaaaccgcgagtttacccggggattctctcgcgcacgatatccaaggtcttgtcacggcagaccaccaccacagcatttctacaactctgagcacatggtatctcaggagacgagcgggtttcccagtcagagacagaacaatcccatcatgcctcaatatccattcccactgcccgtgttcgacatgcataatttcccactacgaccccctcctccacctccccctcctcccgtgaacatgggatgggccacaccaaacatggcagctcatcctctgctgaacctgccttatagtcttcctcctccaccccctcctccgccacttccacctccaccctcaagcggcgactctaatagccactttggaccatattattag

SEQ ID NO: 236369 - DNA, 1485 bp, Artificial Sequence
  derived and/or modified sequence
atggaggtggtggaggccgccgccgcccagctggagaccctgaagttcaacggcaccgacttcggcgtgggcgagggccccgccgcccccagccccggcagcgcccccgtgcccggcacccagccccccctgcagagcttcgagggcagccccgacgccggccagaccgtggaggtgaagcccgccggcgagcagcccctgcagcccgtgctgaacgccgtggccgccggcacccccgccccccagccccagccccccgccgagagccccgcctgcggcgactgcgtgaccagccccggcgccgccgagcccgccagagcccccgacagcctggagaccagcgacagcgacagcgacagcgacagcgagaccgacagcgacagcagcagcagcagcagcagcagcagcagcagcagcagcagcagcagcagcagctgcatcagcctgccccccgtgctgagcgacggcgacgacgacctgcagatcgagaaggagaacaagaacttccccctgaagaccaaggacgagctgctgctgaacgagctgcccagcgtggaggagctgaccatcatcctgcccgaggacatcgagctgaagcccctgggcatggtgagcagcatcatcgagcagctggtgatcatcgagagcatgaccaacctgccccccgtgaacgaggagaccgtgatcttcaagagcgacagacaggccgccggcaagatcttcgagatcttcggccccgtggcccaccccttctacgtgctgagattcaacagcagcgaccacatcgagagcaagggcatcaagatcaaggagaccatgtacttcgcccccagcatgaaggacttcacccagtacatcttcaccgagaagctgaagcaggacaagggcagcgacgccagctggaagaacgaccaggagcccccccccgaggccctggacttcagcgacgacgagaaggagaaggaggccaagcagagaaagaagagccagatccagggcagaaagaagctgaagagcgagttcaacgagcccggcgaggacttcaccgaggtgcaccagaactggaacgcccacagcagcgccagcgagcacgccaagggctacagaaacagagagttcaccagaggcttcagcagagccagataccccagaagctgccacggcagaccccccccccagcacttctacaacagcgagcacatggtgagccaggagaccagcggcttccccagccagagacagaacaaccccatcatgccccagtaccccttccccctgcccgtgttcgacatgcacaacttccccctgagacccccccccccccccccccccccccccgtgaacatgggctgggccacccccaacatggccgcccaccccctgctgaacctgccctacagcctgccccccccccccccccccccccccctgccccccccccccagcagcggcgacagcaacagccacttcggcccctactactag

SEQ ID NO: 236370 - protein, 346 aa, Artificial Sequence
  derived and/or modified sequence
MESTLGAGIVIAEALQNQLAWLENVWLWITFLGDPKILFLFYFPAAYYASRRVGIAVLWISLITEWLNLIFKWFLFGDRPFWWVHESGYYSQAPAQVHQFPSSCETGPGSPSGHCMITGAALWPIMTALSSQVATRARSRWVRVMPSLAYCTFLLAVGLSRIFILAHFPHQVLAGLITGAVLGWLMTPRVPMERELSFYGLTALALMLGTSLIYWTLFTLGLDLSWSISLAFKWCERPEWIHVDSRPFASLSRDSGAALGLGIALHSPCYAQVRRAQLGNGQKIACLVLAMGLLGPLDWLGHPPQISLFYIFNFLKYTLWPCLVLALVPWAVHMFSAQEAPPIHSS

SEQ ID NO: 236371 - DNA, 1041 bp, Artificial Sequence
  derived and/or modified sequence
atggagagtactctgggcgccggtatcgtgattgccgaggccctgcagaaccagctggcgtggctggaaaatgtctggctttggatcaccttcctgggcgatccaaagatcctgttcctgttctattttcctgccgcctactacgcaagcagacgcgttgggatcgctgtgctctggatcagtcttatcactgagtggttaaacctgatcttcaaatggtttctgttcggagataggcccttttggtgggtacacgaatccggatactattctcaagccccggcgcaggttcaccagttccccagttcctgtgaaacagggcctggctcaccatctggacattgtatgattacaggggccgctctttggcccatcatgacggctttatcaagccaggtagccaccagggccagatctaggtgggtgcgggtgatgccttctctggcctactgcacgttcctcctcgctgtgggcttaagtcggatcttcatccttgcccactttcctcatcaggtgttggcaggcctgattactggggctgtgctaggctggctcatgaccccccgagtccccatggaaagagagctctcgttttacggattgaccgcactggcgttaatgctgggtacctccctgatctactggacattattcaccctcggccttgatctgtcctggagcatcagcttggcctttaagtggtgcgaacggcctgaatggatacacgtggactcaaggccattcgcaagccttagccgagatagcggcgcagctcttgggttggggatagctcttcacagcccctgctatgcgcaggtgcggcgggctcagctgggcaatggccagaaaattgcttgcctagtgctcgccatgggactgctcggccctctggactggctggggcaccctccacaaatttcactgttttacatcttcaacttcctgaagtacacattatggccatgtttggtgctcgccctggtgccatgggcggtacacatgttcagtgctcaggaggcaccgcctattcacagtagctag

SEQ ID NO: 236372 - DNA, 1577 bp, Artificial Sequence
  derived and/or modified sequence
tgcccagtagggaggaaaaccggaggagagcgcaggaggaaacagtaccggctggaggccggtcttgcaggagcgggggactgctgggggcggggcttggtggtgaccgctggcggggcggggcctggggctcagaggggtgggctttggagatcagagggtcgacgctgcttcgttgcctggactctggtttccgccctggagcaagccggggcctggtcggcagctgggccgccatggagtccacgctgggcgcgggcatcgtgatagccgaggcgctacagaaccagctagcctggctggagaacgtgtggctctggatcacctttctgggcgatcccaagatcctctttctgttctacttccccgcggcctactacgcctcccgccgtgtgggcatcgcggtgctctggatcagcctcatcaccgagtggctcaacctcatcttcaagtggtttctttttggagacaggcccttttggtgggtccatgagtctggttactacagccaggctccagcccaggttcaccagttcccctcttcttgtgagactggtccaggcagcccttctggacactgcatgatcacaggagcagccctctggcccataatgacggccctgtcttcgcaggtggccactcgggcccgcagccgctgggtaagggtgatgcctagcctggcttattgcaccttccttttggcggttggcttgtcgcgaatcttcatcttagcacatttccctcaccaggtgctggctggcctaataactggcgctgtcctgggctggctgatgactccccgagtgcctatggagcgggagctaagcttctatgggttgactgcactggccctcatgctaggcaccagcctcatctattggaccctctttacactgggcctggatctttcttggtccatcagcctagccttcaagtggtgtgagcggcctgagtggatacacgtggatagccggccctttgcctccctgagccgtgactcaggggctgccctgggcctgggcattgccttgcactctccctgctatgcccaggtgcgtcgggcacagctgggaaatggccagaagatagcctgccttgtgctggccatggggctgctgggccccctggactggctgggccacccccctcagatcagcctcttctacattttcaatttcctcaagtacaccctctggccatgcctagtcctggccctcgtgccctgggcagtgcacatgttcagtgcccaggaagcaccgcccatccactcttcctgacttcttgtgtgcctccctttcctttccctcccacaaagccaacactctgtgaccaccacactccaggaggcagccccatccccttccagcccctaagtaggccctcccctccctaaatctgcttccgcaccacctggtcttagccccaaagatgggccttctctctcccagataagttggtcctccctctgcctttcctctcaagcccccaaagagcaaaggcaacagcaagaccagcgggttcttgcaacactgtgaggggcagccagggcggccccaataaagcccttgaatactttg

SEQ ID NO: 236373 - DNA, 1041 bp, Artificial Sequence
  derived and/or modified sequence
atggagagcaccctgggcgccggcatcgtgattgctgaggccctgcagaaccagctggcctggctggagaatgtgtggctgtggatcaccttcctgggggaccccaagatcctcttcctgttctacttccctgctgcctactatgccagcagaagagtgggcattgctgtgctgtggatcagcctcatcacagagtggctgaacctgatcttcaagtggttcctgtttggagaccggcccttctggtgggtgcatgaaagtggctactacagccaggccccagcccaggtgcaccagttccccagcagctgtgagaccggccctggcagccccagcggccactgcatgatcaccggggccgccctgtggcccatcatgacagccctgagcagccaggtggccacccgggcccggagccgctgggtgcgggtgatgcccagcctggcctactgcaccttcctgctggccgtgggcctgagccgcatcttcatcctggcccacttcccccaccaggtgctggccggcctcatcaccggggctgtgctgggctggctgatgaccccccgggtgcccatggagcgggagctgtccttctacggcctgacagccctggccctgatgctgggcaccagcctcatctactggaccctcttcaccctgggcctggacctgtcctggagcatcagcctggccttcaagtggtgtgagaggcctgagtggatccacgtggacagccggccctttgccagcctgagccgggacagcggggccgccctgggcctgggcatcgccctgcacagcccctgctacgcccaggtgcggcgggcccagctgggcaatggccagaagatcgcctgcctggtgctggccatgggcctgctgggccccctggactggctgggccaccccccccagatcagcctcttctacatcttcaacttcctgaagtacaccctgtggccctgcctggtgctggccctggtgccctgggccgtgcacatgttcagcgcccaggaggccccacccatccacagcagctag

SEQ ID NO: 236374 - DNA, 1041 bp, Artificial Sequence
  derived and/or modified sequence
atggagagcaccctgggcgccggcatcgtgatcgccgaggccctgcaaaaccagcttgcgtggctggagaatgtgtggttatggattactttcctgggagaccctaaaatacttttcttgttctattttcctgccgcatactacgcctcaagaagggtgggcatcgcggtcctgtggatcagcctcattacagaatggttgaatctgatttttaagtggttcttattcggagaccgaccattttggtgggtccacgagtccggctattatagccaggcacctgcgcaggtccatcagttcccatcgagttgcgagaccggcccaggtagtccctctgggcattgtatgatcaccggagcagctttatggcctattatgactgcactgagcagccaagtggcaactagagcaagatccagatgggtccgcgttatgccaagcctggcctattgcactttcctcctggcagtgggactgtctcgaatctttattttggcccatttcccacatcaggttttagccggcctgataaccggcgctgtgctcggatggcttatgacacctagagttcccatggagcgagaattaagtttttatgggttgactgctcttgccctgatgctcggcacctctctaatctattggacattattcacactcggcctagacttaagttggagcatttctcttgcctttaagtggtgtgagaggcctgagtggatacacgtcgacagtagaccctttgcgagtctgtcaagggacagcggcgccgcactgggactaggcatagctctgcattcaccatgctacgcccaagtccggagggctcagctgggaaacggtcagaagattgcatgtctggtgcttgcaatggggctcctcgggccgctcgactggttgggtcaccctccccaaattagtctgttttatattttcaacttcctcaaatacaccctctggccttgcttggtcctggctttggtgccgtgggcggtgcacatgttcagcgcacaggaagcccctccgattcacagctcctag

SEQ ID NO: 236375 - DNA, 1041 bp, Artificial Sequence
  derived and/or modified sequence
atggagtcgaccctaggggcaggcatcgtaattgctgaggctctgcagaaccagctggcctggcttgagaacgtgtggctgtggataacctttctcggagaccccaagattctgtttctcttctacttccccgcagcctactatgcctccaggagggtgggtattgccgtgctgtggattagcctgatcacagaatggctgaacctgatctttaaatggtttctgttcggagacagacccttttggtgggtccatgaatccggctactatagccaggcacctgcgcaagtccaccagttcccatcctcttgtgaaactggacccggatccccaagcggccattgcatgatcaccggggcagcgctctggcccataatgacagccctgagttcccaggtcgccaccagagcaaggtctcgatgggtgagagtgatgccctctctagcctactgtacttttctgctggccgtgggactgtcccggatttttatccttgcccattttccccaccaagtcctggccggtctgataaccggagccgttctcggttggctcatgacgccgagggttccaatggagagggagctttccttctacggccttactgccctcgccttgatgcttgggacttccctcatttactggaccctcttcacattgggactcgacctatcctggagtataagtcttgcctttaagtggtgtgaaagaccggagtggattcacgtggattcacggcctttcgcgagcctttcgcgtgatagcggcgcagccctcggattaggtatcgctctccactctccatgctatgcccaagtcaggcgcgctcaacttgggaacggccagaaaatcgcatgtctggtattggccatgggcctgctgggccctctagactggctgggccacccacctcagatcagtctgttctatatttttaattttctaaaatacacactgtggccctgcctggtgttggctcttgtcccttgggcagtgcatatgttttccgcgcaggaagcaccacctatccattctagctag

SEQ ID NO: 236376 - DNA, 1041 bp, Artificial Sequence
  derived and/or modified sequence
atggagagcaccctgggcgccggcatcgtgatcgccgaggccctgcagaaccagctggcctggctggagaacgtgtggctgtggatcaccttcctgggcgaccccaagatcctgttcctgttctacttccccgccgcctactacgccagcagaagagtgggcatcgccgtgctgtggatcagcctgatcaccgagtggctgaacctgatcttcaagtggttcctgttcggcgacagacccttctggtgggtgcacgagagcggctactacagccaggcccccgcccaggtgcaccagttccccagcagctgcgagaccggccccggcagccccagcggccactgcatgatcaccggcgccgccctgtggcccatcatgaccgccctgagcagccaggtggccaccagagccagaagcagatgggtgagagtgatgcccagcctggcctactgcaccttcctgctggccgtgggcctgagcagaatcttcatcctggcccacttcccccaccaggtgctggccggcctgatcaccggcgccgtgctgggctggctgatgacccccagagtgcccatggagagagagctgagcttctacggcctgaccgccctggccctgatgctgggcaccagcctgatctactggaccctgttcaccctgggcctggacctgagctggagcatcagcctggccttcaagtggtgcgagagacccgagtggatccacgtggacagcagacccttcgccagcctgagcagagacagcggcgccgccctgggcctgggcatcgccctgcacagcccctgctacgcccaggtgagaagagcccagctgggcaacggccagaagatcgcctgcctggtgctggccatgggcctgctgggccccctggactggctgggccaccccccccagatcagcctgttctacatcttcaacttcctgaagtacaccctgtggccctgcctggtgctggccctggtgccctgggccgtgcacatgttcagcgcccaggaggccccccccatccacagcagctag

SEQ ID NO: 236377 - protein, 563 aa, Artificial Sequence
  derived and/or modified sequence
MSDDAGDTLATGDKAEVTEMPNSDSLPEDAEVHCDSAAVSHEPTPADPRGEGHENAAVQGAGAAAIGPPVQPQDANALEPPLNGDVTEDTLAECIDSVSLEAEPRSEIPLQEQNYLAVDSPPSGGGWAGWGSWGKSLLSSASATVGHGLTAVKEKAGATLRIHGVNSGSSEGAQPNTENGVPEITDAATDQGPAESPPTSPSSASRGMLSAITNVVQNTGKSVLTGGLDALEFIGKKTMNVLAESDPGFKRTKTLMERTVSLSQMLREAKEKEKQRLAQQLTMERTAHYGMLFDEYQGLSHLEALEILSNESESKVQSFLASLDGEKLELLKNDLISIKDIFAAKELENEENQEEQGLEEKGEEFARMLTELLFELHVAATPDKLNKAMKRAHDWVEEDQTVVSVDVAKVSEEETKKEEKEEKSQDPQEDKKEEKKTKTIEEVYMSSIESLAEVTARCIEQLHKVAELILHGQEEEKPAQDQAKVLIKLTTAMCNEVASLSKKFTNSLTTVGSNKKAEVLNPMISSVLLEGCNSTTYIQDAFQLLLPVLQVSHIQTSCLKAQP

SEQ ID NO: 236378 - protein, 134 aa, Artificial Sequence
  derived and/or modified sequence
MSDDAGDTLATGDKAEVTEMPNSDSLPEDAEVHCDSAAVSHEPTPADPRGEGHENAAVQGAGAAAIGPPVQPQDANALEPPLNGDVTEDTLAECIDSVSLEAEPRSEIPLQEQNYLAVDSPPSGGGWAGWGSWG

SEQ ID NO: 236379 - DNA, 1692 bp, Artificial Sequence
  derived and/or modified sequence
atgagcgacgacgccggcgacaccctggccaccggcgacaaggccgaggtgaccgagatgcccaacagcgacagcctgcccgaggacgccgaggtgcactgcgacagcgccgccgtgagccacgagcccacccccgccgaccccagaggcgagggccacgagaacgccgccgtgcagggcgccggcgccgccgccatcggcccccccgtgcagccccaggacgccaacgccctggagccccccctgaacggcgacgtgaccgaggacaccctggccgagtgcatcgacagcgtgagcctggaggccgagcccagaagcgagatccccctgcaggagcagaactacctggccgtggacagcccccccagcggcggcggctgggccggctggggcagctggggcaagagcctgctgagcagcgccagcgccaccgtgggccacggcctgaccgccgtgaaggagaaggccggcgccaccctgagaatccacggcgtgaacagcggcagcagcgagggcgcccagcccaacaccgagaacggcgtgcccgagatcaccgacgccgccaccgaccagggccccgccgagagcccccccaccagccccagcagcgccagcagaggcatgctgagcgccatcaccaacgtggtgcagaacaccggcaagagcgtgctgaccggcggcctggacgccctggagttcatcggcaagaagaccatgaacgtgctggccgagagcgaccccggcttcaagagaaccaagaccctgatggagagaaccgtgagcctgagccagatgctgagagaggccaaggagaaggagaagcagagactggcccagcagctgaccatggagagaaccgcccactacggcatgctgttcgacgagtaccagggcctgagccacctggaggccctggagatcctgagcaacgagagcgagagcaaggtgcagagcttcctggccagcctggacggcgagaagctggagctgctgaagaacgacctgatcagcatcaaggacatcttcgccgccaaggagctggagaacgaggagaaccaggaggagcagggcctggaggagaagggcgaggagttcgccagaatgctgaccgagctgctgttcgagctgcacgtggccgccacccccgacaagctgaacaaggccatgaagagagcccacgactgggtggaggaggaccagaccgtggtgagcgtggacgtggccaaggtgagcgaggaggagaccaagaaggaggagaaggaggagaagagccaggacccccaggaggacaagaaggaggagaagaagaccaagaccatcgaggaggtgtacatgagcagcatcgagagcctggccgaggtgaccgccagatgcatcgagcagctgcacaaggtggccgagctgatcctgcacggccaggaggaggagaagcccgcccaggaccaggccaaggtgctgatcaagctgaccaccgccatgtgcaacgaggtggccagcctgagcaagaagttcaccaacagcctgaccaccgtgggcagcaacaagaaggccgaggtgctgaaccccatgatcagcagcgtgctgctggagggctgcaacagcaccacctacatccaggacgccttccagctgctgctgcccgtgctgcaggtgagccacatccagaccagctgcctgaaggcccagccctag

SEQ ID NO: 236380 - DNA, 4050 bp, Artificial Sequence
  derived and/or modified sequence
gtactcggccgcctgagcgccgacccacgccctgcctgctcttccagtccagccaacactctaagcaggcaccgcctccactcgcagcccccgggatgggtcccactccctaccgcagatccccaggccccctccacccagtcggctagccctcgcctctgccatccgatactaaaatgtctgatgatgctggtgacaccttagccactggagacaaagcagaagttactgagatgcctaatagtgattctttacctgaggatgcagaagtgcattgtgattcagctgcagtttcacatgagccaacaccagctgaccccagaggggaggggcatgaaaatgcagctgtgcagggtgcaggggctgccgccattgggccccctgtgcagcctcaggatgccaacgccctggagccccctctcaatggagacgtgactgaggatacacttgctgaatgtattgattccgtcagccttgaggcagaacccagatccgaaatacccctgcaagaacagaattatctggctgtggattcccctccaagtggaggaggatgggcaggctggggatcctggggcaaatctctgctgtcgtcagcatctgccacagtaggtcatggattgacggcagtcaaggaaaaagcaggagccactctacggattcatggtgtaaattctggatcttctgaaggagcccaaccaaatactgaaaacggagtccctgaaataacagatgcagccacagatcagggccctgcagaaagcccacccacttccccttcatcagcctctcggggtatgctgtctgccatcaccaatgtggttcaaaacacaggtaaaagtgtcttaactggaggccttgatgcgttggaattcatcggcaagaaaaccatgaatgtccttgcagaaagtgacccgggctttaagcggaccaagacgctcatggagagaactgtttccttgtctcagatgttaagggaagctaaggagaaggagaagcagagactggcacagcagctcacgatggagagaaccgcgcactacgggatgctgtttgatgaatatcaaggcttgtcacacctggaagccctggaaattctgtccaatgaaagcgaaagcaaggttcagtcatttttagcatcacttgatggagagaagctggaactcttaaaaaatgacctaatttccattaaagacatctttgcagccaaagaattagagaatgaagaaaatcaagaagaacaaggcttagaagaaaagggagaagaatttgctcgcatgcttacagagcttctctttgaattacatgtggcggccacacctgacaaactcaataaggccatgaagagggctcatgactgggtggaagaggatcaaaccgtggtgtcagtagatgtggcaaaagtgtccgaagaagaaacaaagaaggaagaaaaggaagagaaatctcaagaccctcaagaagacaaaaaggaggaaaagaaaactaagaccatagaggaagtatacatgtcgtccattgaaagtctggcggaggtaacagcgcgctgtattgagcagcttcataaagtagcagaattaattcttcatggacaagaagaggaaaaaccagctcaggaccaagcaaaagttctaataaaattaactactgcaatgtgcaatgaagtggcctctttatcaaagaagtttacgaattctttaaccactgttgggagcaacaagaaggccgaggtccttaaccccatgatcagtagtgtattgttagagggctgcaacagtacaacgtacatacaggatgccttccagctgctgctgcctgttctgcaggtctcacatatccagaccagttgtttgaaagcacagccgtgacctggccagactccatctagttaaaggagacagctggccgccttgcctcaatatgtaccatttaaggggatgttctctgtgcgcctggccacagacatccatttgaggacactacaagcaattttgcacagacaatattgagaatgcaaatttagagagagttatcatttctctcaatgtgtataattgtttttacaaacaattgtgttttctttatgttaatttaaacttacacagcttatattgaaaatttcctttcatctgaaatttatttacaaatattcgtgttcattttcctggttaagcatgctatatttagaaactcatggggagaccttagacttttgtttaatcctttatgtttcaacctttaaatgttccattcttatagtattactttaaatcaattctaaaactgaactttgttttgttacataaatgtcgcaggcaaaaataacactacttatagattttacctattatggtaaaaaataggaacatattgtcattctttttttttttttttttttgagacagagtctcactctgtcgccaggctggagtgcgttggcacaatctcggctcactgcaacctccgcctcctgggttcaatcgattctcctgcctcagcctcctgagtagctgggactacaggtgtgtgccaccacgcccagccaattttttttgtatttttagtagagacagggtttcaccatgttggccaggatggtctcgatctcctgacctcgtgatctgcccgcctcagcctcccaaagtgctgggattacaggcttgagccaccgcgcccggccggtcattcattcttgcaacaagcatttattgagcacctactgtgtgctcacagtaaagaaacgtgatcttatcccagtagaggtagatattctgaaaaagaataattcttaaactgcttaaaacaggggtccccacccccaggccacagaccagtaccagtccgtggcactggttaggaaccaggccacacagcagggggtgagcggtgggtgagtgagcacagcttcatctgtatttacagctgctccccagagcttgcattactgcctgagctctgcctcccgtcaggtcagcagcagcattagagtctcatgggagtgcgaaccctgttgtgaactgcacatgcgagggatctaggttgtgcactccttatgagaatctaatgcctgatgaatctaatgcctcatgatctgaggttgaatagcttcgtgccgaaaccatcccccacccccatcccgctaccccgagtccgtgaaaaaattgtcttccatgaaaccggtccctggtaccagaaaggttggggaccactggcttaaaataccaataaatttttgaaccttaaaaactttgaagaacaaggtaaattggtgttttatttaatgtcctaccctttaatttgttgcattttcctatactctttacactattttatcccaaactatgtatatgaggtgaaaatatatatgaaaagggatactgaagaatatttagtttaaaattaatttcttacgatcacgagcacatggtggcataattacaaagcttggaagtattcaaatagaaaatcaaaggtgtttcaatacagtagaatcccaggactgcattttaaaatcgcctcacagatcacactcgctggtggcaaatatcatcatcgttgctaaaggacagaaaatactgatgtgtgttttaactaactggtatattgatccatgggaggctgcacagaagaccctgcggccaggaggggcattgtcagtggctgcttctcctgagctccacgccttcattgcagctgcatgttcgatacaatacacctgcttcacagccccatggacatccctacaggtactgtcatgtgaagccttgcctagtagttctctccagggcaaatgaagctcacagttttgcaaggtggaaacctcttattcacatttgctttgattccccgatggagtagactgcctttgttccatacaggcaaagtaaggatattttaatatcatcctacttcttattagcatttcatttgtctatgtactgtatttcatttgtatgtctcctgaaacatccaaatagagaacataagaacactttatgtacaatctggaaaaaaattacctgagaaatcaattaaagatttttccccttt

SEQ ID NO: 236381 - DNA, 1692 bp, Artificial Sequence
  derived and/or modified sequence
atgtctgatgatgctggggatactctggcaactggcgacaaggctgaggtaactgagatgcctaactctgattccttacctgaggatgcggaggtccattgcgactctgccgcagttagccacgaacctactcccgcagacccccggggagaggggcacgaaaacgccgccgtccagggcgctggtgctgcagccatcggccccccggtgcagccacaggacgccaatgctcttgagccccccctcaacggggatgtgaccgaagatacattggcagaatgtatcgactcggtctctctcgaagcagaaccacgctccgaaatccctctccaggaacagaactacctcgccgtcgactccccaccctcaggagggggctgggctggctggggcagttggggtaaatccctgctgtcctccgcgagcgcaacggttgggcatggcctcactgcggtaaaagaaaaagccggcgctacactccggatacacggagtcaactcaggctcaagtgagggagcccagccaaacacggagaatggggtacccgagatcactgatgctgctaccgaccaggggccagctgagagcccaccgacctcaccatcttccgcctcacgcgggatgctgtcagccataactaatgtcgtgcagaacaccggaaagagtgtgctaactggcgggctcgacgcactggaattcatcgggaagaagaccatgaacgttctggccgagtcagaccccggctttaagcgcaccaagaccttaatggaacggactgtgagtctgtcccagatgctgcgggaggccaaggaaaaagagaagcagcgactggctcagcagctcaccatggagagaaccgctcactatggaatgctgtttgacgagtaccagggtcttagccatttggaggctctggagatcctgtctaacgaatctgagtcgaaggtccagagtttcctggcttccctggatggcgagaaactggagctgctgaagaacgatttgataagtatcaaagatattttcgcagcgaaggaactcgagaatgaggaaaaccaggaagaacaggggctagaggagaaaggcgaagagtttgcccgcatgttaacagagctgctgttcgagctgcacgttgccgccactcccgacaaactcaacaaggctatgaagcgggcacacgattgggtggaagaagatcaaacagttgtctcagtcgacgttgccaaggtcagtgaggaggaaactaagaaagaagagaaagaggagaagtcccaggatccccaagaggacaaaaaagaagaaaagaaaacgaagaccatcgaagaggtctatatgagtagcattgaatctttagccgaggtcactgccagatgtatcgagcagctccataaggtggccgagcttatcctccacggtcaagaggaagaaaagccggctcaggaccaggctaaggtgcttataaaactgactaccgctatgtgcaacgaagtggcctcgctctcaaagaagtttacgaatagcctcacgacagtggggtccaacaagaaggccgaggtgcttaacccaatgattagctccgtgttgttagagggttgcaatagcacgacttacatacaggatgcttttcaactcctgctgcctgtgctgcaggtgtcccatattcagaccagttgtttgaaagctcagccctag

SEQ ID NO: 236382 - DNA, 1692 bp, Artificial Sequence
  derived and/or modified sequence
atgtctgatgatgctggggacaccctggccactggagacaaggccgaggtgacagagatgcccaacagcgacagcctgcctgaagatgctgaggtgcactgtgacagcgctgctgtgtcccatgagcccaccccagctgaccccagaggagagggccatgaaaatgctgctgtgcagggcgctggggccgccgccatcggcccccctgtgcagccccaggatgccaatgccctggagccccccctgaatggagatgtgacagaggacaccctggctgaatgtattgattctgtgtccctggaggccgagcccaggtctgagatccccctgcaggagcagaactacctggccgtggacagccccccatctgggggcggctgggccggctggggctcctggggcaagagcctgctgagcagcgccagcgccaccgtgggccacggcctgacagctgtgaaggagaaggccggggccaccctgcgcatccatggagtgaacagcggcagcagcgagggcgcccagcccaacacagaaaatggagtgcctgagatcacagatgctgccacagaccagggccctgctgagagcccccccaccagccccagcagcgccagccggggcatgctgagcgccatcaccaacgtggtgcagaacacaggcaagtctgtgctgactggaggcctggatgccctggagttcatcggcaagaagaccatgaatgtgctggccgagagtgaccccggcttcaagaggaccaagaccctgatggagaggacagtgtccctgagccagatgctgcgggaggccaaggagaaggagaagcagaggctggcccagcagctgaccatggagaggacagcccactacggcatgctgtttgatgagtaccagggcctgagccacctggaggccctggagatcctgagcaatgaaagtgagagcaaggtgcagagcttcctggccagcctggatggagagaagctggagctgctgaagaatgacctgatcagcatcaaggacatctttgctgccaaggagctggagaatgaggagaaccaggaggagcagggcctggaggagaagggggaggagtttgccaggatgctgacagagctgctgtttgagctgcacgtggccgccaccccagacaagctgaacaaggccatgaagagggcccatgactgggtggaggaggaccagacagtggtgtctgtggatgtggccaaggtgtctgaggaggagaccaagaaggaggagaaggaggagaagagccaggacccccaggaggacaagaaggaggagaagaagaccaagaccatcgaggaggtgtacatgagcagcattgagagcctggccgaggtgacagcccgctgcatcgagcagctgcacaaggtggccgagctgatcctgcacggccaggaggaggagaagccagcccaggaccaggccaaggtgctgatcaagctgaccacagccatgtgcaatgaggtggccagcctgagcaagaagttcaccaacagcctgaccaccgtgggcagcaacaagaaggccgaggtgctgaaccccatgatcagctctgtgctgctggagggctgcaacagcaccacctacatccaggatgccttccagctgctgctgcctgtgctgcaggtgagccacatccagaccagctgcctgaaggcccagccctag

SEQ ID NO: 236383 - DNA, 1692 bp, Artificial Sequence
  derived and/or modified sequence
atgagcgacgacgccggcgacaccctggccaccggcgacaaggccgaagtgacagaaatgcccaattcagattcccttccagaagatgctgaagtccactgtgatagcgctgctgtcagtcatgaaccaaccccagcagaccctcgcggtgaaggacatgaaaatgccgcagtccagggtgccggagctgcggctataggtcctcccgtgcagccccaggatgccaacgccctggagcctccactgaacggagacgtgaccgaggacacactggccgagtgcatcgattctgtctcgctagaagccgagccgcgatcagagatcccgcttcaggaacaaaattacctggctgttgattctcccccaagcgggggagggtgggctggttggggatcctggggcaaatctttgctgagctccgcaagcgccacggtgggtcatgggctgaccgcagtaaaagagaaagccggcgctaccttgaggattcacggcgtcaacagcggaagctctgaaggggcccagccgaacaccgagaacggggtgccagagattaccgatgccgctacagatcagggccctgccgaatcccccccaacttccccctcctcagcaagcagagggatgctttcagccataaccaacgtagtgcaaaatactgggaaatctgtgctcactggggggctagatgctttggaatttatcggcaaaaaaactatgaatgtcctcgcagaatctgacccaggttttaagaggacaaaaacacttatggagcgcacagtttctctgagtcagatgctgcgagaagctaaagagaaagagaaacagagactggcccagcagttaaccatggaaagaactgcccactacggcatgttgtttgacgaatatcaggggctgtcacatcttgaggcgcttgagattctgtccaacgaatccgagagcaaggtccaatcatttctcgcctctctggatggagagaagctggaactcctgaagaacgatctgatttcgattaaggatatctttgctgccaaagagttggagaacgaggaaaaccaggaagaacagggactggaggagaagggagaggagttcgcacgaatgctgacagagctgctgtttgaattacacgtcgcagccacacccgataagttgaacaaagccatgaagagggctcacgattgggtcgaagaggaccagacagtggtgagcgtcgacgtggcaaaggtgtccgaagaggagacgaaaaaggaagagaaggaggaaaagagccaggacccacaggaggacaagaaagaggagaaaaagaccaagacaatcgaagaagtttacatgtcgtcaatcgagagcctggccgaagttactgcccggtgcatcgaacagctgcacaaggtcgccgagctgatcctccacggtcaggaagaggagaaaccggcacaagatcaagccaaggtactgataaaactgacaaccgcaatgtgtaatgaggtcgccagtctcagcaaaaaattcacaaattctctgaccaccgtggggagcaacaaaaaggcagaagtcctgaatcctatgatctcaagtgtgctgctggagggatgcaactctacgacatacatacaggatgctttccagctgctgctacctgtgttgcaagtctctcatattcagacttcatgtctgaaggctcaaccctag

SEQ ID NO: 236384 - DNA, 1692 bp, Artificial Sequence
  derived and/or modified sequence
atgagtgatgatgcaggggacactctagcgacaggtgacaaggccgaggtcaccgaaatgccaaactccgactcgctgcctgaggatgccgaagtacactgtgactccgcagcagtctcccacgagcctacccctgcagaccctaggggagagggtcacgaaaatgcagccgtccagggcgcaggcgcagcagctataggacccccagttcaacctcaggacgctaatgcactggaaccgccactcaatggtgacgttaccgaagacacgctggccgagtgtattgacagtgtgtccctagaggccgagccaaggagtgagattcctctgcaggaacagaattacctcgcagtcgattcgccgccatctggagggggatgggccggatggggctcctgggggaaatccctcctgagctctgcaagcgctacagtggggcatggactaacagccgtgaaggagaaggcaggtgcaacactcaggattcatggcgtgaactccgggtcaagcgagggggctcaacctaatacggagaatggagttcccgagatcacagacgcagccaccgaccaggggcctgctgagagcccgcctacgagtccctcttctgcaagtaggggcatgctcagcgccatcactaacgttgttcagaataccggtaagtccgtgctgactggaggacttgacgctttggagtttataggaaagaaaaccatgaacgtcctcgccgaatctgatcctggctttaagaggactaagacactaatggagcggacagtgtctttgagccaaatgctccgcgaggctaaggagaaggaaaaacaaagattagctcaacaactgactatggaacggaccgcccactacgggatgctgttcgacgaatatcaggggctgtcgcaccttgaagcgcttgagattctcagcaatgaatccgagagcaaggtccagagttttctggcgtcactggacggtgaaaaattggagctgctaaagaatgatctgataagcatcaaagatatttttgccgctaaggaattagagaatgaggaaaaccaagaagaacagggactggaagaaaagggtgaggagttcgcgagaatgttaactgaactgctctttgaactccacgtggccgcaacccctgataagctcaataaggccatgaaaagagcccacgactgggtggaggaggaccagacagtggtgagcgtggacgtggccaaagtgtccgaggaagaaacgaagaaggaggaaaaggaggaaaaatcacaggatccacaggaagataaaaaagaggagaaaaagaccaaaaccatcgaggaggtgtacatgtcttctatagagagtcttgcggaggttactgcgaggtgtatcgagcagttgcataaggtggccgaactaattctccacggccaggaggaggaaaagccagctcaggatcaggccaaggttctcatcaaactgactacagcaatgtgtaatgaagtggcttcactgtccaaaaagttcactaactcacttactaccgtgggatccaataaaaaggcggaggtgctgaatccaatgattagctctgtattgctggaagggtgcaactccaccacatacattcaggatgcatttcaactcctgctccccgtgttgcaagtgtcacatatccaaactagttgccttaaggctcaaccatag

SEQ ID NO: 236385 - protein, 376 aa, Artificial Sequence
  derived and/or modified sequence
MARGPGPLGRPRPDTVAMPKRGKRLKFRAHDACSGRVTVADYANSDPAVVRSGRVKKAVANAVQQEVKSLCGLEASQVPAEEALSGAGEPCDIIDSSDEMDAQEESIHERTVSRKKKSKRHKEELDGAGGEEYPMDIWLLLASYIRPEDIVNFSLICKNAWTVTCTAAFWTRLYRRHYTLDASLPLRLRPESMEKLRCLRACVIRSLYHMYEPFAARISKNPAIPESTPSTLKNSKCLLFWCRKIVGNRQEPMWEFNFKFKKQSPRLKSKCTGGLQPPVQYEDVHTNPDQDCCLLQVTTLNFIFIPIVMGMIFTLFTINVSTDMRHHRVRLVFQDSPVHGGRKLRSEQGVQVILDPVHSVRLFDWWHPQYPFSLRA

SEQ ID NO: 236386 - DNA, 1131 bp, Artificial Sequence
  derived and/or modified sequence
atggccagaggccccggccccctgggcagacccagacccgacaccgtggccatgcccaagagaggcaagagactgaagttcagagcccacgacgcctgcagcggcagagtgaccgtggccgactacgccaacagcgaccccgccgtggtgagaagcggcagagtgaagaaggccgtggccaacgccgtgcagcaggaggtgaagagcctgtgcggcctggaggccagccaggtgcccgccgaggaggccctgagcggcgccggcgagccctgcgacatcatcgacagcagcgacgagatggacgcccaggaggagagcatccacgagagaaccgtgagcagaaagaagaagagcaagagacacaaggaggagctggacggcgccggcggcgaggagtaccccatggacatctggctgctgctggccagctacatcagacccgaggacatcgtgaacttcagcctgatctgcaagaacgcctggaccgtgacctgcaccgccgccttctggaccagactgtacagaagacactacaccctggacgccagcctgcccctgagactgagacccgagagcatggagaagctgagatgcctgagagcctgcgtgatcagaagcctgtaccacatgtacgagcccttcgccgccagaatcagcaagaaccccgccatccccgagagcacccccagcaccctgaagaacagcaagtgcctgctgttctggtgcagaaagatcgtgggcaacagacaggagcccatgtgggagttcaacttcaagttcaagaagcagagccccagactgaagagcaagtgcaccggcggcctgcagccccccgtgcagtacgaggacgtgcacaccaaccccgaccaggactgctgcctgctgcaggtgaccaccctgaacttcatcttcatccccatcgtgatgggcatgatcttcaccctgttcaccatcaacgtgagcaccgacatgagacaccacagagtgagactggtgttccaggacagccccgtgcacggcggcagaaagctgagaagcgagcagggcgtgcaggtgatcctggaccccgtgcacagcgtgagactgttcgactggtggcacccccagtaccccttcagcctgagagcctag

SEQ ID NO: 236387 - DNA, 1131 bp, Artificial Sequence
  derived and/or modified sequence
atggctcgcgggccagggccccttgggcgtccaaggccagacaccgttgccatgcctaagcgtggcaagaggctgaaatttagagcccacgacgcatgctcggggcgggtcacggtggcagactacgcaaactccgacccggccgtggtgaggtccgggcgggtgaagaaggctgtcgcaaacgccgtgcaacaggaggtgaagagcctgtgtggactagaggcaagtcaggttccggctgaagaagccctgagtggagcaggtgaaccttgtgatataatcgattcaagtgatgagatggatgcacaggaggaaagcatccatgagcgaacagtaagccggaaaaaaaagtctaagagacacaaagaggagctggacggagcaggtggtgaagagtacccaatggacatctggttgctgctggcgtcctatattcgtcccgaagatatcgtgaatttctctctgatctgcaagaacgcttggactgtgacctgcaccgcggcattttggaccagactgtataggcgccactacacgctggacgcttctctgcctcttcgtctgcggccggagtccatggagaagcttaggtgtctgcgagcttgcgttatccgctccttgtaccacatgtacgaaccgttcgcagcacggatttccaaaaaccctgcaattcccgagagtacacctagtacattgaaaaactccaaatgcctcttattttggtgcagaaaaatagtcgggaatagacaagaacccatgtgggagtttaattttaagtttaaaaagcaatcgccaaggctgaagtccaagtgtacaggcgggcttcagcccccagttcaatacgaggatgtccatacaaatcctgatcaggattgctgcctgctgcaagtgactacgctgaattttatcttcatcccaatagtgatgggaatgatttttacactcttcacaataaacgtgagcacagacatgcggcatcacagagtcagactcgtgttccaggactcacccgtgcacggtggacggaagctgagatctgagcaaggggtacaggtgattcttgacccagtgcatagcgtgcggctattcgactggtggcatccccagtaccccttttccttaagggcctag

SEQ ID NO: 236388 - DNA, 1131 bp, Artificial Sequence
  derived and/or modified sequence
atggcccggggccctggccccctgggccggcccaggccagacacagtggccatgcccaagaggggcaagaggctgaagttccgggcccatgatgcctgcagcggccgggtgacagtggccgactatgccaacagcgaccctgctgtggtgcgcagcggccgggtgaagaaggctgtggccaatgctgtgcagcaggaggtgaagagcctgtgtggcctggaggccagccaggtgcctgctgaggaggccctgtctggagctggggagccctgtgacatcatcgacagcagtgatgagatggatgcccaggaggagagcatccacgagaggacagtgtccaggaagaagaagagcaagaggcacaaggaggagctggatggagctggaggagaggagtaccccatggacatctggctgctgctggccagctacatccggcctgaggacatcgtgaacttcagcctcatctgcaagaatgcctggacagtgacctgcacagctgccttctggacccggctgtacagaagacactacaccctggatgccagcctgcccctgcggctgcggcctgagagcatggagaagctgcgctgcctgcgggcctgcgtcatccgcagcctgtaccacatgtatgagccctttgctgcccgcatcagcaagaacccagccatccctgagagcacccccagcaccctgaagaacagcaagtgcctgctcttctggtgcaggaagatcgtgggcaaccggcaggagcccatgtgggagttcaacttcaagttcaagaagcagagcccccggctgaagagcaagtgcaccggcggcctgcagccccctgtgcagtatgaagatgtgcacaccaacccagaccaggactgctgcctgctgcaggtgaccaccctgaacttcatcttcatccccatcgtgatgggcatgatcttcaccctcttcaccatcaacgtgtccacagacatgaggcaccaccgggtgcggctggtgttccaggacagccctgtgcatggaggcaggaagctgcggtctgagcagggcgtgcaggtgatcctggaccctgtgcacagcgtgcggctgtttgactggtggcacccccagtaccccttcagcctgcgggcctag

SEQ ID NO: 236389 - DNA, 1131 bp, Artificial Sequence
  derived and/or modified sequence
atggcccggggccccggccccctgggccggccccggcccgacaccgtcgctatgccaaagcggggaaaacgcctgaagttccgcgctcacgatgcctgctcgggtcgggttacggtggcagattatgctaattcagacccggcagtggtgcgctcaggccgcgtcaaaaaggccgtggctaatgcagtgcagcaggaagtgaagagcctgtgtggattggaagcatctcaggtccctgccgaggaagcgctatctggcgccggcgagccatgtgatattatcgatagcagcgatgaaatggacgcacaggaggaaagcatccacgaacggacggtgtccaggaagaagaagagtaaacgacataaggaagaactcgatggagcaggaggcgaagagtatccgatggatatatggctgctgctggcaagttatatccgtcctgaggacatcgtcaatttttcactgatttgtaagaatgcttggacggtgacgtgcacagctgccttttggacccgcttgtaccgacgacactacacattggatgcaagtctgcccctgcggctacggcctgagtctatggaaaaactgcgatgcttgcgcgcgtgcgtgataaggtccctgtatcatatgtatgagcctttcgcagctcggatttccaaaaaccccgcgatcccagagtcaacaccaagtacgctaaaaaactcaaagtgcctcctgttctggtgcaggaagatagtcggtaataggcaggagcccatgtgggaatttaattttaagttcaagaagcagagcccaagattgaagtctaagtgcaccggaggcctacagcctcccgtgcagtatgaggatgtacatactaatcccgaccaggactgctgccttctccaggtgactaccctcaattttatttttatcccaatagtcatggggatgattttcaccctgtttactatcaatgtgagcaccgatatgagacaccaccgagtgcgtcttgtgtttcaagatagccccgtgcacggcggaaggaaattaaggagcgaacagggagtgcaggttatcttggaccctgtccacagcgtgagacttttcgattggtggcatccacagtacccatttagcctccgcgcatag

SEQ ID NO: 236390 - DNA, 1131 bp, Artificial Sequence
  derived and/or modified sequence
atggcgagagggcctggcccactcggacggcctcggccagacacggtggctatgcccaaaaggggcaagagactgaaattcagagcccacgatgcatgcagtggcagggtaaccgtcgctgactacgccaattctgatcctgccgtggttcgaagtggcagggtcaagaaagccgtagcgaatgccgttcagcaagaagtgaagtctctttgtggcctcgaggcctcccaggtccccgcagaggaggccctgtcaggggctggcgaaccatgtgatattattgactcctctgatgagatggatgcgcaggaagagtcgatacacgaacgaaccgtctcacgcaaaaagaaatcaaaaaggcacaaggaagagttagacggcgctgggggtgaagagtatccaatggacatttggctcttactcgcttcgtacatcaggcctgaggacatcgtaaactttagtctgatatgtaagaatgcttggaccgtgacctgcaccgcagcattttggacacggctctatcgcagacattacactctggacgcctcgctcccccttcgtctccgtcccgagtccatggaaaagctccgatgtctcagagcctgtgtcattaggagcttgtaccatatgtacgaaccttttgcggcacggatcagcaagaatcctgctatcccggaatcaacaccatccacacttaagaatagtaagtgcctgctcttttggtgcagaaaaatcgtcgggaatcggcaagaaccaatgtgggagttcaactttaaatttaaaaaacagtcccctaggctgaaaagcaaatgtaccggagggctccagccccctgtgcagtacgaggacgtgcacacaaaccctgaccaagattgctgtctgctgcaagtgactactttaaatttcatattcatcccaattgtgatgggaatgattttcacactgtttactattaatgtctctaccgacatgcgccatcatcgcgtgagactcgtctttcaagacagccccgtgcatgggggtagaaagttgcgatctgagcagggagtccaggtaatcctggacccagttcacagtgtccggctctttgactggtggcatccccagtacccattctccctgcgggcttag

SEQ ID NO: 236391 - DNA, 3019 bp, Artificial Sequence
  derived and/or modified sequence
agcggcctccggtgtgggatggccgcggagccgggcggagctggcttgcggctcccggggccggctctccggccggagacatggcccgggggcccggcccgctaggcaggcctcgccccgatacggtcgccatgcccaagagaggaaagcgactcaagttccgggcccacgacgcctgctccggccgagtgaccgtggcggattacgccaactcggatccggcggtcgtgaggtctggacgagtcaagaaagccgtagccaacgctgttcagcaggaagtaaaatctctttgtggcttggaagcctctcaggttcctgcagaggaagctctttctggggctggtgagccctgtgacatcatcgacagcagtgatgagatggatgcccaggaggaaagcatccatgagagaactgtctccagaaaaaagaaaagcaagagacacaaagaagaactggacggggctggaggagaagagtatcccatggatatttggctattgctggcctcctatatccgtcctgaggacattgtgaatttttccctgatttgtaagaatgcctggactgtcacttgcactgctgccttttggaccaggttgtaccgaaggcactacacgctggatgcttccctgcctttgcgtctgcgaccagagtcaatggagaagctgcgctgtctccgggcttgtgtgatccgatctctgtaccatatgtatgagccatttgctgctcgaatctccaagaatccagccattccagaaagcacccccagcacattaaagaattccaaatgcttacttttctggtgcagaaagattgttgggaacagacaggaaccaatgtgggaattcaacttcaagttcaaaaaacagtcccctaggttaaagagcaagtgtacaggaggattgcagcctcccgttcagtacgaagatgttcataccaatccagaccaggactgctgcctactgcaggtcaccaccctcaatttcatctttattccgattgtcatgggaatgatatttactctgtttactatcaatgtgagcacggacatgcggcatcatcgagtgagactggtgttccaagattcccctgtccatggtggtcggaaactgcgcagtgaacagggtgtgcaagtcatcctggacccagtgcacagcgttcggctctttgactggtggcatcctcagtacccattctccctgagagcgtagttactgcttcccatcccttgggggcagcctcgagtgtagtccattagtaatcagattccagtttggacagggtggctggattgtatatctcgttagtaatgtacatgctcttcaggttctagggctcctgttaggggagggagaaatgttgaatcaagagggaaaacaactactatgatttataaacatattttaatgtaaaaatttgcatttaaaaggagtggccctgttttctgtgttaaaaccccatttggtgctattgagtttgttctttattcttttatcccagtgaaaattgttgatcttgctgtagggaaaaattaaactctttgaatctccaaacaaggaagtttcagcattcccttatggatcagaggaaccttagaggcctgaaattgttgcttccagtttagctgcccctcaaattcaagtgaatattttcccttctccctttacccttctccagaaataaagcaggtgacagggttttcagaatcttaccatattgacttgtgtatcttttttaaaaaataatttgtgatatttattgcatacattttcttttggcagttttggattttaggtatttttttgcatgaggctgataatggtgatgatgactttatacccttggtactatactaggaactttacatagtatctctacttctcacagtcttgcaaagtaggtgatattattcccattttatagttgagaaaacggaattagtgactgtacctataacaccagtaaatgcagagccaagattctgacccaggtctttttgttgtaccataagtttaaaagatgagtctcatttttcttgtggtagatggtggtaaaaaggagtaggcagagtgtacatagataaaaaaaagtaaaagggtaagtaaaaaattgattgtggtatatgttattctaatcagccaaaaaagtttagaagattgatgaaatgatcttttaaatatgtatttctgaataaaatgtaaaaccaagaaagttatttcaggaaggatagtgaccctttccttgaactgttagaagggcatttattaggctaaaacgtcattaacaaaatgcattgcatgttgaaaccagcctcttgaaccataagcacttagcgactttgctctgccctgtactgtgctgcttctgctgtcatcctgtgtgcctacagaagcctggtcttccgtccatgcagaaatgcttatgtcctcctgttgtttagatgactcctattgttcaggtgtactctgagaagagaatcacgtttttctgttttgctaaggagaaaaccttgctgcttgtctctcctcccaccctccaccatccaaaattaaccagtgagctggatattacctggatattgccaggaggtgggcattaagacagtattctttaaaagtgaaaatcttgtgaggcaaactgctaaattcacatttttgtttttttttttttaccatcttccctaggaatattcctagaaagcatctgcttaattttgctgctaacagctaaccttatcccacgttgagggtggtattaaaactgttcacacagagtgagcctgggtcagtcaaaaacagaatttgggcatttgagtgataacagacaacctaaggacaatgagcactttgcagatctctacaattaaaagttgcctctttgaggcaggaggggagaagcacagtccctgccaggttgcctgaactaaagatgccatggagcaggagtgtcttggtgcattgttccccgcttaggagtacctttaaaaagggggtgaaataaatttggcttaataattgta

SEQ ID NO: 236392 - protein, 184 aa, Artificial Sequence
  derived and/or modified sequence
MDGLRQRVEHFLEQRNLVTEVLGALEAKTGVEKRYLAAGAVTLLSLYLLFGYGASLLCNLIGFVYPAYASIKAIESPSKDDDTVWLTYWVVYALFGLAEFFSDLLLSWFPFYYVGKCAFLLFCMAPRPWNGALMLYQRVVRPLFLRHHGAVDRIMNDLSGRALDAAAGITRNVKPSQTPQPKDK

SEQ ID NO: 236393 - DNA, 555 bp, Artificial Sequence
  derived and/or modified sequence
atggatggccttagacaacgggttgaacacttcctcgagcaacgcaacctcgttaccgaggtattaggggctcttgaggctaaaacaggcgtggaaaaacgttacttggctgcaggcgcagttacgttgttatccctgtatctgctcttcggatatggcgcatccctactctgtaacctcatcgggttcgtttatcctgcatacgcgtctataaaggccatcgaatccccatctaaagacgatgataccgtctggctaacttattgggtggtatatgccttatttgggcttgcggaattttttagcgatcttctgctctcctggtttcccttctactatgtcggtaaatgcgcattcctccttttttgtatggctccccggccatggaacggggcgctgatgctataccaacgcgtggtacgcccactatttttacgtcatcacggtgccgtggaccgcattatgaacgacctcagcggacgggctctcgacgcggctgccggcataacacgcaacgtcaagccatctcagaccccgcagccgaaagacaagtag

SEQ ID NO: 236394 - DNA, 555 bp, Artificial Sequence
  derived and/or modified sequence
atggatggcctgcggcagagggtggagcacttcctggagcagaggaacctggtgacagaggtgctgggcgccctggaggccaagacaggagtggagaagcgctacctggccgccggggctgtgaccctgctgagcctgtacctgctgtttggctacggggccagcctgctgtgcaacctgattggatttgtgtacccagcctatgccagcatcaaggccatcgagagccccagcaaggatgatgacacagtgtggctgacctactgggtggtgtatgccctgtttggcctggccgagttcttcagtgacctgctgctgtcctggttccccttctactacgtgggcaaatgtgccttcctgctcttctgcatggccccccggccctggaatggagccctgatgctgtaccagagggtggtgcggcccctcttcctgcggcaccacggggctgtggaccgcatcatgaatgacctgagcggccgggccctggatgctgctgctggcatcaccagaaatgtgaagcccagccagaccccccagcccaaggacaagtag

SEQ ID NO: 236395 - DNA, 555 bp, Artificial Sequence
  derived and/or modified sequence
atggacggcctgcggcagcgggtggagcacttcctggagcagcggaacctggtcactgaagtgctaggcgctctcgaggctaaaactggtgtggagaagaggtatctagccgccggtgccgttacgctgcttagtctctatctgctttttggctatggagcctctctcctgtgcaatctgattggcttcgtctacccggcttacgcctccattaaagctatcgaatctccatcaaaagatgacgacacagtgtggctgacttactgggtagtgtatgcccttttcggactggctgagttcttttccgatctcctcttaagttggttcccattttactatgtgggaaagtgcgcatttcttctgttctgtatggcgccaagaccctggaacggtgctcttatgctgtaccagcgtgtagtgcgcccattattcttacgccaccacggtgccgtggatcgaattatgaatgatctgagcggacgagctctggatgcagctgcaggaattaccagaaatgttaaaccgtcgcagacaccccagcccaaagataagtag

SEQ ID NO: 236396 - DNA, 555 bp, Artificial Sequence
  derived and/or modified sequence
atggatgggctgcggcaacgtgtcgaacacttcctggaacagaggaacctagtcaccgaggtgctgggtgccctcgaggctaaaacaggcgtcgagaagaggtacctggccgctggagccgtcacccttctgtccctttacctgctttttggatacggcgctagtctcctgtgtaacttaattggcttcgtgtatcctgcatatgcaagcatcaaggccatagagtcgccgtctaaggacgacgacaccgtgtggttaacatattgggttgtttatgcccttttcgggctggctgaattcttctcagacctgttgctgtcttggtttccattctactatgttgggaagtgcgcttttctgctattttgcatggccccaaggccgtggaacggtgcgttaatgctgtaccagagggtggtgcgaccgttattcttgcggcaccacggagccgtggatcgaataatgaatgacctcagtgggagagcactggacgctgctgcagggattaccaggaacgtaaaacctagtcagacaccccagccaaaggacaaatag

SEQ ID NO: 236397 - DNA, 1517 bp, Artificial Sequence
  derived and/or modified sequence
ctctcccggcggggtctgggcagcggcggccgtggcggagggctatgcggcgggggagacggggcaggcccctcctcctttgtccgccctgccctcccattggtcctagcggggggccgggggcggacaccggcgcggggccggagcatcgcggctcaggctgcgggaaagcggtgcgcgtgcagcggggtgggtgccctggtccgcgggcgagctcgagcagccaaccccgggcgcgtcggggccatggacggcctgaggcagcgcgtggagcacttcctggagcaaaggaacctggtcaccgaagtgctgggggcgctggaggccaagaccggggtggagaagcggtatctggctgcaggagccgtcactctgctaagcctgtatctgctgttcggctacggagcgtctctgctgtgcaatctcatcggatttgtgtaccccgcatatgcctcaatcaaagctatcgagagcccaagcaaggacgacgacactgtgtggctcacctactgggtggtgtacgccctgtttgggctggccgagttcttcagcgatctactcctgtcctggttccctttctactacgtgggcaagtgcgccttcctgttgttctgcatggctcccaggccctggaacggggctctcatgctgtatcagcgcgtcgtgcgtccgctgttcctaaggcaccacggggccgtagacagaatcatgaacgacctcagcgggcgagccctggacgcggcggccggaataaccaggaacgtcaagccaagccagaccccgcagccgaaggacaagtgaagcagccccctgagcctcacaaggacctcctggctggtgaggagggggccgcgccaggctcccaggcctccacagagtcttcagcgcatcccccaacagcagcccctgccagtccctcgggtccaggcaaggccctgggggtctccttaaatgccacctcgggcaagtcccagtcccagtcctcggccacccccagctctggatcccagggccagctgccctctggctctggctgtggctcccgcctgtccggcagggcccagggccagcgtcgggcacagggcagctcccactggtctcggcaacacacccagccgcctggtacttcctccagcccctcccagtcagccctcccgtcctcggggcccctgcagccacccaacgtcacctccagcccggtctcacccatggtccagtctcccagcagcagcaacatccccacgcagccccccagcaagtcctctggcaagccggaggacgcagcccccaagaccagcggacagcgccagaaggaatcgtcgaaacagcctgccagcagcgcctcagtgcccgagctggtcccctgccattccgggacctctctggagtacacttcggagtccaccaccgagatcacctgcagctggccacaccacaggcccccgtgcctgcagcactactggtgcctgaaacacctggcctgctaggaggctccaataaagctaacccggaccaga

SEQ ID NO: 236398 - DNA, 555 bp, Artificial Sequence
  derived and/or modified sequence
atggacggcctgagacagagagtggagcacttcctggagcagagaaacctggtgaccgaggtgctgggcgccctggaggccaagaccggcgtggagaagagatacctggccgccggcgccgtgaccctgctgagcctgtacctgctgttcggctacggcgccagcctgctgtgcaacctgatcggcttcgtgtaccccgcctacgccagcatcaaggccatcgagagccccagcaaggacgacgacaccgtgtggctgacctactgggtggtgtacgccctgttcggcctggccgagttcttcagcgacctgctgctgagctggttccccttctactacgtgggcaagtgcgccttcctgctgttctgcatggcccccagaccctggaacggcgccctgatgctgtaccagagagtggtgagacccctgttcctgagacaccacggcgccgtggacagaatcatgaacgacctgagcggcagagccctggacgccgccgccggcatcaccagaaacgtgaagcccagccagaccccccagcccaaggacaagtag

SEQ ID NO: 236399 - protein, 593 aa, Artificial Sequence
  derived and/or modified sequence
MLRTSVLRLLGRTGASRLSLLEDFGPRYYSSGSLSAGDDACDVRAYFTTPIFYVNAAPHIGHLYSALLADALCRHRRLRGPSTAATRFSTGTDEHGLKIQQAAATAGLAPTELCDRVSEQFQQLFQEAGISCTDFIRTTEARHRVAVQHFWGVLKSRGLLYKGVYEGWYCASDECFLPEAKVTQQPGPSGDSFPVSLESGHPVSWTKEENYIFRLSQFRKPLQRWLRGNPQAITPEPFHHVVLQWLDEELPDLSVSRRSSHLHWGIPVPGDDSQTIYVWLDALVNYLTVIGYPNAEFKSWWPATSHIIGKDILKFHAIYWPAFLLGAGMSPPQRICVHSHWTVCGQKMSKSLGNVVDPRTCLNRYTVDGFRYFLLRQGVPNWDCDYYDEKVVKLLNSELADALGGLLNRCTAKRINPSETYPAFCTTCFPSEPGLVGPSVRAQAEDYALVSAVATLPKQVADHYDNFRIYKALEAVSSCVRQTNGFVQRHAPWKLNWESPVDAPWLGTVLHVALECLRVFGTLLQPVTPSLADKLLSRLGVSASERSLGELYFLPRFYGHPCPFEGRRLGPETGLLFPRLDQSRTWLVKAHRT

SEQ ID NO: 236400 - protein, 520 aa, Artificial Sequence
  derived and/or modified sequence
MLRTSVLRLLGRTGASRLSLLEDFGPRYYSSGSLSAGDDACDVRAYFTTPIFYVNAAPHIGHLYSALLADALCRHRRLRGPSTAATRFSTGTDEHGLKIQQAAATAGLAPTELCDRVSEQFQQLFQEAGISWTKEENYIFRLSQFRKPLQRWLRGNPQAITPEPFHHVVLQWLDEELPDLSVSRRSSHLHWGIPVPGDDSQTIYVWLDALVNYLTVIGYPNAEFKSWWPATSHIIGKDILKFHAIYWPAFLLGAGMSPPQRICVHSHWTVCGQKMSKSLGNVVDPRTCLNRYTVDGFRYFLLRQGVPNWDCDYYDEKVVKLLNSELADALGGLLNRCTAKRINPSETYPAFCTTCFPSEPGLVGPSVRAQAEDYALVSAVATLPKQVADHYDNFRIYKALEAVSSCVRQTNGFVQRHAPWKLNWESPVDAPWLGTVLHVALECLRVFGTLLQPVTPSLADKLLSRLGVSASERSLGELYFLPRFYGHPCPFEGRRLGPETGLLFPRLDQSRTWLVKAHRT

SEQ ID NO: 236401 - DNA, 372 bp, Artificial Sequence
  derived and/or modified sequence
atggtggatggccgcaccaggaccatcatcaatgacatcttcttcacagagcccaccccagagatgagcagcctgcctgtgcgcagccacagcagcctgagcctgaacctggtgtccctgatggtgatctgccggggcatcatcaagctggtgatccacttcaggatgtactgccccccccggctgaaggccaagcacatcgagcccaccctgcggcctgtgcccctgaaggagctgcgcatcagccactggcccaatgaatgcatccgccacagcgcctctgtgcccatggccactggagccaacggcctggagaccaaggatgagaccaagagaaatgctgagaagtgtgcctgcagcgtcttcctgtag

SEQ ID NO: 236402 - DNA, 1782 bp, Artificial Sequence
  derived and/or modified sequence
atgctcagaacaagcgtgctgagacttttagggaggacaggtgcctcacgcctatccctgctggaggatttcggaccccggtactactccagtggcagcctgagcgctggagatgacgcttgtgacgtgagagcctattttaccacacctatcttctatgtgaatgcagctccccacattggtcacctttattcagcccttctcgctgatgccttgtgcaggcatcgcagactgaggggacctagcacagcagccacccgctttagtacaggcacggacgagcacggactgaagatccaacaggccgcggccactgctggcctggctcctaccgagctttgtgaccgggtgtcagaacagttccagcagctgttccaggaagctggcattagttgcactgattttatccgaactaccgaggcccgccacagagtggccgtccagcatttttggggagttctgaagagcaggggcctcctctacaaaggcgtttatgaaggatggtattgtgcttcggacgagtgtttcttgcccgaggctaaggttacccaacaacccggaccgagcggcgatagctttcctgtgtcgttggaatctgggcatccagtgagctggacaaaggaagagaactacatcttccgcctttcgcaattccgtaagcccctgcaacgatggctgcggggtaaccctcaggctattacacccgagccctttcaccatgtggtactgcagtggttggacgaggagttgccagacctttctgtgagtcgccgcagctcacatcttcactgggggattccagtgccaggcgacgatagccaaacgatctatgtttggctagatgctctggtgaactacctgacggttattggatacccgaacgccgaattcaaatcatggtggcctgctactagccacattatcgggaaagatatcctcaagttccacgccatctattggccggcatttctgctcggggcgggcatgagcccaccccagcgtatttgtgtgcacagccattggactgtatgcggccagaaaatgagcaagagtctaggtaacgtggtggacccgcgcacttgcttgaaccgatacacagtagacgggtttaggtacttcctcctgaggcagggggtacctaattgggattgcgactactacgacgagaaagtagtgaaactgctgaactccgaactcgcagacgcccttggtggcttactgaacagatgcacggcaaagagaattaacccctctgagacctatccagccttctgcaccacttgctttccatcagagcctggtttagtgggcccaagcgttagagcccaggccgaagattatgcgctagtgagtgccgtggcaacattaccaaaacaagtcgccgaccattatgataacttccgaatctacaaggccttggaggccgtctctagctgtgtccgccagaccaacggcttcgtacaacggcacgccccctggaaactcaattgggaatctccggtggacgctccctggttaggaaccgttctgcacgttgcactggagtgtctgagggtcttcggtacactgctgcagccggtgactccaagtcttgccgacaagctcctaagccggttaggggtgtctgcctctgagcggagtctcggcgaactatacttcttaccacgattttacggacatccttgcccttttgagggccggcggctgggacctgaaacaggcttgctatttcccagattggaccagtcgcggacctggctggtaaaagcccaccgaacctag

SEQ ID NO: 236403 - DNA, 1563 bp, Artificial Sequence
  derived and/or modified sequence
atgttgcgtacctccgtgctccgactgcttggcaggaccggagcgtctcgcttgtcactgctggaggacttcggtcccaggtattactcctctggtagtctgtctgccggtgacgacgcttgcgacgtccgggcctattttaccacgccaattttctatgtcaacgccgccccccacatcggccatctgtactccgcattattggccgatgccctctgccggcatagacggttgcgaggcccttctaccgccgctactcgtttttctactggtacagatgaacatggactaaagatccagcaggccgcagcaaccgctggcttagctcccacagaactctgtgaccgggtgtctgaacagttccaacaactgtttcaggaggctggcatttcctggactaaggaggagaactatatattcaggttgagccagttcaggaaacctctgcagaggtggctgcgaggcaacccccaagccattactcctgaaccatttcatcacgtagtgctccagtggcttgatgaggagttgcccgatctttcagtgagccgacgttcgtcacacctgcactggggcattccggtacccggcgacgattcacagactatctacgtgtggttggatgcccttgtgaattatctgaccgtcatcgggtatccgaacgcagaattcaaatcttggtggccagccacatctcacataattggaaaagacatcctgaagttccacgcaatttactggccagcctttctcttgggggccggcatgtcaccaccacagcgtatctgcgtacactctcattggactgtctgtggacagaaaatgtccaaatccttgggcaacgtggtggacccccgaacttgcctgaatcgctacacggtggatggattccgctactttttgcttagacagggagtgcctaattgggattgtgactattacgacgaaaaagttgtgaagcttttaaacagtgaactggcggacgctctgggcggactgcttaaccggtgtactgcaaaaaggataaatccatccgagacttaccctgctttctgtacaacctgtttcccaagcgaaccggggttagttggcccttctgtcagggcacaggctgaggactatgctctggtgagtgccgtggccacgctgccgaaacaggtagccgatcactatgacaatttcagaatttacaaggcattggaggctgtcagcagctgcgtccggcagaccaacggctttgtccagaggcacgccccctggaagctgaattgggaatcacccgtggacgctccctggctgggtacagtgttacacgtggcgctggagtgcctgcgcgtgttcggtacccttctccagcctgtgacacctagcctggctgataaactactatcccgcctgggcgtttctgcttcagagagaagcttgggtgagctgtacttcctgccccgcttttatggccatccgtgccctttcgagggccgccggctgggtcctgagacaggcctcctattcccccgccttgaccagtctcgcacctggctcgtcaaagcacatcgcacatag

SEQ ID NO: 236404 - DNA, 1782 bp, Artificial Sequence
  derived and/or modified sequence
atgctgcggacctctgtgctgcggctgctgggccgcactggagccagccggctgagcctgctggaggactttggcccccgctactacagcagcggcagcctgtctgctggagatgatgcctgtgatgtgcgggcctacttcaccacccccatcttctacgtgaatgctgccccccacatcggccacctgtacagcgccctgctggctgatgccctgtgccgccaccggcggctgcggggccccagcacagctgccacccgcttcagcactggaacagatgaacatggcctgaagatccagcaggccgccgccacagctggcctggcccccacagagctgtgtgacagagtgtctgagcagttccagcagctgttccaggaggccggcatcagctgcacagacttcatccgcaccacagaggcccggcaccgggtggccgtgcagcacttctggggcgtgctgaagagccggggcctgctgtacaagggcgtgtatgagggctggtactgtgccagtgatgagtgcttcctgcctgaggccaaggtgacccagcagcccggccccagcggggacagcttccctgtgtccctggagagcggccaccctgtgtcctggaccaaggaggagaactacatcttccggctgagccagttcaggaagcccctgcagcgctggctgcggggcaacccccaggccatcaccccagagcccttccaccacgtggtgctgcagtggctggatgaggagctgcctgacctgtctgtgtccagaagaagcagccacctgcactggggcatccctgtgcctggagatgacagccagaccatctacgtgtggctggatgccctggtgaactacctgaccgtcatcggctacccaaatgctgagttcaagtcctggtggccagccaccagccacatcatcggcaaggacatcctgaagttccacgccatctactggccagccttcctgctgggcgccggcatgagccccccccagaggatctgtgtgcacagccactggacagtgtgtggccagaagatgagcaagagcctgggcaatgtggtggaccccaggacctgcctgaaccgctacacagtggatggcttccgctacttcctgctgcggcagggcgtgcccaactgggactgtgactactatgatgagaaggtggtgaagctgctgaacagcgagctggctgatgccctgggcggcctgctgaaccgctgcacagccaagaggatcaaccccagcgagacctacccagccttctgcaccacctgcttccccagcgagcccggcctggtgggccccagcgtgcgggcccaggctgaagattatgccctggtgtctgctgtggccaccctgcccaagcaggtggccgaccactatgacaacttccgcatctacaaggccctggaggccgtgagcagctgtgtgcggcagaccaacggctttgtgcagagacatgccccctggaagctgaactgggagagccctgtggatgccccctggctgggcaccgtgctgcacgtggccctggagtgcctgcgggtgtttggcaccctgctgcagcctgtgacccccagcctggccgacaagctgctgagccggctgggcgtgtctgccagcgagaggagcctgggggagctgtacttcctgccccgcttctacggccacccctgcccctttgagggccgccgcctgggccctgagaccggcctgctcttcccccggctggaccagagcaggacctggctggtgaaggcccacaggacatag

SEQ ID NO: 236405 - DNA, 1563 bp, Artificial Sequence
  derived and/or modified sequence
atgctgcggacctctgtgctgcggctgctgggccgcactggagccagccggctgagcctgctggaggactttggcccccgctactacagcagcggcagcctgtctgctggagatgatgcctgtgatgtgcgggcctacttcaccacccccatcttctacgtgaatgctgccccccacatcggccacctgtacagcgccctgctggctgatgccctgtgccgccaccggcggctgcggggccccagcacagctgccacccgcttcagcactggaacagatgaacatggcctgaagatccagcaggccgccgccacagctggcctggcccccacagagctgtgtgacagagtgtctgagcagttccagcagctgttccaggaggccggcatctcctggaccaaggaggagaactacatcttccggctgagccagttcaggaagcccctgcagcgctggctgcggggcaacccccaggccatcaccccagagcccttccaccacgtggtgctgcagtggctggatgaggagctgcctgacctgtctgtgagccgccgcagcagccacctgcactggggcatccctgtgcctggagatgacagccagaccatctacgtgtggctggatgccctggtgaactacctgactgtgattggctacccaaatgctgagttcaagtcctggtggccagccaccagccacatcatcggcaaggacatcctgaagttccacgccatctactggccagccttcctgctgggcgccggcatgagccccccccagaggatctgtgtgcacagccactggacagtgtgtggccagaagatgagcaagagcctgggcaatgtggtggaccccaggacctgcctgaaccgctacacagtggatggcttccgctacttcctgctgcggcagggcgtgcccaactgggactgtgactactatgatgagaaggtggtgaagctgctgaacagcgagctggctgatgccctgggcggcctgctgaaccgctgcacagccaagaggatcaaccccagcgagacctacccagccttctgcaccacctgcttccccagcgagcccggcctggtgggccccagcgtgcgggcccaggccgaggactatgccctggtgtctgctgtggccaccctgcccaagcaggtggccgaccactatgacaacttccgcatctacaaggccctggaggccgtgagcagctgtgtgcggcagaccaatggatttgtgcagagacatgccccctggaagctgaactgggagagccctgtggatgccccctggctgggcaccgtgctgcacgtggccctggagtgcctgcgggtgtttggcaccctgctgcagcctgtgacccccagcctggccgacaagctgctgagccggctgggcgtgtctgccagcgagaggagcctgggggagctgtacttcctgccccgcttctacggccacccctgcccctttgagggccggcggctgggccctgagaccggcctgctcttcccccggctggaccagagcaggacctggctggtgaaggcccacaggacatag

SEQ ID NO: 236406 - DNA, 3027 bp, Artificial Sequence
  derived and/or modified sequence
gctgtcagaacgccgcctcctccgcttgcggccggtctgcaccatgctgcgaacgtccgtcctccgcctgctaggacgcacgggggctagtaggctgtctctcctggaggacttcggcccacgctactacagttcgggctccctcagtgccggcgatgatgcttgtgatgtgcgcgcctacttcactacacccattttctacgtgaacgcggcgccgcacatcgggcacctgtactcggcactactggcggacgccctatgccgccaccgtcgcctccgaggtcccagcacggccgccacgcgattctccactggtaccgacgagcacgggctgaagattcagcaggcagcagctaccgcgggcctggccccgaccgagctgtgcgaccgagtctctgagcagttccagcagcttttccaggaggccggtatctcctgcacagatttcatccgcaccacggaggcccggcaccgggtggctgtgcagcacttctggggggtgcttaagtcccgcggtctgctctacaagggcgtctatgaaggttggtattgcgcttccgacgagtgcttcctgcctgaggccaaggtcacccagcagccgggcccatcgggggattcgtttcctgtatctctcgagagcgggcatccagtctcctggaccaaggaagaaaactacattttcaggctttcccagttccggaagccactccagcggtggctgcggggcaaccctcaggcgatcacccccgaaccatttcatcacgtagttcttcagtggctggacgaggagctgcccgacctgtccgtgtctcgcagaagtagccacttgcactggggcattccggtgcccggggatgattcgcagaccatctatgtatggctggatgccctggtcaactacctcactgtaattggctacccaaatgctgagttcaaatcttggtggccggccacctctcatatcataggtaaggacattctcaaattccatgccatctattggcctgccttcctgttaggggccggcatgagcccgccacagcgcatctgtgtccattcccactggacagtctgtggccaaaagatgtccaagagcttgggcaacgtggtggatcctaggacttgccttaaccgctataccgtggatggcttccgctactttctccttcggcagggcgtccccaactgggactgtgactactatgatgaaaaggtggttaagttgctgaactccgagctggcagatgccttgggaggtctcttgaaccgatgcactgccaaaagaataaatccttctgagacctacccagccttctgcactacctgcttccctagtgagccagggttggtggggccgtcagttcgtgctcaggcagaggattatgctctggtgagcgcagtggccactttgccaaagcaggtagcagaccactatgataactttcggatatataaggctctggaggccgtgtccagctgtgtccggcaaactaatggttttgtccaaaggcatgcaccatggaagctgaactgggagagcccagtggatgctccctggctgggtactgtgcttcatgtggccttggaatgtttgcgagtctttgggactttgctgcagcctgtcaccccaagcctagctgacaagctgctgtctaggctgggggtctctgcctcagagaggagtcttggagagctctatttcttgcctcgattctatggacatccatgcccttttgaagggaggaggctgggacctgaaactgggcttttgtttccaagactagaccagtccaggacttggctggtgaaagcccaccggacctagaaactcagttcttaccggcttgtggtaaaaaagcaaatgtgttatctttttattttttattttcaggaaagttatactagtattttcttaagtgtggaatcaaatgagcacataagctgtgtccctgtgaaaagaggtttgtagcctttcaggtgcctgctcctattcatttctctgtgaccattgatcactgtcctttgtgcattgtgtgtctaagatgtcttcaggggaaagatgggtaagagacagtgttgctaatgctgttccttctttgtgcctccttccaaaccacagttatttgcccaaactacctctcgtggctggtttttcattggcctggcctctgcttctcaggctaattagtgactcctttctttgagggtcagggttggaggccccttactggtggttttacagggggatcctactttgttacacatgttgggtttcctgataaaaagagagtattttattaaacccttgaaccagtgtcctagaccagatgatttttgcccatgtgtatccccatttaaattcctacaactaagtctccctgctttgttaatagtccaacagttgggttgtgtaacatcacacttcaaccggtagatggctctaatctcacacatttacttactaaagattgaggattcggaatatttagaataaattagttttctgctttctaattttgcagatctttacatttttattgcttttcttaaaataagggatagctttgcaaccactattgttttaatggaaagcaaaaaacccccccaaacttatcagaatcctcgttctttttcagactactgaaaaatgacatttactctgttaaatgtttaataagtgaataagtaaatgtatcaagttgtttatataataaattataaaactcttgaggcacttggtatgttaaaaattttaaactttagtaacattaggttacaggtatgatttaaaaatttgtaaatagttcaaaagggcaatgttttctttatatttcttatagtcttaattttgttatccatgtgcataatttacctcatgatttcttttggtcaatcaggatctttaatacaatatagaaattgtgtaatagttattataaatgttaatacacaactttcaggtaattttaactgattatttcttttgctcttttaacttaagttattaaagtttaaaagttcgtaagt

SEQ ID NO: 236407 - DNA, 1915 bp, Artificial Sequence
  derived and/or modified sequence
gaacgccgcctcctccgcttgcggccggtctgcaccatgctgcgaacgtccgtcctccgcctgctaggacgcacgggggctagtaggctgtctctcctggaggacttcggcccacgctactacagttcgggctccctcagtgccggcgatgatgcttgtgatgtgcgcgcctacttcactacacccattttctacgtgaacgcggcgccgcacatcgggcacctgtactcggcactactggcggacgccctatgccgccaccgtcgcctccgaggtcccagcacggccgccacgcgattctccactggtaccgacgagcacgggctgaagattcagcaggcagcagctaccgcgggcctggccccgaccgagctgtgcgaccgagtctctgagcagttccagcagcttttccaggaggccggtatctcctggaccaaggaagaaaactacattttcaggctttcccagttccggaagccactccagcggtggctgcggggcaaccctcaggcgatcacccccgaaccatttcatcacgtagttcttcagtggctggacgaggagctgcccgacctgtccgtgtctcgcagaagtagccacttgcactggggcattccggtgcccggggatgattcgcagaccatctatgtatggctggatgccctggtcaactacctcactgtaattggctacccaaatgctgagttcaaatcttggtggccggccacctctcatatcataggtaaggacattctcaaattccatgccatctattggcctgccttcctgttaggggccggcatgagcccgccacagcgcatctgtgtccattcccactggacagtctgtggccaaaagatgtccaagagcttgggcaacgtggtggatcctaggacttgccttaaccgctataccgtggatggcttccgctactttctccttcggcagggcgtccccaactgggactgtgactactatgatgaaaaggtggttaagttgctgaactccgagctggcagatgccttgggaggtctcttgaaccgatgcactgccaaaagaataaatccttctgagacctacccagccttctgcactacctgcttccctagtgagccagggttggtggggccgtcagttcgtgctcaggcagaggattatgctctggtgagcgcagtggccactttgccaaagcaggtagcagaccactatgataactttcggatatataaggctctggaggccgtgtccagctgtgtccggcaaactaatggttttgtccaaaggcatgcaccatggaagctgaactgggagagcccagtggatgctccctggctgggtactgtgcttcatgtggccttggaatgtttgcgagtctttgggactttgctgcagcctgtcaccccaagcctagctgacaagctgctgtctaggctgggggtctctgcctcagagaggagtcttggagagctctatttcttgcctcgattctatggacatccatgcccttttgaagggaggaggctgggacctgaaactgggcttttgtttccaagactagaccagtccaggacttggctggtgaaagcccaccggacctagaaactcagttcttaccggcttgtggtaaaaaagcaaatgtgttatctttttattttttattttcaggaaagttatactagtattttcttaagtgtggaatcaaatgagcacataagctgtgtccctgtgaaaagaggtttgtagcctttcaggtgcctgctcctattcatttctctgtgaccattgatcactgtcctttgtgcattgtgtgtctaagatgtcttcaggggaaagatgggtaagagacagtgttgctaatgctgttccttctttgtgcctccttccaaaccacagttatttgcccaaactacctctc

SEQ ID NO: 236408 - DNA, 1782 bp, Artificial Sequence
  derived and/or modified sequence
atgctgcggaccagcgtgctgcggctgctgggccggaccggcgcctctcgtctgagcctgctcgaggacttcggccccagatattactcctctggttccctgtccgccggcgatgacgcttgcgacgtgagggcttacttcactacaccaattttttatgtgaatgcggcacctcacatcggccacttgtacagcgccctgctggccgacgcactttgccgacataggaggctgcgggggccaagcacagccgcgacacggttttctacaggtaccgacgagcacggcctgaagatccagcaggccgcggcgacagcgggactcgccccaaccgaactgtgtgatcgagtcagcgaacagttccagcaactgttccaagaggctggaatttcctgcacagacttcatcagaactaccgaggcacgtcacagggtagccgttcagcatttctggggagtgctgaaaagtagaggcctgctgtacaaaggcgtttatgagggatggtactgcgcctctgacgagtgcttcctccccgaagctaaggttacccaacagcccggaccctccggcgacagctttccagtgagcctggagagtgggcatccggtgtcttggactaaagaggaaaactacatattcaggctttctcagttccgaaaaccactgcaacggtggctccgcggcaacccacaggccattacgcccgaaccattccaccatgtagttctccaatggctggatgaggaacttcccgacctcagtgtgtctcggcggagcagccatctgcattggggtattccagtcccaggagacgactctcaaactatatacgtctggctcgacgcacttgtgaactatctgactgtgattggatatcccaatgctgagttcaagtcatggtggcccgccacctctcatatcatcggcaaagacatcctcaaatttcacgccatctactggccagcctttctgctgggagcagggatgtctcctccacagcgaatctgtgttcacagccattggaccgtgtgtggtcaaaagatgtccaaatctctgggaaacgtggtggaccccaggacttgcttgaatcggtacactgtcgatggattcagatacttcctgctgcgacagggtgtcccaaactgggattgtgactattacgacgaaaaagtagttaagctgctgaactccgaactcgctgacgccctcggggggctgcttaacaggtgtactgcaaagcgcataaacccatccgaaacatacccagccttctgcaccacctgtttcccatctgagccaggactagtaggcccttccgtgcgggcacaggcagaggactacgcactggtctccgccgtcgccactttgcctaagcaagtggccgatcactatgataactttcggatttacaaggcccttgaagcagttagtagctgtgttaggcagacgaacggattcgtccaaagacacgctccttggaagttaaactgggagtctcccgtagatgcaccatggctgggaacagtcctacatgtggcattggagtgcctccgcgtgtttggcacgttactccaacctgtgactccctccctagcggacaagctgctgtcccgtcttggcgtctccgccagcgagaggagcctgggggaactgtattttctcccgagattctacgggcatccttgtccattcgaaggaaggcgcctcggtccagagaccggactgttatttccccgtctggaccagtctcgcacatggctcgttaaggctcaccggacctag

SEQ ID NO: 236409 - DNA, 1563 bp, Artificial Sequence
  derived and/or modified sequence
atgctgcggaccagcgtgctgcggctgctgggccggaccggcgcctctagactgagtttgctggaagactttggcccgcggtactattcctccggatccctcagcgccggcgatgatgcttgtgatgtgcgcgcctacttcaccactcctattttctatgtgaatgcggcaccacatataggccatctctatagtgccctactggccgatgcactttgtcggcacagacgcctccgggggccgagcacagcggcaacccgattctccacaggtactgacgaacatggcctgaaaatccagcaggcagccgctactgctggcctggccccaacagaactgtgtgacagagtgtccgaacagttccagcagttgtttcaagaggctggaatctcatggactaaagaggagaattacatcttcagactgtcccagttcagaaagcctttgcaacgctggctccgagggaacccacaggcaatcacccccgaacccttccatcacgtagtgttgcagtggctcgatgaggaactaccagatcttagcgtgtctaggcgcagtagccacctacactggggcattccagtgccaggggatgacagtcagactatctacgtatggctggatgcacttgtgaattatctgactgtgatcggctaccctaatgcggaatttaaatcttggtggccagccaccagccacatcattggcaaggatatcctgaaattccacgccatctactggccggcattcctcctgggcgccggcatgagtcctccacagcggatttgtgtgcactcccattggacagtctgcggccaaaagatgtccaaatcactcgggaacgtcgtagatccccgaacctgcttgaaccggtatactgtggacggctttagatactttctgctgcggcaaggagttccaaactgggactgcgactattatgatgagaaggtggtgaagttgttgaatagcgagctggcagatgccttggggggactattgaaccgatgcaccgcaaagagaattaaccccagtgagacatatccggccttttgcactacctgttttccgagcgagccaggactggtcggcccgtctgtgagagcccaggccgaagactacgcgttggtatctgcggtcgctaccctccctaaacaggtcgcagatcattatgacaatttccggatctacaaggctctggaagcagtgagctcttgtgttcgccagaccaatggcttcgtacaaaggcacgccccttggaagctcaactgggagtcccctgtggacgctccatggctggggacagtgcttcatgtcgccctcgagtgtctgcgtgtgttcggtaccctgctgcagccagtgaccccatcacttgcggacaaactgctctctagacttggcgtaagcgccagcgagcgctccttgggggaattgtactttctcccccgcttctacgggcacccgtgcccatttgaaggaaggaggctgggcccagagacaggtcttctctttcctagactagaccagtccaggacatggttggtgaaagcacatcgcacttag

SEQ ID NO: 236410 - DNA, 1782 bp, Artificial Sequence
  derived and/or modified sequence
atgttgaggaccagcgtgctccggctgctgggcagaactggtgcgagtagactatctctgcttgaagacttcggcccacggtattactccagtgggtcactgagcgcaggcgatgacgcctgcgacgtaagagcgtactttaccacgccaatcttctatgtgaatgcagcaccccatatcggtcatctttactcagcccttctggccgatgcactctgtcggcatcggagattgcgaggacccagtacggctgccaccaggtttagcactggcaccgacgagcatggtctaaaaatccagcaggcagccgctactgccggtctcgcaccgacggaactttgcgaccgtgtctcagaacagtttcaacaactgttccaagaggccggtatcagctgcaccgactttataaggacaacggaagctcgccatcgggttgccgtgcagcatttctggggggtgttaaaatcccgagggctcctgtataagggggtctatgagggctggtactgtgcgagcgacgagtgctttctccccgaggccaaggtgacgcagcagccaggcccaagcggagattccttcccagtcagtctggagtctggccatccagtgtcgtggactaaggaagagaactatatatttaggcttagtcagttccgtaaaccattgcagcgatggctccggggaaaccctcaggcaatcactcctgaaccttttcaccacgtggtgttacagtggcttgacgaggaacttcccgacctatcggtaagccggcgtagctcccacctccactgggggatccctgtgcctggcgatgatagtcagacaatctacgtgtggctggatgctctcgtgaattatcttaccgtaatcggctatccgaatgccgagttcaagagttggtggccagctacatcgcacatcattggaaaggacatcctcaagttccacgctatttactggcccgcattcctcctgggggctggaatgtcaccccctcaaaggatttgtgtccattctcactggactgtttgtggccagaaaatgtctaaatcacttggcaacgtcgtggaccctagaacatgtcttaacaggtacaccgtggatgggtttcggtacttcctactcagacagggtgtacccaactgggattgcgactattatgatgaaaaggtggttaaattactgaactcggagcttgcagacgccctgggcggtttattgaaccgatgcactgctaagcgcataaatccttctgaaacttatcccgctttctgcaccacctgcttcccatcagagccgggactcgtgggcccaagcgtaagggcacaggctgaggactatgcactggtgtccgccgtggctacgttgccaaagcaggtggcggatcactacgataactttaggatttacaaggccttagaagccgtgagcagctgtgttcggcagacaaacggctttgtgcaaaggcatgccccttggaagctgaactgggaatctcccgtggatgccccatggttagggactgtgctccacgttgccctggagtgtctcagagtgtttggcactctgctccagcctgttacgccaagcctagccgataagctgctgtcaagacttggcgtctccgcaagcgagcgcagcctgggcgaactgtatttcttaccacgcttttacgggcacccgtgtcccttcgaaggcagaaggctgggacctgagactggactgttgttccctagattagaccagtctagaacttggcttgttaaggctcacagaacctag

SEQ ID NO: 236411 - DNA, 1563 bp, Artificial Sequence
  derived and/or modified sequence
atgcttcgaactagtgtcctgaggttattgggcaggaccggggctagccgtctctcccttttagaagacttcggaccaagatactacagcagtggttctctatccgcaggcgatgacgcttgtgacgtgcgggcttattttaccacccccatcttttatgtgaatgccgctccacatattggtcacctctattcggctctgctggcagatgccctgtgtcgacaccgccgactcagaggaccttccacagcggcaacccgcttcagcacagggaccgatgagcacggcctgaaaattcagcaggcagcggcaactgccggattggccccaacagagctgtgcgatagagttagtgaacaatttcaacagctgtttcaggaggctggcatttcctggaccaaggaggagaactacattttcaggttgtcacaattcaggaaaccacttcagcggtggctgcgtgggaatccccaagctatcactccagaacccttccatcatgtcgttctgcagtggctggacgaggagctccccgacctaagcgtttcccggaggagttcccatctgcactggggaatccctgtgcccggtgatgactcccaaaccatctacgtctggctggacgcgttggtcaactatctgaccgttataggctaccctaatgccgaattcaaaagctggtggcccgctacaagtcatattatcggtaaggatatccttaaatttcacgccatttattggccagcctttttattaggtgctggcatgagccctccacagcgaatctgtgtgcattcccattggactgtatgtggacaaaagatgtctaagtcactgggcaatgtcgtggatccgagaacatgccttaatcggtacactgtcgatggtttcaggtatttcctcctgagacagggggtcccaaattgggattgcgactattacgatgaaaaagtggtcaaactcctgaacagcgagctggccgacgcactgggaggcctgctgaataggtgcaccgccaagagaatcaacccatcagaaacctatcctgctttttgtactacgtgttttcccagtgaaccaggccttgtggggcctagcgtgcgcgctcaggccgaggattacgctcttgtgagcgcagttgcgacgctgcccaaacaggtggctgaccattacgacaatttccgcatttataaagcccttgaagcagtgagttcttgtgtgcggcaaactaatgggttcgtccagcggcatgcaccatggaagctgaactgggagtcgcccgtggacgcgccatggctgggcaccgtcctgcatgtagccctagaatgcctgagggtgtttgggacattgctccagccagtgaccccctcgttggcggacaaactgctcagtagacttggagtgtctgcctccgagaggagtcttggggagctctacttcttacctcggttctatgggcacccttgccctttcgagggccgtcgactggggcctgaaacaggtctgcttttcccgagactcgaccagagccgcacttggctagttaaggcgcatagaacttag

SEQ ID NO: 236412 - DNA, 1782 bp, Artificial Sequence
  derived and/or modified sequence
atgctgagaaccagcgtgctgagactgctgggcagaaccggcgccagcagactgagcctgctggaggacttcggccccagatactacagcagcggcagcctgagcgccggcgacgacgcctgcgacgtgagagcctacttcaccacccccatcttctacgtgaacgccgccccccacatcggccacctgtacagcgccctgctggccgacgccctgtgcagacacagaagactgagaggccccagcaccgccgccaccagattcagcaccggcaccgacgagcacggcctgaagatccagcaggccgccgccaccgccggcctggcccccaccgagctgtgcgacagagtgagcgagcagttccagcagctgttccaggaggccggcatcagctgcaccgacttcatcagaaccaccgaggccagacacagagtggccgtgcagcacttctggggcgtgctgaagagcagaggcctgctgtacaagggcgtgtacgagggctggtactgcgccagcgacgagtgcttcctgcccgaggccaaggtgacccagcagcccggccccagcggcgacagcttccccgtgagcctggagagcggccaccccgtgagctggaccaaggaggagaactacatcttcagactgagccagttcagaaagcccctgcagagatggctgagaggcaacccccaggccatcacccccgagcccttccaccacgtggtgctgcagtggctggacgaggagctgcccgacctgagcgtgagcagaagaagcagccacctgcactggggcatccccgtgcccggcgacgacagccagaccatctacgtgtggctggacgccctggtgaactacctgaccgtgatcggctaccccaacgccgagttcaagagctggtggcccgccaccagccacatcatcggcaaggacatcctgaagttccacgccatctactggcccgccttcctgctgggcgccggcatgagccccccccagagaatctgcgtgcacagccactggaccgtgtgcggccagaagatgagcaagagcctgggcaacgtggtggaccccagaacctgcctgaacagatacaccgtggacggcttcagatacttcctgctgagacagggcgtgcccaactgggactgcgactactacgacgagaaggtggtgaagctgctgaacagcgagctggccgacgccctgggcggcctgctgaacagatgcaccgccaagagaatcaaccccagcgagacctaccccgccttctgcaccacctgcttccccagcgagcccggcctggtgggccccagcgtgagagcccaggccgaggactacgccctggtgagcgccgtggccaccctgcccaagcaggtggccgaccactacgacaacttcagaatctacaaggccctggaggccgtgagcagctgcgtgagacagaccaacggcttcgtgcagagacacgccccctggaagctgaactgggagagccccgtggacgccccctggctgggcaccgtgctgcacgtggccctggagtgcctgagagtgttcggcaccctgctgcagcccgtgacccccagcctggccgacaagctgctgagcagactgggcgtgagcgccagcgagagaagcctgggcgagctgtacttcctgcccagattctacggccacccctgccccttcgagggcagaagactgggccccgagaccggcctgctgttccccagactggaccagagcagaacctggctggtgaaggcccacagaacctag

SEQ ID NO: 236413 - DNA, 1563 bp, Artificial Sequence
  derived and/or modified sequence
atgctgagaaccagcgtgctgagactgctgggcagaaccggcgccagcagactgagcctgctggaggacttcggccccagatactacagcagcggcagcctgagcgccggcgacgacgcctgcgacgtgagagcctacttcaccacccccatcttctacgtgaacgccgccccccacatcggccacctgtacagcgccctgctggccgacgccctgtgcagacacagaagactgagaggccccagcaccgccgccaccagattcagcaccggcaccgacgagcacggcctgaagatccagcaggccgccgccaccgccggcctggcccccaccgagctgtgcgacagagtgagcgagcagttccagcagctgttccaggaggccggcatcagctggaccaaggaggagaactacatcttcagactgagccagttcagaaagcccctgcagagatggctgagaggcaacccccaggccatcacccccgagcccttccaccacgtggtgctgcagtggctggacgaggagctgcccgacctgagcgtgagcagaagaagcagccacctgcactggggcatccccgtgcccggcgacgacagccagaccatctacgtgtggctggacgccctggtgaactacctgaccgtgatcggctaccccaacgccgagttcaagagctggtggcccgccaccagccacatcatcggcaaggacatcctgaagttccacgccatctactggcccgccttcctgctgggcgccggcatgagccccccccagagaatctgcgtgcacagccactggaccgtgtgcggccagaagatgagcaagagcctgggcaacgtggtggaccccagaacctgcctgaacagatacaccgtggacggcttcagatacttcctgctgagacagggcgtgcccaactgggactgcgactactacgacgagaaggtggtgaagctgctgaacagcgagctggccgacgccctgggcggcctgctgaacagatgcaccgccaagagaatcaaccccagcgagacctaccccgccttctgcaccacctgcttccccagcgagcccggcctggtgggccccagcgtgagagcccaggccgaggactacgccctggtgagcgccgtggccaccctgcccaagcaggtggccgaccactacgacaacttcagaatctacaaggccctggaggccgtgagcagctgcgtgagacagaccaacggcttcgtgcagagacacgccccctggaagctgaactgggagagccccgtggacgccccctggctgggcaccgtgctgcacgtggccctggagtgcctgagagtgttcggcaccctgctgcagcccgtgacccccagcctggccgacaagctgctgagcagactgggcgtgagcgccagcgagagaagcctgggcgagctgtacttcctgcccagattctacggccacccctgccccttcgagggcagaagactgggccccgagaccggcctgctgttccccagactggaccagagcagaacctggctggtgaaggcccacagaacctag

SEQ ID NO: 236414 - protein, 860 aa, Artificial Sequence
  derived and/or modified sequence
MAASRSAGEAGPGGSQGRVVRMKRRGGRGPRRGPAGGGEKALKRLKLAVEEFVHATSEGEAPGGCEGRGAPVSFRPGGRKSRKELRKEKRHLRKARRLQRTAGPEQGPGLGGRSGAEEASGHRQDTEERARPAPSRDPSPPRKPRPSRVKAKATAATAKTRPSAAATAAARKRALLAANEEEDREIRKLERCLGLNKRKKKDGSSSVPLSFARDGLDYILGALESGKNSGLYDSSGEEEEDAGQTLPESDLESDSQDESEEEEEGDVEKEKKAQEAEAQSEDDDEDTEEEQGEEKEKGAQEKRRGKRVRFAEDEEKSENSSEDGDITDKSLCGSGEKYIPPHVRQAEETVDFKKKEELERLKKHVKGLLNRLSEPNMASISGQLEELYMAHSRKDMNDTLTSALMGACVTASAMPSRLMMEHVLLVSILHHTVGIEVGAHFLEAVVRKFDAIYKYGSEGKECDNLFTVIAHLYNFHVVQSLLIFDILKKLIGTFTEKDIELILLMLKNVGFSLRKDDALSLKELITEAQTKASGAGSEFQDQTRIRFMLETMLALKNNDMRKIPGYDPEPVEKLRKLQRALVRNAGSGSETQLRVSWDSVLSAEQTGRWWIVGSAWSGAPMIDNSHHTHLQKQLVGTVSSKILELARKQRMNTDIRRNIFCTIMTSEDFLDAFEKLLKLGLKDQQEREIIHVLMDCCLQEKTYNPFYAFLASKFCEYERRFQMTFQFSIWDKFRDLENLPATNFSNLVHLVAHLLKTKSLSLSILKVVEFSELDKPRVRFLRKVLSILLMETEVEDLSLIFTRVSDNPKLGVLREGLKLFISHFLLKNAQAHRSADEANVLREKADLATKCLQGKASLRM

SEQ ID NO: 236415 - DNA, 2583 bp, Artificial Sequence
  derived and/or modified sequence
atggcagcctccaggtctgctggagaggcaggacccggcgggtcacaggggagagtcgtccgtatgaaaagacggggcgggaggggacccagacgcggcccagctgggggtggtgaaaaggcgctgaaaaggcttaaactggccgtggaggagttcgttcatgctaccagcgagggtgaagccccaggcgggtgcgagggtaggggagcccccgtctcatttaggcctggcggacgcaaatcacggaaagagctccgtaaggagaaaaggcatctcaggaaagcaagacgattacagcggaccgctggccccgagcaaggtccagggttgggcggacgaagcggcgcggaggaagcctctggacaccggcaggacactgaagagagggcaagacccgcccctagccgggacccatcccccccaagaaagccaaggccctctcgtgtcaaggcaaaggccaccgcagctacagcaaaaacacggccatccgccgccgctacggctgccgcaagaaaacgcgcactcctggctgctaatgaggaggaagatcgggaaattaggaaacttgagcgctgcttgggcttgaataagcgcaaaaagaaagacgggagttcctctgtgcccttatctttcgcaagagatggtctcgattacatcttgggggcactggaatcaggaaagaattctggcctgtacgactcttcaggagaggaggaagaggacgcgggccagacgctgcctgagtcggatctggagagcgatagccaggacgaatctgaggaagaagaagaaggtgatgtagaaaaggagaagaaggcccaggaggcggaggcccagagtgaggacgacgacgaggataccgaagaggaacagggggaggaaaaagaaaagggtgcccaggaaaagcgccgtggtaagcgcgtgagattcgccgaggacgaagagaaatctgagaacagctcagaagatggggacattaccgacaaatcactgtgcgggagcggggagaaatatatccctcctcacgtgagacaggccgaggagacagtggacttcaagaagaaagaggaattggagagactgaaaaagcacgtcaagggtctccttaatcggctgtccgaacctaatatggccagcattagtgggcagctcgaggaactgtacatggctcattctcggaaagatatgaacgacacgcttacatcggcactgatgggcgcctgcgttacagccagcgccatgccttctaggctcatgatggaacatgtgctgctggtgagtatactacaccacactgtggggatcgaagtgggagcccacttccttgaagcagtagtgcgtaagtttgatgctatctacaaatacgggagtgagggaaaggagtgtgacaacctctttacagtcatagcccacttatacaacttccacgttgtgcaaagtcttttgatcttcgacatcttgaagaaactcattggaactttcacggagaaagacatcgagctgattctgctaatgctgaagaatgtgggattctcactgaggaaagacgatgccctgtctttgaaggagttaataacagaggcacagacgaaggcttccggggccggcagcgagtttcaggaccagacacggattcgatttatgctcgaaaccatgctggcgttgaagaataatgacatgaggaagattcccggttatgaccctgagcccgttgagaagctacgcaagctgcaaagggctctcgtgagaaacgctggaagcggctcagaaacccagctgagggtgagctgggactccgtattgtctgcggaacagacaggacgctggtggatcgtcgggtctgcctggtccggcgcccctatgatcgacaacagccaccatacacatttgcagaaacaactggttggaacagtgtccagtaaaatcctcgaacttgctaggaagcagcggatgaatactgatattcgtaggaatatcttctgcaccataatgacctccgaggatttcttagatgccttcgagaaactgctgaaactggggctcaaagatcagcaagagcgtgagattatccacgtactcatggattgttgcttgcaggagaaaacatacaacccattttatgcattcctggcgagcaagttttgcgagtatgagagaagattccagatgacgtttcagttctccatctgggacaagtttagagacctggagaatctaccagcgacaaatttctcgaacctggttcacctggtggcccatcttttgaagactaagagtctttctttatcgatcttaaaagtcgttgaattctccgagctggataaaccccgggttagattcctgcgcaaagttctctccattcttctgatggagaccgaagtagaggacctgagcctgattttcacgcgtgtgagcgacaaccccaaattgggggtgttaagagagggactgaagttatttatttcccacttccttctgaaaaatgcccaggctcatcgctctgcggacgaggctaacgtgctgagggaaaaggccgatctcgcgacaaagtgtctgcaggggaaagctagtttgaggatgtag

SEQ ID NO: 236416 - DNA, 6077 bp, Artificial Sequence
  derived and/or modified sequence
cacgcgtttcgaaagatggcggcgtccaggagcgcgggagaggccggcccgggcggctcccagggacgcgtggtccgcatgaagcgcagaggcgggcgcgggccgcgccgcggtcctgctggcggtggggagaaggccctgaagaggctgaagctagcggtggaggagttcgtgcacgcgacttcggaaggcgaggctcccgggggttgcgaggggcgcggcgccccggtgagctttcgcccgggagggagaaaaagccgtaaggaactgaggaaggagaagcggcacctgcggaaagcacgccggctgcagaggacggcgggccccgaacagggtcccggcctgggaggccgaagcggagccgaagaagccagcggtcaccggcaggacacggaggagcgcgcccgcccagcccctagtcgggacccctcgcctcccaggaagccgcggccgtcccgggtcaaggccaaggccacggccgccaccgcaaagaccagaccctccgcagccgccaccgccgctgcccggaaacgggcgcttttagcggcgaacgaggaggaggaccgagagatccgaaagctggagcgttgcctcggtttgaacaagcgcaaaaagaaggacggcagcagctccgtgccgctgagctttgcacgcgacggtcttgactatattctgggagccctggagtctgggaaaaatagcggcttgtacgacagcagtggtgaggaggaggaagatgccggacagacactccccgaaagtgacttagagagtgactcccaggacgaaagtgaggaggaggaggagggagacgtagaaaaggaaaagaaggcgcaggaagcagaagcgcagagcgaggacgacgacgaggatacagaagaggaacagggggaagaaaaggaaaagggagcgcaggagaaaaggagggggaagagagtccgttttgcagaagatgaagaaaagagtgaaaattcctcggaggacggtgacataacggataagagtctttgtggaagtggtgaaaagtacatcccacctcatgtgaggcaagctgaggagacagtggacttcaagaaaaaggaagaactagaaaggctgaagaaacatgtaaaaggtctacttaacaggttgagtgaacccaacatggcttccatcagtgggcagctggaggaactgtacatggcccacagcagaaaggacatgaatgacaccctgacctccgctctcatgggtgcctgcgtcactgcctcggccatgcccagcagactgatgatggagcatgttctcttagtcagcatccttcaccacacagttggaatcgaggtcggtgcccactttctggaggcagtggtgaggaagttcgatgccatctataaatacggaagcgaagggaaagagtgtgacaacctgttcaccgtcattgcccatttatacaacttccacgtggtacagtctctcctcatcttcgacattttgaaaaaactgattggaactttcaccgaaaaagatattgaactgatcttgttaatgctgaaaaacgtgggtttttcattgaggaaagatgatgctttatcacttaaggaattgatcactgaagcccagaccaaagccagcggggcaggcagcgagtttcaggaccagaccaggattcggtttatgctagagacgatgttggccctgaagaacaatgacatgcgcaaaattccaggctatgaccccgagcccgtggagaagctgaggaaactgcagagagctttggtccgcaacgccggctcaggttctgagacgcagcttcgcgtctcctgggacagtgtcttgagtgcggagcagacgggtcgctggtggattgtggggtccgcctggagtggggccccgatgatcgacaacagtcaccatacgcacctgcagaagcagcttgtggggacggtcagttcaaagatcctagaactcgcccggaagcagaggatgaacacagacatccggagaaacatattctgcacaataatgacaagtgaagattttttggatgcttttgaaaagcttctgaagcttggacttaaggatcagcaggagagagaaatcattcacgttctcatggattgctgccttcaagagaaaacttacaatcccttctatgctttcctggctagcaaattctgtgaatatgaaaggagatttcagatgactttccagttcagcatatgggacaaatttcgggacttggaaaacttgccagctacgaatttctctaatttggttcatctggtggcccacttgttgaagacaaaatcgctttccctttccatcttaaaggtagttgaattcagtgaattggacaaacccagagtccgttttttacgaaaagtattaagtatcctattaatggaaacagaagttgaagacctcagtttaattttcacaagagtatctgacaacccaaagctgggggtgttacgtgagggtttgaagcttttcatcagccacttcttgctaaagaacgcacaggcccacagaagcgccgacgaagccaacgtgctgagagagaaagctgaccttgcaacgaagtgtctgcaaggaaaagcttccctgagaatgtagtcagggaaggaaggagggcaggtggccctttgactgtaaaatgtccttggtaaacccaaaggcttattctgttgcctgcgtgtgaatgtttggtagagctatatcattgtctgttaatgtattatattttgagattttttttgatctaaggttttattgtttgtatttcaagccattttcaaataactatcttgggggtgagaggagaaggagggagggaaaaggggtcaggcacactggacagggttctctaagcagtgaggctggtgtgtatgattgtcttaaaattttttaatagatatggccgagcgtgatggctcacccctgtaatcccagcactttgtgaggccaaggtgggcggatcacttgaggccaggaatttgaaaccagcctgggcaaaaccctgtctctactaaaaatataaaaattagccaggcatgatggcacatgctggtaatagcagctactgaggtggctgaggcacaagaattgcttggaccctggaggtagaggctgcagtgagccaagattgtaccactgtactccagcctgggctggacagtgagacttttgacagtgagactgtcaaaaaaaaaaaaaaaattaatagataaaacaggccactagagggtgcagttataaagaaattgatgaggtttttacctttttaaaatattggttagaagttcaaaaaccatcccttaaaggtgattgtttttttgagacagagtcttgctctgtcacccagagtggagtgcagtgtcctgtaatctcagctcactgcaacctctacctcccgggttcaagcgattctcctgcctcagcctctttagctgggactacaggcgcacgccaccacgcccggctaatttttgtattttagtagagatgggtttcaccatgttggcaaggctggtcttgaactcctgacctcaggtgatacacccatctcggcctcccaaagtgctgggattacaggcttgagccaccacgcccagcttaaatgtgattcttgatactgttttaagtatttaggttgcaattaactttggcaaagtcagtcgacataagccctgtggatatggccttatgtacactgtaatgcagacaggtgcttttcatcattcatgtaacattctcacacagttgaggatattcatctcctcaccaattccagattgtaaatgtaccatcttaaacaactctgaggtcaccaaacagtagttatttgactgttaataggtgctacttgcttgcaaggatttggagatgtaaacatgaagaaaatatagttactgcctgcaaagaattaacatccgtctagtgggagaaacaaacacaccccactcactaagtatggaaaactgattctgggaggaagcagaaatgtccctagataacagcatgtattgcagatacccaaatgtttattgttttctcagcccttcaattttgcttttctctctcaaatgctacagactcaatttaaatcttacctttgattgttgaaaaaagtcactaagatgtgaatacagaatagacattgagaggttatatatgtccaaaactcatctgtccagcagtcaccgtcctcttcagagtggtcacgttgggcagatgggcacaggtgctggtgatgcctctcctgggcaaaacgccccatttgtggcactttcagatactatttatttactttttaagagagagacaggctcactctgtcacccaggccagagtgcagtggcacgatcatagttaccgcagcatcaaattcctggactgaagcggtccttttgcctcagcctcgcggatagctaggaccacaagcagtagagacaagatctccgtatgttatacaggctggcctcaagtgatcctcttaccttggcctcccaaacaccgggattataggcgtgagcccccgtgcctggcctcaaattttattttagctcgaccctatggcagtttgtgtttggaaatcgtgatgtgaagtcatcagtatctgtgcatatccctaaactaatggtttaagctttgaagcatgcgcaagcaacatgaacaactgaatacagaaagtaactgaaagcagcacagagactgtgtcgtccctacagacttctaaccctgcattcagcaacatcattcgacccgaagccagattcaaaccctatgtcttctagcaggttctgaatttagaggacaaataaggtgacaggtactaagagaagagtgaattaagtgaaaatcttccctttgttaaggagctttttaacaagagtgtctttgctgggtggtgattgggatgtaacagatcagttctactggacttgtagcttgatagtgaaataaggagcttgggctaaggtataaatcaacacactgcttccttcctccagaaggtcttactgtgaaggaaaaaatgtcagttgaactaaattgtgcttcacgcctcggtagatttgcattctgatgcaagcccccaacctcacggaccaagaggatccctggctgcctgtgaatggcccacatttgagtggtgctaacttgatgtgagtaggcattaattatgggtgcggctactaagatgggaaaaactatcacgacagtggcaccacctgatttcatgatgtaccatatgcagtaacccatgtttgaggtacagaattgaagctgatttttctgcaaaagatgaatttctataaacaatcccatttttatattttattattaaaacaaaaatacctctctttgctagagagttatatgtatgacttaaattattagctatggtttgcatttagtacatggcagattgcctgtaagtctgttcattttaacaacatacagggctgggcacggtggctcacgcctgtaatcccagcactttgggaggttgcgggtggatcacttgaggtcaggagttcgagaccagcctggccaacatggcaaaaccccgtctctatgaaaaatataaaaattagctgggcatggtggcaggcacctgtaatcccagctactcgggaggctgaggcaggagaatcgcttgaacctgggaggcggatgttgcagtgagcagagatcgtgccattgcactccagcctgggaacaagagtgaaactctcaaaagcagaaacaaaaacccaacatatatgggctgttagatagtaattgtaatttcgtataaatagtaaatgagtacatcttgattaaaagctatgaattcagaattgcttttaaatatatagggggttttttgaaatttattacagtgcaattgaaaatacacttaaaatactgcaggatgcttagtgctcagtgttatgtatgaacttgtggactttacaatgcaggttgagaactgctaatgtatagaatgactaaacagctgtctttcagggtatcatttttaaaggtataaggaacaaactttaatgtattgaaatgcataaataaaatttattttttatattttgtttaga

SEQ ID NO: 236417 - DNA, 2583 bp, Artificial Sequence
  derived and/or modified sequence
atggccgccagccgctctgctggggaggccggccctgggggcagccagggccgggtggtgaggatgaagaggcggggcggccggggcccccggcggggccctgctgggggcggggagaaggccctgaagaggctgaagctggccgtggaggagtttgtgcacgccaccagcgagggggaggcccctgggggctgtgagggccgcggggcccctgtgtccttccggcctgggggcaggaagagcaggaaggagctgaggaaggagaagaggcacctgaggaaggcccggcggctgcagaggacagctggccctgagcagggccctggcctgggcggccgcagcggggctgaggaggccagcggccaccggcaggacacagaggagcgggcccggcctgcccccagccgggaccccagcccccccaggaagccccggcccagccgggtgaaggccaaggccacagctgccacagccaagacccggcccagcgctgctgccacagctgctgccaggaagagggccctgctggccgccaatgaggaggaggaccgggagatcaggaagctggagcgctgcctgggcctgaacaagaggaagaagaaggatggcagcagctctgtgcccctgagctttgccagagatggcctggactacatcctgggcgccctggagagcggcaagaacagcggcctgtatgacagcagtggagaggaggaggaggatgctggccagaccctgcctgagagtgacctggagagtgacagccaggatgaaagtgaggaggaggaggagggagatgtggagaaggagaagaaggcccaggaggccgaggcccagagtgaagatgatgatgaggacacagaggaggagcagggcgaggagaaggagaagggggcccaggagaagagaagaggcaagagggtgcgctttgctgaagatgaggagaagtctgagaacagcagtgaagatggagacatcacagacaagagcctgtgtggcagcggggagaagtacatccccccccacgtgcggcaggccgaggagaccgtggacttcaagaagaaggaggagctggagcggctgaagaagcacgtgaagggcctgctgaaccggctgtctgagcccaacatggccagcatcagcggccagctggaggagctgtacatggcccacagcaggaaggacatgaatgacaccctgaccagcgccctgatgggcgcctgtgtgacagccagcgccatgcccagccggctgatgatggagcacgtgctgctggtgtccatcctgcaccacacagtgggcatcgaggtgggcgcccacttcctggaggccgtggtgaggaagtttgatgccatctacaagtatggcagcgagggcaaggaatgtgacaacctcttcaccgtgattgcccacctgtacaacttccacgtggtgcagagcctgctgatctttgacatcctgaagaagctgattggcaccttcacagagaaggacatcgagctgatcctgctgatgctgaagaatgtgggcttcagcctgaggaaggatgatgccctgagcctgaaggagctgatcacagaggcccagaccaaggccagcggggccggcagcgagttccaggaccagacccgcatccgcttcatgctggagaccatgctggccctgaagaacaatgacatgaggaagatccctggctatgaccctgagcctgtggagaagctgaggaagctgcagagggccctggtgagaaatgccggcagcggcagcgagacccagctgcgggtgtcctgggacagcgtgctgtctgctgagcagacaggccgctggtggatcgtgggcagcgcctggagcggggcccccatgattgacaacagccaccacacccacctgcagaagcagctggtgggcaccgtgagcagcaagatcctggagctggccaggaagcagaggatgaacacagacatcagaagaaacatcttctgcaccatcatgaccagcgaggacttcctggatgcctttgagaagctgctgaagctgggcctgaaggaccagcaggagcgggagatcatccacgtgctgatggactgctgcctgcaggagaagacctacaaccccttctacgccttcctggccagcaagttctgtgaatatgaaagacgcttccagatgaccttccagttcagcatctgggacaagttccgggacctggagaacctgcctgccaccaacttcagcaacctggtgcacctggtggcccacctgctgaagaccaagagcctgagcctgagcatcctgaaggtggtggagttcagcgagctggacaagccccgggtgcgcttcctgaggaaggtgctgagcatcctgctgatggagacagaggtggaggacctgagcctcatcttcaccagggtgtctgacaaccccaagctgggcgtgctgcgggagggcctgaagctgttcatcagccacttcctgctgaagaatgcccaggcccacaggtctgcagatgaggccaacgtgctgcgggagaaggctgacctggccaccaagtgcctgcagggcaaggccagcctgaggatgtag

SEQ ID NO: 236418 - DNA, 2583 bp, Artificial Sequence
  derived and/or modified sequence
atggccgccagccggagcgccggcgaggccggccccggcggcagccagggtcgtgtcgtgagaatgaaacggcgtggaggacgagggcctcgacgcggccctgcggggggtggcgaaaaggccctgaagcggttaaaacttgccgtggaagaattcgtccacgcgacctccgaaggggaggcaccaggcggctgtgagggcagaggcgcccccgtcagcttcagacccggcggaaggaaaagcaggaaggaacttcggaaagaaaaaaggcacctgcggaaagcgcgtaggctacagcgcactgccggcccagaacagggacccggcctcggaggaagatccggggctgaggaggcctctggccacagacaggacacggaggaacgggcgcggccagcgccttcgagggatccttcccccccccgcaagccgaggccaagtcgagtaaaggccaaagccaccgccgctactgcgaaaacccgcccaagtgctgctgccaccgctgccgctaggaagcgggcactactcgctgcgaacgaggaagaggacagagagattcgaaagcttgaaagatgcctgggcttgaacaagcgaaagaaaaaagacggctctagcagcgtgccgctctcattcgcacgcgacgggctcgattacatcctcggcgcattggaatctgggaagaactctgggctctatgattcatcaggcgaagaggaggaggacgccgggcagaccttgcctgagtccgatctggagtccgattcgcaagacgagtctgaggaagaggaggagggagatgtcgaaaaggaaaaaaaagcacaagaggccgaggctcagtctgaggacgatgatgaagacacagaggaggaacagggggaggaaaaggagaagggcgcacaagaaaagcgacgcggtaagcgtgtgcgatttgcagaagatgaggagaagagcgaaaattcatcagaggacggtgacattaccgataaatccctatgtggcagcggcgaaaaatatattccacctcatgtgaggcaggctgaggagactgtcgatttcaaaaaaaaggaagagctagagcgtctcaaaaaacacgtcaaggggctgctgaatagactgagtgaaccgaatatggccagtatctcaggccagctagaggagctgtatatggcccactctcgaaaggatatgaatgatacgctcacatccgccttgatgggtgcctgtgtaaccgcaagcgcaatgccatcaagattgatgatggagcacgtcctgctagtgtctatcctgcatcacaccgttgggatcgaagtaggcgcacatttccttgaggccgtagttagaaagttcgatgcgatctacaagtacggcagtgaaggcaaggagtgtgataatctgtttactgtaattgcccacttgtataatttccatgtggttcagtcacttctgattttcgacatcctgaagaagctcatcggtaccttcactgagaaggacatcgagctgattctcctcatgctgaaaaatgtgggattttctctccgaaaagatgatgccctctctcttaaggaacttattacggaggcccagactaaagcatccggtgctggatccgagttccaagatcagactcggattagatttatgctcgaaactatgcttgcactcaaaaataacgatatgagaaagatcccaggctacgaccctgaacctgtggagaagctgaggaaactgcagagagccctggtaaggaacgccggaagcggatccgaaacacagctccgtgtctcttgggactcagtacttagtgcggaacagactggtcgctggtggatcgtgggttctgcctggtccggcgcccccatgatcgacaactcacatcacacgcacctgcagaaacagcttgttgggaccgtgtcctctaagattctcgagctggccagaaagcagagaatgaatacagatatacggcggaacatcttctgcacaataatgacttccgaggactttttagatgcttttgaaaagctgttgaaactggggcttaaggaccagcaagaaagggaaatcattcatgtgctaatggattgttgcctgcaagagaagacctataatcccttttacgccttcctggccagcaagttttgtgagtatgaacgcagattccagatgacctttcaattctccatatgggacaaatttcgagatctggagaaccttccagccacaaatttctctaatctcgtgcatttggtggctcatctgctaaagaccaaatcgctgagtctcagtattctgaaggttgtggagtttagcgagctggacaagccccgtgttagattcttgcgaaaggttctcagtatcttgctgatggaaaccgaggtcgaagacttgagtcttatctttacgcgcgtgtccgataatcccaagctgggagtattacgagaaggtcttaagctttttataagtcattttctgctgaaaaatgctcaggcccaccggagtgccgacgaggccaacgttctgagggagaaagctgatctggcaacaaaatgcctgcagggcaaagcttccttacggatgtag

SEQ ID NO: 236419 - DNA, 2583 bp, Artificial Sequence
  derived and/or modified sequence
atggctgctagccggtctgcaggggaggcagggccaggtggctcccaaggtcgggtcgttaggatgaagcgccgtggtggccgtggaccaaggagagggcctgccggaggcggagagaaggcattaaaaaggctgaagctggcggtcgaagagtttgtccacgccacatccgagggcgaggccccaggtgggtgtgaagggagaggcgctcccgtgtcctttaggccagggggacggaaatcccgaaaggagctacgaaaagaaaaacggcatctgcggaaggcgcgtcgcctgcaaagaaccgctggccctgagcagggtccaggcctcggcggaaggtctggcgcagaagaggcctcaggccatagacaggatactgaggagcgggcacgacctgcaccaagtagggatcccagtcccccacgtaaaccgagaccttcgagagtgaaggccaaagccaccgcagcaaccgctaagacaaggccctccgctgcagccacggccgcagctcgtaaaagggctttactggccgcaaatgaggaagaagaccgggagatacggaagctggagagatgcctgggactcaacaaacgtaagaaaaaggatggttcctcctctgtacctttgtccttcgcacgcgatggactggactacatactgggagccctcgagtcaggcaagaattctggattatatgatagctccggcgaagaggaagaggatgccggtcagacccttccggaatctgacctggagagcgacagtcaggacgaatccgaggaggaagaggagggggacgtcgagaaggaaaagaaagcccaggaggctgaggctcaaagcgaggatgacgacgaagacacagaggaagagcagggcgaggaaaaagaaaagggggcacaagaaaaaaggcggggaaagagagtgcggttcgccgaagacgaggaaaaatccgagaattcatccgaagatggagacattaccgacaaatctctgtgcggtagcggggagaagtacattcccccacacgtgaggcaggctgaggagaccgtcgactttaaaaaaaaagaagaacttgagcggttaaaaaagcatgtcaaaggactgctcaatcgcctttccgaaccaaacatggcatccattagtggacaactggaggagctttatatggcccatagcagaaaggacatgaacgatactctgacgtccgcattgatgggagcctgtgtgactgctagcgcaatgccctcacgactgatgatggaacacgtgctgttggtttcgattctgcaccatactgtagggatagaggtgggagctcatttcctagaggcagtggttcgaaagtttgacgccatttacaagtatggatcggaaggcaaggagtgcgataacttattcacagttattgcccacctgtataactttcatgttgttcaatccctgctcattttcgacatactcaagaagctaatcgggactttcacagaaaaggatatagaattgatcctcctgatgctcaaaaatgtgggtttctcactccggaaagacgatgcgttaagtcttaaggagctgattaccgaggcccaaaccaaggcatccggcgctggttccgagtttcaagaccagactcggattaggtttatgctcgaaacaatgctcgcactcaaaaataacgacatgagaaagatcccagggtacgatccagagcctgtggaaaaactgcggaagcttcagcgcgctctcgtccggaatgcgggatctgggtccgagacacagctcagggtatcgtgggatagtgttctgtccgcggagcaaaccgggagatggtggatcgtgggctcagcctggtccggcgctccaatgatagataatagccatcacacccatctccagaaacaactcgtcggcacagtaagcagtaagattttggaactggcaaggaagcaacgcatgaatactgacattagacgcaacatattctgtactattatgacttctgaggatttcctggatgcctttgagaagctgctgaaactcggtcttaaagaccagcaagaaagagagattatccatgtcctgatggactgttgtctacaggagaagacttacaaccctttttacgcgtttctggcctctaagttttgcgagtacgagcggcgattccagatgacttttcagtttagcatatgggataagtttcgtgatctggaaaacctgccggctacaaactttagcaatctcgtgcacctggtggctcaccttctgaagacaaagagcctttcactcagcatcttgaaagtcgtggaattctctgagcttgataaacccagagtacggtttttaaggaaagtgctgagcatcttgctgatggagacagaagttgaagacctttcactgatcttcacccgagtgtctgataacccgaaacttggcgtcctgcgggaaggcttaaaacttttcatctctcacttcctgctcaagaatgcccaggcccaccgaagcgccgatgaagccaacgtgctacgagaaaaggccgatctggccacgaagtgcctgcagggtaaggccagtttacggatgtag

SEQ ID NO: 236420 - DNA, 2583 bp, Artificial Sequence
  derived and/or modified sequence
atggccgccagcagaagcgccggcgaggccggccccggcggcagccagggcagagtggtgagaatgaagagaagaggcggcagaggccccagaagaggccccgccggcggcggcgagaaggccctgaagagactgaagctggccgtggaggagttcgtgcacgccaccagcgagggcgaggcccccggcggctgcgagggcagaggcgcccccgtgagcttcagacccggcggcagaaagagcagaaaggagctgagaaaggagaagagacacctgagaaaggccagaagactgcagagaaccgccggccccgagcagggccccggcctgggcggcagaagcggcgccgaggaggccagcggccacagacaggacaccgaggagagagccagacccgcccccagcagagaccccagcccccccagaaagcccagacccagcagagtgaaggccaaggccaccgccgccaccgccaagaccagacccagcgccgccgccaccgccgccgccagaaagagagccctgctggccgccaacgaggaggaggacagagagatcagaaagctggagagatgcctgggcctgaacaagagaaagaagaaggacggcagcagcagcgtgcccctgagcttcgccagagacggcctggactacatcctgggcgccctggagagcggcaagaacagcggcctgtacgacagcagcggcgaggaggaggaggacgccggccagaccctgcccgagagcgacctggagagcgacagccaggacgagagcgaggaggaggaggagggcgacgtggagaaggagaagaaggcccaggaggccgaggcccagagcgaggacgacgacgaggacaccgaggaggagcagggcgaggagaaggagaagggcgcccaggagaagagaagaggcaagagagtgagattcgccgaggacgaggagaagagcgagaacagcagcgaggacggcgacatcaccgacaagagcctgtgcggcagcggcgagaagtacatccccccccacgtgagacaggccgaggagaccgtggacttcaagaagaaggaggagctggagagactgaagaagcacgtgaagggcctgctgaacagactgagcgagcccaacatggccagcatcagcggccagctggaggagctgtacatggcccacagcagaaaggacatgaacgacaccctgaccagcgccctgatgggcgcctgcgtgaccgccagcgccatgcccagcagactgatgatggagcacgtgctgctggtgagcatcctgcaccacaccgtgggcatcgaggtgggcgcccacttcctggaggccgtggtgagaaagttcgacgccatctacaagtacggcagcgagggcaaggagtgcgacaacctgttcaccgtgatcgcccacctgtacaacttccacgtggtgcagagcctgctgatcttcgacatcctgaagaagctgatcggcaccttcaccgagaaggacatcgagctgatcctgctgatgctgaagaacgtgggcttcagcctgagaaaggacgacgccctgagcctgaaggagctgatcaccgaggcccagaccaaggccagcggcgccggcagcgagttccaggaccagaccagaatcagattcatgctggagaccatgctggccctgaagaacaacgacatgagaaagatccccggctacgaccccgagcccgtggagaagctgagaaagctgcagagagccctggtgagaaacgccggcagcggcagcgagacccagctgagagtgagctgggacagcgtgctgagcgccgagcagaccggcagatggtggatcgtgggcagcgcctggagcggcgcccccatgatcgacaacagccaccacacccacctgcagaagcagctggtgggcaccgtgagcagcaagatcctggagctggccagaaagcagagaatgaacaccgacatcagaagaaacatcttctgcaccatcatgaccagcgaggacttcctggacgccttcgagaagctgctgaagctgggcctgaaggaccagcaggagagagagatcatccacgtgctgatggactgctgcctgcaggagaagacctacaaccccttctacgccttcctggccagcaagttctgcgagtacgagagaagattccagatgaccttccagttcagcatctgggacaagttcagagacctggagaacctgcccgccaccaacttcagcaacctggtgcacctggtggcccacctgctgaagaccaagagcctgagcctgagcatcctgaaggtggtggagttcagcgagctggacaagcccagagtgagattcctgagaaaggtgctgagcatcctgctgatggagaccgaggtggaggacctgagcctgatcttcaccagagtgagcgacaaccccaagctgggcgtgctgagagagggcctgaagctgttcatcagccacttcctgctgaagaacgcccaggcccacagaagcgccgacgaggccaacgtgctgagagagaaggccgacctggccaccaagtgcctgcagggcaaggccagcctgagaatgtag

SEQ ID NO: 236421 - protein, 175 aa, Artificial Sequence
  derived and/or modified sequence
MSHGAGLVRTTCSSGSALGPGAGAAQPSASPLEGLLDLSYPRTHAALLKVAQMVTLLIAFICVRSSLWTNYSAYSYFEVVTICDLIMILAFYLVHLFRFYRVLTCISWPLSELLHYLIGTLLLLIASIVAASKSYNQSGLVAGAIFGFMATFLCMASIWLSYKISCVTQSTDAAV

SEQ ID NO: 236422 - DNA, 528 bp, Artificial Sequence
  derived and/or modified sequence
atgagccatggcgctggattagtaagaaccacctgttcatctggctctgcactgggtcctggggccggtgccgcacagccctccgccagccccctggagggactcctggacttgagttaccctagaacacacgcagcccttctgaaggtggctcagatggtgacactgcttattgcctttatatgtgtacggagtagcctgtggactaactactctgcctactcatattttgaggttgttacaatttgcgacctaatcatgatattggctttctatctggtccacctgttccggttctacagggtgctcacatgcattagttggccactctctgagctactgcattatctgatcgggacattgttgctcctgatcgcctccatagtggccgcaagtaagagctataaccagtcaggcttggtggctggtgccatctttggctttatggccacgttcctgtgcatggcttctatctggctaagctacaaaataagctgcgtcacccagtctacagacgccgcagtatag

SEQ ID NO: 236423 - DNA, 528 bp, Artificial Sequence
  derived and/or modified sequence
atgagccatggagctggcctggtgaggaccacctgcagcagcggcagcgccctgggccctggggccggggccgcccagcccagcgccagccccctggagggcctgctggacctgagctaccccaggacccatgctgccctgctgaaggtggcccagatggtgaccctgctgattgccttcatctgtgtgcgcagcagcctgtggaccaactacagcgcctacagctactttgaggtggtgaccatctgtgacctgatcatgatcctggccttctacctggtgcacctgttccgcttctacagagtgctgacctgcatctcctggcccctgtctgagctgctgcactacctgattggcaccctgctgctgctgattgccagcatcgtggccgccagcaagagctacaaccagagcggcctggtggccggggccatcttcggcttcatggccaccttcctgtgcatggccagcatctggctgagctacaagatcagctgtgtgacccagagcacagatgctgctgtgtag

SEQ ID NO: 236424 - DNA, 528 bp, Artificial Sequence
  derived and/or modified sequence
atgagccacggcgccggcctggtgcggaccacctgcagcagcggctctgcattagggcctggcgccggagccgcccagccttcggcgtctccacttgaagggctgttggatctgtcgtaccccagaacccacgcggcactgttgaaagtcgcccagatggtaactcttctgatagcattcatttgcgtgcggtcaagtctctggacgaactacagtgcctacagttatttcgaagtcgtgaccatatgcgacctgataatgatcctggccttctacctggtgcatctgtttcgcttttatcgtgtacttacatgtatctcatggcctctctctgagctcttgcattacttgatcgggaccctcttactgctgatagcctccattgttgccgcatcaaagtcttacaatcagagcggcttggtggccggcgccatttttggctttatggcaacattcctgtgtatggcctcaatatggctgtcatacaagatttcatgcgtcacccagtctactgatgctgccgtgtag

SEQ ID NO: 236425 - DNA, 528 bp, Artificial Sequence
  derived and/or modified sequence
atgagccacggtgctggcctggttagaacaacatgctcttcaggcagcgctctgggacccggagctggtgctgcccagccgtcagcctctcctctggaggggttgctcgacctgtcgtacccaaggacgcatgctgcactgctcaaagtggcacagatggtgacactgttgattgcattcatctgtgtacggtcatccctttggacgaactactcagcatactcctatttcgaggtggtgacaatctgtgacctcatcatgatcctggctttctatctggtgcacctattccggttctaccgagtgctcacttgcatcagctggccactgagtgagctactccattatctgattggcactctactgctgttaatagcctccatcgtggcagcatcaaaaagctataatcagtccgggctggtggccggagccatcttcggttttatggcgaccttcctgtgcatggctagcatttggctttcgtacaaaatcagctgcgttactcagtccaccgacgcagctgtttag

SEQ ID NO: 236426 - DNA, 2038 bp, Artificial Sequence
  derived and/or modified sequence
agtctaacttccgcgcatctacgagggccgggactgccgctacctttctggaaggcgccggccggccagtcaccggagggatcccgccagaggcggctccgcgtctccagcagcggggcagggacccgggcgccccgccctcgccagcgcccgcccccgcccgcccccggcccgccctctgtatctggcccctgggcagctgcccggggaggcggccagcgagctggggccgcgcaatgtcgcacggagccgggctcgtccgcaccacgtgcagcagcggcagcgcgctcggacccggggccggcgcggcccagcccagcgcgagccccttggaggggctgctggacctcagctacccccgcacccacgcggccctgctgaaagtggcgcaaatggtcaccctgctgattgccttcatctgtgtgcggagctccctgtggaccaactacagcgcctacagctactttgaagtggtcaccatttgcgacttgataatgatcctcgccttttacctggtccacctcttccgcttctaccgcgtgctcacctgtatcagctggcccctgtcggaacttctgcactatttaatcggtaccctgctcctcctcatcgcctccattgtggcagcttccaagagttacaaccagagcggactggtagccggagcgatctttggtttcatggccaccttcctctgcatggcaagcatatggctgtcctataagatctcgtgtgtaacccagtccacagatgcagccgtctgatgaggccacaacccctaggcccctcaggagctttgcagagaggaggacgtgtactccaggcgaggcctctggacctgtgttcctgtgccaaagtcctgtcaggctggtgggcaccaggaaaggcctgcaccctcttcctgctctcccaggaagccagctccctgagctcctgagccagccggaaactcttcctccagccttccggggagaacatccctcccattctgggaaaggaaagcagcctccagggaaatgttttctgccttcctgcttctagaaccacctcaggtactgatgaaccccacttagcacagctgaaggggtttgtgaatactcccgcctaaatcccttctacttcactcctcaggggagtgaagtgccttaagaaacaaagccctgtcctaatttatctagcttgtcagtccggtcttagagataccctctttcctgaagtgaggcgtgcctgtagaaacactatgtggtcagcctgtccccaaggagatcttgtgtctcctctccatctctgcctttgttaccagtgtgcatgtgtttgtgtgttttttaataaaatattgactcggccagttgcacaaggatttcttattgaaccagatgaaggctgtaaaacctggcctgaaacagtttccattcgagcttgtgtctggcccatggccctccacccgtgctctgtgtgtgccccttgctgaactgctggacttcaggttttctctccatcttgggggatagtatagcagggcagagttttaggtaaacatgtgcaggttctcaattatattcacgtcctccttctcctgcaataccaatcttctcattttggaaagagctttagagcaagctaagggttgtgtttacactatgatgattaatgatctcggcctaaatgtgctgtttcgctgatcttgagctgctcagttggctagaaaaaggagggatggaacaatgtttgagcaaccccgtgtgcaaggacctacattcacaaccacatctaatagcgatggtagtgactgcaagggggcaggttataggaccacatttttagaaatgaaatcggggctccatccccaggcacagggcaagccagtgaggagctgggctcaggatctaggtctgcctgactcccagccccatccttgcctctgctgagtgttgccggaaatggaagcagcccctgtgggctttgagctggagctctggggctactcttgtggctgctggccagctcggggcatcgggttctgtctgggatgatctaa

SEQ ID NO: 236427 - DNA, 528 bp, Artificial Sequence
  derived and/or modified sequence
atgagccacggcgccggcctggtgagaaccacctgcagcagcggcagcgccctgggccccggcgccggcgccgcccagcccagcgccagccccctggagggcctgctggacctgagctaccccagaacccacgccgccctgctgaaggtggcccagatggtgaccctgctgatcgccttcatctgcgtgagaagcagcctgtggaccaactacagcgcctacagctacttcgaggtggtgaccatctgcgacctgatcatgatcctggccttctacctggtgcacctgttcagattctacagagtgctgacctgcatcagctggcccctgagcgagctgctgcactacctgatcggcaccctgctgctgctgatcgccagcatcgtggccgccagcaagagctacaaccagagcggcctggtggccggcgccatcttcggcttcatggccaccttcctgtgcatggccagcatctggctgagctacaagatcagctgcgtgacccagagcaccgacgccgccgtgtag

SEQ ID NO: 236428 - protein, 327 aa, Artificial Sequence [sequence omitted]

SEQ ID NO: 236429 - DNA, 984 bp, Artificial Sequence
  derived and/or modified sequence
atgctgggcccccaggtgtggagcagcgtgagacagggcctgagcagaagcctgagcagaaacgtgggcgtgtgggccagcggcgagggcaagaaggtggacatcgccggcatctacccccccgtgaccacccccttcaccgccaccgccgaggtggactacggcaagctggaggagaacctgcacaagctgggcaccttccccttcagaggcttcgtggtgcagggcagcaacggcgagttccccttcctgaccagcagcgagagactggaggtggtgagcagagtgagacaggccatgcccaagaacagactgctgctggccggcagcggctgcgagagcacccaggccaccgtggagatgaccgtgagcatggcccaggtgggcgccgacgccgccatggtggtgaccccctgctactacagaggcagaatgagcagcgccgccctgatccaccactacaccaaggtggccgacctgagccccatccccgtggtgctgtacagcgtgcccgccaacaccggcctggacctgcccgtggacgccgtggtgaccctgagccagcaccccaacatcgtgggcatgaaggacagcggcggcgacgtgaccagaatcggcctgatcgtgcacaagaccagaaagcaggacttccaggtgctggccggcagcgccggcttcctgatggccagctacgccctgggcgccgtgggcggcgtgtgcgccctggccaacgtgctgggcgcccaggtgtgccagctggagagactgtgctgcaccggccagtgggaggacgcccagaagctgcagcacagactgatcgagcccaacgccgccgtgaccagaagattcggcatccccggcctgaagaagatcatggactggttcggctactacggcggcccctgcagagcccccctgcaggagctgagccccgccgaggaggaggccctgagaatggacttcaccagcaacggctggctgtag

SEQ ID NO: 236430 - DNA, 2488 bp, Artificial Sequence
  derived and/or modified sequence
ggctgggcttctggcttcagagctgggaattgtgggaggagggcccagatcccactggagataccgaaggagatactctttagtattgggatcccagaaaccagtcctatatctggccagagggacactgggttgtggcatctctctagctgctacccagaaggaacagggccccctggggcctataggccttgcccctgaccctgggaacacccagctcaggcctgccccagtggccacaagtcagggaggccgcaaatttttaactagaaacattgatcattaatagggggttagaaagagttcaaactaagtctcactctgggacatagaccaattgtgcttcaggcctcctgcagagatgctgggtccccaagtctggtcttctgtgaggcaggggctaagcaggagcttgtccaggaatgtgggggtctgggcctcaggggaggggaagaaggtggacattgcgggtatctacccccctgtgaccacccccttcactgccactgcagaggtggactatgggaaactggaggagaatctgcacaaactgggcaccttccccttccgaggcttcgtggtccagggctccaatggcgagtttcctttcctgaccagcagtgagcgcctcgaggtggtgagccgtgtgcgccaggccatgcccaagaacaggctcctgctagctggctccggatgcgagtccactcaagccacagtggagatgaccgtcagcatggcccaggtcggggctgacgcggccatggtggtgaccccttgctactatcgtggccgcatgagcagtgcggccctcattcaccactacaccaaggttgctgatctctctccaatccctgtggtgctgtacagtgtcccagccaacacagggctggacctgcctgtggatgcagtggtcacgctttcccagcacccgaatattgtgggcatgaaggacagcggtggtgatgtgaccaggattgggctgattgttcacaagaccaggaagcaggattttcaggtgttggctggatcggctggctttctgatggccagctatgccttgggagctgtggggggcgtctgcgccctggccaatgtcctgggggctcaggtgtgccagctggagcgactgtgctgcacggggcaatgggaagatgcccagaaactgcagcaccgcctcattgagccaaacgctgcggtgacccggcgctttgggatcccagggctgaagaaaatcatggactggtttggctactatggaggcccctgccgcgcccccttgcaggagctgagccccgctgaggaggaggcactgcgcatggatttcaccagcaacggctggctctgagggcaggcagggtccatggctggcctgagcccatctcagcctcctgccttgcacttgcagcctgaagcggagagcacagggggatgagggtggcaggcagcggggagccgatagaggctcctttgcctgctgtggtcctccaggcagcctttcacaggcacgcccatgcatatctcctattctaacggcccctgacctctcccttttggatcctaaactgtgtctctggtctgaagactgggaaggagcaatttctcaatttatctttctactgtggatgctttcctacgccctgaggcacatgaagtcagaaaggaagggcagaggggcaagtaggcacagtaagggaattttcttttctttttttttttttttgagacagagtttcactctgtcacccaggctggagtgcaatggcatgatctcgcctcctgggttcaagcgattctcctgcctcagcctcccgagtagctgggattacaggcgcctgccaccacgcccagctaatttttgtatttttagcagagatggggtttcaccgtgttggccaggctggtcttgaactcctgacctcaggtgatccaactgcctcggcctcccaaagtgctgggattacagctgtgagccactgcacccggccgggaatttatcaaaggggggactacttagatttggggcttcaaacctgagtctagcacaatgcagctggaggccagggctactcctacaaacccaagttctgactccttccagggaagtatcagcttaagaaacttgatcaggaaagtgacactggtctttcaaagagccctctttaccctcccatccctgccctccacactgcaagctgcattccagccacaacgcccttttctaaatctattttcattcatctcctattctggtctgtagccttgattccaaccattgaatgcacggagacagcccagtggcttgtcagattggtaaataatgacacctggtggataaatgttacattctagaagactattctggtcagcctaggtctgaaacactaaggagacttggcctgagatagggccatccacttgcctacaggcactctgcttttattattaaaaatagtcactttgttactataataaaatttaacagaaaaaa

SEQ ID NO: 236431 - DNA, 984 bp, Artificial Sequence
  derived and/or modified sequence
atgttaggaccgcaggtgtggagtagtgtcagacagggtctgtcgaggtctctgtctagaaatgtgggagtgtgggccagtggcgagggtaagaaggtcgacattgctggtatctaccctccagtgaccacaccctttaccgcgaccgccgaagtcgactacggcaagcttgaggagaacctccataaactaggcacattcccatttagaggttttgtagtgcagggatcaaatggtgaatttccatttctgacaagctcggagcgcctagaagtcgtgagtcgcgtcagacaggcaatgccgaaaaatagactgttgttggccgggagcgggtgcgagagtacccaagccacagtggagatgacagtgagtatggcgcaggtcggggcagacgccgctatggttgtgacaccgtgctactataggggccgtatgagctccgctgcactcattcaccattatactaaagtcgcagacttgtctcccattccggtggttctatatagtgtgccggccaatacaggacttgacctgcccgtcgacgcagtcgtaacattgtcacagcacccaaatattgttgggatgaaggacagcgggggagatgttacacgcataggtctcatcgtgcacaaaactcgcaagcaggactttcaggtgctcgccggcagcgctggtttcctgatggcttcctacgcactgggtgctgtcggcggtgtgtgcgccttagccaatgtgctgggggcgcaggtgtgtcagctggagcgcttatgctgtacggggcaatgggaggatgcccagaaactacaacatcgattgatcgaacctaatgcagccgttactcgacggtttgggatccctggtttgaagaaaatcatggattggttcggctactacggaggtccatgtagggctcctttgcaggaattgtcgcctgccgaagaggaggctctgcgcatggattttaccagcaatggatggctctag

SEQ ID NO: 236432 - DNA, 984 bp, Artificial Sequence
  derived and/or modified sequence
atgctgggcccccaggtgtggagctctgtgcggcagggcctgagccgcagcctgagcagaaatgtgggcgtgtgggccagcggggagggcaagaaggtggacattgctggcatctacccacctgtgaccacccccttcaccgccacagctgaggtggactatggcaagctggaggagaacctgcacaagctgggcaccttccccttccggggctttgtggtgcagggcagcaatggagagttccccttcctgaccagcagcgagcggctggaggtggtgtcccgggtgcggcaggccatgcccaagaaccggctgctgctggccggcagcggctgtgagagcacccaggccaccgtggagatgacagtgtccatggcccaggtgggcgcagatgctgccatggtggtgaccccctgctactaccggggccgcatgagcagcgctgccctgatccaccactacaccaaggtggccgacctgagccccatccctgtggtgctgtacagcgtgcctgccaacacaggcctggacctgcctgtggatgctgtggtgaccctgagccagcaccccaacatcgtgggcatgaaggacagcggaggagatgtgaccagaattggcctcatcgtgcacaagaccaggaagcaggacttccaggtgctggccggcagcgctggcttcctgatggccagctatgccctgggcgctgtgggcggcgtgtgtgccctggccaacgtgctgggcgcccaggtgtgccagctggagcggctgtgctgcaccggccagtgggaggatgcccagaagctgcagcaccggctgattgagcccaatgctgctgtgaccaggagatttggcatccctggcctgaagaagatcatggactggtttggctactacggcggcccctgccgggcccccctgcaggagctgagccctgctgaggaggaggccctgaggatggacttcaccagcaatggctggctgtag

SEQ ID NO: 236433 - DNA, 984 bp, Artificial Sequence
  derived and/or modified sequence
atgctgggcccccaggtgtggagcagcgtgcggcagggcctgagcagaagtttgtcaaggaatgtcggcgtgtgggcatccggcgaggggaagaaggtggacatcgccggtatctacccacctgtcaccactcccttcacagctaccgcggaagttgactatggcaaacttgaagagaacctccacaagctcgggacctttcccttcagggggtttgtggttcagggaagtaacggtgagtttcctttccttaccagctccgagcgcctggaagttgtcagtcgggtgagacaggcaatgcccaaaaatcgcctcctgctggcaggttctgggtgtgagagcacgcaggccactgtggagatgactgtgtcaatggctcaggtgggcgcagatgctgcgatggttgttaccccgtgctattaccgcggccgcatgagcagcgctgccctgattcaccactacactaaggtggcagacttaagtcctattcctgtggttctttactcagtccctgcaaataccgggcttgatcttcctgtggacgctgtggtcactttaagtcagcaccccaacatagtggggatgaaagactcaggcggggacgtcactcgcattggtctgattgtccacaagactcgcaagcaggatttccaagttctagcggggtccgccggattcctcatggcctcttatgccttaggggccgtcggcggggtgtgcgcactcgcgaatgtgctgggcgcgcaggtttgccagctggagcggctgtgttgcacaggtcagtgggaggacgcccagaaactgcagcaccgactgattgagccgaacgccgctgtcacaagacgctttggtatcccaggattgaagaaaatcatggactggtttggctattatggaggcccctgtcgggcccccctgcaagagctgagccctgcggaggaggaggccctccgcatggacttcacctctaatggctggttatag

SEQ ID NO: 236434 - DNA, 984 bp, Artificial Sequence
  derived and/or modified sequence
atgcttggccctcaagtgtggtcatctgtcaggcaaggactctcccggtctttgagccgaaatgtgggtgtttgggccagtggcgaagggaagaaggtggacatagctggcatttacccacctgtcacaaccccatttacagcaactgctgaggtggactacggtaaactggaggagaatttacataagcttggcacatttcccttccggggttttgtagtgcagggatccaacggcgagtttccattcctgacaagctccgaaaggctggaggtagttagccgagtcaggcaggccatgccaaaaaatcgtctgttactcgcaggctctggatgcgagtcgacgcaggcaactgtggagatgactgtgtccatggcccaggtgggggctgatgcagccatggtggtgactccttgttattataggggcaggatgagtagcgctgcacttatccaccattacacaaaagtcgcagatctgagtccaatcccggtggtgctgtactcagtccccgctaacaccggactggacctccccgtagatgcagtggtgacgctgagtcagcaccccaacatagtgggtatgaaggacagtggcggagatgtgactagaataggtttgattgttcacaaaacacgtaagcaagatttccaagtactggccggatccgccggattcctcatggcatcatatgccctcggcgcagttggcggtgtatgcgcccttgctaacgtgttaggagctcaggtctgtcaattggaacggctatgttgtacagggcaatgggaggatgcccagaaactacagcaccgtctgatcgagcctaacgctgctgtgacgcgcagattcggcatcccagggctgaaaaagatcatggactggtttgggtattacggtggtccctgtagagctccattgcaggagctcagcccagccgaagaggaggccttgaggatggactttacatctaacgggtggctgtag

SEQ ID NO: 236435 - protein, 293 aa, Artificial Sequence
  derived and/or modified sequence
MALVSADSRIAELLTELHQLIKQTQEERSRSEHNLVNIQKTHERMQTENKISPYYRTKLRGLYTTAKADAEAECNILRKALDKIAEIKSLLEERRIAAKIAGLYNDSEPPRKTMRRGVLMTLLQQSAMTLPLWIGKPGDKPPPLCGAIPASGDYVARPGDKVAARVKAVDGDEQWILAEVVSYSHATNKYEVDDIDEEGKERHTLSRRRVIPLPQWKANPETDPEALFQKEQLVLALYPQTTCFYRALIHAPPQRPQDDYSVLFEDTSYADGYSPPLNVAQRYVVACKEPKKK

SEQ ID NO: 236436 - DNA, 882 bp, Artificial Sequence
  derived and/or modified sequence
atggccctggtcagtgcagactccaggatcgccgaactgctgactgaattacatcagctcattaagcagacgcaggaagagcggtcccgtagcgaacacaatctcgttaatatccagaagacacatgaacgtatgcagaccgagaacaaaattagtccatactaccgaacgaagttgcgcggtttgtatacaaccgcaaaggctgacgccgaggctgagtgcaatatcctccgaaaagccttagataagatagccgaaattaagagtctcctggaagaacggcgaatcgcagcaaagatagcaggattatataatgactccgagccacccagaaagactatgagaaggggcgttctgatgaccctccttcagcaatcggccatgacgctgccactgtggattggaaagcccggggacaagccgcctccgttgtgcggggccattccagcgtcaggggattatgtggctcggcccggcgataaggtggcggcaagggtgaaagccgtggatggcgatgaacaatggatccttgccgaggttgttagctactcacacgcgaccaataagtacgaggtcgacgatattgacgaagagggcaaagagcggcacactttgagccgtaggagagtgatacccttgccccagtggaaagccaacccagaaacagaccccgaggccctttttcagaaagaacagttagtactggcgctgtacccacagactacctgcttttatagagctctaatccatgctccaccacagaggcctcaggacgactattctgtactctttgaagacacttcctacgcagacggatattccccacccctaaacgtggctcagcggtatgtcgtagcgtgtaaggagcccaagaagaagtag

SEQ ID NO: 236437 - DNA, 882 bp, Artificial Sequence
  derived and/or modified sequence
atggccctggtgtctgctgacagcagaattgctgagctgctgacagagctgcaccagctgatcaagcagacccaggaggagaggagccgctctgagcacaacctggtgaacatccagaagacccatgagaggatgcagacagagaacaagatcagcccctactaccgcaccaagctgcggggcctgtacaccacagccaaggcagatgctgaggccgagtgcaacatcctgaggaaggccctggacaagattgctgagatcaagagcctgctggaggagaggagaattgctgccaagattgctggcctgtacaatgattctgagccccccaggaagaccatgagaagaggagtgctgatgaccctgctgcagcagagcgccatgaccctgcccctgtggattggcaagccaggggacaagcccccacccctgtgtggggccatcccagccagcggggactatgtggcccggcctggggacaaggtggccgcccgggtgaaggctgtggatggagatgagcagtggatcctggccgaggtggtgtcctacagccacgccaccaacaagtatgaggtggatgacattgatgaggagggcaaggagcggcacaccctgagcagaagaagagtcatccccctgccccagtggaaggccaaccctgagacagatcctgaggccctcttccagaaggagcagctggtgctggccctgtacccccagaccacctgcttctaccgggccctgatccacgccccaccccagaggccccaggatgactacagcgtgctgtttgaggacaccagctatgcagatggctacagcccccccctgaatgtggcccagagatatgtggtggcctgcaaggagcccaagaagaagtag

SEQ ID NO: 236438 - DNA, 882 bp, Artificial Sequence
  derived and/or modified sequence
atggccctggtgagcgccgacagccggatcgccgagctgctgaccgaattacaccaacttatcaaacaaacgcaggaggaaaggtctagaagcgagcacaatctagtaaacatccaaaagactcacgaacgtatgcagaccgaaaataagatttcgccatactacaggacaaagctcagaggtctgtatacaaccgctaaggccgatgcagaggccgagtgcaacattttaagaaaagccctcgacaaaatcgcagaaataaaaagcttgctagaggagcgtaggatcgcagccaaaattgccgggctctataacgactctgagcccccacgtaaaacgatgaggaggggcgtcttaatgacacttctccaacagagcgctatgacccttcccctctggatagggaaacctggtgataagccaccccctctctgcggtgctatccctgcttctggcgattacgtggcgcgccctggggacaaagtggctgccagggttaaggcggtggacggagatgagcagtggattctggcagaagtcgtctcctacagccatgccacaaataagtacgaggtcgatgatattgacgaagaaggcaaggagagacatacattgagccggaggagagtgataccccttccacagtggaaagccaatccggaaaccgaccctgaggcattatttcagaaggaacagctggtcctcgcactctatcctcagacaacatgtttctaccgggctttgatccacgcacctccacaacggcctcaggatgattatagcgtgctgttcgaggatacttcatacgccgacggctactccccccccctcaatgtcgctcagcgctacgtcgttgcttgcaaggaacctaagaaaaagtag

SEQ ID NO: 236439 - DNA, 882 bp, Artificial Sequence
  derived and/or modified sequence
atggccctggtcagtgctgattccagaattgccgaacttctgaccgaacttcaccagcttattaaacaaacccaggaggaaaggtcccgatccgagcacaacctggtcaacatacagaagacccatgaacggatgcagacggagaataagatatctccatactataggacaaagctcaggggactttatacaaccgccaaagcagacgccgaagcagaatgtaatattctaaggaaggctctggacaaaatcgccgagattaagtcgctgcttgaggagcggaggatcgctgccaaaatagctggcctgtataatgactcagaacctcctcgcaagaccatgcggagaggagtgctgatgacccttttgcagcagtccgccatgactctaccattgtggattggtaagccgggtgataagccaccacctctctgtggggcaattccagcgtctggtgattacgtggcgaggccaggagacaaggtcgcggcaagagtcaaagccgtggacggggacgagcagtggatcctggctgaagtggtctcctatagtcatgcaactaataaatacgaggtggacgatatcgacgaagaaggtaaggagagacacacactgtcccggaggagagttattcctctgccgcagtggaaggcgaaccctgaaacagacccagaggccctcttccagaaggaacaactggtgcttgccttgtatccccagactacatgtttttatagagctcttattcacgcacctccacagcgacctcaggatgactatagcgttctctttgaggacacaagctatgcagatggctactctccgccactaaacgtagcccagcggtacgtcgttgcttgcaaagagcccaagaagaagtag

SEQ ID NO: 236440 - DNA, 1153 bp, Artificial Sequence
  derived and/or modified sequence
cgcgcgactacgctcataaaaggaaaaaaaagcgtgtgcggttctcgacgtgccgccaatcttcgaacgcaggtctgtgatcatccgcagactccgaaaaagggttcgaggaacgcgcctgctcccctcgtcgcagtttccagcccgacgagcttgttttgtcccggactcggtgcccctgtagacaatggccctcgtgtctgccgattcccgcattgcagaacttctcacagagctccatcagctgatcaaacaaacccaggaagagcgttcgcggagcgaacacaacttagtgaacatccagaagacccatgagcggatgcagacagagaacaagatttctccctattaccggacaaagctgcgtggcctctacacaaccgccaaggccgatgcagaggctgagtgcaacatccttcggaaagctctggacaagatcgcggaaatcaagtctctgttggaagagaggcggattgcggccaagattgccggtctctacaatgactcggagccaccccggaagaccatgcgcagaggggtgctgatgaccctgctgcagcagtcggccatgaccctgcccctgtggatcgggaagcctggtgacaagcccccacccctctgtggggccatccctgcctcaggagactacgtggccagacctggagacaaggtggctgcccgggtgaaggccgtggatggggacgagcagtggatcctggccgaggtggtcagttacagccatgccaccaacaagtatgaggtagatgacatcgatgaagaaggcaaagagagacacaccctgagccggcgccgtgtcatcccgctgccccagtggaaggccaacccggagacggaccctgaggccttgttccagaaggagcagctcgtgctggccctgtatccccagactacctgcttctaccgcgccctgatccatgcgcccccacagcggccccaggatgactactcggtcctgtttgaagacacctcctatgcagatggctattcccctcccctcaatgtggctcagagatacgtggtggcttgtaaggaacccaagaaaaagtgatgccgcctggcagactcgccatcccccaacgacacagggcaggacagcagaggacgtgctgggattaaacacattccccctcta

SEQ ID NO: 236441 - DNA, 882 bp, Artificial Sequence
  derived and/or modified sequence
atggccctggtgagcgccgacagcagaatcgccgagctgctgaccgagctgcaccagctgatcaagcagacccaggaggagagaagcagaagcgagcacaacctggtgaacatccagaagacccacgagagaatgcagaccgagaacaagatcagcccctactacagaaccaagctgagaggcctgtacaccaccgccaaggccgacgccgaggccgagtgcaacatcctgagaaaggccctggacaagatcgccgagatcaagagcctgctggaggagagaagaatcgccgccaagatcgccggcctgtacaacgacagcgagccccccagaaagaccatgagaagaggcgtgctgatgaccctgctgcagcagagcgccatgaccctgcccctgtggatcggcaagcccggcgacaagcccccccccctgtgcggcgccatccccgccagcggcgactacgtggccagacccggcgacaaggtggccgccagagtgaaggccgtggacggcgacgagcagtggatcctggccgaggtggtgagctacagccacgccaccaacaagtacgaggtggacgacatcgacgaggagggcaaggagagacacaccctgagcagaagaagagtgatccccctgccccagtggaaggccaaccccgagaccgaccccgaggccctgttccagaaggagcagctggtgctggccctgtacccccagaccacctgcttctacagagccctgatccacgcccccccccagagaccccaggacgactacagcgtgctgttcgaggacaccagctacgccgacggctacagcccccccctgaacgtggcccagagatacgtggtggcctgcaaggagcccaagaagaagtag

SEQ ID NO: 236442 - protein, 474 aa, Artificial Sequence
  derived and/or modified sequence
MDRNPSPPPPGRDKEEEEEVAGGDCIGSTVYSKHWLFGVLSGLIQIVSPENTKSSSDDEEQLTELDEEMENEICRVWDMSMDEDVALFLQEFNAPDIFMGVLAKSKCPRLREICVGILGNMACFQEICVSISSDKNLGQVLLHCLYDSDPPTLLETSRLLLTCLSQAEVASVWVERIQEHPAIYDSICFIMSSSTNVDLLVKVGEVVDKLFDLDEKLMLEWVRNGAAQPLDQPQEESEEQPVFRLVPCILEAAKQVRSENPEWLDVYMHILQLLTTVDDGIQAIVHCPDTGKDIWNLLFDLVCHEFCQSDDPPIILQEQKTVLASVFSVLSAIYASQTEQEYLKIEKVDLPLIDSLIRVLQNMEQCQKKPENSAESNTEETKRTDLTQDDFHLKILKDILCEFLSNIFQALTKETVAQGVKEGQLSKQKCSSAFQNLLPFYSPVVEDFIKILREVDKALADDLEKNFPSLKVQT

SEQ ID NO: 236443 - DNA, 1425 bp, Artificial Sequence
  derived and/or modified sequence
atggatcgtaatcccagtccacctccccctggcagagacaaagaggaagaggaggaagtcgctggcggagattgcattggatccacagtatacagcaaacattggctgttcggcgtacttagtggcttaattcagatcgtgtctcccgaaaacactaaatcaagctctgatgatgaagagcaactgacagagctagatgaggaaatggagaacgagatttgccgcgtgtgggatatgtccatggacgaagacgtagcactgttcctccaggagtttaatgcccctgacatcttcatgggcgtactggcaaaatctaagtgtccgaggctgcgtgaaatttgtgtgggtattctcggaaatatggcctgctttcaggagatctgcgtgtccattagcagcgataagaaccttgggcaggtgctgctacactgtctgtatgactcggacccaccaacactcctggagacaagccggttattgttgacctgtctttctcaggcggaggttgcttcggtgtgggtggagcgcatccaggaacatccagccatctatgacagcatttgttttatcatgtctagttccacgaatgtggacctcctggtcaaagttggggaagtcgttgataaattattcgacttagatgaaaaactcatgctggagtgggtgagaaatggcgctgcccaaccacttgatcagccgcaggaagagtcagaggaacagcctgtttttagactcgtgccatgcattctggaggcagccaagcaggtgcgctcagagaatcccgagtggctagatgtgtacatgcatattttacaactgctcacaacggtggacgatggaatccaagccatcgtgcattgccctgacaccggcaaggacatttggaatctcctctttgatttggtttgccacgagttttgtcagagtgacgaccctcccattattctgcaggagcagaagacggttttggcaagcgtgtttagcgttttatctgccatctacgcctcccagactgaacaagagtacctgaaaatagagaaggtcgatctcccattgatcgatagcttgatccgggtgctgcagaatatggaacaatgccagaaaaagccagaaaacagcgcagagtctaatacagaggagactaaaagaaccgacttgacacaagacgattttcacctgaaaatcttaaaggacattctttgcgagttcctctcaaacatatttcaggctctgaccaaggagaccgtcgcccaaggcgtaaaagaaggacagctcagcaaacaaaagtgttcatctgctttccaaaatttacttccattctatagccccgtggtggaggatttcattaaaatactgcgggaagtggataaagcactggccgacgatctggagaagaactttccaagcctcaaagtccagacatag

SEQ ID NO: 236444 - DNA, 1425 bp, Artificial Sequence
  derived and/or modified sequence
atggaccgtaacccatccccaccaccccctgggcgagacaaggaagaggaagaggaagttgccggaggggactgcatcggctctaccgtgtacagtaaacactggttgtttggagtgctttccggactaattcagatcgtcagcccagagaataccaaaagttcaagcgatgatgaagaacagcttaccgaactcgacgaggaaatggaaaacgagatctgtagagtttgggacatgagtatggacgaggatgttgccctttttttgcaggaattcaacgcacctgacatctttatgggggtgttagccaaatctaagtgcccccgcctgagggaaatctgtgtgggtatactgggtaacatggcctgttttcaggaaatttgtgtatccatttcttcagataagaacctgggccaggttttgcttcactgtttatacgattctgaccctcccactctacttgaaactagtaggttactgctgacatgtcttagtcaagcggaggtggcatctgtgtgggtggagcgcatccaggagcatccggccatttatgactcaatctgttttattatgagtagtagtaccaacgtagacctcctcgtgaaagttggcgaggtggtggacaagttattcgacctggatgagaaactgatgctggaatgggtgagaaacggagccgcccagccattggatcaaccacaagaggaaagcgaagaacagccagtgttccgactggtcccttgtatcctcgaggccgccaagcaggtcaggtctgaaaatcccgagtggctggacgtctatatgcatattctgcaattgctcacaacagtcgacgacggcatccaagctattgttcattgccccgatacaggcaaagacatctggaatcttttattcgacctcgtgtgtcacgaattctgccaaagcgatgatccccctattatcttacaggagcaaaagacagtgcttgcatctgtattttccgtgcttagcgcgatttacgcttctcagactgaacaagaatacctgaaaattgagaaagtagacctgccccttatcgactctctgatccgcgtccttcagaacatggaacaatgccagaaaaagccggaaaattccgccgaatcaaatactgaagaaaccaaaaggacggacctaacccaggatgatttccatctgaagattctgaaggacattctctgcgagtttctctctaatatttttcaggcactcacgaaagagacagtggcacagggggtcaaagaagggcagttatcgaaacagaagtgtagtagcgcattccagaatttgctgcctttttactctccagtagtggaagactttataaagatcctgagagaggtcgacaaggccctagctgacgacttggagaaaaacttcccttccctgaaagtgcagacctag

SEQ ID NO: 236445 - DNA, 1425 bp, Artificial Sequence
  derived and/or modified sequence
atggaccgtaacccatccccaccaccccctgggcgagacaaggaagaggaagaggaagttgccggaggggactgcatcggctctaccgtgtacagtaaacactggttgtttggagtgctttccggactaattcagatcgtcagcccagagaataccaaaagttcaagcgatgatgaagaacagcttaccgaactcgacgaggaaatggaaaacgagatctgtagagtttgggacatgagtatggacgaggatgttgccctttttttgcaggaattcaacgcacctgacatctttatgggggtgttagccaaatctaagtgcccccgcctgagggaaatctgtgtgggtatactgggtaacatggcctgttttcaggaaatttgtgtatccatttcttcagataagaacctgggccaggttttgcttcactgtttatacgattctgaccctcccactctacttgaaactagtaggttactgctgacatgtcttagtcaagcggaggtggcatctgtgtgggtggagcgcatccaggagcatccggccatttatgactcaatctgttttattatgagtagtagtaccaacgtagacctcctcgtgaaagtcggggaagttgtggataagttatttgatctggacgaaaaactcatgctcgagtgggttcgcaatggtgccgcacagccgctggaccaaccacaggaggaatccgaagaacagcctgttttccgcctggtcccttgcattctcgaagccgcaaagcaagtgcgaagtgagaaccctgagtggttagatgtgtacatgcatattctccaactgctgacaaccgtcgatgatgggatacaggccatagtccattgtcccgacacagggaaagacatttggaatctactattcgatctggtttgtcatgaattctgtcaatccgatgatccacctataatactgcaagaacaaaaaacagtgcttgcctccgtgttctctgtcctatctgccatatatgcgagccagaccgagcaagagtatttgaagattgaaaaagttgacctccccctcatagacagcctcataagagtactgcagaatatggagcagtgccaaaaaaagcccgaaaactccgccgagtcgaacaccgaagagaccaagaggactgaccttacccaggacgatttccacctgaagattctgaaggacatattgtgtgaattcttatcaaatattttccaagctttgacgaaagagaccgtggctcagggtgtcaaagaaggccagctatcaaaacagaagtgtagttcagcttttcaaaatctgttgcctttctatagtccggttgttgaggatttcatcaaaattcttcgcgaagtcgacaaagcacttgccgacgatctcgagaaaaacttcccttccctgaaggtccagacatag

SEQ ID NO: 236446 - DNA, 1582 bp, Artificial Sequence
  derived and/or modified sequence
ctcctccgcagcttccggcacggccttcaagcgcgggacgcgacaaagtcatggaccgcaacccctcgccgccgccgccgggtcgcgacaaggaggaggaggaggaggtggccggtggagactgcatagggagcacggtctacagcaaacactggctcttcggcgtcctcagcggactcatccagattgttagccctgaaaacaccaaatctagctcagatgatgaggagcagctgacggagcttgatgaagaaatggagaatgaaatttgcagagtatgggatatgtcaatggatgaggacgtggctttatttctccaagaatttaatgctcctgatatattcatgggagtactggccaagtccaagtgtcctcgattaagagaaatctgtgtgggaattttaggtaatatggcctgtttccaggagatatgtgtgtccatcagcagtgataaaaatcttgggcaggtgttattgcactgtttgtatgattcagacccacctactctgctggaaacaagcaggttgttgcttacttgcctttcccaggcagaagtggccagtgtttgggttgaaaggatccaggaacatccagctatttatgatagcatttgcttcattatgtcaagttcaacaaatgttgacttgctggtgaaggtgggggaggttgtggacaagctctttgatttggatgagaaactaatgttagaatgggtcagaaatggggctgctcagcctctggaccaaccccaggaagagtctgaagagcagccagtgtttcggcttgtgccctgtatacttgaagctgccaaacaagtacgttctgaaaatccagaatggcttgatgtttacatgcacattttacaactgcttactacagtggatgatggaattcaagcaattgtacattgtcctgacactggaaaagacatttggaatttactttttgacctggtctgccatgaattctgccagtctgatgatccacccatcattcttcaagaacagaaaacagtgctagcctctgttttttcagtgttgtctgccatctatgcctcacagactgagcaagagtatctaaagatagaaaaagtagatcttcctctaattgacagcctcattcgggtcttacaaaatatggaacagtgtcagaaaaaaccagagaactcggcagagtctaacacagaggaaactaaaaggactgatttaacccaagatgatttccacttgaaaatcttaaaggatattttatgtgaatttctttctaatatttttcaggcattaacaaaggagacggtggctcagggagtaaaggaaggccagttgagcaaacagaagtgttcctctgcatttcaaaaccttcttcctttctatagccctgtggtggaagattttattaaaatcctacgtgaagttgataaggcgcttgctgatgacttggaaaaaaacttcccaagtttgaaggttcagacttaaaacctgaattggaattacttctgtacaagaaataaactttatttttctcactgacagttgaaattgacttattggaaatattaactaaagcccatattagaccataa

SEQ ID NO: 236447 - DNA, 1425 bp, Artificial Sequence
  derived and/or modified sequence
atggacagaaaccccagcccccccccccccggcagagacaaggaggaggaggaggaggtggccggcggcgactgcatcggcagcaccgtgtacagcaagcactggctgttcggcgtgctgagcggcctgatccagatcgtgagccccgagaacaccaagagcagcagcgacgacgaggagcagctgaccgagctggacgaggagatggagaacgagatctgcagagtgtgggacatgagcatggacgaggacgtggccctgttcctgcaggagttcaacgcccccgacatcttcatgggcgtgctggccaagagcaagtgccccagactgagagagatctgcgtgggcatcctgggcaacatggcctgcttccaggagatctgcgtgagcatcagcagcgacaagaacctgggccaggtgctgctgcactgcctgtacgacagcgacccccccaccctgctggagaccagcagactgctgctgacctgcctgagccaggccgaggtggccagcgtgtgggtggagagaatccaggagcaccccgccatctacgacagcatctgcttcatcatgagcagcagcaccaacgtggacctgctggtgaaggtgggcgaggtggtggacaagctgttcgacctggacgagaagctgatgctggagtgggtgagaaacggcgccgcccagcccctggaccagccccaggaggagagcgaggagcagcccgtgttcagactggtgccctgcatcctggaggccgccaagcaggtgagaagcgagaaccccgagtggctggacgtgtacatgcacatcctgcagctgctgaccaccgtggacgacggcatccaggccatcgtgcactgccccgacaccggcaaggacatctggaacctgctgttcgacctggtgtgccacgagttctgccagagcgacgacccccccatcatcctgcaggagcagaagaccgtgctggccagcgtgttcagcgtgctgagcgccatctacgccagccagaccgagcaggagtacctgaagatcgagaaggtggacctgcccctgatcgacagcctgatcagagtgctgcagaacatggagcagtgccagaagaagcccgagaacagcgccgagagcaacaccgaggagaccaagagaaccgacctgacccaggacgacttccacctgaagatcctgaaggacatcctgtgcgagttcctgagcaacatcttccaggccctgaccaaggagaccgtggcccagggcgtgaaggagggccagctgagcaagcagaagtgcagcagcgccttccagaacctgctgcccttctacagccccgtggtggaggacttcatcaagatcctgagagaggtggacaaggccctggccgacgacctggagaagaacttccccagcctgaaggtgcagacctag

SEQ ID NO: 236448 - DNA, 1425 bp, Artificial Sequence
  derived and/or modified sequence
atggatcgtaacccctctcctccaccacctggccgggacaaggaagaggaggaagaggtggccgggggcgattgtattggctctacagtttactctaaacattggctctttggtgttttgagtggtttgattcagatcgtcagccctgagaacaccaaaagctcatcagacgacgaagagcagttaacagagctggacgaagaaatggagaatgaaatctgtcgcgtgtgggacatgagcatggacgaagacgtggcactgtttcttcaggaatttaatgcccccgacattttcatgggagtgctcgccaagagcaaatgtccacgtttaagagagatttgtgtggggatcctcggtaacatggcgtgctttcaggagatctgtgttagtatatcgagcgataaaaacttgggccaggttctgctgcactgtctctacgacagcgatcctcctaccctgctggagacatcacggctcctgctgacctgtctctctcaggccgaagtcgcaagcgtctgggtggagcggatccaagagcatccagcaatctatgacagcatttgcttcatcatgtccagttctacgaatgtcgatctgttggtcaaggtaggggaggtggtcgacaagctatttgacctggatgaaaagcttatgctggaatgggtccggaatggtgccgcccagccgctcgaccaacctcaggaagagagtgaagagcagcccgtgttccgcctggtaccttgcatcctcgaggctgccaaacaggttcggtccgagaaccccgaatggcttgatgtctacatgcacatcctgcaactcctgacaacagttgacgacggcattcaggctatagtccattgccctgacactgggaaggacatatggaacctcctgttcgacctggtgtgtcatgagttctgccaaagtgatgatccccctataattctgcaggaacaaaaaaccgtcctcgcatcagtgtttagcgtgcttagtgctatatatgcaagccagaccgagcaggaatacttgaagatcgagaaggtggatctccccctgattgatagtcttattcgcgtcttgcagaatatggagcagtgccaaaagaaaccagaaaactctgcagaatccaatactgaagagacgaagcgcaccgatctcactcaggacgattttcaccttaagatactgaaagacatcctctgtgaatttctatccaatatcttccaggcgttaacaaaggaaacggtggcccaaggagtcaaagaagggcagctaagcaagcagaagtgttcaagcgcctttcagaacctgctgcctttttactctccggtggttgaagactttatcaagatactccgggaagtggacaaggctttagcagacgacctcgagaagaattttccaagcctaaaggtccaaacctag

SEQ ID NO: 236449 - DNA, 1425 bp, Artificial Sequence
  derived and/or modified sequence
atggacaggaaccccagccccccacctcctggccgggacaaggaggaggaggaggaggtggccggcggggactgcatcggcagcacagtgtacagcaagcactggctgtttggagtgctgagcggcctcatccagatcgtgtccccagagaacaccaagagcagcagtgatgatgaggagcagctgacagagctggatgaggagatggagaatgagatctgccgggtgtgggacatgtccatggatgaagatgtggccctcttcctgcaggagttcaatgccccagacatcttcatgggcgtgctggccaagagcaagtgcccccggctgcgggagatctgtgtgggcatcctgggcaacatggcctgcttccaggagatctgtgtgtccatcagcagtgacaagaacctgggccaggtgctgctgcactgcctgtatgacagcgacccccccaccctgctggagaccagccggctgctgctgacctgcctgagccaggccgaggtggcctctgtgtgggtggagcgcatccaggagcacccagccatctatgacagcatctgcttcatcatgagcagcagcaccaacgtggacctgctggtgaaggtgggggaggtggtggacaagctgtttgacctggatgagaagctgatgctggagtgggtgagaaatggagctgcccagcccctggaccagccccaggaggagagcgaggagcagcctgtgttccggctggtgccctgcatcctggaggccgccaagcaggtgcgctcagaaaatcctgagtggctggatgtgtacatgcacatcctgcagctgctgaccaccgtggatgatggcatccaggccatcgtgcactgcccagacaccgggaaggacatctggaacctgctgtttgacctggtgtgccacgagttctgccagagtgatgacccccccatcatcctgcaggagcagaagacagtgctggcctctgtgttttctgtgctgagcgccatctatgccagccagacagagcaggagtacctgaagattgagaaggtggacctgcccctgattgacagcctcatccgggtgctgcagaacatggagcagtgccagaagaagccagaaaattctgctgagagcaacacagaggagaccaagaggacagacctgacccaggatgacttccacctgaagatcctgaaggacatcctgtgtgagttcctgagcaacatcttccaggccctgaccaaggagaccgtggcccagggcgtgaaggagggccagctgagcaagcagaagtgcagcagcgccttccagaacctgctgcccttctacagccctgtggtggaggacttcatcaagatcctgcgggaggtggacaaggccctggctgatgacctggagaagaacttccccagcctgaaggtgcagacctag

SEQ ID NO: 236450 - DNA, 1425 bp, Artificial Sequence
  derived and/or modified sequence
atggaccggaaccccagcccccccccccccggccgggacaaggaggaagaggaggaagtggcgggcggggattgtataggttctacagtctatagcaaacactggctgttcggggtgctgagtggcctcatccagattgtttcacccgaaaacactaaatcctcatcggacgatgaagagcagctgactgagcttgacgaagagatggaaaatgaaatttgtcgcgtgtgggacatgtcaatggacgaagatgtagccttattcctccaggagttcaatgcccccgatatctttatgggcgtgctggccaaatcgaaatgtcccagattgagagagatctgcgtagggatcctgggtaacatggcatgctttcaggaaatatgcgtgtctatctcttcagataagaacctggggcaagtgctgttacattgcttatacgactccgatccacccactcttctggagaccagtcgcctgctgctcacctgtttgtctcaggctgaggtcgcaagcgtgtgggtggagcggatccaggagcaccccgcaatatatgacagcatctgcttcatcatgagcagtagtacgaatgttgacctgctagtaaaggtgggcgaagtggtggacaagctgtttgacctcgacgagaagctgatgctcgagtgggttaggaacggcgcggcacaaccattagaccagccacaggaggaatctgaagaacaaccagttttccggcttgtaccctgtatcctcgaagctgctaaacaggtcagatccgagaatcccgagtggcttgacgtgtatatgcacatactgcagctcctgaccacagtcgacgacggtatacaggctattgtgcattgtccagacaccggtaaggacatttggaacctcctctttgaccttgtttgtcatgagttctgtcagagcgacgaccctcctattatcctgcaggagcaaaaaacagtcctcgctagtgtattcagcgtgttgtctgcaatttatgcatctcagaccgaacaggaataccttaagatagagaaagtcgatttgcccctgatcgacagcctgattcgggttcttcagaacatggaacaatgtcagaagaagccggagaattctgcagagagcaataccgaagagaccaaaagaacagatctgacgcaagatgatttccacctgaagatcctgaaggacatcctgtgtgagtttctaagcaacatctttcaagcactgacgaaagaaacggtggcacagggagttaaagaaggccaattatcaaagcagaagtgtagcagtgcttttcagaaccttctgcccttttattcccctgtggtggaggacttcattaagatcctgcgagaggtggataaggccctggcagacgacctcgagaaaaacttcccctctctaaaggtacaaacctag

SEQ ID NO: 236451 - RNA, 1425 nt, Artificial Sequence
  derived and/or modified sequence
auggaccguaacccauccccaccacccccugggcgagacaaggaagaggaagaggaaguugccggaggggacugcaucggcucuaccguguacaguaaacacugguuguuuggagugcuuuccggacuaauucagaucgucagcccagagaauaccaaaaguucaagcgaugaugaagaacagcuuaccgaacucgacgaggaaauggaaaacgagaucuguagaguuugggacaugaguauggacgaggauguugcccuuuuuuugcaggaauucaacgcaccugacaucuuuauggggguguuagccaaaucuaagugcccccgccugagggaaaucuguguggguauacuggguaacauggccuguuuucaggaaauuuguguauccauuucuucagauaagaaccugggccagguuuugcuucacuguuuauacgauucugacccucccacucuacuugaaacuaguagguuacugcugacaugucuuagucaagcggagguggcaucuguguggguggagcgcauccaggagcauccggccauuuaugacucaaucuguuuuauuaugaguaguaguaccaacguagaccuccucgugaaaguuggcgaggugguggacaaguuauucgaccuggaugagaaacugaugcuggaaugggugagaaacggagccgcccagccauuggaucaaccacaagaggaaagcgaagaacagccaguguuccgacuggucccuuguauccucgaggccgccaagcaggucaggucugaaaaucccgaguggcuggacgucuauaugcauauucugcaauugcucacaacagucgacgacggcauccaagcuauuguucauugccccgauacaggcaaagacaucuggaaucuuuuauucgaccucgugugucacgaauucugccaaagcgaugaucccccuauuaucuuacaggagcaaaagacagugcuugcaucuguauuuuccgugcuuagcgcgauuuacgcuucucagacugaacaagaauaccugaaaauugagaaaguagaccugccccuuaucgacucucugauccgcguccuucagaacauggaacaaugccagaaaaagccggaaaauuccgccgaaucaaauacugaagaaaccaaaaggacggaccuaacccaggaugauuuccaucugaagauucugaaggacauucucugcgaguuucucucuaauauuuuucaggcacucacgaaagagacaguggcacagggggucaaagaagggcaguuaucgaaacagaaguguaguagcgcauuccagaauuugcugccuuuuuacucuccaguaguggaagacuuuauaaagauccugagagaggucgacaaggcccuagcugacgacuuggagaaaaacuucccuucccugaaagugcagaccuag

SEQ ID NO: 236452 - RNA, 1425 nt, Artificial Sequence
  derived and/or modified sequence
auggaccguaacccauccccaccacccccugggcgagacaaggaagaggaagaggaaguugccggaggggacugcaucggcucuaccguguacaguaaacacugguuguuuggagugcuuuccggacuaauucagaucgucagcccagagaauaccaaaaguucaagcgaugaugaagaacagcuuaccgaacucgacgaggaaauggaaaacgagaucuguagaguuugggacaugaguauggacgaggauguugcccuuuuuuugcaggaauucaacgcaccugacaucuuuauggggguguuagccaaaucuaagugcccccgccugagggaaaucuguguggguauacuggguaacauggccuguuuucaggaaauuuguguauccauuucuucagauaagaaccugggccagguuuugcuucacuguuuauacgauucugacccucccacucuacuugaaacuaguagguuacugcugacaugucuuagucaagcggagguggcaucuguguggguggagcgcauccaggagcauccggccauuuaugacucaaucuguuuuauuaugaguaguaguaccaacguagaccuccucgugaaagucggggaaguuguggauaaguuauuugaucuggacgaaaaacucaugcucgaguggguucgcaauggugccgcacagccgcuggaccaaccacaggaggaauccgaagaacagccuguuuuccgccuggucccuugcauucucgaagccgcaaagcaagugcgaagugagaacccugagugguuagauguguacaugcauauucuccaacugcugacaaccgucgaugaugggauacaggccauaguccauugucccgacacagggaaagacauuuggaaucuacuauucgaucugguuugucaugaauucugucaauccgaugauccaccuauaauacugcaagaacaaaaaacagugcuugccuccguguucucuguccuaucugccauauaugcgagccagaccgagcaagaguauuugaagauugaaaaaguugaccucccccucauagacagccucauaagaguacugcagaauauggagcagugccaaaaaaagcccgaaaacuccgccgagucgaacaccgaagagaccaagaggacugaccuuacccaggacgauuuccaccugaagauucugaaggacauauugugugaauucuuaucaaauauuuuccaagcuuugacgaaagagaccguggcucagggugucaaagaaggccagcuaucaaaacagaaguguaguucagcuuuucaaaaucuguugccuuucuauaguccgguuguugaggauuucaucaaaauucuucgcgaagucgacaaagcacuugccgacgaucucgagaaaaacuucccuucccugaagguccagacauag

SEQ ID NO: 236453 - protein, 351 aa, Artificial Sequence
  derived and/or modified sequence
MEPAPGLVEQPKCLEAGSPEPEPAPWQALPVLSEKQSGDVELVLAYAAPVLDKRQTSRLLKEVSALHPLPAQPHLKRVRPSRDAGSPHALEMLLCLAGPASGPRSLAELLPRPAVDPRGLGQPFLVPVPARPPLTRGQFEEARAHWPTSFHEDKQVTSALAGRLFSTQERAAMQSHMERAVWAARRAAARGLRAVGAVVVDPASDRVLATGHDCSCADNPLLHAVMVCVDLVARGQGRGTYDFRPFPACSFAPAAAPQAVRAGAVRKLDADEDGLPYLCTGYDLYVTREPCAMCAMALVHARILRVFYGAPSPDGALGTRFRIHARPDLNHRFQVFRGVLEEQCRWLDPDT

SEQ ID NO: 236454 - protein, 53 aa, Artificial Sequence
  derived and/or modified sequence
MEPAPGLVEQPKCLEAGSPEPEPAPWQALPVLSEKQSGDVELVLAYAAPVLDK

SEQ ID NO: 236455 - DNA, 1056 bp, Artificial Sequence
  derived and/or modified sequence
atggagcccgcccccggcctggtggagcagcccaagtgcctggaggccggcagccccgagcccgagcccgccccctggcaggccctgcccgtgctgagcgagaagcagagcggcgacgtggagctggtgctggcctacgccgcccccgtgctggacaagagacagaccagcagactgctgaaggaggtgagcgccctgcaccccctgcccgcccagccccacctgaagagagtgagacccagcagagacgccggcagcccccacgccctggagatgctgctgtgcctggccggccccgccagcggccccagaagcctggccgagctgctgcccagacccgccgtggaccccagaggcctgggccagcccttcctggtgcccgtgcccgccagaccccccctgaccagaggccagttcgaggaggccagagcccactggcccaccagcttccacgaggacaagcaggtgaccagcgccctggccggcagactgttcagcacccaggagagagccgccatgcagagccacatggagagagccgtgtgggccgccagaagagccgccgccagaggcctgagagccgtgggcgccgtggtggtggaccccgccagcgacagagtgctggccaccggccacgactgcagctgcgccgacaaccccctgctgcacgccgtgatggtgtgcgtggacctggtggccagaggccagggcagaggcacctacgacttcagacccttccccgcctgcagcttcgcccccgccgccgccccccaggccgtgagagccggcgccgtgagaaagctggacgccgacgaggacggcctgccctacctgtgcaccggctacgacctgtacgtgaccagagagccctgcgccatgtgcgccatggccctggtgcacgccagaatcctgagagtgttctacggcgcccccagccccgacggcgccctgggcaccagattcagaatccacgccagacccgacctgaaccacagattccaggtgttcagaggcgtgctggaggagcagtgcagatggctggaccccgacacctag

SEQ ID NO: 236456 - DNA, 162 bp, Artificial Sequence
  derived and/or modified sequence
atggagcccgcccccggcctggtggagcagcccaagtgcctggaggccggcagccccgagcccgagcccgccccctggcaggccctgcccgtgctgagcgagaagcagagcggcgacgtggagctggtgctggcctacgccgcccccgtgctggacaagtag

SEQ ID NO: 236457 - DNA, 1578 bp, Artificial Sequence
  derived and/or modified sequence
cgctcgcgcccggatccctcaggggttagcaggacatgagggagtgtagctctgatgcggtgacctgggccggagccctcggactagcctcagctttggtggcagcacgccctgccttgtggagccacggcctcccgggacggactccccggctctcccccagccgcccgcagccgccggatgatcctctgctcccgtctctgtctcccacagtcggcctcgctgaggatggagcccgccccgggcctcgtggagcagcccaagtgcttggaggccgggagcccggagcctgagccggcgccgtggcaggccctccctgtcctgtccgagaagcagtcaggggacgtggagctggtgctggcctacgccgcgcccgtcctggacaagcgccagacctcacgcctcctgaaggaggtgtcggccctgcacccgctccccgcccagcctcacctcaagcgggtgcggcccagccgcgatgccggcagcccccacgccctggagatgctgctttgcctggctgggccggcctcgggcccgcgctcgctggctgagctcctgccacggccggctgtggacccccgcggcctggggcaacccttcctggtgcccgtgcccgcccggccgcctctgaccaggggccagttcgaggaggcccgggcccactggcccacgtccttccacgaggacaagcaggtgaccagcgccctggctgggcggctcttctccacgcaggagcgcgccgccatgcagagccacatggagcgggcggtgtgggcggcccggcgggcagcagcgcggggcttgcgggccgtgggggccgtggtagtggacccggcctcggaccgcgtgctggccaccggccacgactgcagctgcgcggacaaccccctcctgcacgccgtcatggtgtgcgtggacctcgtggcgcgcggccagggccgcggcacctacgacttcagacccttccccgcctgctccttcgccccggccgctgccccccaggccgtccgcgcaggcgccgtgcgtaaactggacgcagacgaggacggcctcccctacctgtgcactggctacgacctgtacgtgacccgcgagccctgcgccatgtgcgccatggccctggtgcacgcacgcatcctgcgcgtcttctacggtgcgccctcgcccgacggcgccctgggcacccgcttccgcatccacgcacggcccgacctcaaccaccgcttccaggtgttccgcggggtgctggaggagcagtgccgctggctggaccccgacacgtaggcgccgccctcctgcctccggacccttcccgctcccggccgtggggcgcccctcctggacttccgggcctcgatttcttccgcacaagcctgaccgtggatttcagggacacataccgcctccagcggggagcacgggtgctgccttccgtgcggatcgagctttcctggactcggtcattggggccaccccgtgccagcggtgcccttctgcggccgcccttgctgcgtttgtgtcccctctgtctcgcgggccgggaaactgctctgatgggaaaataaacagcccaaaacc

SEQ ID NO: 236458 - DNA, 983 bp, Artificial Sequence
  derived and/or modified sequence
tttgtttttcatcagacagaggttgtactcttggagggacaagcgaggctgtgtttgtcttttaccctggagacagtggagtgtttgtggcctagcagggccgtgcgggcctctcggtcctggtcgcgcgtggtgtgcgttttgggagggcccagcgagtcggctgctatgggccccacctggcacggggcctcgggcagcggcagcacctggcgctgcctccgcgcttcctgctcccggctcccactgcatctccggttctgtgctttgttgaacgcgtgagcttcgggcagcgctggggccgcttcagcgtgacctccaaggccactggcctggagttccactggctgctggtcccccatctgtggggcgccccggcggctgaggcgtggaccaggcagtgcatgtcgaggagtagcacccacagctgcgcggctgcgaaatgatccagagacacatccctgtctgcgggaggagccgtccataccagcggggatgtgtagtccaggctggcagttcaggatcacccggctggagtcattttaagatcatctgcggcttagccccagcaccatctgaggcagtactgtctgctagaaataactgtgagcacacaggggttagcaggacatgagggagtgtagctctgatgcggtgacctgggccggagccctcggactagcctcagctttggtggcagcacgccctgccttgtggagccacggcctcccgggacggactccccggctctcccccagccgcccgcagccgccggatgatcctctgctcccgtctctgtctcccacagtcggcctcgctgaggatggagcccgccccgggcctcgtggagcagcccaagtgcttggaggccgggagcccggagcctgagccggcgccgtggcaggccctccctgtcctgtccgagaagcagtcaggggacgtggagctggtgctggcctacgccgcgcccgtcctggacaagc

SEQ ID NO: 236459 - DNA, 1056 bp, Artificial Sequence
  derived and/or modified sequence
atggaacctgccccagggctggtggagcagcccaagtgtctggaggcaggtagccccgaaccagaacctgcgccatggcaggccctgcccgtgttatctgagaagcaatctggcgatgtcgaattagtcctcgcctacgccgccccggtgctcgacaagagacagacatccagactcctgaaggaagttagcgccttgcaccctttaccagcccagccacatttgaagcgggttaggccttcccgggacgcaggcagtccacacgccttggaaatgcttctgtgtctggcaggccccgcttccggccccaggtctctggcagaacttctccccaggccggccgtcgacccgaggggtctcggccagccctttctggtccctgtgcctgcaagacctcccctaacccgtgggcagtttgaggaggcccgggcacattggcctacatctttccacgaagataaacaggtgaccagcgcgttagccggaagacttttctccactcaggaacgcgctgccatgcagagccacatggagagagccgtgtgggctgcacgccgagcagcagctcggggactccgggccgtgggcgcagtggtcgtcgatccagctagcgatcgtgttttagcaaccgggcacgactgctcatgcgctgacaatccgctgctccacgctgttatggtatgtgttgatctggtggcgagaggacagggtcgcggtacatacgattttaggccttttccagcatgctcatttgccccagcagccgcacctcaggcagtgcgtgccggagccgtgagaaaactggacgctgacgaggacgggctgccctacctttgcactgggtatgacctatacgtgacccgggagccctgcgctatgtgcgcaatggccctggtacatgcgaggattctgcgtgtgttctacggggccccatctcctgatggcgctttgggaacacgatttaggattcatgcacggccagacctgaatcatcgcttccaggtatttagaggggtcctggaggaacaatgccggtggctagaccccgacacatag

SEQ ID NO: 236460 - DNA, 162 bp, Artificial Sequence
  derived and/or modified sequence
atggaacctgcacctggcttggtcgagcaacccaaatgcctggaagctggcagtcctgagcctgagcccgcaccatggcaagccctccccgtgctctctgaaaaacaatccggagatgttgagctcgtactggcctatgcagcccccgtgctggacaagtag

SEQ ID NO: 236461 - DNA, 1056 bp, Artificial Sequence
  derived and/or modified sequence
atggagcccgcccctggcctggtggagcagcccaagtgcctggaggccggcagccctgagcctgagcccgccccctggcaggccctgcctgtgctgtctgagaagcagagcggagatgtggagctggtgctggcctatgctgcccctgtgctggacaagaggcagaccagccggctgctgaaggaggtgtctgccctgcaccccctgcctgcccagccccacctgaagagggtgcggcccagcagagatgctggcagcccccacgccctggagatgctgctgtgcctggccggccctgccagcggccccaggagcctggccgagctgctgcccaggcctgctgtggacccccggggcctgggccagcccttcctggtgcctgtgcctgcccggccccccctgacccggggccagtttgaggaggcccgggcccactggcccaccagcttccacgaggacaagcaggtgaccagcgccctggccggccgcctcttcagcacccaggagagagctgccatgcagagccacatggagagagctgtgtgggccgccaggagagctgctgcccggggcctgcgggctgtgggcgctgtggtggtggaccctgccagtgacagagtgctggccaccggccatgactgcagctgtgccgacaaccccctgctgcatgctgtgatggtgtgtgtggacctggtggcccggggccagggccggggcacctatgacttccggcccttccctgcctgcagctttgccccagctgctgccccccaggccgtgcgggccggggctgtgaggaagctggatgctgatgaagatggcctgccctacctgtgcaccggctatgacctgtatgtgacccgggagccctgtgccatgtgtgccatggccctggtgcacgcccgcatcctgcgggtcttctacggggcccccagcccagatggagccctgggcacccgcttccgcatccacgcccggccagacctgaaccaccgcttccaggtgttccggggcgtgctggaggagcagtgccgctggctggaccctgacacctag

SEQ ID NO: 236462 - DNA, 162 bp, Artificial Sequence
  derived and/or modified sequence
atggagcccgcccctggcctggtggagcagcccaagtgcctggaggccggcagccctgagcctgagcccgccccctggcaggccctgcctgtgctgtctgagaagcagagcggagatgtggagctggtgctggcctatgctgcccctgtgctggacaagtag

SEQ ID NO: 236463 - DNA, 1056 bp, Artificial Sequence
  derived and/or modified sequence
atggagcccgcccccggcctggtggagcagcccaagtgcctggaggctggctcccctgaaccagaacctgcaccctggcaagcgctaccagtgctctccgagaagcagtcaggagatgtggaattagtcttggcttacgctgctcctgtcctggataagaggcaaaccagtaggctcttgaaggaggtttccgccctgcaccctttgcctgcccaacctcatttaaagcgagtccgcccaagtagagatgccggatccccacacgctctcgaaatgcttctgtgtctggccggtccggcatccggacctcgaagtctggccgaactgctgcctcgccccgccgttgaccccaggggtttgggccagcccttcttggtgcctgtccccgcccggccaccattgacccgaggccagttcgaggaggccagagctcactggccaactagtttccatgaggacaaacaggttactagtgcactggccggacgtctgttttccacgcaagagcgggcagctatgcaatcccatatggaaagggcggtctgggctgcccgtagggccgctgcccgtggcctgcgcgctgtgggagcggtcgtggtggaccctgcatctgaccgagttctggccacaggccacgactgctcgtgtgctgacaatccactcctccatgccgtaatggtctgcgtggatctggtggcccgtgggcagggcaggggcacatacgacttcaggcccttccccgcatgcagcttcgcaccagccgccgccccccaagccgtacgagcaggcgctgttcgtaaactggatgccgacgaagacggcttaccatacctgtgtactggatacgacctgtacgtcactagagagccctgtgccatgtgtgccatggctctggtgcacgcccgtatacttcgcgtcttctacggcgcaccatctcccgacggggcccttggtacccggtttaggattcacgctagacctgatctgaaccaccgatttcaggtgttcagaggggtcctggaggaacagtgccggtggctggatcccgacacgtag

SEQ ID NO: 236464 - DNA, 162 bp, Artificial Sequence
  derived and/or modified sequence
atggagcccgcccccggcctggtggagcagcccaagtgcctggaggcaggatcaccggagcccgagccggctccctggcaggccctgccagtgctgtctgaaaaacagtctggagacgtcgagctggtgttagcttatgccgctccagtattagacaagtag

SEQ ID NO: 236465 - DNA, 1056 bp, Artificial Sequence
  derived and/or modified sequence
atggaaccggctccagggcttgtcgaacaacctaagtgtctggaagcagggtcaccagaaccggaaccggctccttggcaagcactgccagtgctgtctgaaaagcaaagcggagacgtggagctggtcctcgcctacgccgcacctgtactggataagcgacagacttccaggcttctcaaggaggtgtccgcactgcatccgctacccgcacaaccacacctgaagcgggtccggccttcccgggacgccggttccccacatgctctcgaaatgctcttatgcctggccggaccggcttctggtcccagaagtctagccgagttgcttcccaggccagcagttgatcccaggggactaggccagccttttttagtccccgttcctgcgcgtcctcctctcacaaggggacaatttgaagaagcccgtgcccactggcctaccagcttccatgaggacaaacaggtcactagcgctctcgccggaaggttattcagcacccaggaacgtgctgcaatgcaatctcatatggaaagagccgtctgggccgctcgacgggcagccgcacgagggctcagagctgtgggagctgttgtggtggaccctgccagcgatagggttctagccactggacatgactgttcctgcgccgacaatcctctgttgcacgcggtgatggtatgtgtggaccttgtggcacgcggacagggcagggggacctacgactttcgcccattcccggcttgctccttcgcgccagccgcagccccacaggcggtgagagcaggagccgttcggaagctggacgcagatgaagacgggctaccctacttatgcacaggctatgacttgtacgtgactcgcgaaccctgcgctatgtgtgcgatggcccttgttcacgcgcgaatcctaagggtgttctacggtgctcccagtcccgatggggcactggggacacgattccggatccatgccaggcccgatcttaaccaccgctttcaggtgtttcgcggtgttctggaagaacaatgcaggtggctggacccagacacctag

SEQ ID NO: 236466 - DNA, 162 bp, Artificial Sequence
  derived and/or modified sequence
atggagccagccccaggcctcgtggagcaacctaaatgtctcgaagctggctctccagagcccgaacctgctccatggcaggctttgcccgtactttcagagaaacagagcggcgacgtggaacttgttctcgcctacgctgctcctgttctcgataaatag

SEQ ID NO: 236467 - DNA, 111 bp, Artificial Sequence
  derived and/or modified sequence
ggacgggacgactggcaggctgcccctccagccgcacctgtcagagatccactaggggaggcaagctgggcacccgaatgtggtggagatctggaaaacctgtatgtttag

SEQ ID NO: 236468 - protein, 436 aa, Artificial Sequence [sequence omitted]

SEQ ID NO: 236469 - protein, 177 aa, Artificial Sequence
  derived and/or modified sequence
MVGFGANRRAGRLPSLVLVVLLVVIVVLAFNYWSISSRHVLLQEEVAELQGQVQRTEVARGRLEKRNSDLLLLVDTHKKQIDQKEADYGRLSSRLQAREGLGKRCEDDKVKLQNNISYQMADIHHLKEQLAELRQEFLRQEDQLQDYRKNNTYLVKRLEYESKRPKRFNQMMERNWI

SEQ ID NO: 236470 - protein, 415 aa, Artificial Sequence
  derived and/or modified sequence
MVVIVVLAFNYWSISSRHVLLQEEVAELQGQVQRTEVARGRLEKRNSDLLLLVDTHKKQIDQKEADYGRLSSRLQAREGLGKRCEDDKVKLQNNISYQMADIHHLKEQLAELRQEFLRQEDQLQDYRKNNTYLVKRLEYESFQCGQQMKELRAQHEENIKKLADQFLEEQKQETQKIQSNDGKELDINNQVVPKNIPKVAENVADKNEEPSSNHIPHGKEQIKRGGDAGMPGIEENDLAKVDDLPPALRKPPISVSQHESHQAISHLPTGQPLSPNMPPDSHINHNGNPGTSKQNPSSPLQRLIPGSNLDSEPRIQTDILKQATKDRVSDFHKLKQSRFFDENESPVDPQHGSKLADYNGDDGNVGEYEADKQAELAYNEEEDGDGGEEDVQDDEERELQMDPADYGKQHFNDVL

SEQ ID NO: 236471 - protein, 24 aa, Artificial Sequence
  derived and/or modified sequence
QDDEERELQMDPADYGKQHFNDVL

SEQ ID NO: 236472 - protein, 433 aa, Artificial Sequence [sequence omitted]

SEQ ID NO: 236473 - DNA, 1311 bp, Artificial Sequence
  derived and/or modified sequence
atggtgggcttcggcgccaacagaagagccggcagactgcccagcctggtgctggtggtgctgctggtggtgatcgtggtgctggccttcaactactggagcatcagcagcagacacgtgctgctgcaggaggaggtggccgagctgcagggccaggtgcagagaaccgaggtggccagaggcagactggagaagagaaacagcgacctgctgctgctggtggacacccacaagaagcagatcgaccagaaggaggccgactacggcagactgagcagcagactgcaggccagagagggcctgggcaagagatgcgaggacgacaaggtgaagctgcagaacaacatcagctaccagatggccgacatccaccacctgaaggagcagctggccgagctgagacaggagttcctgagacaggaggaccagctgcaggactacagaaagaacaacacctacctggtgaagagactggagtacgagagcttccagtgcggccagcagatgaaggagctgagagcccagcacgaggagaacatcaagaagctggccgaccagttcctggaggagcagaagcaggagacccagaagatccagagcaacgacggcaaggagctggacatcaacaaccaggtggtgcccaagaacatccccaaggtggccgagaacgtggccgacaagaacgaggagcccagcagcaaccacatcccccacggcaaggagcagatcaagagaggcggcgacgccggcatgcccggcatcgaggagaacgacctggccaaggtggacgacctgccccccgccctgagaaagccccccatcagcgtgagccagcacgagagccaccaggccatcagccacctgcccaccggccagcccctgagccccaacatgccccccgacagccacatcaaccacaacggcaaccccggcaccagcaagcagaaccccagcagccccctgcagagactgatccccggcagcaacctggacagcgagcccagaatccagaccgacatcctgaagcaggccaccaaggacagagtgagcgacttccacaagctgaagcagagcagattcttcgacgagaacgagagccccgtggacccccagcacggcagcaagctggccgactacaacggcgacgacggcaacgtgggcgagtacgaggccgacaagcaggccgagctggcctacaacgaggaggaggacggcgacggcggcgaggaggacgtgcaggacgacgaggagagagagctgcagatggaccccgccgactacggcaagcagcacttcaacgacgtgctgtag

SEQ ID NO: 236474 - DNA, 1248 bp, Artificial Sequence
  derived and/or modified sequence
atggtggtgatcgtggtgctggccttcaactactggagcatcagcagcagacacgtgctgctgcaggaggaggtggccgagctgcagggccaggtgcagagaaccgaggtggccagaggcagactggagaagagaaacagcgacctgctgctgctggtggacacccacaagaagcagatcgaccagaaggaggccgactacggcagactgagcagcagactgcaggccagagagggcctgggcaagagatgcgaggacgacaaggtgaagctgcagaacaacatcagctaccagatggccgacatccaccacctgaaggagcagctggccgagctgagacaggagttcctgagacaggaggaccagctgcaggactacagaaagaacaacacctacctggtgaagagactggagtacgagagcttccagtgcggccagcagatgaaggagctgagagcccagcacgaggagaacatcaagaagctggccgaccagttcctggaggagcagaagcaggagacccagaagatccagagcaacgacggcaaggagctggacatcaacaaccaggtggtgcccaagaacatccccaaggtggccgagaacgtggccgacaagaacgaggagcccagcagcaaccacatcccccacggcaaggagcagatcaagagaggcggcgacgccggcatgcccggcatcgaggagaacgacctggccaaggtggacgacctgccccccgccctgagaaagccccccatcagcgtgagccagcacgagagccaccaggccatcagccacctgcccaccggccagcccctgagccccaacatgccccccgacagccacatcaaccacaacggcaaccccggcaccagcaagcagaaccccagcagccccctgcagagactgatccccggcagcaacctggacagcgagcccagaatccagaccgacatcctgaagcaggccaccaaggacagagtgagcgacttccacaagctgaagcagagcagattcttcgacgagaacgagagccccgtggacccccagcacggcagcaagctggccgactacaacggcgacgacggcaacgtgggcgagtacgaggccgacaagcaggccgagctggcctacaacgaggaggaggacggcgacggcggcgaggaggacgtgcaggacgacgaggagagagagctgcagatggaccccgccgactacggcaagcagcacttcaacgacgtgctgtag

SEQ ID NO: 236475 - DNA, 75 bp, Artificial Sequence
  derived and/or modified sequence
caggacgacgaggagagagagctgcagatggaccccgccgactacggcaagcagcacttcaacgacgtgctgtag

SEQ ID NO: 236476 - DNA, 1302 bp, Artificial Sequence
  derived and/or modified sequence
atggtgggcttcggcgccaacagaagagccggcagactgcccagcctggtgctggtggtgctgctggtggtgatcgtggtgctggccttcaactactggagcatcagcagcagacacgtgctgctgcaggaggaggtggccgagctgcagggccaggtgcagagaaccgaggtggccagaggcagactggagaagagaaacagcgacctgctgctgctggtggacacccacaagaagcagatcgaccagaaggaggccgactacggcagactgagcagcagactgcaggccagagagggcctgggcaagagatgcgaggacgacaaggtgaagctgcagaacaacatcagctaccagatggccgacatccaccacctgaaggagcagctggccgagctgagacaggagttcctgagacaggaggaccagctgcaggactacagaaagaacaacacctacctggtgaagagactggagtacgagagcttccagtgcggccagcagatgaaggagctgagagcccagcacgaggagaacatcaagaagctggccgaccagttcctggaggagcagaagcaggagacccagaagatccagagcaacgacggcaaggagctggacatcaacaaccaggtggtgcccaagaacatccccaaggtggccgagaacgtggccgacaagaacgaggagcccagcagcaaccacatcccccacggcaaggagcagatcaagagaggcggcgacgccggcatgcccggcatcgaggagaacgacctggccaaggtggacgacctgccccccgccctgagaaagccccccatcagcgtgagccagcacgagagccaccaggccatcagccacctgcccaccggccagcccctgagccccaacatgccccccgacagccacatcaaccacaacggcaaccccggcaccagcaagcagaaccccagcagccccctgcagagactgatccccggcagcaacctggacagcgagcccagaatccagaccgacatcctgaagcaggccaccaaggacagagtgagcgacttccacaagctgaagcagagcagattcttcgacgagaacgagagccccgtggacccccagcacggcagcaagctggccgactacaacggcgacgacggcaacgtgggcgagtacgaggccgacaagcaggccgagctggcctacaacgaggaggaggacggcgacggcggcgaggaggacgtgcagggcgagagaggccccggcctgcacgccatcaccatgaagcccaccagcaagttcttcggctag

SEQ ID NO: 236477 - DNA, 1311 bp, Artificial Sequence
  derived and/or modified sequence
atggtgggattcggagctaatcggagggccggacgactcccctccttggtgctggtcgtgctgttagttgtcatagttgtgttagcatttaattactggtcgatcagctcacgacacgtcttgttgcaagaggaggttgctgaactgcaggggcaggtgcagcgcaccgaagtggcccgtggaagactcgaaaagaggaactctgacctgctgctgctcgtggatacgcataagaaacaaatcgaccagaaggaagccgattacggtcgcctttcctcacgactgcaagcccgcgaaggcctgggaaaacggtgcgaggatgacaaagtgaagttacagaataacatttcttaccagatggccgacatacatcacctcaaagaacaactggctgaactgagacaggagttcctccggcaggaagaccagttgcaggactacagaaagaacaatacctatcttgtcaaacgactggaatacgagtcctttcagtgtgggcagcaaatgaaggagcttcgggctcaacatgaggaaaacattaagaaattggcagatcagtttctggaggaacaaaaacaggaaacgcagaagattcagagcaatgatgggaaggaacttgacatcaataatcaggttgtcccaaagaacatcccaaaggttgctgaaaatgtagctgacaaaaacgaagagccatctagtaaccacatcccacacggcaaggaacaaattaagcgcggcggcgacgccgggatgcctggtatcgaagaaaatgatttagcaaaggtcgatgacctcccacctgctctgaggaaaccccccatctcagtgagccaacatgagtcacaccaggccatttcacacctaccgacagggcagcctttgtcccctaacatgcctcctgactcacatatcaaccacaacggcaatcccggcacatccaaacaaaaccccagctctccgctccagcgccttatcccaggctcaaatctcgattctgaacctcggatccagaccgatattctcaagcaggccaccaaggatcgcgtcagtgacttccacaaactgaaacagagcagatttttcgacgaaaacgagtctccggtggatccacagcacggcagtaaacttgctgattacaacggagatgatgggaatgttggggaatacgaggctgacaagcaggccgaactggcctacaatgaagaagaagacggagacggcggggaagaggacgtccaagatgatgaagagcgagagctacagatggaccccgccgattatggcaaacagcactttaatgacgtactgtag

SEQ ID NO: 236478 - DNA, 1248 bp, Artificial Sequence
  derived and/or modified sequence
atggtggtgattgtggtgctcgcttttaattactggagcatttcttcccgacacgtcctgcttcaggaagaggtggccgagctccagggacaggtgcagcgaactgaagtggcacgaggacgcttagagaaacgcaattcggacctccttctgctcgtggatactcacaagaaacagattgaccagaaagaagccgactacggcagactttccagccgcctccaggcccgggaggggctgggcaaacggtgcgaagatgataaagtgaaattgcagaataatatctcctaccaaatggcagacatccatcatcttaaagagcaattagcggagcttcgacaggaattcctgagacaggaagatcagctccaggattataggaaaaacaacacctacctggtcaaacgtttggaatatgagagttttcagtgcggccaacaaatgaaggagctgcgggcccaacacgaagagaatattaagaaacttgccgaccaattcttagaagagcaaaaacaagaaacccagaaaatccaatctaacgatggcaaggagctggacattaacaatcaggttgtgccaaagaacattccgaaggtggccgaaaacgtggcagataaaaatgaggagccaagttctaatcacattccccacggcaaggagcaaataaaacgtggaggtgatgcgggaatgcccggaatcgaggagaacgatttggcaaaagtagacgatctgcctccagctctccggaaacctccgatctccgtcagtcagcacgagagccaccaggccattagccatctgcccactggtcagccccttagtcctaatatgccccctgattcccacatcaatcataatggaaaccctggcacgtcaaagcagaacccctcatcacccctccagcgcttaatacccggtagcaatctcgattccgaacctaggattcagaccgatatcctcaagcaggccacgaaagaccgtgtgagcgactttcataagctgaaacagagccgatttttcgacgaaaacgaatccccggtggaccctcagcatggcagtaaactggctgactataacggggatgacggcaacgtgggcgagtacgaggctgacaaacaggctgagctggcgtacaatgaggaggaggatggcgacggtggcgaagaagatgtgcaggacgatgaggagagagaattacagatggaccctgctgactacgggaaacagcattttaacgacgtcctgtag

SEQ ID NO: 236479 - DNA, 75 bp, Artificial Sequence
  derived and/or modified sequence
caagacgacgaagagcgtgaactgcaaatggacccagcagattacggcaaacagcactttaacgacgtactgtag

SEQ ID NO: 236480 - DNA, 1302 bp, Artificial Sequence
  derived and/or modified sequence
atggtcgggttcggagcaaatcggcgtgcgggaaggctcccaagtctggttcttgtcgtgctgcttgtggtgatcgttgttctggcctttaactactggagtatctccagtcgacacgtcctgctccaggaggaagtcgcggagctgcaaggccaagtgcagcgaaccgaagtggcacggggcaggctcgaaaagaggaattctgacctcctgctgctagtggacacgcacaagaagcagatcgaccaaaaagaagccgactacgggcggctgtcgtcacgcctgcaagcccgcgaaggactcggcaagcgatgcgaggatgacaaggtcaagctacagaacaacatctcataccagatggcggacatacaccacctgaaggagcaactggccgaactgaggcaagagttccttaggcaagaagatcaactgcaggattaccgcaagaataatacttatctcgtaaaaagactggaatacgagagtttccaatgcggccagcagatgaaggagctcagagctcagcacgaggaaaacatcaaaaaattggccgaccaatttttggaggagcaaaaacaagagactcaaaagatccagagcaacgatgggaaagagctcgatattaataaccaggtggttcctaagaacatccctaaggtggccgaaaatgtggcagacaagaatgaggaacctagctcgaaccacattccgcatggcaaggagcagatcaagagaggaggcgatgctgggatgcctggtatcgaggagaatgaccttgcgaaggtggacgacctgcccccagcgctccggaagccccccatctcagtatcacagcatgagtcacaccaggccattagtcaccttcccacaggccaacctctttcccccaacatgcctccggactcgcatataaaccacaacgggaaccccggaacatccaaacaaaacccttcgagccccctgcaacgcctgataccagggtccaacttggactcagaaccaagaattcagactgacatcctcaaacaggccactaaggaccgcgtctcggatttccacaaacttaaacaatctcggttctttgatgaaaacgagtctcctgtcgatccccagcacggatctaaactcgctgattacaacggcgatgacgggaacgtcggagagtatgaggctgacaaacaggcagagttggcttataacgaggaagaggatggggacggtggtgaagaagatgtgcaaggcgagcgcggacctggccttcacgccatcacaatgaaaccaacttcaaagtttttcggttag

SEQ ID NO: 236481 - DNA, 1311 bp, Artificial Sequence
  derived and/or modified sequence
atggtgggctttggagccaacagaagagctggccgcctgcccagcctggtgctggtggtgctgctggtggtgattgtggtgctggccttcaactactggagcatcagcagcagacatgtgctgctgcaggaggaggtggccgagctgcagggccaggtgcagaggacagaggtggcccggggccgcctggagaagaggaacagcgacctgctgctgctggtggacacccacaagaagcagattgaccagaaggaggccgactatggccgcctgagcagccggctgcaggcccgggagggcctgggcaagagatgtgaagatgacaaggtgaagctgcagaacaacatctcctaccagatggctgacatccaccacctgaaggagcagctggccgagctgcggcaggagttcctgcggcaggaggaccagctgcaggactacaggaagaacaacacctacctggtgaagaggctggagtatgagagcttccagtgtggccagcagatgaaggagctgcgggcccagcacgaggagaacatcaagaagctggccgaccagttcctggaggagcagaagcaggagacccagaagatccagagcaatgatggcaaggagctggacatcaacaaccaggtggtgcccaagaacatccccaaggtggccgagaatgtggccgacaagaatgaggagcccagcagcaaccacatcccccacggcaaggagcagatcaagagaggaggagatgctggcatgcctggcatcgaggagaatgacctggccaaggtggatgacctgcccccagccctgaggaagccacccatctctgtgtcccagcacgagagccaccaggccatcagccacctgcccaccggccagcccctgagccccaacatgcccccagacagccacatcaaccacaatggaaatcctggcaccagcaagcagaaccccagcagccccctgcagaggctcatccctggcagcaacctggacagcgagccccgcatccagacagacatcctgaagcaggccaccaaggacagagtgtctgacttccacaagctgaagcagagccgcttctttgatgaaaatgaaagccctgtggacccccagcacggcagcaagctggccgactacaatggagatgatggaaatgtgggggagtatgaagctgacaagcaggccgagctggcctacaatgaggaggaggatggagatggaggagaggaggatgtgcaggatgatgaggagcgggagctgcagatggaccctgctgactatggcaagcagcacttcaatgatgtgctgtag

SEQ ID NO: 236482 - DNA, 1248 bp, Artificial Sequence
  derived and/or modified sequence
atggtggtgattgtggtgctggccttcaactactggagcatcagcagccgccacgtgctgctgcaggaggaggtggccgagctgcagggccaggtgcagaggacagaggtggcccggggccgcctggagaagaggaacagcgacctgctgctgctggtggacacccacaagaagcagattgaccagaaggaggccgactatggccgcctgagcagccggctgcaggcccgggagggcctgggcaagagatgtgaagatgacaaggtgaagctgcagaacaacatctcctaccagatggctgacatccaccacctgaaggagcagctggccgagctgcggcaggagttcctgcggcaggaggaccagctgcaggactacaggaagaacaacacctacctggtgaagaggctggagtatgagagcttccagtgtggccagcagatgaaggagctgcgggcccagcacgaggagaacatcaagaagctggccgaccagttcctggaggagcagaagcaggagacccagaagatccagagcaatgatggcaaggagctggacatcaacaaccaggtggtgcccaagaacatccccaaggtggctgaaaatgtggccgacaagaatgaggagcccagcagcaaccacatcccccacggcaaggagcagatcaagagaggaggagatgctggcatgcctggcattgaagaaaatgacctggccaaggtggatgacctgcccccagccctgaggaagccacccatctctgtgtcccagcacgagagccaccaggccatcagccacctgcccaccggccagcccctgagccccaacatgcccccagacagccacatcaaccacaacggcaaccctggcaccagcaagcagaaccccagcagccccctgcagaggctcatccctggcagcaacctggacagcgagccccgcatccagacagacatcctgaagcaggccaccaaggacagagtgtctgacttccacaagctgaagcagagccgcttctttgatgaaaatgaaagccctgtggacccccagcacggcagcaagctggccgactacaatggagatgatggaaatgtgggggagtatgaggccgacaagcaggccgagctggcctacaatgaggaggaggatggagatggaggagaagaagatgtgcaggatgatgaggagcgggagctgcagatggaccctgctgactatggcaagcagcacttcaatgatgtgctgtag

SEQ ID NO: 236483 - DNA, 75 bp, Artificial Sequence
  derived and/or modified sequence
caggatgatgaggagcgggagctgcagatggaccctgctgactatggcaagcagcacttcaatgatgtgctgtag

SEQ ID NO: 236484 - DNA, 1302 bp, Artificial Sequence
  derived and/or modified sequence
atggtgggctttggagccaacagaagagctggccgcctgcccagcctggtgctggtggtgctgctggtggtgattgtggtgctggccttcaactactggagcatcagcagcagacatgtgctgctgcaggaggaggtggccgagctgcagggccaggtgcagaggacagaggtggcccggggccgcctggagaagaggaacagcgacctgctgctgctggtggacacccacaagaagcagattgaccagaaggaggccgactatggccgcctgagcagccggctgcaggcccgggagggcctgggcaagagatgtgaagatgacaaggtgaagctgcagaacaacatctcctaccagatggctgacatccaccacctgaaggagcagctggccgagctgcggcaggagttcctgcggcaggaggaccagctgcaggactacaggaagaacaacacctacctggtgaagaggctggagtatgagagcttccagtgtggccagcagatgaaggagctgcgggcccagcacgaggagaacatcaagaagctggccgaccagttcctggaggagcagaagcaggagacccagaagatccagagcaatgatggcaaggagctggacatcaacaaccaggtggtgcccaagaacatccccaaggtggccgagaatgtggccgacaagaatgaggagcccagcagcaaccacatcccccacggcaaggagcagatcaagagaggaggagatgctggcatgcctggcatcgaggagaatgacctggccaaggtggatgacctgcccccagccctgaggaagccacccatctctgtgtcccagcacgagagccaccaggccatcagccacctgcccaccggccagcccctgagccccaacatgcccccagacagccacatcaaccacaatggaaatcctggcaccagcaagcagaaccccagcagccccctgcagaggctcatccctggcagcaacctggacagcgagccccgcatccagacagacatcctgaagcaggccaccaaggacagagtgtctgacttccacaagctgaagcagagccgcttctttgatgaaaatgaaagccctgtggacccccagcacggcagcaagctggccgactacaatggagatgatggaaatgtgggggagtatgaagctgacaagcaggccgagctggcctacaatgaggaggaggatggagatggaggagaggaggatgtgcagggcgagcggggccctggcctgcacgccatcaccatgaagcccaccagcaagttcttcggctag

SEQ ID NO: 236485 - DNA, 1311 bp, Artificial Sequence
  derived and/or modified sequence
atggtgggcttcggcgccaaccggcgggccggccggctgcccagcctggtcctagtcgtgctgctggtagtgatcgtggtgctcgccttcaactattggtccattagcagccggcatgttctcctccaggaggaggtggcagaactccaaggacaggtgcagcgaaccgaggtggccagaggccgtctcgagaaacgcaattcagatctcttgctgctcgtagatacccacaaaaagcaaatcgatcagaaggaagctgactacggacgattgtcatctaggttacaagcgcgggagggccttggtaagcggtgcgaggatgataaagtgaagctgcagaataatatttcataccagatggcggatatccatcacttgaaagagcagctcgctgagctccggcaggaattcctgcggcaggaagatcaattacaggactaccgcaaaaataacacatatcttgtcaaacgattggagtacgaaagtttccaatgcggccagcagatgaaggaattgcgggcgcagcatgaagagaatatcaagaagttggctgaccaatttctggaagagcagaagcaggagacccagaaaatccaatcgaatgatgggaaggaacttgacatcaataatcaggtggtgccaaagaatatccctaaggtcgccgaaaacgtggccgacaagaacgaagagccatctagtaaccatatcccacacggcaaagagcagattaaacgcggtggagacgccggaatgcctggcatcgaagaaaacgatctggcgaaggttgacgatcttcccccggcactccgcaaaccgcctatctcagtctcccaacacgagtcacaccaggctattagtcacttacccacagggcaacctttgtccccaaatatgccacccgactcgcacattaatcacaatggtaacccagggacgtctaaacagaatccgagttctcccctgcagaggcttatcccagggagtaatctagactctgagccacgaattcagaccgatatattaaaacaggcaacaaaggatagggtaagcgacttccacaagctcaagcaatcacgctttttcgacgagaacgagtctccagtggaccctcagcacggatcaaagctggctgactataacggtgatgacggaaacgtgggcgaatatgaagcagataaacaggctgagctggcctacaatgaagaagaggatggggatggaggagaagaggacgtgcaagacgatgaggaaagggaactccagatggaccctgcagactacggtaaacagcatttcaacgatgtgctgtag

SEQ ID NO: 236486 - DNA, 1248 bp, Artificial Sequence
  derived and/or modified sequence
atggtggtgatcgtggtgctggccttcaactactggagcatcagctctcgccacgtgctgctgcaggaggaagttgcagagttgcagggccaggtccagcggactgaggtggctcgtggtcggctagagaagcgcaattccgacctgctgctgctcgtggacacccacaaaaagcagatcgatcagaaagaagcagactatgggcggttgtcctccaggcttcaggctagagaagggttgggcaagcgatgcgaggacgacaaagtcaagctgcagaacaacatcagttaccaaatggctgacatccaccacctcaaggaacaattggcagaactaaggcaagaatttttgaggcaggaggatcagctccaagattatcgtaagaacaacacataccttgtgaaacgattggaatacgaatcttttcaatgcggccagcagatgaaagaactgcgtgcacagcacgaagaaaacatcaaaaagctggccgaccaattcctggaagagcagaagcaagaaacacagaagattcagtcaaacgatggaaaagagctggatatcaataaccaggtggtgccaaagaacatccctaaggtcgcagagaatgtggcggacaagaacgaagaaccgtcctccaatcatatcccacatggcaaagaacagattaagcggggcggcgacgccggtatgcctggtatagaggagaacgatctggcaaaagtcgacgatctgccaccagcactgcggaagccacctatctccgtgtcacagcacgagagtcaccaagcgatctctcacctacctaccggtcagccccttagccctaatatgccaccggattcccacatcaaccacaacggaaacccagggacatcgaagcagaacccttcatcaccactgcagagactgattcctgggagcaacctggactcagaacccagaattcaaacagatatcttgaaacaggctactaaggatagagtgtccgacttccacaagctgaagcagtctaggttttttgacgaaaatgaaagtccagtggatccacagcacgggagtaagcttgccgattacaacggggatgatggtaacgttggcgaatatgaggcggataagcaggccgaattagcgtataatgaggaagaagacggggacgggggcgaggaggacgtccaggacgacgaagagcgcgagctccaaatggaccctgccgactacggcaaacagcactttaatgatgtgctctag

SEQ ID NO: 236487 - DNA, 75 bp, Artificial Sequence
  derived and/or modified sequence
caggacgacgaggagcgggagctgcagatggaccccgccgactacgggaaacaacatttcaatgacgtactttag

SEQ ID NO: 236488 - DNA, 1302 bp, Artificial Sequence
  derived and/or modified sequence
atggtgggcttcggcgccaaccggcgggccggccggctgcccagcctggtgttggttgtgcttctggtggtaatagtagtccttgccttcaattattggtctatttcttctagacacgtcctgctgcaggaagaggtggccgaactgcagggacaggtgcagcgcaccgaggttgcacgcggccgcctcgagaagcggaactcggacttgctgctgctggttgacacccacaagaagcagatagaccaaaaagaggcagactacggacgcctgagcagccgactgcaagctagagagggattgggcaagaggtgcgaggacgacaaagtcaaattgcagaacaatattagctatcagatggccgacattcatcatcttaaggagcaactggctgagttgagacaggaattcctccgtcaggaagatcagctccaggactacaggaagaacaacacttacctcgtaaaacggctggaatatgaatcatttcagtgcggccagcaaatgaaagaactgcgagcccaacacgaggaaaacatcaagaaattggcagatcagttcctggaagagcagaagcaagaaacccaaaaaatacagtctaacgatggaaaggagttggatattaacaaccaggtggttccgaagaatataccaaaggtggcagaaaacgtggccgataaaaatgaagaaccatctagcaaccatatccctcacggcaaagagcagatcaagaggggaggagatgccggtatgcccgggattgaggaaaatgatcttgctaaagtggatgaccttcctccagctctaaggaagccacctatatctgtgtcacagcatgaaagccatcaagcaattagtcacttacccacagggcagcccctgagtcccaatatgccccctgattcgcatattaaccataatgggaatcctgggacgtctaaacaaaatccttctagccccctccagcggctgatccccggatcaaacttggattcagaaccaaggattcaaaccgacattttgaagcaagcaaccaaagatcgtgtgtcggatttccacaagctgaagcaaagccgattctttgatgaaaatgaatcccccgttgatcctcagcacggctcaaaattagctgattataacggggacgatggaaatgtcggcgaatatgaagctgacaaacaagctgagctggcctacaacgaggaagaggatggcgacgggggtgaggaagacgttcagggcgaacgaggcccaggactccacgccattaccatgaaacccacgtctaagtttttcgggtag

SEQ ID NO: 236489 - DNA, 1311 bp, Artificial Sequence
  derived and/or modified sequence
atggttggcttcggcgctaatagaagagcaggacgcttgccttccctggtccttgtcgttctcctcgtggttatcgtagtcttggcattcaactattggtccatctctagtcggcacgtcttgctgcaagaggaagtggcagagctgcaggggcaggtgcagaggacggaggtggcacggggtcggcttgaaaaacggaatagtgatctgctcctgttggtcgatactcataaaaagcaaatagaccagaaggaggccgactatggtcggctgagcagcagactgcaggctagagaaggcttagggaaacggtgtgaggatgacaaagtgaagttgcagaacaatatctcctatcagatggctgatatccaccatctgaaggagcagctcgcggaactgcgtcaggagtttttgcgacaagaagaccagcttcaggattataggaagaacaacacatatcttgtcaaaagactggagtacgagagctttcaatgtggccagcagatgaaagagctccgggcacaacacgaagaaaacattaaaaaacttgccgatcagtttctggaggagcagaaacaggagacacagaagatccaaagcaatgatggcaaagaactcgatatcaacaatcaggtggtgcctaaaaacatccccaaagtagcagaaaatgtggccgacaagaacgaggagccctcctccaaccacatcccccacggcaaagaacagatcaagcgcggtggcgacgctgggatgccaggcatagaggaaaacgaccttgccaaagtagacgatctgccaccagccttaagaaaaccacctatttctgtgagccagcacgagagccaccaggcaatttcccacttgcccaccggacagccactcagccctaatatgcctccagactcccacattaatcacaacgggaacccgggaactagcaagcagaacccctcttcccctcttcagcggctgatcccaggatccaacctggactcagaacctcggatacagacagacatcttgaaacaggctaccaaggacagagtgagcgatttccacaaactgaaacagtcaagatttttcgacgagaacgaatcgccagtcgacccccagcacggctccaaactagccgactataatggtgacgacggtaatgtaggggaatatgaagccgacaagcaagcggagctcgcttataacgaggaagaggacggcgacgggggagaggaggacgtccaagacgatgaggagagggagctccaaatggaccctgccgactacggaaaacagcatttcaatgacgtgttgtag

SEQ ID NO: 236490 - DNA, 1248 bp, Artificial Sequence
  derived and/or modified sequence
atggtagtgatcgtggtactggccttcaattattggtccatctccagtcggcacgtcctgctacaggaggaggtcgcagagttgcagggtcaggtgcagcggacagaggtggcgagagggagactggagaaaaggaactctgatcttctgcttcttgtagacactcacaaaaaacagattgaccagaaggaggcagattatggccgtctgagctctaggctccaagccagagaggggctcgggaagcgctgtgaagatgataaagtcaaactccagaacaacattagctatcagatggcagacatccatcatctgaaagagcaactggccgagctgcgtcaggagttcttgcggcaggaagatcaactccaggattatcgcaagaacaatacttacctcgtgaaacgattggagtacgaaagctttcagtgtggacagcagatgaaagaactccgggctcaacatgaggagaacataaagaaactggccgaccaattcctggaagaacaaaagcaggagacccagaagatccagtctaacgacgggaaggagctagatattaacaaccaagttgttcccaagaacattccaaaggtggcagaaaatgtggcggataagaatgaggaaccctcttctaatcatatcccccacggaaaggagcagatcaagcgaggcggagacgccggaatgcctggaattgaagaaaacgatcttgcaaaggtagatgacctcccaccagccctgcgcaaaccccctatcagcgtttctcaacacgaaagccaccaagctatctcacatttacccaccggccaaccattaagtccgaacatgcctcccgactctcacattaatcacaatgggaacccaggaacatctaaacagaatcccagttcccctcttcagcggctgataccaggcagcaatctcgactcagagccaagaattcagaccgatattctaaaacaggctacaaaagatcgagtatctgatttccacaaacttaagcagtccagattctttgacgaaaacgaaagcccagtcgacccacagcacgggtcaaaattggcagattacaacggggacgatgggaacgtgggagaatacgaagcggacaaacaggctgagcttgcgtacaacgaggaggaggatggtgatggcggagaggaggatgttcaggatgacgaggagcgtgaactgcaaatggatccagccgactacggcaagcaacatttcaatgatgtgctgtag

SEQ ID NO: 236491 - DNA, 75 bp, Artificial Sequence
  derived and/or modified sequence
caggatgatgaagaacgggaactgcagatggaccctgccgactacgggaagcagcatttcaatgatgtactgtag

SEQ ID NO: 236492 - DNA, 1302 bp, Artificial Sequence
  derived and/or modified sequence
atggtggggttcggcgctaataggcgggctggacgcttgccctcactggtgttagtggtgctgttagttgttatcgtggtgctggcattcaattactggtctatctcgtcgagacacgtgctgttgcaggaagaagttgccgagcttcaggggcaggtgcaaaggacagaggtcgccagaggaaggctggaaaagcggaactcagatcttctgctcttagtcgatacgcataagaagcagattgaccagaaagaagctgattacggcaggctaagctctcggctacaagctagagaaggtttgggaaaacgctgcgaagacgacaaggtgaagctgcagaacaacatatcctatcagatggcggacatacaccatctgaaggagcagcttgcggaactgaggcaggagttcttgcgccaagaagaccaactccaggattatcgaaagaacaacacatatctggttaaacgtctcgagtacgaatcctttcagtgcggacagcagatgaaagagctgcgagcccagcacgaagagaatattaagaaactggcagatcagttcctggaggaacaaaaacaagaaactcagaagatacagtccaacgacggaaaagagctcgacatcaataaccaggtggtgccaaaaaacatcccaaaggttgccgaaaacgtggctgataaaaacgaagaaccttcatccaatcacattccccacggaaaagagcaaataaagcgcggaggggacgcaggtatgcccggaatcgaagagaacgacttagccaaagtcgatgacctcccacctgccctgaggaaaccccctattagcgttagccagcatgagtctcatcaggctatctcccacctgcctaccggccaacccttatcgcccaatatgccgcctgactctcacattaaccataacggaaaccccggtacctcaaagcagaatccaagttcacccctgcaaaggctaatacccggatccaacctggactctgaaccacggatccagacagatattctgaagcaggctaccaaagacagagtctcggacttccacaagctgaaacagtcacgctttttcgacgagaatgagagccccgtcgatccacagcatggcagcaagcttgctgactataacggcgatgatgggaatgtgggcgagtacgaggcagacaaacaagctgagttggcttacaatgaggaagaagacggtgatggaggggaggaagacgtccagggcgaacgagggcctggtctccacgccattacgatgaagccaacatcaaaatttttcggctag

SEQ ID NO: 236493 - DNA, 3962 bp, Artificial Sequence
  derived and/or modified sequence
ccgtgaggtgttgggtttgggggacgctggcagctgggttctcccggttcccttgggcaggtgcagggtcgggttcaaagcctccggaacgcgttttggcctgatttgaggaggggggcggggagggacctgcggcttgcggccccgcccccttctccggctcgcagccgaccggtaagcccgcctcctccctcggccggccctggggccgtgtccgccgggcaactccagccgaggcctgggcttctgcctgcaggtgtctgcggcgaggcccctagggtacagcccgatttggccccatggtgggtttcggggccaaccggcgggctggccgcctgccctctctcgtgctggtggtgctgctggtggtgatcgtcgtcctcgccttcaactactggagcatctcctcccgccacgtcctgcttcaggaggaggtggccgagctgcagggccaggtccagcgcaccgaagtggcccgcgggcggctggaaaagcgcaattcggacctcttgctgttggtggacacgcacaagaaacagatcgaccagaaggaggccgactacggccgcctcagcagccggctgcaggccagagagggcctcgggaagagatgcgaggatgacaaggttaaactacagaacaacatatcgtatcagatggcagacatacatcatttaaaggagcaacttgctgagcttcgtcaggaatttcttcgacaagaagaccagcttcaggactataggaagaacaatacttaccttgtgaagaggttagaatatgaaagttttcagtgtggacagcagatgaaggaattgagagcacagcatgaagaaaatattaaaaagttagcagaccagtttttagaggaacaaaagcaagagacccaaaagattcaatcaaatgatggaaaggaattggatataaacaatcaagtagtacctaaaaatattccaaaagtagctgagaatgttgcagataagaatgaagaaccctcaagcaatcatattccacatgggaaagaacaaatcaaaagaggtggtgatgcagggatgcctggaatagaagagaatgacctagcaaaagttgatgatcttccccctgctttaaggaagcctcctatttcagtttctcaacatgaaagtcatcaagcaatctcccatcttccaactggacaacctctctccccaaatatgcctccagattcacacataaaccacaatggaaaccccggtacttcaaaacagaatccttccagtcctcttcagcgtttaattccaggctcaaacttggacagtgaacccagaattcaaacagatatactaaagcaggctaccaaggacagagtcagtgatttccataaattgaagcaaagccgattctttgatgaaaatgaatcccctgttgatccgcagcatggctctaaactggcggattataatggggatgatggtaacgtaggtgagtatgaggcagacaagcaggctgagctggcttacaatgaggaagaagatggtgatggtggagaggaagacgtccaagatgatgaagaacgagagcttcaaatggatcctgcagactatggaaagcaacatttcaatgatgtcctttaagtcctaaaggaatgcttcagaaaacctaaagtgctgtaaaatgaaatcattctactttgtcctttctgacttttgttgtaaagacgaattgtatcagttgtaaagatacattgagatagaattaaggaaaaactttaatgaaggaatgtacccatgtacatatgtgaactttttcatattgtattatcaaggtatagacttttttggttatgatacagttaagccaaaaacagctaatctttgcatctaaagcaaactaatgtatatttcacattttattgagccgacttatttccacaaatagataaacaggacaaaatagttgtacaggttatatgtggcatagcataaccacagtaagaacagaacagatattcagcagaaaactttttatactctaattctttttttttttttttttgagacagagttttagtcttgtttcccaggctggagtgcaatggcacaatcttggctcactgcaacctccgcctcctgggttcaggcaattttcctgcctcagcctcccaagtagctgggattacaggcacccaccaccatgcccagctaatttttgtatttttaatagagagctaataattgtatatttaataaagacgggtttcaccatgttggccaggctggtcttgaactcctgacctcaggtgatcctcctgcattggcctcccaaagtgctggaattccaggcatgagccactgcgcccagtctacacactaattcttgttagcccaacagctgttctgttctatctacccctcatttcacgctcaaggagtcatacctagaatagttacacacaagagggaaactggaagccaaacactgtacagtattgtgtagaaagtcacctccctactccttttattttacatgagtgctgatgtgttttggcagatgagctttcagctgaggcctgatggaaattgagataacctgcaaagacataacagtatttatgagttatatcttagttcttgaaattgtggaatgcatgattgacaatatatttttaatttttattttttcaagtaataccagtactgtttaactatagccagaactggctaaaatttttatattttcagagttgaagttggtgaagacattcatgatttaaacaccagatcctgaaaggggttaaatctactttgaaatgaatctgcaatcagtatttcaaagcttttctggtaattttagtgatcttatttgattagactttttcagaagtactaaataaggaattttaacaggtttttattaatgcacagataaatagaagtacagtgaggtctatagccattttattaaaatagcttaaaagtttgtaaaaaaatgaatctttgtaattacttaatatgttagttaagaacccgtcaagcttatatttgctagacttacaaattattttaaatgcatttatcttttttgacactattcagtggaatgtgtaagctagctaattcttgttttctgatttaaagcacttttaaatcttatcctgccccctaaaaacaaaaggttttgatcacaaggggaaatttaagattgttaaccctgtttttcagaagggctactgttaattgcacataaacatgaaatgtgttttcccctgtgtactaacacattctaggcaaaattcaaacttatagtggtaaagaaacaggttgttcacttgctgaggtgcaaaaattcttaagacttctgtttgaaattgctcaatgactaggaaaagatgtagtagtttactaaaattgtttttctaccatatcaaattaaacaattcatgcctttatagggtcaggcctacaatgaataggtatggtggtttcacagaattttaaaatagagttaaagggaagtgatgtacatttcgggggcattagggtagggagatgaatcaaaaaatacccctagtaatgctttatattttaatactgcaaaagctttacaaatggaaaccatgcaattacctgccttagttcttttgtcataaaaacaatcacttggttggttgtattgtagctattacttatacagcaacatttcttcaattagcagtctagacattttataaacagaaatcttggaccaattgataatatttctgactgtattaatattttagtgctataaaatactatgtgaatctcttaaaaatctgacattttacagtctgtattagacatactgtttttataatgttttacttctgccttaagatttaggttttttaaatgtatttttgccctgaattaagtgttaatttgatggaaactctgcttttaaaatcatcatttactgggttctaataaattaaaaattaaacttgt

SEQ ID NO: 236494 - DNA, 1704 bp, Artificial Sequence
  derived and/or modified sequence
ctggggccgtgtccgccgggcaactccagccgaggcctgggcttctgcctgcaggtgtctgcggcgaggcccctagggtacagcccgatttggccccatggtggtgatcgtcgtcctcgccttcaactactggagcatctcctcccgccacgtcctgcttcaggaggaggtggccgagctgcagggccaggtccagcgcaccgaagtggcccgcgggcggctggaaaagcgcaattcggacctcttgctgttggtggacacgcacaagaaacagatcgaccagaaggaggccgactacggccgcctcagcagccggctgcaggccagagagggcctcgggaagagatgcgaggatgacaaggttaaactacagaacaacatatcgtatcagatggcagacatacatcatttaaaggagcaacttgctgagcttcgtcaggaatttcttcgacaagaagaccagcttcaggactataggaagaacaatacttaccttgtgaagaggttagaatatgaaagttttcagtgtggacagcagatgaaggaattgagagcacagcatgaagaaaatattaaaaagttagcagaccagtttttagaggaacaaaagcaagagacccaaaagattcaatcaaatgatggaaaggaattggatataaacaatcaagtagtacctaaaaatattccaaaagtagctgagaatgttgcagataagaatgaagaaccctcaagcaatcatattccacatgggaaagaacaaatcaaaagaggtggtgatgcagggatgcctggaatagaagagaatgacctagcaaaagttgatgatcttccccctgctttaaggaagcctcctatttcagtttctcaacatgaaagtcatcaagcaatctcccatcttccaactggacaacctctctccccaaatatgcctccagattcacacataaaccacaatggaaaccccggtacttcaaaacagaatccttccagtcctcttcagcgtttaattccaggctcaaacttggacagtgaacccagaattcaaacagatatactaaagcaggctaccaaggacagagtcagtgatttccataaattgaagcaaagccgattctttgatgaaaatgaatcccctgttgatccgcagcatggctctaaactggcggattataatggggatgatggtaacgtaggtgagtatgaggcagacaagcaggctgagctggcttacaatgaggaagaagatggtgatggtggagaggaagacgtccaagatgatgaagaacgagagcttcaaatggatcctgcagactatggaaagcaacatttcaatgatgtcctttaagtcctaaaggaatgcttcagaaaacctaaagtgctgtaaaatgaaatcattctactttgtcctttctgacttttgttgtaaagacgaattgtatcagttgtaaagatacattgagatagaattaaggaaaaactttaatgaaggaatgtacccatgtacatatgtgaactttttcatattgtattatcaaggtatagacttttttggttatgatacagttaagccaaaaacagctaatctttgcatctaaagcaaactaatgtatatttcacattttattgagccgacttatttccacaaatagataaacaggacaaaatagttgtacaggttatatgtggcatagcataaccacagta

SEQ ID NO: 236495 - DNA, 353 bp, Artificial Sequence
  derived and/or modified sequence
caagatgatgaagaacgagagcttcaaatggatcctgcagactatggaaagcaacatttcaatgatgtcctttaagtcctaaaggaatgcttcagaaaacctaaaagttgaagttggtgaagacattcatgatttaaacaccagatcctgaaaggggttaaatctactttgaaatgaatctgcaatcagtatttcaaagcttttctggtaattttagtgatcttatttgattagactttttcagaagtactaaataaggaattttaacaggtttttattaatgcacagataaatagaagtacagtgaggtctatagccattttattaaaatagcttaaaagtttgtaaaaaaa

SEQ ID NO: 236496 - DNA, 1760 bp, Artificial Sequence
  derived and/or modified sequence
ctggcagctgggttctcccggttcccttgggcaggtgcagggtcgggttcaaagcctccggaacgcgttttggcctgatttgaggaggggggcggggagggacctgcggcttgcggccccgcccccttctccggctcgcagccgaccggtaagcccgcctcctccctcggccggccctggggccgtgtccgccgggcaactccagccgaggcctgggcttctgcctgcaggtgtctgcggcgaggcccctagggtacagcccgatttggccccatggtgggtttcggggccaaccggcgggctggccgcctgccctctctcgtgctggtggtgctgctggtggtgatcgtcgtcctcgccttcaactactggagcatctcctcccgccacgtcctgcttcaggaggaggtggccgagctgcagggccaggtccagcgcaccgaagtggcccgcgggcggctggaaaagcgcaattcggacctcttgctgttggtggacacgcacaagaaacagatcgaccagaaggaggccgactacggccgcctcagcagccggctgcaggccagagagggcctcgggaagagatgcgaggatgacaaggttaaactacagaacaacatatcgtatcagatggcagacatacatcatttaaaggagcaacttgctgagcttcgtcaggaatttcttcgacaagaagaccagcttcaggactataggaagaacaatacttaccttgtgaagaggttagaatatgaaagttttcagtgtggacagcagatgaaggaattgagagcacagcatgaagaaaatattaaaaagttagcagaccagtttttagaggaacaaaagcaagagacccaaaagattcaatcaaatgatggaaaggaattggatataaacaatcaagtagtacctaaaaatattccaaaagtagctgagaatgttgcagataagaatgaagaaccctcaagcaatcatattccacatgggaaagaacaaatcaaaagaggtggtgatgcagggatgcctggaatagaagagaatgacctagcaaaagttgatgatcttccccctgctttaaggaagcctcctatttcagtttctcaacatgaaagtcatcaagcaatctcccatcttccaactggacaacctctctccccaaatatgcctccagattcacacataaaccacaatggaaaccccggtacttcaaaacagaatccttccagtcctcttcagcgtttaattccaggctcaaacttggacagtgaacccagaattcaaacagatatactaaagcaggctaccaaggacagagtcagtgatttccataaattgaagcaaagccgattctttgatgaaaatgaatcccctgttgatccgcagcatggctctaaactggcggattataatggggatgatggtaacgtaggtgagtatgaggcagacaagcaggctgagctggcttacaatgaggaagaagatggtgatggtggagaggaagacgtccaaggtgagcgtgggcctggcctccatgctataaccatgaaacccacctctaagttttttggttgaatttgtgtagaatttcccccacttattagtggcagtgtaacctaaattttttgttttttctttgcaggagaatcgcttgaacccgggaggcggaggttgcaatgagccgaattcgtgccactgcactccagcctgggcaacagagcaagacttcgtctaaaaaaaaaaaaaaaaaatcccaaaaa

SEQ ID NO: 236497 - protein, 547 aa, Artificial Sequence
  derived and/or modified sequence
MSTASSSSSSSSSQTPHPPSQRMRRSAAGSPPAVAAAGSGNGAGGGGGVGCAPAAGAGRLLQPIRATVPYQLLRGSQHSPTRPPVAAAAASLGSLPGPGAARGPSPSSPTPPAAAAPAEQAPRAKGRPRRSPESHRRSSSPERRSPGSPVCRADKAKSQQVRTSSTIRRTSSLDTITGPYLTGQWPRDPHVHYPSCMKDKATQTPSCWAEEGAEKRSHQRSASWGSADQLKEQIAKLRQQLQRSKQSSRHSKEKDRQSPLHGNHITISHTQATGSRSVPMPLSNISVPKSSVSRVPCNVEGISPELEKVFIKENNGKEEVSKPLDIPDGRRAPLPAHYRSSSTRSIDTQTPSVQERSSSCSSHSPCVSPFCPPESQDGSPCSTEDLLYDRDKDSGSSSPLPKYASSPKPNNSYMFKREPPEGCERVKVFEEMASRQPISAPLFSCPDKNKVNFIPTGSAFCPVKLLGPLLPASDLMLKNSPNSGQSSALATLTVEQLSSRVSFTSLSDDTSTAGSMEASVQQPSQQQQLLQELQGEDHISAQNYVII

SEQ ID NO: 236498 - DNA, 1644 bp, Artificial Sequence
  derived and/or modified sequence
atgagcaccgccagcagcagcagcagcagcagcagcagccagaccccccacccccccagccagagaatgagaagaagcgccgccggcagcccccccgccgtggccgccgccggcagcggcaacggcgccggcggcggcggcggcgtgggctgcgcccccgccgccggcgccggcagactgctgcagcccatcagagccaccgtgccctaccagctgctgagaggcagccagcacagccccaccagaccccccgtggccgccgccgccgccagcctgggcagcctgcccggccccggcgccgccagaggccccagccccagcagccccaccccccccgccgccgccgcccccgccgagcaggcccccagagccaagggcagacccagaagaagccccgagagccacagaagaagcagcagccccgagagaagaagccccggcagccccgtgtgcagagccgacaaggccaagagccagcaggtgagaaccagcagcaccatcagaagaaccagcagcctggacaccatcaccggcccctacctgaccggccagtggcccagagacccccacgtgcactaccccagctgcatgaaggacaaggccacccagacccccagctgctgggccgaggagggcgccgagaagagaagccaccagagaagcgccagctggggcagcgccgaccagctgaaggagcagatcgccaagctgagacagcagctgcagagaagcaagcagagcagcagacacagcaaggagaaggacagacagagccccctgcacggcaaccacatcaccatcagccacacccaggccaccggcagcagaagcgtgcccatgcccctgagcaacatcagcgtgcccaagagcagcgtgagcagagtgccctgcaacgtggagggcatcagccccgagctggagaaggtgttcatcaaggagaacaacggcaaggaggaggtgagcaagcccctggacatccccgacggcagaagagcccccctgcccgcccactacagaagcagcagcaccagaagcatcgacacccagacccccagcgtgcaggagagaagcagcagctgcagcagccacagcccctgcgtgagccccttctgcccccccgagagccaggacggcagcccctgcagcaccgaggacctgctgtacgacagagacaaggacagcggcagcagcagccccctgcccaagtacgccagcagccccaagcccaacaacagctacatgttcaagagagagccccccgagggctgcgagagagtgaaggtgttcgaggagatggccagcagacagcccatcagcgcccccctgttcagctgccccgacaagaacaaggtgaacttcatccccaccggcagcgccttctgccccgtgaagctgctgggccccctgctgcccgccagcgacctgatgctgaagaacagccccaacagcggccagagcagcgccctggccaccctgaccgtggagcagctgagcagcagagtgagcttcaccagcctgagcgacgacaccagcaccgccggcagcatggaggccagcgtgcagcagcccagccagcagcagcagctgctgcaggagctgcagggcgaggaccacatcagcgcccagaactacgtgatcatctag

SEQ ID NO: 236499 - DNA, 1644 bp, Artificial Sequence
  derived and/or modified sequence
atgagcacggcctcttcaagtagtagctctagcagttcccaaaccccacacccccccagtcagcgcatgcggcggtctgccgctggcagccctcccgccgtcgccgccgcaggatccggtaatggtgctgggggcggagggggagtcgggtgtgcacctgccgccggcgccggccggctactgcaaccaatcagggcaacagtcccatatcagctactgcggggctctcagcactccccaaccagaccccccgttgccgcagcagccgcctcactgggttcgttacccggtcccggggcagcccgcgggccatccccaagtagccctactcctcctgctgccgccgcccccgccgaacaggcccctagagccaagggaagacccagacgctccccagagtcgcaccgccggtcctcatcacccgagcggaggtcacccggctcccctgtatgcagagctgataaggccaagtctcagcaggtacgcacctcctctacgatcaggaggacttcttctctggacactatcacgggtccgtatcttaccggtcaatggccacgggacccacatgtacattacccatcctgtatgaaggataaagccacccagacaccgtcttgttgggctgaagagggagcagaaaaaagaagtcaccagcgtagtgccagttggggttctgctgatcagctgaaagaacaaatcgcgaagctgaggcagcagctgcagcggtcgaaacaatcttcaaggcattccaaggaaaaggaccgacaaagtcctttgcatggcaatcacattacaataagtcacacccaagcaactggctctagatccgttcctatgcccctttctaatatctctgtgcccaaatccagcgtctctcgagtcccgtgcaatgtggagggtataagccctgaacttgagaaagtgttcatcaaggagaataacggaaaggaagaagtgagtaaaccattggacatcccagatgggaggcgggcgccccttcccgctcactacaggtcatcaagtactcgttctattgatactcagactccctccgtgcaggagagatcctcatcctgctccagccactcaccttgtgtttcaccattctgccctcctgaaagccaggacggcagtccctgttccacagaggacctactgtacgacagagacaaagatagtggaagctctagtcctctgcccaagtatgcttcttcacccaagcccaataactcctacatgtttaaaagggagccacctgagggttgcgagagggttaaagtttttgaagaaatggcttcgaggcagcccatttcagcccccctgttttcgtgtccagacaaaaataaggttaattttattccaaccggatcagctttttgtcccgtgaagctgcttggcccactcttgccagcaagcgaccttatgctgaaaaatagcccaaactctggacagtcctccgcgcttgcaaccctaacggttgaacaactgtcctctagagtgagcttcacaagtttatctgatgatacctcaacagcgggctccatggaggctagtgtgcaacagccttctcagcagcagcagcttcttcaggaactccaaggcgaagaccacatttctgcgcagaattatgttattatttag

SEQ ID NO: 236500 - DNA, 1644 bp, Artificial Sequence
  derived and/or modified sequence
atgagcacagccagcagcagcagcagcagcagcagcagccagaccccccacccccccagccagaggatgagaagatctgctgctggcagccccccagctgtggccgctgctggcagcggaaatggagctgggggcggcggcggcgtgggctgtgccccagctgctggagctggccgcctgctgcagcccatccgggccaccgtgccctaccagctgctgcggggcagccagcacagccccaccaggcctcctgtggccgctgctgctgccagcctgggcagcctgcccggccctggggccgcccggggccccagccccagcagccccaccccacctgctgctgctgccccagctgagcaggccccccgggccaagggccggcccaggaggagccctgagagccaccggcgcagcagcagccctgagaggaggagccctggcagccctgtgtgcagagctgacaaggccaagagccagcaggtgaggaccagcagcaccatccggaggaccagcagcctggacaccatcaccggcccctacctgaccggccagtggccccgggacccccacgtgcactaccccagctgcatgaaggacaaggccacccagacccccagctgctgggccgaggagggcgctgagaagaggagccaccagaggtctgcctcctggggcagcgctgaccagctgaaggagcagatcgccaagctgcggcagcagctgcagaggagcaagcagagcagccgccacagcaaggagaaggaccggcagagccccctgcacggcaaccacatcaccatcagccacacccaggccaccggcagccgctctgtgcccatgcccctgagcaacatctctgtgcccaagagctctgtgtcccgggtgccctgcaatgtggagggcatcagccctgagctggagaaggtgttcatcaaggaaaataatggcaaggaggaggtgtccaagcccctggacatcccagatggccggcgggcccccctgcctgcccactaccgcagcagcagcaccaggagcattgacacccagacccccagcgtgcaggagaggagcagcagctgcagcagccacagcccctgtgtgagccccttctgccccccagagagccaggacggcagcccctgcagcacagaggacctgctgtatgaccgggacaaggacagcggcagcagcagccccctgcccaagtatgccagcagccccaagcccaacaacagctacatgttcaagcgggagcccccagagggctgtgagcgggtgaaggtgtttgaggagatggccagccggcagcccatcagcgcccccctcttcagctgcccagacaagaacaaggtgaacttcatccccaccggcagcgccttctgccctgtgaagctgctgggccccctgctgcctgccagtgacctgatgctgaagaacagccccaacagcggccagagcagcgccctggccaccctgactgtggagcagctgagcagccgggtgtccttcaccagcctgagtgatgacaccagcacagctggctccatggaggcctctgtgcagcagcccagccagcagcagcagctgctgcaggagctgcagggcgaggaccacatcagcgcccagaactacgtgatcatctag

SEQ ID NO: 236501 - DNA, 1644 bp, Artificial Sequence
  derived and/or modified sequence
atgagcaccgccagcagcagcagcagcagcagcagcagccagaccccccatcctccaagccagcgtatgagacgctccgccgccggttccccaccagctgtggccgccgccggatcaggtaacggagcaggaggcggcggcggagtaggctgtgcgcccgcggcaggcgctggcaggttgctgcagcctatcagagccacagtcccatatcaactactgaggggatctcagcattctccgacaaggccacccgtcgctgccgctgccgccagccttggaagtttgccaggccccggagctgccagaggcccctccccgagcagtccaacaccgcctgctgcagctgcgccagccgagcaggcccctcgtgccaagggacgtccccgaagatcacccgaaagtcaccgcaggagctcctctcctgagagaagaagtcctgggagccctgtttgtcgggctgacaaggcaaagtcgcaacaggtccgcacatcatccacaatacggcggaccagcagtctggacaccatcactggaccctacctaaccggacagtggcctcgggacccccatgtgcactacccttcctgcatgaaagataaagcaactcagacaccctcttgttgggcagaggaaggggcagaaaagagatcccaccagaggagtgcctcgtgggggtcagccgaccagttgaaagagcagattgccaaactgcggcagcaactccagcgatctaagcagagttcccgccactcaaaagagaaagacagacagtccccgctccacggaaaccatatcacgattagccatactcaggcaaccgggtctagaagtgtgccaatgcctctgtctaacatctctgtgcctaaatcctctgtgagcagggtaccctgcaatgtcgagggaatctctccagagcttgagaaagtgttcattaaagaaaacaacgggaaggaggaagtaagtaagcccctcgacattccagacggccggcgagcccctttaccagcacattataggtctagctccacacggtcaatcgatacccaaactcctagcgtccaagagcgatcatcatcctgttcttcacactcgccatgcgtgtctcccttctgcccgcctgagtcgcaggatgggagcccatgctccaccgaggatctactctatgaccgggataaggattctggcagctcatctccactgccgaaatatgcatcatcgcccaagccaaacaattcttatatgttcaagagagaaccaccagagggctgcgaacgcgtcaaagtcttcgaagaaatggcttcaagacagcccattagtgcgccactatttagctgccctgacaagaataaggtgaactttattccaacgggtagcgctttttgtcctgtaaagctcctcgggcctttgctaccggctagcgacctcatgctaaagaacagcccaaacagtggacagagctccgccctcgctacacttaccgtcgagcagctgtcatcccgagtgtcctttacttctctttccgacgatacctcaacagctggctctatggaagcttctgttcagcaaccaagtcagcagcagcagctcctgcaggagctgcagggagaggatcatatatcggcacaaaattacgtgattatttag

SEQ ID NO: 236502 - DNA, 1644 bp, Artificial Sequence
  derived and/or modified sequence
atgtctactgctagctcctcctcctctagctcatccagccaaacaccgcatccacccagtcagcgaatgcggaggagcgccgcaggaagcccacctgctgtcgccgcagcagggtccgggaatggagcagggggaggtggcggtgtggggtgcgcccctgccgctggcgcagggcgacttttacagcccattagggccaccgtgccctatcagttgctacggggtagtcagcactcgcccacaaggcccccagtggcggcagccgcagcgagcctagggtccctgccgggacctggagccgcaagaggacccagcccttcctcaccaacgccgccagcagctgccgcaccagctgaacaagcaccacgcgctaagggacgccctagaaggtcacccgagtcccaccggaggagctcttcccccgagcgccgatctcccggaagtccagtctgtcgcgcagacaaggcaaaaagtcaacaggtgaggacctcgtctactataagaagaacatcttctctggacacaattaccggcccttacctgaccggccagtggccgcgagatccccatgtccactacccctcgtgtatgaaggacaaggcaactcagaccccatcttgctgggctgaagaaggtgctgagaaaagatcccaccaacgaagcgcttcttggggctcggcagaccaactcaaagagcagatcgctaagctacgacaacagctgcagcggtccaaacagagctctcgccacagtaaggagaaggacagacagtcccctttacacggaaatcacattactatttcacacacacaggccaccggttcccggtcggtgcccatgccattgtctaatatctccgtacccaagagtagcgtgtcgagggtcccatgtaatgtcgagggcatttctccagagctggagaaagtcttcattaaagaaaacaacggtaaggaggaggtgtccaagccactcgacatcccagacggcaggcgagcccctcttcccgcacactacaggtcttcatccacgcgctctattgatacccagacaccctctgtgcaggagagatcctcttcctgctcttcccacagcccctgcgtaagccccttctgccccccagaatcgcaagatggcagtccatgtagcactgaggacctactatatgaccgcgacaaggactcagggtctagcagcccactccctaagtacgccagctcccccaagcctaacaacagttatatgtttaagcgagagccacctgaaggttgcgaacgagtcaaggtgttcgaagaaatggcatccagacaacccatctcagccccactgttctcctgtcctgacaagaataaagtgaattttatccccaccgggtccgctttctgtccagttaaacttctgggcccactcctgcccgcaagtgatttgatgctgaagaacagtcccaacagcgggcagtccagcgctttggctacgctgacggtggaacaactgtcatctagagtttcttttactagcctctctgacgacacttccacggctggctccatggaagcaagcgtgcaacaaccgtctcagcagcagcagctcctgcaggagctccagggggaggatcacatttcagcccagaactacgttatcatttag

SEQ ID NO: 236503 - DNA, 495 bp, Artificial Sequence
  derived and/or modified sequence
atggaggacgagagaatcctggacaacctgggcgccgagggcagacacggcagcgagtgggagtggagaagatggcacttcggcggctgggtggaggaggagcacagacacagatggcccagaggcgtgtggagcaccgacaagagccccggcggcgtgcagccccagtgcctgagccaggaggtgagcgccctggtgagcggcacccagagcagcctgagaaacggcctgggcgacaagtggagcgcctgctgcaccagagccctgggccagatggagcagaccaagcagagcaagagaagagccggcagagaggacagattcagcgtggccctgggcagatgcagaggcaacgagcacaagaccctgagccacgtgcccggcgccagcgacgccgcccagaagcccagagccaagccctgcagcagaggcatcggcgccagcgtgctgctgcagaccatgcacctgagcttcatcaccctgggcttcagatag

SEQ ID NO: 236504 - DNA, 4743 bp, Artificial Sequence
  derived and/or modified sequence
ttagttgccattcggagtgaggagtgggtagaagcggcggcggcggcggcggcgtttgcggtggcgcggactccgaggagcgccagcacctcgaggccctttctctctaccctggtccccagaagcaggggtcccggccctccttgcagctgccgggttctcccgtgcgtgcagccctgcgagggctgaggagaaggctgcgagcggccctcggggctgcgtgatccgggccgttgccctgtcagcacgatgcctggagcggtggcggcggcggctccgggctccttgcggccccggccgtgaccgccacaccgagcccagccgggcggttgcggccgttggacgtttgttttcgcagccttcccctcccccctcgccgaggcggcgggggtgtgcgttggggagggggagccccgagactcctcccccacagcgatacccccgcccctcccccttacacactcgcacgcactatcgcgccggctcccacacgctcgcgcgcctcccgccccgcgcctccgtgtcggccggcggcgtccagggcccgcagagccaccatgtccactgcctcctcctcctcctcctccagttcctctcagacccctcatcccccgtcgcagaggatgaggcgcagcgccgcggggtccccgcccgccgtcgccgccgccgggagcgggaacggtgcgggcggcggcggcggcgtgggctgcgccccggctgcgggagccggccggctgctgcagcccatccgcgccacggtgccctaccagctcttgcggggcagccagcacagtcccacgcgtccgcccgtcgccgctgccgccgcctcgctgggcagcctcccggggcccggcgcggcccgcggccccagcccgtccagcccgacgccgccggcggccgcagccccggccgagcaggcgccgcgggccaagggccgcccgagacggtccccagagagccaccggaggagcagctcacctgagagacggagccccggctcgcccgtgtgcagagcggacaaggcaaaatctcagcaagttcggacctctagtacaataaggcgaacctcctctttggatacaataacaggaccttacctcacaggacagtggccacgggatcctcatgttcactacccttcatgcatgaaagacaaagctactcagacacctagctgttgggcagaagagggtgcagaaaagaggtcacatcagcgttctgcgtcatgggggagtgctgatcaactaaaagagcagatcgccaaactgaggcagcaactacaacgcagtaaacagagtagtcgtcacagtaaggagaaagatcgccagtcacctcttcatggcaaccatataacaatcagtcacactcaggctactggatcaaggtcagttcctatgccactgtcaaatatatcagtgccaaaatcatctgtttcgcgtgtgccctgcaatgtagaaggaataagtcctgaattagaaaaggtattcattaaagaaaataatgggaaggaagaagtatccaagccgttggacataccagatggtcgaagagctccacttcctgctcattaccggagcagtagtactcgcagcattgacactcagactccttctgtccaggagcgcagcagtagctgcagcagtcattcaccctgtgtctcccctttttgtcccccggaatcccaggatggtagcccttgctcaacagaagatttgctctatgatcgtgataaagacagtgggagtagctcaccgttacccaagtatgcttcatctcccaaaccaaacaacagctacatgttcaaacgggagcccccagagggatgtgagcgagtgaaggtctttgaggaaatggcgtctcgtcagcctatctcggcccctctcttttcatgtcctgacaaaaacaaggttaatttcatcccaaccggatcagctttctgtcctgtaaaacttctaggccccctcttacctgcttctgaccttatgctcaagaactcccctaactctggccagagctcagctttggcaactctgaccgttgagcagctctcatcccgggtttcctttacgtctctttctgatgacaccagcacagcgggctccatggaggcctctgtccagcagccatcccagcagcagcagctcctgcaggaactgcagggtgaggaccacatctctgctcagaactatgtgatcatctaaaaaagggggagctggcctccaccctatgttccatggattcggaacaagatttcagacatctgcatgagtgacaaactttctgaacaccaccaccaccaataatacttatcagcatcataaagtatctcttaaacactgatcttggcagggacggaactcctattcagcagtttttgtggaaagcagtaatgcttgcaaaacgtgtgtgtcattcagcattttaagtggagactatgcatttcatagtatatttgacagattagtactgtgtcctgtgttttgttccagattcttcagtataaataagctctatatcaaaaagttgcctgtctaaatagaaaatgtcttgctgtgttttgtcctatggaaaatactgtaattcaggattatgtttacaattgatccaggtgtttgtttctaacttctgtaatacatacaatgcaaaaaaaaaaaaaaaaaaatggccacaacagttgcacagtgcccaccctatggcctagcttcaggtacttcagttgaagtctaaactcaggtaacttggaatgtatatcatattgggatattaaatatttcacagctaaaaagctaaagagggaacatcactcttttgcctttccttattttatgcatttccctttcctcattacattccacattcttagaataagaagtgcattcaatcctaggagaatgataatcctggacatgggtgaacatgaggagaaccagcaaaatctgtggtgtttgacatcactttgtcatgtggttacaagtaaaacaactgttgcattcactgtttcaacatgtgtacatgtggcttttttaaaagttcaggtgttgctcagtaaaggactgtgacaatgttgcaaataaagtgttcagtactggactgtacataaacattccacattgtgtgtgatgaaatttaaagacaagaatgtctagagttaatttcaaaataagtgaagtgtttgacggaatggttgagatttttttgtttatgttagccatcagggtcataactgttaccattttatctaaagacatatttatatttagtttctcccttggaaattctttattttgcaggtgaaaaagtgacatactttttgttattgtcttcctcaagcagtttaggtgcatgatcttcatttacatagaatacttgggtctcagaattgatgcaacataagcaggtttttttggtgacttacaagagcaatagtttgaagctatctcatttaagcctctcataatgcataatcatgagtagttttgaaatttgcaacctgtgaggtagagcataaactcaagaaaatagccttgaacttgcagacttttgacacaagttctccacaaagtgtgaagagagccccaggcattcctgattggtcaatgggagagcctaactttcattgttttcttcagtacaaagagtatccaaaagctaagtttttgtattccactactttcagttcaataaaacctagagttgtttcatctgcgcctaaagtgtatggcacaattttcttaagaattaggggaaccaggtgcctacagttaaaggaacgtttcagttcctttcattcattcctgggtttttcttttattttctaagaaggttgaagaaggatgagtgatagagaagaaagcaacaccattgatttttttttttaagaaatgatatatatatgtatatgtttgtgtgtgtgtgtgtgtgtgtgtgtgtgtgtattctgtgcattattttgtcatgatctcaattctcttctttccaccaaagtttgtcgtaatattttctcctgaaggtgcattctggctcctttaaattagtcagtgttatattgtaggagactgtcatggaaaaaaggactcagtttactttcgtcattttcacaggggaaccttttaaaacaatcttttcagcagcagatacctttaaccctaataatctcaggccttgatgaaaatactatattttgtagattatggttaaagggggaaaattactagttccgtaagataaatatgagctccatttgacttctgatgtctggtttagcattacataatatgttgatcttacactctgcttttgtccaaataaaatgcaatagtatcaatatcaatttcagaaaaatggactgaatatgcttttttggtgatgaaatctcatgtacgatatttatagtgatgtgcttttattttctcatgagatactaaatattaattgtgttgtacatttgttcttagcatatattaaagttttgaaccaaatgtgttaaagcttacgctttgccatgtaaatttcccagaagttgttgagctcaaatgtatcctacatccagctgtagaaatttgtcagaaattgtttaaattttgtatataattgtactgtttaattctagccattgcgctgaacagtatttgagttaccatataatatggctttacacaaggaaatgtgtggcttttgttttgtattttttcagtatagaagttcctgtgtcttatttaaataaagttattagtaaaactgaaa

SEQ ID NO: 236505 - protein, 272 aa, Artificial Sequence
  derived and/or modified sequence
MVRCYVEIVEKLPERRPDPATIEGCAQLKPNNYLLAWHTPFNEKGSGFGAATKAMCIGLRYWKPERLETLIEVSVECGRMTHNHPTGFLGSLCTALFVSFAAQGKPLVQWGRDMLRAVPLAEEYCRKTIRHTAEYQEHWFYFEAKWQFYLEERKISKDSENKAIFPDNYDAEEREKTYRKWSSEGRGGRRGHDAPMIAYDALLAAGNSWTELCHRAMFHGGESAATGTIAGCLFGLLYGLDLVPKGLYQDLEDKEKLEDLGAALYRLSTEEK

SEQ ID NO: 236506 - protein, 354 aa, Artificial Sequence
  derived and/or modified sequence
MEKFKAAMLLGSVGDALGYRNVCKENSTVGMKIQEELQRSGGLDHLVLSPGEWPVSDNTIMHIATAEALTTDYWCLDDLYREMVRCYVEIVEKLPERRPDPATIEGCAQLKPNNYLLAWHTPFNEKGSGFGAATKAMCIGLRYWKPERLETLIEVSVECGRMTHNHPTGFLGSLCTALFVSFAAQGKPLVQWGRDMLRAVPLAEEYCRKTIRHTAEYQEHWFYFEAKWQFYLEERKISKDSENKAIFPDNYDAEEREKTYRKWSSEGRGGRRGHDAPMIAYDALLAAGNSWTELCHRAMFHGGESAATGTIAGCLFGLLYGLDLVPKGLYQDLEDKEKLEDLGAALYRLSTEEK

SEQ ID NO: 236507 - protein, 176 aa, Artificial Sequence
  derived and/or modified sequence
MVRCYVEIVEKLPERRPDPATIEGCAQLKPNNYLLAWHTPFNEKGSGFGAATKAMCIGLRYWKPERLETLIEVSVECGRMTHNHPTGFLGSLCTALFVSFAAQGKPLVQWGRDMLRAVPLAEEYCRKTIRHTAEYQEHWFYFEAKWQFYLEERKISKDSENKAIFPDNYDAEEREK

SEQ ID NO: 236508 - DNA, 1065 bp, Artificial Sequence
  derived and/or modified sequence
atggagaagtttaaggcggcaatgctgctggggagcgtgggcgacgccctgggctatcgcaacgtgtgtaaggagaattctaccgtcggcatgaaaattcaggaggagcttcagcggtctggagggctggaccatttagtgctctcgcctggggaatggccagttagcgataacaccattatgcacattgccaccgccgaggcgctcacaaccgactattggtgcctagatgacctgtatcgcgagatggtgcgctgctacgttgaaatcgtggagaagctccctgaaagaaggcccgaccccgccactatcgagggctgtgcccaactcaaacctaacaactatttgttagcttggcatacaccctttaacgaaaaaggcagcggattcggcgctgccaccaaagcaatgtgcatagggctgaggtattggaagcccgagaggctggaaaccctaatagaggtttcagtggagtgcggcaggatgacacacaatcaccccaccggatttttaggcagcctatgtacggctcttttcgtatccttcgctgctcagggaaaaccattggtccaatggggcagggatatgttacgggccgtccccttggcagaggaatactgcagaaagaccatccggcacacagccgagtaccaggagcattggttttacttcgaagcaaagtggcagttctacctggaggaaagaaaaatctcaaaggacagcgagaataaagccatattcccagacaattacgacgccgaggagcgcgaaaaaacatacagaaaatggtctagcgaaggtcgggggggtcggcgcggtcacgatgcccctatgatcgcttacgacgccctgttggctgccgggaactcctggacggagctctgtcatcgggccatgttccatgggggcgaaagcgcagcaactggaaccattgctggatgccttttcggcctgttatatgggttggatcttgtgccaaaaggcctgtatcaggatctcgaggacaaagagaagctggaggacttaggtgcggcactctaccggctctccactgaagagaagtag

SEQ ID NO: 236509 - DNA, 1872 bp, Artificial Sequence
  derived and/or modified sequence
ggcacgagagcagactctgaaccaggaagtagccgtgtctagcgctctacaagacacataggagaggtggcatccatggccctgaaacgacaagcccatgttgccagcgcattatcaccaagtcacttggcaagcgtttagcagactactggtgcctggatgatctgtaccgggagatggtgagatgctatgtggaaatcgttgagaagcttccagaacgccggccagacccagctaccattgaaggctgtgctcagctaaagcccaataactaccttctcgcctggcacacaccgttcaatgaaaaaggctcagggtttggagcggccaccaaggccatgtgcatcggcctgcggtactggaagcctgagcggctggagaccctcatcgaggtcagcgtggagtgcggccggatgacccacaaccatcccacaggcttcctgggctccctgtgcacggccctgtttgtgtcgttcgccgcacaaggaaagcccctggtccagtgggggagagacatgctgcgggcggtgcctctggcagaagagtactgcaggaagaccatccggcacacggcagaataccaggagcactggttttactttgaagctaaatggcaattttatttggaggagaggaaaatcagtaaagactcagaaaataaagccatcttccccgacaattatgatgcagaagagagggaaaagacctacaggaagtggagctcggaaggtcgagggggaagacgaggccacgatgcccccatgatagcctatgacgccctccttgcagcaggaaacagctggactgagctgtgtcaccgggccatgtttcatggaggggagagcgcggccacgggcaccattgcaggctgcctgttcgggttgctgtacggcctggacctcgttcccaaaggcttgtaccaggacctggaggacaaggagaagctggaggacctgggcgcggctctctaccgcctgtccacagaggagaagtaaagccatttctgccactttccccctagagagccgattccaccccggggcccgtagggccctctcgcagcccctgggtgagggtgtctctgtgaggctccactgcggtctgtgcctgactggccacatctaactctctgtttccaatttcagaatcctaactgttgcataaaatacattgtttgtcctgcgagaatattttccgtcctccaccatcaacattgacactgcgtagatttgccgcacttggacctccatgcgtggcactcacccgcagtctcctggacaggcgctgtattttattctgtcgcagagctaatgctgtttactcactcacttcaacaacactaactgcggtggtggcctccagcaggcccccccgctgcagaccctctgtcctgcctctgcctccaggcatgcgtttccccgtgagggccaatgcacctccccccaccccccaccctcccatgtccacagtgggtcgtgtgttcctggacagagaaacagtccacactggggcctgcgggacacatatagcagcatattttgctcttaaccccacccacctttttaatcacactagattttaagatcaatccctttttgaaacaactcacggagaaaaccagaacataaatggcctcctgccagctccggcgtctctctgtggtctgccttagtgggccaagtccaaatgcagagaaggcctttcccttccgcgcctgccccatcgggctcgctgacgaggaagcgctgtccctgtgatgaggttctctctcagagagtcttggaaaagagaccacttgctcttgtttaaaataaatttggacgtgatttttccatgcagcatctggtgtgaataaaacagcagttgactgat

SEQ ID NO: 236510 - DNA, 1341 bp, Artificial Sequence
  derived and/or modified sequence
tgaccactataaaagtcaggcgggctgaggaggagacaaaggccaggacgctccgcagctgttggggaagaggagctgcctcctgggatggagaaatttaaggctgcgatgttgctggggagcgtcggcgatgctcttggctacagaaatgtctgcaaggagaacagcactgtaggcatgaagatccaggaggagctgcaacgttccgggggcctggaccacctcgtactctcgccaggagaatggcccgtgagtgacaacaccatcatgcacatcgcaaccgccgaggccctcaccacagactactggtgcctggatgatctgtaccgggagatggtgagatgctatgtggaaatcgttgagaagcttccagaacgccggccagacccagctaccattgaaggctgtgctcagctaaagcccaataactaccttctcgcctggcacacaccgttcaatgaaaaaggctcagggtttggagcggccaccaaggccatgtgcatcggcctgcggtactggaagcctgagcggctggagaccctcatcgaggtcagcgtggagtgcggccggatgacccacaaccatcccacaggcttcctgggctccctgtgcacggccctgtttgtgtcgttcgccgcacaaggaaagcccctggtccagtgggggagagacatgctgcgggcggtgcctctggcagaagagtactgcaggaagaccatccggcacacggcagaataccaggagcactggttttactttgaagctaaatggcaattttatttggaggagaggaaaatcagtaaagactcagaaaataaagccatcttccccgacaattatgatgcagaagagagggaaaagacctacaggaagtggagctcggaaggtcgagggggaagacgaggccacgatgcccccatgatagcctatgacgccctccttgcagcaggaaacagctggactgagctgtgtcaccgggccatgtttcatggaggggagagcgcggccacgggcaccattgcaggctgcctgttcgggttgctgtacggcctggacctcgttcccaaaggcttgtaccaggacctggaggacaaggagaagctggaggacctgggcgcggctctctaccgcctgtccacagaggagaagtaaagccatttctgccactttccccctagagagccgattccaccccggggcccgtagggccctctcgcagcccctgggtgagggtgtctctgtgaggctccactgcggtctgtgcctgactggccacatctaactctctgtttccaatttcagaatcctaactgttgcataaaatacattgtttgtcctgcg

SEQ ID NO: 236511 - DNA, 950 bp, Artificial Sequence
  derived and/or modified sequence
cctccttccgggtgagcctctgaacagggctgtctccttctgggtgagcctctctgaaccgggctgcctccttccgggtgtgtctctctgaacggggctcactccttccagggtccctccttcccggtgagcctctctgactggggctgcctccttccgggtgagcctctctgactggggctgcctccttccgggtgagcctctctgactggggctgcctccttccgggtgagcctctctgaacagggcacgagagcagactctgaaccaggaagtagccgtgtctagcgctctacaagacacataggagaggtggcatccatggccctgaaacgacaagcccatgttgccagcgcattatcaccaagtcacttggcaagcgtttagcagactactggtgcctggatgatctgtaccgggagatggtgagatgctatgtggaaatcgttgagaagcttccagaacgccggccagacccagctaccattgaaggctgtgctcagctaaagcccaataactaccttctcgcctggcacacaccgttcaatgaaaaaggctcagggtttggagcggccaccaaggccatgtgcatcggcctgcggtactggaagcctgagcggctggagaccctcatcgaggtcagcgtggagtgcggccggatgacccacaaccatcccacaggcttcctgggctccctgtgcacggccctgtttgtgtcgttcgccgcacaaggaaagcccctggtccagtgggggagagacatgctgcgggcggtgcctctggcagaagagtactgcaggaagaccatccggcacacggcagaataccaggagcactggttttactttgaagctaaatggcaattttatttggaggagaggaaaatcagtaaagactcagaaaataaagccatcttccccgacaattatgatgcagaagagagggaaaag

SEQ ID NO: 236512 - DNA, 1065 bp, Artificial Sequence
  derived and/or modified sequence
atggagaagttcaaggccgccatgctgctgggctctgtgggagatgccctgggctacagaaatgtgtgcaaggagaacagcacagtgggcatgaagatccaggaggagctgcagaggtctgggggcctggaccacctggtgctgagccctggagagtggcctgtgtctgacaacaccatcatgcacatcgccacagctgaggccctgaccacagactactggtgcctggatgacctgtaccgggagatggtgcgctgctacgtggagatcgtggagaagctgcctgagaggaggccagaccctgccaccatcgagggctgtgcccagctgaagcccaacaactacctgctggcctggcacacccccttcaatgagaagggcagcggctttggagctgccaccaaggccatgtgcatcggcctgcgctactggaagccagagcggctggagaccctgattgaggtgtctgtggagtgtggccgcatgacccacaaccaccccaccggcttcctgggcagcctgtgcacagccctgtttgtgtcctttgctgcccagggcaagcccctggtgcagtggggccgggacatgctgcgggctgtgcccctggccgaggagtactgcaggaagaccatccgccacacagctgagtaccaggagcactggttctactttgaggccaagtggcagttctacctggaggagaggaagatcagcaaggacagcgagaacaaggccatcttcccagacaactatgatgctgaggagcgggagaagacctacaggaagtggagcagcgagggccggggcggcagaagaggacatgatgcccccatgattgcctatgatgccctgctggccgccggcaacagctggacagagctgtgccaccgggccatgtttcatggaggagagagcgctgccaccggcaccatcgccggctgcctgtttggcctgctgtatggcctggacctggtgcccaagggcctgtaccaggacctggaggacaaggagaagctggaggacctgggcgccgccctgtaccgcctgagcacagaggagaagtag

SEQ ID NO: 236513 - DNA, 1065 bp, Artificial Sequence
  derived and/or modified sequence
atggagaagttcaaggccgccatgctgctgggcagcgtgggcgacgcgctgggatatcgcaacgtatgtaaggagaattccaccgtgggcatgaaaatacaagaggagctacaaagatccggaggcctggatcacctggtgctgtcacccggagaatggcctgtcagtgataatacaattatgcacattgccacagctgaagcactcacaacagattattggtgcctggacgacctctaccgggagatggttcgttgttatgtggagattgttgagaagttacccgagcgcagacccgatcctgccaccatcgagggctgcgctcagctcaaacctaataactatctcctggcgtggcatactccgttcaatgagaaaggctccgggttcggcgcggccaccaaagccatgtgtatcgggctgcggtattggaaacctgagagactagagacattgatcgaggtgagcgtagagtgtggaagaatgacccataatcacccaactggcttcctcggtagcctctgcaccgccctttttgtttcgtttgctgcccagggaaagccactggtgcagtgggggagagacatgctgagggcagtgcctctcgccgaagagtactgtcggaaaactattcggcataccgctgaatatcaagaacactggttttatttcgaggccaaatggcagttctatctcgaggagagaaagattagtaaggatagcgaaaacaaggccattttccctgataattacgatgccgaagagagggaaaagacataccggaagtggagctctgagggtagaggcggccggcgcggtcatgatgcaccaatgatcgcctatgacgctcttctcgcggcgggtaattcctggacagaactctgtcatagggctatgttccacgggggtgaatcagcagcaaccggcactatcgcgggttgtttgtttggtctgttgtacggtttagacctggtgccgaagggtctttatcaggatctcgaggacaaggagaaactagaggacctgggtgccgccctctatagactgagtacggaggaaaaatag

SEQ ID NO: 236514 - DNA, 1065 bp, Artificial Sequence
  derived and/or modified sequence
atggaaaaatttaaagcggcaatgctgctcggctctgtcggggacgcccttggatatcggaatgtatgtaaagaaaattcaaccgtgggaatgaaaatccaggaagagctgcaaagaagcgggggactggaccacctggtacttagtccgggtgagtggccggtgtctgataatacaatcatgcatatcgccaccgctgaagccttaacaacggactactggtgtctagacgacctgtatcgagagatggttaggtgttatgtggaaattgtggaaaagctgccggaacggcgacccgatccagccaccatcgagggttgtgcacaactgaagccgaacaactaccttttggcctggcacacaccattcaacgaaaaagggagcggcttcggggcagccaccaaggcaatgtgtatcggcctccgctattggaagcccgaacgtcttgagaccttgatcgaggtgagtgtggagtgtggacgcatgacacacaatcaccccacaggattcctagggtcgctctgtacagcgctgttcgtttcatttgccgcacaagggaagcccctggtgcaatgggggagagacatgcttcgggctgtcccactggccgaagagtactgccgtaaaactattagacacacggccgaataccaagaacactggttctattttgaagcgaagtggcagttctaccttgaagaaagaaaaatttctaaagatagcgagaacaaggcgatttttccagacaactacgacgcagaagaaagggagaaaacatacagaaaatggtcctcagaaggcagagggggacgtaggggccatgatgccccaatgatcgcctacgacgcacttcttgctgcaggcaattcgtggaccgagttatgtcaccgcgctatgttccacgggggagagtccgctgccacgggaactattgcaggatgtctgttcggactgctctacggccttgacctggtgcctaagggcctgtatcaagaccttgaggacaaagagaagttggaggacctgggtgcggctctgtaccgtctgtctactgaggagaagtag

SEQ ID NO: 236515 - DNA, 1065 bp, Artificial Sequence
  derived and/or modified sequence
atggagaagttcaaggccgccatgctgctgggcagcgtgggcgacgccctgggctacagaaacgtgtgcaaggagaacagcaccgtgggcatgaagatccaggaggagctgcagagaagcggcggcctggaccacctggtgctgagccccggcgagtggcccgtgagcgacaacaccatcatgcacatcgccaccgccgaggccctgaccaccgactactggtgcctggacgacctgtacagagagatggtgagatgctacgtggagatcgtggagaagctgcccgagagaagacccgaccccgccaccatcgagggctgcgcccagctgaagcccaacaactacctgctggcctggcacacccccttcaacgagaagggcagcggcttcggcgccgccaccaaggccatgtgcatcggcctgagatactggaagcccgagagactggagaccctgatcgaggtgagcgtggagtgcggcagaatgacccacaaccaccccaccggcttcctgggcagcctgtgcaccgccctgttcgtgagcttcgccgcccagggcaagcccctggtgcagtggggcagagacatgctgagagccgtgcccctggccgaggagtactgcagaaagaccatcagacacaccgccgagtaccaggagcactggttctacttcgaggccaagtggcagttctacctggaggagagaaagatcagcaaggacagcgagaacaaggccatcttccccgacaactacgacgccgaggagagagagaagacctacagaaagtggagcagcgagggcagaggcggcagaagaggccacgacgcccccatgatcgcctacgacgccctgctggccgccggcaacagctggaccgagctgtgccacagagccatgttccacggcggcgagagcgccgccaccggcaccatcgccggctgcctgttcggcctgctgtacggcctggacctggtgcccaagggcctgtaccaggacctggaggacaaggagaagctggaggacctgggcgccgccctgtacagactgagcaccgaggagaagtag

SEQ ID NO: 236516 - protein, 522 aa, Artificial Sequence
  derived and/or modified sequence
MQPWHGKAMQRASEAGATAPKASARNARGAPMDPTESPAAPEAALPKAGKFGPARKSGSRQKKSAPDTQERPPVRATGARAKKAPQRAQDTQPSDATSAPGAEGLEPPAAREPALSRAGSCRQRGARCSTKPRPPPGPWDVPSPGLPVSAPILVRRDAAPGASKLRAVLEKLKLSRDDISTAAGMVKGVVDHLLLRLKCDSAFRGVGLLNTGSYYEHVKISAPNEFDVMFKLEVPRIQLEEYSNTRAYYFVKFKRNPKENPLSQFLEGEILSASKMLSKFRKIIKEEINDIKDTDVIMKRKRGGSPAVTLLISEKISVDITLALESKSSWPASTQEGLRIQNWLSAKVRKQLRLKPFYLVPKHAKEGNGFQEETWRLSFSHIEKEILNNHGKSKTCCENKEEKCCRKDCLKLMKYLLEQLKERFKDKKHLDKFSSYHVKTAFFHVCTQNPQDSQWDRKDLGLCFDNCVTYFLQCLRTEKLENYFIPEFNLFSSNLIDKRSKEFLTKQIEYERNNEFPVFDEF

SEQ ID NO: 236517 - DNA, 1569 bp, Artificial Sequence
  derived and/or modified sequence
atgcagccgtggcacggcaaagccatgcagcgcgcttccgaggcgggtgctaccgcacccaaagcttcagcacggaacgcccgaggggctcctatggacccgaccgagagtcccgccgccccggaggcggctctccccaaagcaggcaagttcgggccggcccgcaagtcaggctcccgccagaaaaagagcgccccagacacacaggagcgccctccagtgagggcgacaggggctcgggcgaaaaaggccccccaacgcgctcaagatacacaaccatcggacgctacttccgcgcccggtgccgaaggcttagaaccaccagccgctcgggagcccgcattaagtcgagcgggctcatgccggcagcgcggggcccgatgcagtacaaagcctagaccccctccagggccctgggacgtaccatcacctggcctcccagtgtcagcaccgatactcgttcggagagacgctgctccaggcgccagcaaactgcgagctgtgttggaaaagctgaagctgagcagggatgacataagcaccgccgccggcatggtaaagggagtggtcgaccacctgcttctgcggctgaagtgcgactccgcatttcgcggggtggggcttcttaacaccggaagttattacgagcatgtcaaaatttctgcaccgaacgaatttgatgtaatgttcaagttggaagttccacgcattcagctagaggagtattcgaatacccgggcgtattattttgtgaaattcaagcggaaccctaaggagaaccccctgagccagttcttggaaggagagattctgagtgccagcaagatgctttctaagttccggaaaatcattaaggaggagatcaacgacattaaagacacagacgttattatgaaacggaaaagaggagggtctccagccgtgactctccttatttcggagaagattagcgttgatatcacactcgctttagagagtaaatccagttggcctgcatcgactcaggagggcttgcgaatccagaactggttgtccgcaaaggtgcgtaagcagctccggcttaaacctttctacctggttcctaagcatgccaaagaggggaatggattccaggaagaaacatggcgcttaagcttcagtcacatagaaaaggaaatccttaataatcacggaaaatccaagacctgttgtgaaaataaggaggagaaatgctgtcgtaaggattgcctcaagctgatgaagtacctgttagaacaattaaaagagagatttaaagataaaaaacatctcgataagttttctagctaccatgtgaaaaccgcattttttcatgtttgcactcaaaatccgcaagactctcagtgggatcggaaagatttaggtctctgcttcgacaattgcgtgacttacttcctacagtgcctacgcacggagaaactcgagaactattttatccctgaatttaatctgttcagcagtaacctgatcgacaaacggagcaaggaattcctgacaaaacagatcgagtacgagcgcaacaacgaatttccagtgtttgacgaattctag

SEQ ID NO: 236518 - DNA, 1569 bp, Artificial Sequence
  derived and/or modified sequence
atgcagccctggcacggcaaggccatgcagagggccagcgaggccggggccacagcccccaaggccagcgccagaaatgcccggggggcccccatggaccccacagagagccctgctgcccctgaggccgccctgcccaaggccggcaagtttggacctgccaggaagagcggcagccggcagaagaagagcgccccagacacccaggagcggccccctgtgcgggccactggagcccgggccaagaaggccccccagagggcccaggacacccagcccagtgatgccaccagcgcccctggagctgagggcctggagcccccagctgcccgggagcccgccctgagccgggccggcagctgccggcagagaggagcccgctgcagcaccaagccccggcccccacctggcccctgggatgtgcccagccctggcctgcctgtgtctgcccccatcctggtgagaagagatgctgcccctggggccagcaagctgcgggctgtgctggagaagctgaagctgagcagagatgacatcagcacagctgctggcatggtgaagggcgtggtggaccacctgctgctgcggctgaagtgtgacagcgccttccggggcgtgggcctgctgaacacaggcagctactatgaacatgtgaagatcagcgccccaaatgaatttgatgtgatgttcaagctggaggtgccccgcatccagctggaggagtacagcaacacccgggcctactactttgtgaagttcaagaggaaccccaaggagaaccccctgagccagttcctggagggggagatcctgagcgccagcaagatgctgagcaagttcaggaagatcatcaaggaggagatcaatgacatcaaggacacagatgtgatcatgaagaggaagagaggaggcagccctgctgtgaccctgctgatcagcgagaagatctctgtggacatcaccctggccctggagagcaagagctcctggccagccagcacccaggagggcctgcgcatccagaactggctgagcgccaaggtgaggaagcagctgcggctgaagcccttctacctggtgcccaagcacgccaaggagggcaatggcttccaggaggagacctggaggctgtccttcagccacatcgagaaggagatcctgaacaaccacggcaagagcaagacctgctgtgagaacaaggaggagaagtgctgcaggaaggactgcctgaagctgatgaagtacctgctggagcagctgaaggagcgcttcaaggacaagaagcacctggacaagttcagcagctaccacgtgaagacagccttcttccacgtgtgcacccagaacccccaggacagccagtgggacaggaaggacctgggcctgtgctttgacaactgtgtgacctacttcctgcagtgcctgaggacagagaagctggagaactacttcatccctgagttcaacctcttcagcagcaacctgattgacaagaggagcaaggagttcctgaccaagcagatcgagtatgaaagaaataatgagttccctgtgtttgatgagttctag

SEQ ID NO: 236519 - DNA, 3182 bp, Artificial Sequence
  derived and/or modified sequence
agtagtgcttggtttccaacagctgctgctggctcttcctcttgcggccttttcctgaaacggattcttctttcggggaacagaaagcgccagccatgcagccttggcacggaaaggccatgcagagagcttccgaggccggagccactgcccccaaggcttccgcacggaatgccaggggcgccccgatggatcccaccgagtctccggctgcccccgaggccgccctgcctaaggcgggaaagttcggccccgccaggaagtcgggatcccggcagaaaaagagcgccccggacacccaggagaggccgcccgtccgcgcaactggggcccgcgccaaaaaggcccctcagcgcgcccaggacacgcagccgtctgacgccaccagcgcccctggggcagaggggctggagcctcctgcggctcgggagccggctctttccagggctggttcttgccgccagaggggcgcgcgctgctccacgaagccaagacctccgcccgggccctgggacgtgcccagccccggcctgccggtctcggcccccattctcgtacggagggatgcggcgcctggggcctcgaagctccgggcggttttggagaagttgaagctcagccgcgatgatatctccacggcggcggggatggtgaaaggggttgtggaccacctgctgctcagactgaagtgcgactccgcgttcagaggcgtcgggctgctgaacaccgggagctactatgagcacgtgaagatttctgcacctaatgaatttgatgtcatgtttaaactggaagtccccagaattcaactagaagaatattccaacactcgtgcatattactttgtgaaatttaaaagaaatccgaaagaaaatcctctgagtcagtttttagaaggtgaaatattatcagcttctaagatgctgtcaaagtttaggaaaatcattaaggaagaaattaacgacattaaagatacagatgtcatcatgaagaggaaaagaggagggagccctgctgtaacacttcttattagtgaaaaaatatctgtggatataaccctggctttggaatcaaaaagtagctggcctgctagcacccaagaaggcctgcgcattcaaaactggctttcagcaaaagttaggaagcaactacgactaaagccattttaccttgtacccaagcatgcaaaggaaggaaatggtttccaagaagaaacatggcggctatccttctctcacatcgaaaaggaaattttgaacaatcatggaaaatctaaaacgtgctgtgaaaacaaagaagagaaatgttgcaggaaagattgtttaaaactaatgaaataccttttagaacagctgaaagaaaggtttaaagacaaaaaacatctggataaattctcttcttatcatgtgaaaactgccttctttcacgtatgtacccagaaccctcaagacagtcagtgggaccgcaaagacctgggcctctgctttgataactgcgtgacatactttcttcagtgcctcaggacagaaaaacttgagaattattttattcctgaattcaatctattctctagcaacttaattgacaaaagaagtaaggaatttctgacaaagcaaattgaatatgaaagaaacaatgagtttccagtttttgatgaattttgagattgtatttttagaaagatctaagaactagagtcaccctaaatcctggagaatacaagaaaaatttgaaaaggggccagacgctgtggctcacacctgtaatcccagctctttggaggccgaggcaggcggatcacttgaggtcaggagtttgagaccagcctgaccaacatggtgaaactccatctctactaaaaatataaaaattagccgggcatggtgatgcatgcctgtaatcccagctactcgggaggcttagacatgagaatcacttgaacccaggaggtggaggttgcagtgagtcaagatggcaccactgcactccatcctgggtgacagagcaagacttcctctcaaaaaataaataaataaataagaaaaataaattaggaaattattaaaataattttttagaaaagcaacaaaataacaaaaattagtgactgtaataattggaatgtttgaaatttgtcacagcaataattgactaaaatgaatgtaaataattattcagttttcagtttgttgtaataaactctaatcagtataaaggattgactatcctaggaaaaagattagtcaaggaataagaagcaaaagtagtatttgaaatctaaaaacattaccatgtttgctttatcatgcaggcaaataaataaataaatgacatttttaggttggaataaaaaaagataaagtacatattgccttaattaaattcatcaagttcttactgaaaaacagctctccgccgtgcctggccaggaaatacataattttttttttttttttttagatggagtctcgctctgtcgcccaggctggagtccagtggcatgatcttggctcactgcaagctctgcttcctgggttcatgccattctcctgcctcagccttccgagtagctgggactacaggtgcccgccaccacatccggctaattttttgtatttttagtaaagatggggtttcaccatgttagccaggatggtctcgatctccttaccttgtgatccgcccgccttggcctcccaaagtgctgggattacaggtgtgagccaccacgcctggctgaaatacataatcttaaaagaaaacataagatactttattttaatatacgtgactaaatgtaaaacctaacttattttctgttatctatttatttttactttcagtaacactttttttattttaggtagcattcagcctagaggcaactgctgtttgttaaatatttcctgttcatatattttgcacattttcttatgggttagttttcttctcattgttttgggaagttcttaatatatttggggtatttatctttcattcgttgtctgtgtaacaaataacttctgccatatgggttgtctgcacattttttggtgtcttttagtaaacaaggtttttttgttttgtattgttttgtttattgtaaagatttttaaattttaatggagttgatttcttttctcattcaagcttttgagaataaattggagttgaatttttta

SEQ ID NO: 236520 - DNA, 1569 bp, Artificial Sequence
  derived and/or modified sequence
atgcagccctggcacggcaaggccatgcagcgggccagcgaggccggcgccaccgcccccaaggcatcagcccgaaacgccagaggcgctccaatggaccccacagaaagtcctgcagcccccgaggccgctctacctaaggccggcaagtttggcccagcaaggaagagtgggagcaggcagaagaagtccgcccctgacacccaggaaaggcctcccgtgcgcgctacaggcgctagagcaaagaaagctcctcaacgcgcgcaagacactcagcctagtgacgccactagcgccccaggtgcagagggactcgagccccctgccgccagggagcctgcactgagtagagctggctcttgccggcagcgaggcgctcgttgttcgacgaagcctagaccacccccggggccctgggacgtccccagtcctggacttccagtgtctgcgcccatcctggtgagaagagacgccgctcccggcgcttctaagctgagggctgttctggagaaattaaagctgtcccgtgatgatatcagtactgccgcaggtatggtaaagggggttgtggaccaccttctgctccgtttaaagtgcgattccgcatttaggggcgtcgggctattgaatacaggatcttactatgagcacgtgaagatctccgcccctaacgagttcgacgtaatgttcaagctcgaggtacccaggatccaattggaagagtactctaatacacgggcctactattttgtaaagttcaagcgtaatcccaaggagaaccctctaagccagtttctggagggcgagatcctgtcagcctcaaaaatgctttctaagttcagaaaaattattaaggaagaaattaatgacattaaggacactgacgtaattatgaagcgaaaacggggaggatcacctgccgtgaccctcctcattagtgagaagatttccgtcgacattacgctggctctggaaagcaaaagcagctggcccgcctcaacccaggagggcttacgaatacaaaactggttgtctgctaaagttcgtaaacaactgagactgaagcctttctacctggtgccaaagcatgccaaggaggggaatggcttccaggaagaaacatggagattgagtttctctcatatcgagaaagaaattttgaacaaccacgggaaaagcaagacctgttgtgaaaacaaggaagagaagtgttgccgtaaggactgcctgaaactgatgaagtacctgttggaacagctgaaggaacgctttaaggataagaagcacctggacaagttcagcagctaccacgtcaagacagcttttttccatgtgtgcacgcagaatccacaggactcgcaatgggaccggaaagacctcggcctctgttttgacaactgcgtcacctatttcctgcagtgcttaaggaccgagaagctcgaaaattatttcatacccgaatttaacttattttcatctaacctgatcgataaacggagtaaagagttcctaacgaaacaaattgaatatgagaggaataatgagttccccgttttcgacgagttctag

SEQ ID NO: 236521 - DNA, 1569 bp, Artificial Sequence
  derived and/or modified sequence
atgcagccctggcacggcaaagctatgcagcgcgcatctgaggcaggcgctaccgcccctaaggcctctgctcggaacgcccgaggcgcacctatggacccaaccgagtcccctgctgcaccagaagctgccttgcctaaagccggtaagttcgggccagctcggaaatccggctcccgacagaagaagtctgcgccagacacccaagaacggccacccgtgcgcgctactggtgcaagggccaaaaaggctccccagcgggctcaggatacacaaccctccgatgctacatcagctcccggagccgagggcctcgagccaccagccgctagagaacccgcactcagtcgggcaggttcatgccgccagcggggtgcacgctgctccactaaacccaggccaccgccaggaccttgggacgtgcctagtccgggtctcccagtgagtgccccaatattggtgcggagagatgctgcccctggggcttccaagctccgcgcagtgctcgaaaagctgaagctctcacgagatgacatcagcaccgccgcagggatggtgaaaggcgtggtggatcacctgctgctacggctcaagtgcgatagcgcctttagaggggttggcctcctgaacacaggatcttactatgagcatgtgaagatctcagcacccaacgagtttgacgtcatgttcaagctagaggtgcctaggatccagctcgaggaatattctaacacacgggcatattatttcgtgaaattcaaaaggaatcccaaggagaatcccttaagtcagttcttggagggagagatcctctcagcaagcaagatgctgtccaagtttcgtaaaatcattaaggaagagatcaacgacattaaggataccgatgtcataatgaaaagaaagagggggggtagccctgccgtgacgctactgattagtgagaaaatttctgtggacatcacgttagcgcttgagagcaaatcaagctggccagcctcaacgcaggaaggactgagaatccaaaactggttgagtgcaaaagtccgcaagcagttgagactgaagcctttctacctagtgcctaaacatgccaaggaagggaacgggttccaggaggagacctggaggctctcattcagccacattgagaaagaaatcctgaacaaccacggcaagtccaaaacatgctgcgagaacaaggaagagaagtgctgcaggaaagactgcctgaaattgatgaaatacctgctcgagcagctgaaggagcgatttaaggataagaagcatctggataagttttcctcataccatgttaaaactgccttcttccatgtgtgcacccagaatccacaggattcccagtgggacaggaaggacctgggcttgtgttttgacaactgtgtaacttactttctgcagtgtctgcggacagaaaagttagagaattattttattcccgaatttaacttgttcagtagtaatctgatcgacaaaaggagcaaagaatttcttaccaaacagatcgagtatgaacgcaacaatgagttccccgtttttgatgaattctag

SEQ ID NO: 236522 - DNA, 1569 bp, Artificial Sequence
  derived and/or modified sequence
atgcagccctggcacggcaaggccatgcagagagccagcgaggccggcgccaccgcccccaaggccagcgccagaaacgccagaggcgcccccatggaccccaccgagagccccgccgcccccgaggccgccctgcccaaggccggcaagttcggccccgccagaaagagcggcagcagacagaagaagagcgcccccgacacccaggagagaccccccgtgagagccaccggcgccagagccaagaaggccccccagagagcccaggacacccagcccagcgacgccaccagcgcccccggcgccgagggcctggagccccccgccgccagagagcccgccctgagcagagccggcagctgcagacagagaggcgccagatgcagcaccaagcccagacccccccccggcccctgggacgtgcccagccccggcctgcccgtgagcgcccccatcctggtgagaagagacgccgcccccggcgccagcaagctgagagccgtgctggagaagctgaagctgagcagagacgacatcagcaccgccgccggcatggtgaagggcgtggtggaccacctgctgctgagactgaagtgcgacagcgccttcagaggcgtgggcctgctgaacaccggcagctactacgagcacgtgaagatcagcgcccccaacgagttcgacgtgatgttcaagctggaggtgcccagaatccagctggaggagtacagcaacaccagagcctactacttcgtgaagttcaagagaaaccccaaggagaaccccctgagccagttcctggagggcgagatcctgagcgccagcaagatgctgagcaagttcagaaagatcatcaaggaggagatcaacgacatcaaggacaccgacgtgatcatgaagagaaagagaggcggcagccccgccgtgaccctgctgatcagcgagaagatcagcgtggacatcaccctggccctggagagcaagagcagctggcccgccagcacccaggagggcctgagaatccagaactggctgagcgccaaggtgagaaagcagctgagactgaagcccttctacctggtgcccaagcacgccaaggagggcaacggcttccaggaggagacctggagactgagcttcagccacatcgagaaggagatcctgaacaaccacggcaagagcaagacctgctgcgagaacaaggaggagaagtgctgcagaaaggactgcctgaagctgatgaagtacctgctggagcagctgaaggagagattcaaggacaagaagcacctggacaagttcagcagctaccacgtgaagaccgccttcttccacgtgtgcacccagaacccccaggacagccagtgggacagaaaggacctgggcctgtgcttcgacaactgcgtgacctacttcctgcagtgcctgagaaccgagaagctggagaactacttcatccccgagttcaacctgttcagcagcaacctgatcgacaagagaagcaaggagttcctgaccaagcagatcgagtacgagagaaacaacgagttccccgtgttcgacgagttctag

SEQ ID NO: 236523 - protein, 325 aa, Artificial Sequence
  derived and/or modified sequence
MALADSTRGLPNGGGGGGGSGSSSSSAEPPLFPDIVELNVGGQVYVTRRCTVVSVPDSLLWRMFTQQQPQELARDSKGRFFLDRDGFLFRYILDYLRDLQLVLPDYFPERSRLQREAEYFELPELVRRLGAPQQPGPGPPPSRRGVHKEGSLGDELLPLGYSEPEQQEGASAGAPSPTLELASRSPSGGAAGPLLTPSQSLDGSRRSGYITIGYRGSYTIGRDAQADAKFRRVARITVCGKTSLAKEVFGDTLNESRDPDRPPERYTSRYYLKFNFLEQAFDKLSESGFHMVACSSTGTCAFASSTDQSEDKIWTSYTEYVFCRE

SEQ ID NO: 236524 - DNA, 978 bp, Artificial Sequence
  derived and/or modified sequence
atggccctggccgacagcaccagaggcctgcccaacggcggcggcggcggcggcggcagcggcagcagcagcagcagcgccgagccccccctgttccccgacatcgtggagctgaacgtgggcggccaggtgtacgtgaccagaagatgcaccgtggtgagcgtgcccgacagcctgctgtggagaatgttcacccagcagcagccccaggagctggccagagacagcaagggcagattcttcctggacagagacggcttcctgttcagatacatcctggactacctgagagacctgcagctggtgctgcccgactacttccccgagagaagcagactgcagagagaggccgagtacttcgagctgcccgagctggtgagaagactgggcgccccccagcagcccggccccggccccccccccagcagaagaggcgtgcacaaggagggcagcctgggcgacgagctgctgcccctgggctacagcgagcccgagcagcaggagggcgccagcgccggcgcccccagccccaccctggagctggccagcagaagccccagcggcggcgccgccggccccctgctgacccccagccagagcctggacggcagcagaagaagcggctacatcaccatcggctacagaggcagctacaccatcggcagagacgcccaggccgacgccaagttcagaagagtggccagaatcaccgtgtgcggcaagaccagcctggccaaggaggtgttcggcgacaccctgaacgagagcagagaccccgacagaccccccgagagatacaccagcagatactacctgaagttcaacttcctggagcaggccttcgacaagctgagcgagagcggcttccacatggtggcctgcagcagcaccggcacctgcgccttcgccagcagcaccgaccagagcgaggacaagatctggaccagctacaccgagtacgtgttctgcagagagtag

SEQ ID NO: 236525 - DNA, 978 bp, Artificial Sequence
  derived and/or modified sequence
atggctctggctgactcaacccggggccttccaaatggtgggggaggtggcggaggcagcgggtcatccagcagtagcgcagagccgcccctgtttccggacattgttgaactgaatgtcgggggacaagtctatgttaccagaagatgtacagttgtgagcgtcccagattccctcttgtggcgcatgtttacccagcagcaaccccaggagttggcccgtgactcaaagggacggtttttcctcgaccgcgacggcttcctgtttcgctatattttagattacctccgcgacctgcaactcgtactgcctgattattttcctgagcgctcccgattgcagagggaagcagaatacttcgaattgcccgaattggtgcggagattgggggccccacagcagcctggacctgggccaccccccagccgccgcggggtgcataaggaggggtccctcggcgatgagctgctccccctggggtactctgagcctgaacagcaggagggagcaagtgccggcgcccctagcccgactctggagctcgcctcacggagtccatctggcggtgccgctggccccctgctcacccccagtcagtctctggacgggtcgcgcaggagtgggtatattacaatcgggtatcggggcagttacacaatcggcagggatgcccaggccgatgcaaaatttcgccgggttgcccggatcacagtctgcgggaagacgagccttgctaaggaagtctttggggacacgttaaatgagtccagggatcccgacagaccgccagagaggtacacctctcgctactacctgaaatttaacttcctcgagcaagcctttgataagttaagtgaaagtggattccatatggtggcttgctcgtccacgggtacttgtgccttcgcctcttccacagatcagagtgaagacaagatctggacgtcctacacagagtacgtcttctgcagggagtag

SEQ ID NO: 236526 - DNA, 978 bp, Artificial Sequence
  derived and/or modified sequence
atggcccttgccgatagcacaagagggctcccgaacggagggggcggagggggaggttccggctctagttctagctctgccgagcccccgctgttccccgatatagtcgagctgaatgtgggcgggcaggtctatgttactcgacggtgtacggtggtgtccgttcctgactccctgctctggcgcatgttcacgcagcagcagcctcaggagctggcaagggactccaagggaaggttctttcttgaccgggacggatttctcttcaggtatatcctggattacctgagagacctgcagctcgtgttaccagattatttccctgagaggagcagattgcaacgcgaagctgagtatttcgagctaccggaactcgtacgccgtctcggtgcaccccagcaacctggtccaggccctccacccagcaggaggggcgtccacaaagaggggtcattgggcgatgaattgcttcctctgggatactctgaacccgaacagcaagagggcgcctccgccggggcaccctccccaactctagaattagcttcacggtctccgagcggtggggctgcaggcccattgctaactccgtctcaatcactggatggaagcagacgttctggctatatcacaattggataccgcggctcctataccatcgggcgcgatgcgcaggctgatgccaagtttcgcagagtggcaaggattacggtttgtgggaagaccagtctggcaaaggaggtatttggagacacgctgaatgaatccagggatccagaccgcccacccgaaagatatacctctaggtactacctgaaatttaatttcctagagcaggcgtttgataaactgagcgagtccggctttcatatggttgcttgttccagcacaggcacgtgtgcttttgccagcagcaccgaccagtccgaggacaagatctggacgtcctacacagaatacgtgttttgccgggaatag

SEQ ID NO: 236527 - DNA, 978 bp, Artificial Sequence
  derived and/or modified sequence
atggccctggccgacagcacccggggcctgcccaacggcggcggcggcggcggcggcagcggcagcagcagcagcagcgctgagcccccactcttcccagacatcgtggagctgaatgtgggcggccaggtgtatgtgacccggcgctgcaccgtggtgtctgtgcctgacagcctgctgtggaggatgttcacccagcagcagccccaggagctggcccgggacagcaagggccgcttcttcctggacagagatggcttcctgttccgctacatcctggactacctgcgggacctgcagctggtgctgcctgactacttccctgagaggagccggctgcagcgggaggccgagtactttgagctgcctgagctggtgcggcggctgggcgccccccagcagcccggccctggccccccacccagcagaagaggagtgcacaaggagggcagcctgggagatgagctgctgcccctgggctacagcgagcctgagcagcaggagggcgccagcgctggggcccccagccccaccctggagctggccagccgcagccccagcggcggcgctgctggccccctgctgacccccagccagagcctggatggcagcagaagaagtggctacatcaccatcggctaccggggcagctacaccatcggcagagatgcccaggctgatgccaagttcagaagagtggcccgcatcaccgtgtgtgggaagaccagcctggccaaggaggtgtttggagacaccctgaatgaaagccgggaccctgaccggcccccagagcgctacaccagccgctactacctgaagttcaacttcctggagcaggcctttgacaagctgtctgagagcggcttccacatggtggcctgcagcagcacaggcacctgtgcctttgccagcagcacagaccagagcgaggacaagatctggaccagctacacagaatatgtgttctgccgggagtag

SEQ ID NO: 236528 - DNA, 978 bp, Artificial Sequence
  derived and/or modified sequence
atggccctggccgacagcacccggggcctgcccaacggcggcggcggcggcggaggctctggcagtagcagctccagcgccgagccacctctgttccccgatatagtggaattaaatgttggaggacaggtatatgtgaccaggcggtgcacagtcgtttccgtgccagattcattgttgtggcggatgttcacccagcaacagcctcaggaactggcaagggactctaagggccgcttctttcttgacagagatggttttttatttaggtatatactcgactatttgcgagatctgcagctggtcctgcccgactacttccctgaaaggtcccggttacagcgtgaggcggagtatttcgaattgcccgaactggtgaggcggctgggtgcaccccagcagccaggccctgggcccccaccctcgagaagaggggttcataaggaaggctcactcggcgatgagttattacctctgggctattcagaacctgagcagcaggagggcgcttccgctggagcgccgtcaccgactctcgagttggcaagcagatcacctagtggaggcgcagcaggccccctgttgacgccaagccagtcacttgatgggtcccgtagatccggatacattacaattggatatcgtggatcgtacaccataggccgggatgcacaggcggacgcaaagtttagaagagtggcacgaatcaccgtctgcggaaaaacctctctcgctaaagaagtgtttggcgacacactcaacgagagccgggatcctgataggcctccagaacggtacaccagccggtattatctaaagttcaatttcctcgaacaggccttcgacaaattgagcgagagtggcttccacatggtcgcatgctcctcaactggtacctgcgcgtttgctagctccaccgatcagagtgaagataaaatttggacatcatataccgaatatgtcttctgtcgagaatag

SEQ ID NO: 236529 - DNA, 978 bp, Artificial Sequence
  derived and/or modified sequence
atggccctggccgacagcacccggggcctgcccaacggcggcggcggaggcggtggctctggctcgtcctcctccagcgctgagccacctcttttccctgatatcgtggaactgaacgtcggaggccaggtttacgtaacaagacgctgtacagtggtatccgtgcctgattcactcttatggagaatgtttacccagcagcagccccaggagttggctagagattccaaagggaggttctttctggatagggatgggtttctgttccgatatattttagactatctgagggatttacaacttgttctacccgattatttccctgaaagatctcggctgcagagagaggccgaatatttcgaattgccagagctggtacggagactgggagcccctcagcagcccggtccaggaccaccccctagccggcgaggagtgcataaggaggggagtcttggcgacgaacttctgcctctcggttattccgaaccagagcaacaggagggagctagtgccggcgctccatcccccacactagaattagccagccgaagcccctcgggaggagccgcaggacccttgttaactccttctcagagcttagatggcagcaggaggtctgggtatatcactatcgggtatagaggcagttataccattggacgagatgctcaagccgacgcaaagtttagacgggtggcacgaatcaccgtttgcgggaagaccagcctggccaaggaggtctttggggacacccttaacgaaagccgggatccagacagaccacccgagcggtacacctctcgttattaccttaaatttaattttctggaacaggcctttgacaagttgtccgaatccggattccacatggtggcttgctctagcacaggcacctgcgcgtttgctagctcaacggaccaatctgaggataaaatatggacgagctataccgagtacgtcttttgccgcgagtag

SEQ ID NO: 236530 - DNA, 3839 bp, Artificial Sequence
  derived and/or modified sequence
actcgcctggagcgcgcgggcaaggcgggcggagcgcactggaactcaagggggcgcacagcggcgcgctcgcaccgctcggctccgcgcggctctaggaggtggcggcggtggcggtggcggcggtggcggcggcggcggcggcggggcgcagggctgagcgagcgtccgggttccggggctccggggaaggcggttgcagctcctgagtgcagcgcggcttcctgccactgtcccggcccggccacctctctgtcatggctctggcggacagcacacgtggattacccaacgggggcggcggcgggggcggcagtggctcctcgtcgtcctccgcggagccaccgctcttccccgacatcgtggagctgaacgtggggggccaggtgtacgtgacccggcgctgcacggtggtgtcggtgcccgactcgctgctctggcgcatgttcacgcagcagcagccgcaggagctggcccgggacagcaaaggccgcttctttctggaccgggacggcttcctcttccgctacatcctggattacctgcgggacttgcagctcgtgctgcccgactacttccccgagcgcagccggctgcagcgcgaggccgagtacttcgagctgccagagctcgtgcgccgcctcggggcgccccagcagcccggcccggggccgccgccctcgcggcgcggggtgcacaaggagggctcgctgggtgacgagctgctgccgcttggctactcggagcccgaacagcaggagggcgcctctgccggggcgccgtcgcccacgctggagctggctagccgcagtccgtccgggggcgcggcgggcccgctgctcacgccgtcccagtcgctggacggcagccggcgctcgggctacatcaccatcggctaccgcggctcctacaccatcgggcgggacgcgcaggcggacgccaagttccggcgagtggcgcgcatcaccgtttgcggaaagacgtcgctggccaaggaggtgtttggggacaccctgaacgaaagccgggaccccgaccgtcccccggagcgctacacctcgcgctattacctcaagttcaacttcctggagcaggccttcgacaagctgtccgagtcgggcttccacatggtggcgtgcagctccacgggcacctgcgcctttgccagcagcaccgaccagagcgaggacaagatctggaccagctacaccgagtacgtcttctgcagggagtgagctccccagaccccctcgccactccagcgcccttttcagctgctgctcgccagaagcccttgattccactggttgacatggcagcagttactggcaagagggagaaaggacgctgccgcctaagagtgcaaggctgctcaggtctccaagcgccgtaggaggtcacctggcagtgactgtagggagctgggtcatagtgcacgtcgtgggtattaggaaagcctgtattctttcaatgaatgtcagtaggaccttcctttagctgtaagacttggtgggcggggtggggtggggagggaggaaagggtaggaagggtgggaagggagaagcagacatagtcatttatgatttgaaagttggaagtttgtaccatctgtttgagtatatgcacatttaaaaaatatcatatagtaaatgcaaacatgccaagtattttataaagattaataacagacctactcttacctggcagtttacttaacttactgttttgagtcctaaacttagagttgttaatgcttatatataatctaaccaaagagttacccagtagggttttagtttttgaacttttattttcttgttgattataaatcctgattttggaatctattgcgcaaaagaagtttcattttggttacttagacctaagatcacttattaaaaatccttattttctccaagcccagcaaacgttgacttctgggcaaacctgaaaacctgaaaatgccactttcatgcagtttgtttgaagttaagtggaatcctttcaaatgacgagctgcagagaactcagcaccaagggctgcctatctgtagatagctgtaaaatggaatatttttaaatgaaggcaaataagtacttaaaagtgagctgagcaataaaatggtccaataataggtaaatgcaacagaaacagaaggagacctggttgccttatgcctttactcttacatggaataaattcccaatgcatatcctatgtaaaccataagtgaagggaaataaacctcgtcatgctccatgctgtgaggtgtcctttggatattctgtgatgacagagaagcctattttgttttgttttcagcatctttctctgatgtacgtttttaaggattttgtaagagctgttttcagtgtttaaattagtgctatttttccttgtttttaaaaatgaatctcgtactgtatcttactatgtccatacagatgttacaaatcgacagttttattcttagactcatgtgatccaagctgtatataccatatataaacattttacatgaatcatttagttttttaattcatttactaatgctataaaatttcctatattaccccagtaatttgcatcagctggtttatatactaaagcaacatgttttgatgagtttcttacatccttatcgaggaattgggttaggaaaaaatacataattgtaaaactgagtttgctgtattatactttttttcttgagtattagttgtattactaatcatatgttgattaactgtctacttaaagtcaaggtacctgtatttttaatccactaatttttttttagttgggaaatagatttcaggtcttttattagactaacattttttgagaagtaaaattgacttcatatacaaagcctgtaattttaggcgaaatggaagcagaaatctaggaagttgtgcttgcttgtatgttgagtttggtctcagactaagtaatgcatcagaattcatctgtttgaagcctgaaataatttaggactctgattcactgaccaaaagtcagtgttgcagagatttctctaccccgtatggtattttgttagattgttcaacaggaagcacatgattgagaacatcttgggacagaccaaaaccactgacagatggcaaggctcggcgattctgatttcccttctcaaatctgctcaactccaagagtcttgagaaactgctaaaattttgcctctgtcactcaagtcttacaaatgttatcttgtaaacctttgaggtgaactattccactgtcttgtacataggcatcttattcactgcaccctgtcacacccagcaccccccgccccgcacattatttgaaagactgggaatttaatggttagggacagtaaatctacttctttttccagggacgactgtcccctctaaagttaaagtcaatacaagaaaactgtctatttttagcctaaagtaaaggctgtgaagaaaattcattttacattgggtagacagtaaaaaacaagtaaaataacttgacatgagcacctttagatcccttcccctccatgggctttgggccacagaatgaacctttgaggcctgtaaagtggattgtaatttcctataagctgtaatagtggaggtattgtgggttcatttgagtaagccctccaaagataccattcaaataacctgggagaatgtcataaattattcagataattaacactgcatgaatctgattcagaggcatgcatttacatatgttgccctaattaccatttgatgatcataaatacaagtgaatgacattggacttttagtaacaaacttaatttttaaaaaggtgtagacaatggtggtt

SEQ ID NO: 236531 - DNA, 6214 bp, Artificial Sequence
  derived and/or modified sequence
gcgggcaaggcgggcggagcgcactggaactcaagggggcgcacagcggcgcgctcgcaccgctcggctccgcgcggctctaggaggtggcggcggtggcggtggcggcggtggcggcggcggcggcggcggggcgcagggctgagcgagcgtccgggttccggggctccggggaaggcggttgcagctcctgagtgcagcgcggcttcctgccactgtcccggcccggccacctctctgtcatggctctggcggacagcacacgtggattacccaacgggggcggcggcgggggcggcagtggctcctcgtcgtcctccgcggagccaccgctcttccccgacatcgtggagctgaacgtggggggccaggtgtacgtgacccggcgctgcacggtggtgtcggtgcccgactcgctgctctggcgcatgttcacgcagcagcagccgcaggagctggcccgggacagcaaaggccgcttctttctggaccgggacggcttcctcttccgctacatcctggattacctgcgggacttgcagctcgtgctgcccgactacttccccgagcgcagccggctgcagcgcgaggccgagtacttcgagctgccagagctcgtgcgccgcctcggggcgccccagcagcccggcccggggccgccgccctcgcggcgcggggtgcacaaggagggctcgctgggtgacgagctgctgccgcttggctactcggagcccgaacagcaggagggcgcctctgccggggcgccgtcgcccacgctggagctggctagccgcagtccgtccgggggcgcggcgggcccgctgctcacgccgtcccagtcgctggacggcagccggcgctcgggctacatcaccatcggctaccgcggctcctacaccatcgggcgggacgcgcaggcggacgccaagttccggcgagtggcgcgcatcaccgtttgcggaaagacgtcgctggccaaggaggtgtttggggacaccctgaacgaaagccgggaccccgaccgtcccccggagcgctacacctcgcgctattacctcaagttcaacttcctggagcaggccttcgacaagctgtccgagtcgggcttccacatggtggcgtgcagctccacgggcacctgcgcctttgccagcagcaccgaccagagcgaggacaagatctggaccagctacaccgagtacgtcttctgcagggagtgagctccccagaccccctcgccactccagcgcccagtccttctcctgcccgagagatgattacagagcctcttgtcccacctttgtcccctggctgctgccctcccattctccccctccagtagtagctgggtgagacctgtccgcccaccttccctccactacagaacctgcagccgcaaatcctctgggctgcttcgtcttctttggacctcctgaaccgagagaacccagaggaacccccaccccacccccacctaccactccatgctttctctactccctgcctcaaaccacccctcccccagatggtacttcagtttggatctattgggggagtgtggccacagaccgggggatgattgaattgttcagaacctgattggaccgtgtccaatgtgcggaagatttccttgaaatcttctcaagctcttatgactcactgggggtttaagagatcaggattggttccactgtctggggttagtgttttacaaggtcattacacagtctttttgacctcttttgaaggtagagttttagaaggctggatggaagattctgagcctggaattaggaccccatggaggcagttcagtaactaaactaataaagttttgaaaagttacacgtaaagtagaagaatctagtgcgtgggacagtaaaggatcctttctcgtacagaataaaaggtctcagcctgtagcttaaacttatagaaagtgatccgcctgcctgcagaggcgcccttttcagctgctgctcgccagaagcccttgattccactggttgacatggcagcagttactggcaagagggagaaaggacgctgccgcctaagagtgcaaggctgctcaggtctccaagcgccgtaggaggtcacctggcagtgactgtagggagctgggtcatagtgcacgtcgtgggtattaggaaagcctgtattctttcaatgaatgtcagtaggaccttcctttagctgtaagacttggtgggcggggtggggtggggagggaggaaagggtaggaagggtgggaagggagaagcagacatagtcatttatgatttgaaagttggaagtttgtaccatctgtttgagtatatgcacatttaaaaaatatcatatagtaaatgcaaacatgccaagtattttataaagattaataacagacctactcttacctggcagtttacttaacttactgttttgagtcctaaacttagagttgttaatgcttatatataatctaaccaaagagttacccagtagggttttagtttttgaacttttattttcttgttgattataaatcctgattttggaatctattgcgcaaaagaagtttcattttggttacttagacctaagatcacttattaaaaatccttattttctccaagcccagcaaacgttgacttctgggcaaacctgaaaacctgaaaatgccactttcatgcagtttgtttgaagttaagtggaatcctttcaaatgacgagctgcagagaactcagcaccaagggctgcctatctgtagatagctgtaaaatggaatatttttaaatgaaggcaaataagtacttaaaagtgagctgagcaataaaatggtccaataataggtaaatgcaacagaaacagaaggagacctggttgccttatgcctttactcttacatggaataaattcccaatgcatatcctatgtaaaccataagtgaagggaaataaacctcgtcatgctccatgctgtgaggtgtcctttggatattctgtgatgacagagaagcctattttgttttgttttcagcatctttctctgatgtacgtttttaaggattttgtaagagctgttttcagtgtttaaattagtgctatttttccttgtttttaaaaatgaatctcgtactgtatcttactatgtccatacagatgttacaaatcgacagttttattcttagactcatgtgatccaagctgtatataccatatataaacattttacatgaatcatttagttttttaattcatttactaatgctataaaatttcctatattaccccagtaatttgcatcagctggtttatatactaaagcaacatgttttgatgagtttcttacatccttatcgaggaattgggttaggaaaaaatacataattgtaaaactgagtttgctgtattatactttttttcttgagtattagttgtattactaatcatatgttgattaactgtctacttaaagtcaaggtacctgtatttttaatccactaatttttttttagttgggaaatagatttcaggtcttttattagactaacattttttgagaagtaaaattgacttcatatacaaagcctgtaattttaggcgaaatggaagcagaaatctaggaagttgtgcttgcttgtatgttgagtttggtctcagactaagtaatgcatcagaattcatctgtttgaagcctgaaataatttaggactctgattcactgaccaaaagtcagtgttgcagagatttctctaccccgtatggtattttgttagattgttcaacaggaagcacatgattgagaacatcttgggacagaccaaaaccactgacagatggcaaggctcggcgattctgatttcccttctcaaatctgctcaactccaagagtcttgagaaactgctaaaattttgcctctgtcactcaagtcttacaaatgttatcttgtaaacctttgaggtgaactattccactgtcttgtacataggcatcttattcactgcaccctgtcacacccagcaccccccgccccgcacattatttgaaagactgggaatttaatggttagggacagtaaatctacttctttttccagggacgactgtcccctctaaagttaaagtcaatacaagaaaactgtctatttttagcctaaagtaaaggctgtgaagaaaattcattttacattgggtagacagtaaaaaacaagtaaaataacttgacatgagcacctttagatcccttcccctccatgggctttgggccacagaatgaacctttgaggcctgtaaagtggattgtaatttcctataagctgtaatagtggaggtattgtgggttcatttgagtaagccctccaaagataccattcaaataacctgggagaatgtcataaattattcagataattaacactgcatgaatctgattcagaggcatgcatttacatatgttgccctaattaccatttgatgatcataaatacaagtgaatgacattggacttttagtaacaaacttaatttttaaaaaggtgtagacaatggtggttaaaaaaaaaaaaaaaacaggtaccaggttctgtgtgtttgcaccaagtaattgacatgttttttaatacatgtggaccatgaacagtattcattctactttttcaaatgatatgctgtagaaaatattccttgaagatgtgagatttaaaaatttttccctttcaatgttgttatgtattctactggtttttgattgatagcacagtgataaatcataatactagacaaaattgtcttctctttcaaaccagagccatatatatgtctgtatatatgggacctactgcttctctgaggaaatgcataatctgttaatatcagacaaaatgagcaattggcagtgctcataatatattccaatttttattggaattttcgatggaatgttatttcaataaagccatgtaaggtgaaactttgataactttttactcttcaagttagggtaaattctgatccaatattcaattcatttgtgtactcccacatgcaaaatgctaaattacaatgcagacattaagaaaaagtattgactggaggggttgaattccttgagaatttattttatagtctaaatcacaaatactttactcaatttagtttttaaaatagtaaactgaatatttttgttgtaagcctatcagagtcaatccttcgtttggaattgttttcctgtttttccttactataaatcatttaaaaactgaattcattttcttagatggcataagtctgtctcttgagaaataagtaaaatactcctattttcagtatctgtagcacctgaaataggtctttgtatagccagaaacaagttatgttgaagttagcttttctttgtcaacagttttggacaataaaaatctgaaagtattaacacttgattttctactggggcccttcaaacttggttggaagaaattcaaccagaatatctacattagagtataatcatgtgtggtaggaagatggactagttaatcaagatttgttgtcacttaaattttttgtgatttttttccaagccagtttttttaaattctaaatgtgttttgaggtatgggtacattaattgtaatgtaaactattatacaactgtttttgcgactttataggcaggtaaattttgctattactattgaatacaaatgacaattcatttatgaccactcaaacagcgttagtaaccatttagtgacaaaggattaaaacatccatctggatgttaattttgaagatgtaaattatatgttgtttaaatttttccaggcatctgaaaaccttatctgctagacaatgtaagattcacacagagttatctgggattctgattttttaaatagtacatatcattaaaccattttctctaaatgtaagaagagcagaaaaaatcttataagattatcagatttttctaatgacacagaaatgtaagaaaaaaatccctttatattgaaaaaagatgcagtcaaagtcttttcagacatgcccaaactttgagaatttcttcaaccatctaatgctataaagatttttgttcttcctgttcacaaccagttgtataacagaaatactagctactgttttccttcctgtgtgtgaagtaatgaatcattgattatgtgacttgttatgtattcaattaaacactaaagaataaaacattcactccttt

SEQ ID NO: 236532 - DNA, 978 bp, Artificial Sequence
  derived and/or modified sequence
atggcattagcggactcaacgagaggcctcccaaacgggggtgggggaggcggaggtagcggcagttcttctagctccgctgagcccccactctttcctgatatagtggagctgaatgtgggaggtcaggtctacgtcaccaggagatgcacagtcgtgagcgtgcctgacagcttactatggaggatgtttactcaacagcagccacaggaactcgcacgcgactctaagggacgcttttttttagaccgggatggcttccttttccggtacatcttggattaccttagagatctgcaattggtgctccccgactattttcctgagcggtcaaggttgcaacgggaggctgagtatttcgagttgcccgagctcgtgcggaggctgggagccccacagcagcctggacccggtccgcctcctagtcgaaggggtgttcacaaagaggggagtcttggagacgagctgttacccctagggtatagtgaacccgaacagcaggagggtgcatcagccggagcgccaagtccgactctcgagttggcctccaggagcccctcaggcggagccgcaggccctctcctaaccccatctcagtcactggatggaagcaggcgctcagggtatataacgatcggctacagggggagttataccattgggagggacgcccaggctgacgcaaagtttaggcgggtggcgcgtatcactgtgtgcgggaaaaccagtttagcaaaggaggtcttcggcgatacacttaacgaatctcgcgacccggacaggccacccgagcggtacacctcccggtactatcttaaattcaactttctagagcaggcatttgacaagcttagcgaaagtgggttccacatggttgcatgttccagcacaggaacctgcgctttcgcgtcatctacagaccagagcgaagataagatctggaccagttataccgaatacgtgttttgcagggagtag

SEQ ID NO: 236533 - DNA, 978 bp, Artificial Sequence
  derived and/or modified sequence
atggctctggccgactccacccgcggactgcccaatgggggaggtggtggcggtggctctgggagtagcagtagctcagcagagcctccactctttccagacatagtggaactaaatgtaggcggtcaagtgtatgtaacccgtcgctgcacggtggtttccgtccctgactctctgctgtggagaatgttcacacagcagcagccccaagaactcgccagagactcaaaaggcagattctttttggatcgggacggtttcctctttaggtatatactcgattatctgagggatctccagttggtgctgcctgactattttccggaaagatctcgtcttcagagagaggctgagtatttcgagctgcccgaactcgtccggcgactcggtgccccacaacagccaggacctggcccacccccttcacggagaggagtgcacaaagaggggtcactgggcgacgagctgctccctctcgggtatagtgaaccagaacagcaggaaggtgctagcgccggagccccttcacccaccctcgagttagcatctaggtctcccagtggcggagccgcaggaccattgctgactccatctcagtcacttgacggctcacgccgatcaggatacataacaattggttatcgaggaagttataccattggcagagatgcccaggctgatgctaagttccgcagagtcgctaggatcaccgtgtgcggcaaaaccagcttggcaaaagaggtgttcggggacacattgaatgagtctcgggatcccgatcggccacctgagcgttatacaagccgctactatctcaaatttaattttctggagcaagcctttgacaaattatccgaatccgggtttcatatggtcgcttgctcatcgactggtacatgtgccttcgcctcttccacagatcagtctgaagataagatttggacctcctatacggagtacgtcttctgtcgtgagtag

SEQ ID NO: 236534 - DNA, 477 bp, Artificial Sequence
  derived and/or modified sequence
atgcccgagccccccacccccagcgtgggcagctgcgccgccagagccagcagaatgagcgccgccccctgcagcagagcccccagccccatcgaccaccccagagccgaggagtgcggcagagccgccagagactggcaggccgccccccccgccgcccccgtgagagaccccctgggcgaggccagctgggcccccgagagcggcgaggacatggagaacctgtacgtgcagctgaagctgcagagcgtgggcacctgcttcaacagagaggagctgcccagcgtgctgcagggcgaggagctgggcgccaccagcgtgaccaacaagcccggcctgagcgccatgagaaaggagaccgaccagcaggtgggcgagagaaagctgacctactgcggcgaccaggtgaccctgttcaccgaccaggccctgagccagatcctgagcagcgaggagggcagaatcaaggtgatgtag

SEQ ID NO: 236535 - protein, 500 aa, Artificial Sequence
  derived and/or modified sequence
MAPPSAPLPAQGPGKARPSRKRGRRPRALKFVDVAVYFSPEEWGCLRPAQRALYRDVMRETYGHLGALGCAGPKPALISWLERNTDDWEPAALDPQEYPRGLTVQRKSRTRKKNGEKEVFPPKEAPRKGKRGRRPSKPRLIPRQTSGGPICPDCGCTFPDHQALESHKCAQNLKKPYPCPDCGRRFSYPSLLVSHRRAHSGECPYVCDQCGKRFSQRKNLSQHQVIHTGEKPYHCPDCGRCFRRSRSLANHRTTHTGEKPHQCPSCGRRFAYPSLLAIHQRTHTGEKPYTCLECNRRFRQRTALVIHQRIHTGEKPYPCPDCERRFSSSSRLVSHRRVHSGERPYACEHCEARFSQRSTLLQHQLLHTGEKPYPCPDCGRAFRRSGSLAIHRSTHTEEKLHACDDCGRRFAYPSLLASHRRVHSGERPYACDLCSKRFAQWSHLAQHQLLHTGEKPFPCLECGRCFRQRWSLAVHKCSPKAPNCSPRSAIGGSSQRGNAH

SEQ ID NO: 236536 - protein, 498 aa, Artificial Sequence
  derived and/or modified sequence
MAPPSAPLPAQGPGKARPSRKRGRRPRALKFVDVAVYFSPEEWGCLRPAQRALYRDVMRETYGHLGALGCAGPKPALISWLERNTDDWEPAALDPQEYPRGLTVQRKSRTRKKNGEKEVFPPKEAPRKGKRGRRPSKPRLIPRQTSGGPICPDCGCTFPDHQALESHKCAQNLKKPYPCPDCGRRFSYPSLLVSHRRAHSGECPYVCDQCGKRFSQRKNLSQHQVIHTGEKPYHCPDCGRCFRRSRSLANHRTTHTGEKPHQCPSCGRRFAYPSLLAIHQRTHTGEKPYTCLECNRRFRQRTALVIHQRIHTGEKPYPCPDCERRFSSSSRLVSHRRVHSGERPYACEHCEARFSQRSTLLQHQLLHTGEKPYPCPDCGRAFRRSGSLAIHRSTHTEEKLHACDDCGRRFAYPSLLASHRRVHSGERPYACDLCSKRFAQWSHLAQHQLLHTGEKPFPCLEPVLPPEVVSAVHKCSPKAPNCSPRSAIGGSSQRGNAH

SEQ ID NO: 236537 - DNA, 2724 bp, Artificial Sequence
  derived and/or modified sequence
ggaagccggcatggcgctccggtcaataaaatcgatagctggaagctgcctgtgttccaggcaaaggcggtgcggtagcagcgccgccattttccccgaaggcatcttccggtgcctttcacccaagttcgggcaggagtttcctgaataacagcaaaaggtttccgttagccccgcgggcgaccaattccgattccctccgggcctccccggccacgctcagccctggtccggcaggggctcctcgatcccaggggccgccagcgcccgagggccgaggcctggacacggaaggccgtggcgccggcttctcgggtcccatggcgccaccttcggctccgctccctgcgcagggaccaggaaaggccagacccagtcggaaaaggggcaggaggccgagggctctgaagttcgtggacgtggccgtgtacttctccccggaggagtggggctgcctgcggcccgcgcagagggccctgtaccgggacgtgatgcgggagacctacggtcacctgggcgcgctcgggtgcgcaggtcccaaaccagccctcatctcctggttggaacgaaacaccgatgactgggaaccggctgctctagatccgcaggagtacccgagagggctaacagtccagagaaaaagcagaaccagaaagaagaatggggagaaggaagtattcccgcctaaggaggcaccccgaaaggggaagcgaggccggaggcccagcaaaccccgactgattcctaggcagacgtccgggggccccatctgccctgactgcggctgtaccttccctgatcatcaggccctggagagccacaagtgcgcccagaatctaaaaaagccttacccttgcccagactgtgggcgccgcttttcctatccatccctgctggtcagtcaccggcgggcacactccggcgagtgcccctatgtttgtgaccagtgtggcaaacgtttctcccagcgcaagaacctctcccagcaccaggtcatccatacaggggagaagccctatcactgccctgactgtggtcgctgcttccggaggagccggtccttggccaatcaccggaccacacacacaggtgaaaaaccccaccagtgccctagctgtggacgtcgcttcgcctacccctccctgctagccatccaccagcgtacacacacgggagagaagccctacacttgcctcgagtgcaaccgccgcttccgccagcgcacggccctcgtcatccaccagcgcatccacacgggcgagaagccctacccgtgcccggactgcgagcggcgcttctcctcctcctctcgcctggtcagtcaccggcgtgtgcactctggggagcgtccctatgcctgcgagcactgtgaggcccgcttctcccagcgcagcacgctgctccagcaccagctcttgcacaccggagagaagccctacccctgcccagactgtgggcgtgccttccggcggagcggctccctggccatccatcgcagcacgcacacagaggagaagctgcacgcctgcgacgactgtggtcgccgctttgcctacccctcactgctggccagccaccggcgcgtgcactcgggcgagcggccctatgcctgcgacctttgctccaagcgttttgctcagtggagccacctggcccagcaccagctgctgcacacgggggagaagcctttcccctgcctcgagtgtggccggtgcttccgccagaggtggtctctggctgtccacaagtgtagccccaaggccccaaactgtagccctagatctgctatcgggggctccagtcagaggggcaacgcccattagaaggggaaggactgcctacgttcatttcattttatggagggtcccagaaaagggaaggaggagccccaggtcatacagggcagagtcagaactaaacccgggtctcctgctgcacagagctgaactttgtatcttgcaatgcgctggctgcctccctgtgcgtgtctggaacagtcccattaggagaggtgacgtcatttgcttaaagttttccaagctaccctatcctaaaatagtttgtgtggatatcagggctaaaagttctccccatctattttaggggctgtctgcttttctagtctgtccacacagggattacctgtcatcttgcatgcaatcaggagaatctcataggggcaggaccttcccctactctgcctcttcctccatactaggttggaaaaatctggtttagcccactttttgcaacactcctgccaagtggtcttctacccattgcttgaaaatctctcttgacagggagctcactacctcacaaggcaggtcatttcattgtgggatctatagaaggttaagtaccacattctcctctaaaccttgcctacgacatgtttaatacttcatctacatagcagcccttcagataatcacaaccactttgcccccaagttttcaggttaagtagcatgaatttggtcattccttaaagacagggtttcaatttccacacatgatctctgcaaacaggcactgggttttcagtgtcctttttgaagggtcatataaaaataaggtaacaccacagtgccactacaccttctggggctggacttgtttcagcagctttggttgcactgaatttgggggagctgcatggtaccaggggtttattgggttgcagatatataaatgccctaaacttaaaaaaaaaaaaaaaaaa

SEQ ID NO: 236538 - DNA, 1503 bp, Artificial Sequence
  derived and/or modified sequence
atggccccccccagcgcccccctgcccgcccagggccccggcaaggccagacccagcagaaagagaggcagaagacccagagccctgaagttcgtggacgtggccgtgtacttcagccccgaggagtggggctgcctgagacccgcccagagagccctgtacagagacgtgatgagagagacctacggccacctgggcgccctgggctgcgccggccccaagcccgccctgatcagctggctggagagaaacaccgacgactgggagcccgccgccctggacccccaggagtaccccagaggcctgaccgtgcagagaaagagcagaaccagaaagaagaacggcgagaaggaggtgttcccccccaaggaggcccccagaaagggcaagagaggcagaagacccagcaagcccagactgatccccagacagaccagcggcggccccatctgccccgactgcggctgcaccttccccgaccaccaggccctggagagccacaagtgcgcccagaacctgaagaagccctacccctgccccgactgcggcagaagattcagctaccccagcctgctggtgagccacagaagagcccacagcggcgagtgcccctacgtgtgcgaccagtgcggcaagagattcagccagagaaagaacctgagccagcaccaggtgatccacaccggcgagaagccctaccactgccccgactgcggcagatgcttcagaagaagcagaagcctggccaaccacagaaccacccacaccggcgagaagccccaccagtgccccagctgcggcagaagattcgcctaccccagcctgctggccatccaccagagaacccacaccggcgagaagccctacacctgcctggagtgcaacagaagattcagacagagaaccgccctggtgatccaccagagaatccacaccggcgagaagccctacccctgccccgactgcgagagaagattcagcagcagcagcagactggtgagccacagaagagtgcacagcggcgagagaccctacgcctgcgagcactgcgaggccagattcagccagagaagcaccctgctgcagcaccagctgctgcacaccggcgagaagccctacccctgccccgactgcggcagagccttcagaagaagcggcagcctggccatccacagaagcacccacaccgaggagaagctgcacgcctgcgacgactgcggcagaagattcgcctaccccagcctgctggccagccacagaagagtgcacagcggcgagagaccctacgcctgcgacctgtgcagcaagagattcgcccagtggagccacctggcccagcaccagctgctgcacaccggcgagaagcccttcccctgcctggagtgcggcagatgcttcagacagagatggagcctggccgtgcacaagtgcagccccaaggcccccaactgcagccccagaagcgccatcggcggcagcagccagagaggcaacgcccactag

SEQ ID NO: 236539 - DNA, 1497 bp, Artificial Sequence
  derived and/or modified sequence
atggccccccccagcgcccccctgcccgcccagggccccggcaaggccagacccagcagaaagagaggcagaagacccagagccctgaagttcgtggacgtggccgtgtacttcagccccgaggagtggggctgcctgagacccgcccagagagccctgtacagagacgtgatgagagagacctacggccacctgggcgccctgggctgcgccggccccaagcccgccctgatcagctggctggagagaaacaccgacgactgggagcccgccgccctggacccccaggagtaccccagaggcctgaccgtgcagagaaagagcagaaccagaaagaagaacggcgagaaggaggtgttcccccccaaggaggcccccagaaagggcaagagaggcagaagacccagcaagcccagactgatccccagacagaccagcggcggccccatctgccccgactgcggctgcaccttccccgaccaccaggccctggagagccacaagtgcgcccagaacctgaagaagccctacccctgccccgactgcggcagaagattcagctaccccagcctgctggtgagccacagaagagcccacagcggcgagtgcccctacgtgtgcgaccagtgcggcaagagattcagccagagaaagaacctgagccagcaccaggtgatccacaccggcgagaagccctaccactgccccgactgcggcagatgcttcagaagaagcagaagcctggccaaccacagaaccacccacaccggcgagaagccccaccagtgccccagctgcggcagaagattcgcctaccccagcctgctggccatccaccagagaacccacaccggcgagaagccctacacctgcctggagtgcaacagaagattcagacagagaaccgccctggtgatccaccagagaatccacaccggcgagaagccctacccctgccccgactgcgagagaagattcagcagcagcagcagactggtgagccacagaagagtgcacagcggcgagagaccctacgcctgcgagcactgcgaggccagattcagccagagaagcaccctgctgcagcaccagctgctgcacaccggcgagaagccctacccctgccccgactgcggcagagccttcagaagaagcggcagcctggccatccacagaagcacccacaccgaggagaagctgcacgcctgcgacgactgcggcagaagattcgcctaccccagcctgctggccagccacagaagagtgcacagcggcgagagaccctacgcctgcgacctgtgcagcaagagattcgcccagtggagccacctggcccagcaccagctgctgcacaccggcgagaagcccttcccctgcctggagcccgtgctgccccccgaggtggtgagcgccgtgcacaagtgcagccccaaggcccccaactgcagccccagaagcgccatcggcggcagcagccagagaggcaacgcccactag

SEQ ID NO: 236540 - DNA, 1503 bp, Artificial Sequence
  derived and/or modified sequence
atggctcctccctctgcccctcttcctgcccaaggcccagggaaggctcggccttcacgcaaacgcggtagaaggcctagggcactcaaatttgtagacgtggctgtatatttctcccctgaggagtggggatgtttgcgcccagctcagagagccctgtacagggatgtgatgagagagacctatgggcacctcggggctctggggtgcgccgggcctaaacctgccctgatctcttggttagagcgcaatacggatgactgggagccagccgctctcgacccacaggagtaccccaggggtttgacagttcagagaaaatcccgaacccgcaagaagaacggagaaaaagaagtgttcccaccaaaggaagcccctaggaaaggcaaacggggcaggcgtcctagtaaacctcggctcatcccacggcagacatctggtggtccaatttgtcccgattgcggctgtacctttcccgaccaccaggccctagaatcccacaagtgcgctcagaatctgaagaaaccctacccttgcccagattgcggacgccgattttcctacccatccctcctggtttcgcaccgccgcgcccattccggcgagtgcccctatgtctgcgatcaatgcggcaagaggtttagccaacgcaaaaacttaagccagcaccaggtgattcatactggggagaaaccctaccactgcccagactgcggccgctgcttccgccgttcacgttcactcgctaaccacagaactacgcacaccggagagaaacctcaccagtgcccctcctgcgggcggcgatttgcatacccctctctgctagccatacaccaacggactcacacaggtgagaaaccctacacttgcctcgaatgtaatagacgctttcgccagaggacagcactcgttatccaccagcggatccacaccggagaaaaaccatacccatgccctgactgcgaacgtcgcttttcgtcctcctcccgattggtgtctcataggagagtgcattccggcgagaggccgtacgcatgtgagcattgtgaggctagattttcacagcgatctaccctgcttcaacatcagctcttacacacaggggagaagccatacccatgccctgattgcggtagggctttccgaagatcaggttctctggcaatacacaggtctactcacactgaagagaagcttcacgcctgtgatgactgcggacgacggttcgcctatcccagcctgctcgccagccacagacgggtgcacagcggcgaacgtccttatgcctgcgatctgtgttctaagcgttttgctcagtggtctcacctcgcacaacaccagctgctccacacgggggaaaaaccctttccctgcctggagtgcggccgctgcttccggcaaaggtggtcgttggcagtgcataagtgttcgcccaaagctcccaattgtagtccaaggtcagcgattgggggatcgtctcaaagagggaacgcccactag

SEQ ID NO: 236541 - DNA, 1497 bp, Artificial Sequence
  derived and/or modified sequence
atggcccctccatctgccccgctgcctgcacagggccccggtaaggctcggccaagtaggaagaggggaaggcgaccgcgcgcgctgaagtttgtggatgtcgccgtctatttttcgccggaggaatggggctgtctccgtcccgcacagcgtgctttgtatcgggacgttatgcgggaaacatacggccatctgggtgccctaggctgtgctggacccaaacccgcgctaataagctggctcgagaggaatacagacgattgggaacctgcggctctagatcctcaggaataccccagagggctgacggttcaaagaaagagccggacacgcaaaaagaatggagagaaggaagtgtttccaccaaaagaggctcccaggaagggcaaaaggggacggcgtccatccaagcctagactcatccctagacagaccagcggagggcccatatgtcctgattgtgggtgcaccttcccagaccaccaggccctcgaatctcataagtgcgctcagaacttaaagaaaccatatccctgcccagattgcggaagaagattctcctatcctagcttactcgttagtcacaggcgggcacactcgggcgaatgcccatatgtgtgcgaccaatgcggcaagaggttctcacagaggaaaaacctcagtcagcatcaagtcatccacaccggcgagaaaccctatcattgtcccgactgcgggagatgttttagacggagtcgctcactggccaatcatagaactacacatacaggagagaagccgcatcagtgcccttcatgcggtcgcaggtttgcctacccatccctcctggctatacaccagaggactcacactggcgaaaagccttatacttgtctcgaatgcaacagacggtttaggcagcgaactgctttggtaattcatcaaagaatccacactggagagaagccttatccctgccctgactgtgagaggcggtttagctccagttctcgactggtgtcacatcgacgggttcacagcggcgagagaccatacgcatgtgagcactgcgaggcgcggttcagtcagcgaagtactttgttgcaacatcagttactacacacaggggagaagccctacccttgtcccgattgcggccgtgcctttcgcaggtcaggcagccttgccatacaccgctccactcatacagaagagaagttacatgcctgtgatgattgcgggcgcaggttcgcttacccttcgctgttggcctcccataggcgggtgcattcaggtgaacggccttatgcctgtgatctgtgttctaagagattcgcccaatggtcacacctcgctcagcaccaactactgcacacgggggagaagccttttccttgtttggagcctgtgttgccccctgaggtggtctctgcggtgcacaaatgtagtccaaaggccccaaattgcagtccccggagcgcaattggcggaagctctcagcggggaaacgcgcattag

SEQ ID NO: 236542 - DNA, 1503 bp, Artificial Sequence
  derived and/or modified sequence
atggcccctccttctgcccccctgcctgcccagggccctgggaaggcccggcccagcaggaagaggggccggcggccccgggccctgaagtttgtggatgtggccgtgtacttcagccctgaggagtggggctgcctgcggcctgcccagagggccctgtacagagatgtgatgagggagacctacggccacctgggcgccctgggctgtgccggccccaagccagccctgatctcctggctggagaggaacacagatgactgggagcctgctgccctggacccccaggagtacccccggggcctgactgtgcagaggaagagcaggaccaggaagaagaatggagagaaggaggtgtttcctcccaaggaggcccccaggaagggcaagagaggaagaagacccagcaagcccaggctcatcccccggcagaccagcggcggccccatctgcccagactgtggctgcaccttcccagaccaccaggccctggagagccacaagtgtgcccagaacctgaagaagccctacccctgcccagactgtggccgccgcttctcctaccccagcctgctggtgagccaccggcgggcccacagcggggagtgcccctacgtgtgtgaccagtgtgggaagcgcttcagccagaggaagaacctgagccagcaccaggtgatccacactggagagaagccctaccactgcccagactgtggccgctgcttcagaagaagccgcagcctggccaaccacaggaccacccacactggagagaagccccaccagtgccccagctgtggccgccgctttgcctaccccagcctgctggccatccaccagaggacccacactggagagaagccctacacctgcctggagtgcaacagacgcttccggcagaggacagccctggtgatccaccagaggatccacactggagagaagccctacccctgcccagactgtgagcggcgcttcagcagcagcagccggctggtgagccaccggcgggtgcacagcggggagcggccctatgcctgtgagcactgtgaggcccgcttcagccagaggagcaccctgctgcagcaccagctgctgcacactggagagaagccctacccctgcccagactgtggccgggccttcagaagaagtggcagcctggccatccacaggagcacccacacagaggagaagctgcacgcctgtgatgactgtggccgccgctttgcctaccccagcctgctggccagccaccggcgggtgcacagcggggagcggccctatgcctgtgacctgtgcagcaagagatttgcccagtggagccacctggcccagcaccagctgctgcacactggagagaagcccttcccctgcctggagtgtggccgctgcttccggcagcgctggagcctggccgtgcacaagtgcagccccaaggcccccaactgcagccccaggtctgccatcggcggcagcagccagagaggaaatgcccactag

SEQ ID NO: 236543 - DNA, 1497 bp, Artificial Sequence
  derived and/or modified sequence
atggcccctccttctgcccccctgcctgcccagggccctgggaaggcccggcccagcaggaagaggggccggcggccccgggccctgaagtttgtggatgtggccgtgtacttcagccctgaggagtggggctgcctgcggcctgcccagagggccctgtacagagatgtgatgagggagacctacggccacctgggcgccctgggctgtgccggccccaagccagccctgatctcctggctggagaggaacacagatgactgggagcctgctgccctggacccccaggagtacccccggggcctgactgtgcagaggaagagcaggaccaggaagaagaatggagagaaggaggtgtttcctcccaaggaggcccccaggaagggcaagagaggaagaagacccagcaagcccaggctcatcccccggcagaccagcggcggccccatctgcccagactgtggctgcaccttcccagaccaccaggccctggagagccacaagtgtgcccagaacctgaagaagccctacccctgcccagactgtggccgccgcttctcctaccccagcctgctggtgagccaccggcgggcccacagcggggagtgcccctacgtgtgtgaccagtgtgggaagcgcttcagccagaggaagaacctgagccagcaccaggtgatccacactggagagaagccctaccactgcccagactgtggccgctgcttcagaagaagccgcagcctggccaaccacaggaccacccacactggagagaagccccaccagtgccccagctgtggccgccgctttgcctaccccagcctgctggccatccaccagaggacccacactggagagaagccctacacctgcctggagtgcaacagacgcttccggcagaggacagccctggtgatccaccagaggatccacactggagagaagccctacccctgcccagactgtgagcggcgcttcagcagcagcagccggctggtgagccaccggcgggtgcacagcggggagcggccctatgcctgtgagcactgtgaggcccgcttcagccagaggagcaccctgctgcagcaccagctgctgcacactggagagaagccctacccctgcccagactgtggccgggccttcagaagaagtggcagcctggccatccacaggagcacccacacagaggagaagctgcacgcctgtgatgactgtggccgccgctttgcctaccccagcctgctggccagccaccggcgggtgcacagcggggagcggccctatgcctgtgacctgtgcagcaagagatttgcccagtggagccacctggcccagcaccagctgctgcacactggagagaagcccttcccctgcctggagcctgtgctgcccccagaggtggtgtctgctgtgcacaagtgcagccccaaggcccccaactgcagccccaggtctgccatcggcggcagcagccagagaggaaatgcccactag

SEQ ID NO: 236544 - DNA, 1503 bp, Artificial Sequence
  derived and/or modified sequence
atggccccccccagcgcccccctgcccgcccagggccccggcaaggcacgcccatctaggaagcgaggtcgaagacctcgtgccttaaagtttgtggatgtggccgtgtattttagcccagaggagtggggatgccttagaccggcccagcgagcactgtatagggacgtgatgcgtgagacgtacgggcacttgggtgctctcggctgtgccgggcccaagccagcactgataagttggctggaacgcaataccgacgattgggagccggctgctcttgatccacaagaatatccccgcggcctgactgtgcagagaaagtctcggacaaggaaaaaaaacggggagaaggaggtgttcccaccaaaagaagcaccaagaaaaggaaaaagagggaggcgcccctccaaacccaggctcatcccgcgccagacttccgggggcccaatctgccctgactgcgggtgcacctttcccgatcaccaggcactagaatcacacaagtgtgcccaaaacctgaagaaaccgtacccttgcccagactgcggacggcgctttagctatcccagtcttttggtttctcatcgccgagcccattctggtgaatgtccgtatgtctgcgaccagtgtgggaaaagattctcccagcgaaagaacttaagccagcatcaggtaattcacacaggagagaagccttatcattgtcctgactgcgggaggtgcttccgccggtctcggtctctcgctaaccatcgaactacccataccggagaaaagccacaccagtgcccatcttgtggacgacgtttcgcttaccccagcttactcgccatacatcagaggacacacactggcgaaaaaccatacacgtgcctggagtgtaacaggaggtttcggcaaagaacagcccttgtcattcaccaacggatacatacaggtgagaaaccctacccctgtcccgattgtgagcggaggttctccagcagtagcaggctggtatcacacaggcgggtgcactccggagaacgcccttatgcctgtgagcactgcgaagcacgtttttcacaacgttctacactgcttcagcatcagctgctacataccggggagaagccatacccctgtcctgattgcggtagggcattcagacggtcaggcagccttgccatccataggagcacacatacagaggagaaacttcatgcgtgtgatgattgtggcagacgtttcgcataccccagtttgctggctagtcaccggagggtccattccggggagcgcccctatgcttgcgacctgtgtagtaaaaggtttgctcagtggtcacacctcgcacagcatcaactgctacacacaggggagaaaccattcccctgcctagagtgcggtagatgttttcggcagcgttggtctctggctgtgcataagtgttccccaaaagcccccaattgttcacccaggtcggctatcggtggctcttcccagagaggcaatgcccattag

SEQ ID NO: 236545 - DNA, 1497 bp, Artificial Sequence
  derived and/or modified sequence
atggccccccccagcgcccccctgcccgcccagggccccggcaaggctaggccgagccgaaagcgcgggagaaggcctagagccctgaagttcgtagatgtggctgtttattttagccccgaagagtggggctgcctaaggcccgcccagagagcactgtatagagacgtcatgcgcgagacatatggacacctcggagcccttgggtgtgcaggccccaagcccgctctgatttcctggctcgaaagaaacaccgatgactgggagcctgccgcgttggaccctcaagaatatccccgtggtctgaccgtgcagcgaaagagtagaactaggaagaagaatggggaaaaggaggtcttcccccccaaagaggcgcccagaaaagggaaaagaggaaggcgcccctctaaaccacgattgatcccaagacagaccagcggtggtccgatatgtccagattgcgggtgcacttttcctgaccaccaggcactggaatcccacaagtgtgcgcaaaacttaaaaaaaccatatccctgtccagattgtggccggcgcttttcctacccctccctactggtgagccatagacgggcacactctggcgagtgcccttacgtatgtgaccaatgcggcaaacgcttctcccagaggaaaaatctaagccagcaccaggtgatacacactggagaaaagccttaccattgcccggactgtggcaggtgtttccggcgcagcaggagcctggccaaccatcggaccactcataccggtgaaaaaccccatcagtgtccatcttgtggtcgtcgattcgcttatcctagcctcctcgctattcaccagcgaacccacaccggcgagaagccctacacgtgcctggaatgcaatcgtcgtttcagacagcggactgccctagtgatccaccagcggattcataccggcgagaaaccgtatccttgccccgactgcgagcgccggttttcctccagttccaggctggtatcccaccgccgtgtgcacagcggagaaaggccctacgcttgtgaacattgcgaagctaggttttcacagcggagcacacttctgcagcatcagctactgcataccggtgaaaagccctatccttgccccgactgtggccgcgcgtttaggcgctccggaagcctggccatccatagatccacccatactgaagagaagctgcacgcctgcgatgactgtggcagacggtttgcctatccttcactgctggctagtcatcggagggtccacagtggggagcgcccctatgcttgtgatttatgctcaaagaggttcgctcagtggagccacctcgcccagcatcagcttctgcacaccggggaaaagccttttccgtgcctagagcccgtgctgcccccagaggtggtctctgcagtgcacaaatgctctcccaaggctcccaactgctccccccgctctgcaatcggcgggtctagccaacgaggaaatgctcactag

SEQ ID NO: 236546 - DNA, 1503 bp, Artificial Sequence
  derived and/or modified sequence
atggcacccccatcggccccactgcctgcccagggcccaggcaaagcaagaccctctcgcaaaagaggcaggcgccctagagctctgaagtttgtcgacgtggcagtttatttttctccagaggagtggggatgtctgaggcctgctcagcgggctttgtatcgcgacgtgatgcgtgaaacctacggacaccttggagcactgggatgcgctggacctaagcccgcactgatttcctggcttgaaagaaacaccgatgactgggagccggctgcacttgatcctcaggagtatcccagaggtttaactgttcaacggaagtcccgcaccagaaagaagaatggggagaaggaggtttttcccccaaaggaggctccgaggaaaggcaaaagagggagaagacctagtaaacctcgactcataccacgccagactagtggcggacccatttgtccagattgtggctgcacattcccagaccatcaggccttagagtcccacaaatgcgcccaaaatctgaaaaagccctatccttgtccagattgcggtcggcgttttagttacccgtccctgctggttagtcatcgcagagcccactcaggcgaatgtccatatgtatgtgatcagtgtggcaagaggttcagccagaggaaaaatcttagccagcaccaggtcattcacacaggagagaagccgtatcactgcccagattgtgggagatgcttcagaagatctagatctttagctaaccacagaacaacacatacgggagagaaacctcaccagtgcccctcatgcggcaggaggttcgcgtatccttcacttttggctattcaccagcggacccacacgggtgagaagccctatacttgcctggaatgcaatagaagattcagacagcggactgcgttggtgatacaccaaaggatccacaccggtgaaaagccatatccctgtcccgattgcgagaggcggttctcaagctcaagcagactcgtctctcaccgccgtgttcactcaggcgagcggccttacgcgtgtgaacattgtgaagcacggttcagtcagagatcaacactcctgcagcatcaacttctgcacactggcgagaaaccttacccttgtcctgattgcggaagggccttccgtcggtcgggtagtctggccatacatcgtagcactcacactgaggagaaacttcatgcgtgtgacgactgcggtcgtcgcttcgcctacccctctctgctagccagccacaggcgcgtgcattccggagaacggccttatgcttgcgacctgtgctcgaagagattcgcgcagtggagtcacttagcacagcaccagcttttgcataccggagagaagccgttcccgtgtctggaatgcggcaggtgtttccggcagaggtggagtctagctgtgcacaaatgttcgcccaaggcccctaattgttctccacggtcagcaatcggaggctcctctcaacgtggaaatgcacactag

SEQ ID NO: 236547 - DNA, 1497 bp, Artificial Sequence
  derived and/or modified sequence
atggcacctccaagcgccccacttcctgctcaggggccaggaaaggcaaggcctagtagaaaaagaggtcgcagacctagggctttgaaatttgtggacgtggcagtgtacttttctccagaggagtggggatgtctcaggccagctcaaagagcgttgtatagggacgtcatgagagagacctacgggcaccttggcgcattggggtgtgccggtcccaaacccgcactgatcagctggctggaaagaaatacagatgattgggaaccggcagccctggacccccaggagtaccccagaggccttaccgtacagcggaaatctcggacacggaaaaagaatggtgagaaggaagtttttcctcccaaagaagccccacgaaaggggaagagaggaagacggccttctaagcccaggctgatccccaggcagacgagtggcggtccaatttgcccggattgtggctgcaccttcccggatcaccaggccctcgagagtcataagtgcgcccaaaacctcaaaaagccctacccgtgccctgattgtggcagaaggttctcatacccgagcctgctggtgagccatagacgggcacatagcggcgagtgcccgtacgtttgcgaccagtgcggtaaacgcttctcccaacggaagaatctgtcacagcaccaggtgattcatacaggcgaaaagccctatcattgcccagactgtggacgatgttttcgccgatcccgaagtcttgccaatcatcgtaccactcatactggcgagaagccacatcaatgcccctcctgcggccgaaggtttgcctacccctccctacttgccatacaccagcgcacacacactggcgaaaagccatacacctgtctagagtgtaaccgtcggtttaggcagcgcaccgccctcgtgattcaccagcgaatccatacaggcgagaagccttacccatgccctgattgtgagcgcaggttttcaagctcaagccgcttagtgtcccaccgcagggttcattccggggaaaggccctatgcctgcgaacattgcgaggcaagatttagtcagcgtagcaccctcctccaacaccagctgctgcatactggggaaaagccatacccctgcccagattgcgggcgagctttccgcagatcagggagtctggccattcatcggtctacacacacagaggaaaagctgcacgcatgtgacgattgtggacgccgtttcgcctatccaagtcttctagctagccatcggagagtgcattccggcgagcggccttacgcatgcgacctgtgtagcaaaaggttcgcacagtggtctcaccttgctcagcatcagctactgcacacgggcgagaagccgtttccttgtcttgagcccgttctccctcctgaagtggtcagtgccgtccataagtgctccccaaaagcaccaaactgtagtccgcgatctgccattgggggttccagccaacgcggaaatgcacactag

SEQ ID NO: 236548 - DNA, 3547 bp, Artificial Sequence
  derived and/or modified sequence
ttgagggcaaagaggttaggaagccggcatggcgctccggtcaataaaatcgatagctggaagctgcctgtgttccaggcaaaggcggtgcggtagcagcgccgccattttccccgaaggcatcttccggtgcctttcacccaagttcgggcaggagtttcctgaataacagcaaaaggtttccgttagccccgcgggcgaccaattccgattccctccgggcctccccggccacgctcagccctggtccggcaggggctcctcgatcccaggggccgccagcgcccgagggccgaggcctggacacggaaggccgtggcgccggcttctcgggtcccatggcgccaccttcggctccgctccctgcgcagggaccaggaaaggccagacccagtcggaaaaggggcaggaggccgagggctctgaagttcgtggacgtggccgtgtacttctccccggaggagtggggctgcctgcggcccgcgcagagggccctgtaccgggacgtgatgcgggagacctacggtcacctgggcgcgctcgggtgcgcaggtcccaaaccagccctcatctcctggttggaacgaaacaccgatgactgggaaccggctgctctagatccgcaggagtacccgagagggctaacagtccagagaaaaagcagaaccagaaagaagaatggggagaaggaagtattcccgcctaaggaggcaccccgaaaggggaagcgaggccggaggcccagcaaaccccgactgattcctaggcagacgtccgggggccccatctgccctgactgcggctgtaccttccctgatcatcaggccctggagagccacaagtgcgcccagaatctaaaaaagccttacccttgcccagactgtgggcgccgcttttcctatccatccctgctggtcagtcaccggcgggcacactccggcgagtgcccctatgtttgtgaccagtgtggcaaacgtttctcccagcgcaagaacctctcccagcaccaggtcatccatacaggggagaagccctatcactgccctgactgtggtcgctgcttccggaggagccggtccttggccaatcaccggaccacacacacaggtgaaaaaccccaccagtgccctagctgtggacgtcgcttcgcctacccctccctgctagccatccaccagcgtacacacacgggagagaagccctacacttgcctcgagtgcaaccgccgcttccgccagcgcacggccctcgtcatccaccagcgcatccacacgggcgagaagccctacccgtgcccggactgcgagcggcgcttctcctcctcctctcgcctggtcagtcaccggcgtgtgcactctggggagcgtccctatgcctgcgagcactgtgaggcccgcttctcccagcgcagcacgctgctccagcaccagctcttgcacaccggagagaagccctacccctgcccagactgtgggcgtgccttccggcggagcggctccctggccatccatcgcagcacgcacacagaggagaagctgcacgcctgcgacgactgtggtcgccgctttgcctacccctcactgctggccagccaccggcgcgtgcactcgggcgagcggccctatgcctgcgacctttgctccaagcgttttgctcagtggagccacctggcccagcaccagctgctgcacacgggggagaagcctttcccctgcctcgagtgtggccggtgcttccgccagaggtggtctctggctgtccacaagtgtagccccaaggccccaaactgtagccctagatctgctatcgggggctccagtcagaggggcaacgcccattagaaggggaaggactgcctacgttcatttcattttatggagggtcccagaaaagggaaggaggagccccaggtcatacagggcagagtcagaactaaacccgggtctcctgctgcacagagctgaactttgtatcttgcaatgcgctggctgcctccctgtgcgtgtctggaacagtcccattaggagaggtgacgtcatttgcttaaagttttccaagctaccctatcctaaaatagtttgtgtggatatcagggctaaaagttctccccatctattttaggggctgtctgcttttctagtctgtccacacagggattacctgtcatcttgcatgcaatcaggagaatctcataggggcaggaccttcccctactctgcctcttcctccatactaggttggaaaaatctggtttagcccactttttgcaacactcctgccaagtggtcttctacccattgcttgaaaatctctcttgacagggagctcactacctcacaaggcaggtcatttcattgtgggatctatagaaggttaagtaccacattctcctctaaaccttgcctacgacatgtttaatacttcatctacatagcagcccttcagataatcacaaccactttgcccccaagttttcaggttaagtagcatgaatttggtcattccttaaagacagggtttcaatttccacacatgatctctgcaaacaggcactgggttttcagtgtcctttttgaagggtcatataaaaataaggtaacaccacagtgccactacaccttctggggctggacttgtttcagcagctttggttgcactgaatttgggggagctgcatggtaccaggggtttattgggttgcagatatataaatgccctaaacttaaaaaaaaaaaaaaaagctataaaactaagtcttcatcttgtatttggaaaattggttcaagctgggtatgagacataagtgtagtcagctctgggagaaggttgctcttaaggagaagcagggacctgtggtttagcagcaggaagtgcaaatgggactggcttgtgctctacctggcagacctggattggcttcaggcagccagtgcctggaaaagcctggagaattgggccgtacttgaccctgattctcatcaggcacagatgaatcacaggcacctaagaatcggcacagaacttccatgaggcctcagtcagcattttttcacaaaatgagctgaggccattcaaggaggctagaaagagggaactgaatccagagaggaagagtctatagtcatcaagttgtatccatgccagcctccctccacagaggtggcagcagcgtggctcaatctgatccacctccatggcacccactgggtaggtgcttcataaagctttaccgagttaaatgtgaacaaggcctaccactttgccttgggcagctgcaccaaattagaatttccagatgtgactcatctcatattccaacagctggagtgggtcatcctttacccctgtggctccttcctacagctctcctgatctcagcacaagcaggggagcagctgggggaacacagctttatgtaattacctctgttcaatatttagcaagttgcattgtaacattgtaactgtttgtttctccttggatgatgagctacccccaagaaggggtcatatcagattgggtctcattaaaatgtctgatgaatgaa

SEQ ID NO: 236549 - DNA, 2713 bp, Artificial Sequence
  derived and/or modified sequence
ggcaaagaggttaggaagccggcatggcgctccggtcaataaaatcgatagctggaagctgcctgtgttccaggcaaaggcggtgcggtagcagcgccgccattttccccgaaggcatcttccggtgcctttcacccaagttcgggcaggagtttcctgaataacagcaaaaggtttccgttagccccgcgggcgaccaattccgattccctccgggcctccccggccacgctcagccctggtccggcaggggctcctcgatcccaggggccgccagcgcccgagggccgaggcctggacacggaaggccgtggcgccggcttctcgggtcccatggcgccaccttcggctccgctccctgcgcagggaccaggaaaggccagacccagtcggaaaaggggcaggaggccgagggctctgaagttcgtggacgtggccgtgtacttctccccggaggagtggggctgcctgcggcccgcgcagagggccctgtaccgggacgtgatgcgggagacctacggtcacctgggcgcgctcgggtgcgcaggtcccaaaccagccctcatctcctggttggaacgaaacaccgatgactgggaaccggctgctctagatccgcaggagtacccgagagggctaacagtccagagaaaaagcagaaccagaaagaagaatggggagaaggaagtattcccgcctaaggaggcaccccgaaaggggaagcgaggccggaggcccagcaaaccccgactgattcctaggcagacgtccgggggccccatctgccctgactgcggctgtaccttccctgatcatcaggccctggagagccacaagtgcgcccagaatctaaaaaagccttacccttgcccagactgtgggcgccgcttttcctatccatccctgctggtcagtcaccggcgggcacactccggcgagtgcccctatgtttgtgaccagtgtggcaaacgtttctcccagcgcaagaacctctcccagcaccaggtcatccatacaggggagaagccctatcactgccctgactgtggtcgctgcttccggaggagccggtccttggccaatcaccggaccacacacacaggtgaaaaaccccaccagtgccctagctgtggacgtcgcttcgcctacccctccctgctagccatccaccagcgtacacacacgggagagaagccctacacttgcctcgagtgcaaccgccgcttccgccagcgcacggccctcgtcatccaccagcgcatccacacgggcgagaagccctacccgtgcccggactgcgagcggcgcttctcctcctcctctcgcctggtcagtcaccggcgtgtgcactctggggagcgtccctatgcctgcgagcactgtgaggcccgcttctcccagcgcagcacgctgctccagcaccagctcttgcacaccggagagaagccctacccctgcccagactgtgggcgtgccttccggcggagcggctccctggccatccatcgcagcacgcacacagaggagaagctgcacgcctgcgacgactgtggtcgccgctttgcctacccctcactgctggccagccaccggcgcgtgcactcgggcgagcggccctatgcctgcgacctttgctccaagcgttttgctcagtggagccacctggcccagcaccagctgctgcacacgggggagaagcctttcccctgcctcgagccggtgcttccgccagaggtggtctctgctgtccacaagtgtagccccaaggccccaaactgtagccctagatctgctatcgggggctccagtcagaggggcaacgcccattagaaggggaaggactgcctacgttcatttcattttatggagggtcccagaaaagggaaggaggagccccaggtcatacagggcagagtcagaactaaacccgggtctcctgctgcacagagctgaactttgtatcttgcaatgcgctggctgcctccctgtgcgtgtctggaacagtcccattaggagaggtgacgtcatttgcttaaagttttccaagctaccctatcctaaaatagtttgtgtggatatcagggctaaaagttctccccatctattttaggggctgtctgcttttctagtctgtccacacagggattacctgtcatcttgcatgcaatcaggagaatctcataggggcaggaccttcccctactctgcctcttcctccatactaggttggaaaaatctggtttagcccactttttgcaacactcctgccaagtggtcttctacccattgcttgaaaatctctcttgacagggagctcactacctcacaaggcaggtcatttcattgtgggatctatagaaggttaagtaccacattctcctctaaaccttgcctacgacatgtttaatacttcatctacatagcagcccttcagataatcacaaccactttgcccccaagttttcaggttaagtagcatgaatttggtcattccttaaagacagggtttcaatttccacacatgatctctgcaaacaggcactgggttttcagtgtcctttttgaagggtcatataaaaataaggtaacaccacagtgccactacaccttctggggctggacttgtttcagcagctttggttgcactgaatttgggggagctgcatggtaccaggggtttattgggttgcagatatataaatgccctaaactt

SEQ ID NO: 236550 - protein, 99 aa, Artificial Sequence
  derived and/or modified sequence
MSTAQSLKSVDYEVFGRVQGVCFRMYTEDEARKIGVVGWVKNTSKGTVTGQVQGPEDKVNSMKSWLSKVGSPSSRIDRTNFSNEKTISKLEYSNFSIRY

SEQ ID NO: 236551 - protein, 97 aa, Artificial Sequence
  derived and/or modified sequence
MCPLPLAAAAVAAPRAPLRLLNRGLAAAMSTAQSLKSVDYEVFGRVQGVCFRMYTEDEARKIGVVGWVKNTSKGTVTGQVQGPEDKVNSMLECSGLI

SEQ ID NO: 236552 - DNA, 300 bp, Artificial Sequence
  derived and/or modified sequence
atgtctactgctcaaagtctgaaaagcgtcgattatgaagtttttggcagagtgcagggtgtgtgctttaggatgtacactgaagacgaagctagaaaaatcggagtggtggggtgggtgaaaaatactagcaagggcactgtgaccggccaggtgcaggggccagaggataaggtgaactctatgaaaagctggctgagtaaggtcggatccccatcaagtcgcattgataggaccaacttcagcaacgagaagaccattagcaagctggagtactccaacttctctattaggtattag

SEQ ID NO: 236553 - DNA, 294 bp, Artificial Sequence
  derived and/or modified sequence
atgtgccctctgcccttggccgctgcagcagttgcagcccctagagcaccactgaggcttctcaatcgaggtctcgccgcagctatgagcaccgcacagagccttaagtctgtagactatgaggtcttcggccgggtgcagggcgtgtgtttcagaatgtatactgaggatgaagccaggaagatcggagttgtcggttgggttaaaaatacgtcaaagggtactgtgaccgggcaggtgcaaggcccagaggacaaagtgaattcaatgctggaatgtagtggcttgatttag

SEQ ID NO: 236554 - DNA, 300 bp, Artificial Sequence
  derived and/or modified sequence
atgagcacagcccagagcctgaagtctgtggactatgaggtgtttggccgggtgcagggcgtgtgcttcaggatgtacacagaagatgaggccaggaagattggagtggtgggctgggtgaagaacaccagcaaaggaacagtgacaggccaggtgcagggccctgaggacaaggtgaacagcatgaagtcctggctgagcaaggtgggcagccccagcagcagaattgacaggaccaacttcagcaatgagaagaccatcagcaagctggagtacagcaacttcagcatccgctactag

SEQ ID NO: 236555 - DNA, 294 bp, Artificial Sequence
  derived and/or modified sequence
atgtgccccctgcccctggccgctgctgctgtggccgccccccgggcccccctgcggctgctgaacagaggcctggccgccgccatgagcacagcccagagcctgaagtctgtggactatgaggtgtttggccgggtgcagggcgtgtgcttcaggatgtacacagaagatgaggccaggaagattggagtggtgggctgggtgaagaacaccagcaaaggaacagtgacaggccaggtgcagggccctgaggacaaggtgaacagcatgctggagtgcagcggcctcatctag

SEQ ID NO: 236556 - DNA, 300 bp, Artificial Sequence
  derived and/or modified sequence
atgagcaccgcccagagcctgaagagcgtggactacgaggtgttcggacgggtccaaggggtgtgtttccggatgtatacagaagacgaggctcgaaaaattggcgtcgtgggatgggtgaagaacacctcaaagggaacagtaaccggtcaggtccagggtccggaggacaaagtcaatagtatgaagtcatggctgtctaaagttggttcccctagctccagaattgacaggacaaatttttccaacgagaagactatttccaaattggagtactcgaatttctcaattcggtattag

SEQ ID NO: 236557 - DNA, 294 bp, Artificial Sequence
  derived and/or modified sequence
atgtgccccctgcccctggccgccgccgccgtggccgccccccgggcccccttgagacttctaaaccgcgggttagcagcagcaatgtccaccgctcagagtctaaaaagcgtcgattatgaggtttttggacgcgttcagggcgtctgtttcaggatgtacaccgaggacgaggctcgcaagattggggtcgtgggctgggttaagaatacgagcaaggggacagtcacagggcaggtgcagggccccgaggacaaggtgaacagcatgctcgagtgtagcggcctgatctag

SEQ ID NO: 236558 - DNA, 300 bp, Artificial Sequence
  derived and/or modified sequence
atgtcaactgcccagagcctgaaatctgtggactacgaggtgttcggcagggtgcagggcgtgtgcttccgaatgtacaccgaggacgaggcccgtaagatcggcgtggttgggtgggttaagaacacgagcaaaggaaccgttacaggacaagtgcagggcccagaggataaggtgaacagtatgaagagttggctgagtaaggtgggcagtccctcctcaagaatagacagaaccaattttagcaatgaaaaaacaataagcaaactagaatattctaattttagcatcagatattag

SEQ ID NO: 236559 - DNA, 294 bp, Artificial Sequence
  derived and/or modified sequence
atgtgtcctctgcccttagcagctgcagccgtggcagcgcctcgtgccccacttagattactgaatcgtggcctggctgcggcaatgagcaccgcccagagcctgaagtctgtcgactatgaggtgtttggcagagttcagggggtctgttttcgaatgtacactgaggacgaggcccgaaaaattggtgtggtaggttgggttaagaacacttccaagggcaccgtgacagggcaagtgcaagggccagaagacaaagtgaattctatgctcgaatgcagcggtttaatttag

SEQ ID NO: 236560 - DNA, 300 bp, Artificial Sequence
  derived and/or modified sequence
atgagcaccgcccagagcctgaagagcgtggactacgaggtgttcggcagagtgcagggcgtgtgcttcagaatgtacaccgaggacgaggccagaaagatcggcgtggtgggctgggtgaagaacaccagcaagggcaccgtgaccggccaggtgcagggccccgaggacaaggtgaacagcatgaagagctggctgagcaaggtgggcagccccagcagcagaatcgacagaaccaacttcagcaacgagaagaccatcagcaagctggagtacagcaacttcagcatcagatactag

SEQ ID NO: 236561 - DNA, 294 bp, Artificial Sequence
  derived and/or modified sequence
atgtgccccctgcccctggccgccgccgccgtggccgcccccagagcccccctgagactgctgaacagaggcctggccgccgccatgagcaccgcccagagcctgaagagcgtggactacgaggtgttcggcagagtgcagggcgtgtgcttcagaatgtacaccgaggacgaggccagaaagatcggcgtggtgggctgggtgaagaacaccagcaagggcaccgtgaccggccaggtgcagggccccgaggacaaggtgaacagcatgctggagtgcagcggcctgatctag

SEQ ID NO: 236562 - DNA, 993 bp, Artificial Sequence
  derived and/or modified sequence
cggctgccctcgctcccaggccccgcagtctcatttgccgcttccgacgcgtgaccccggcgcgctagcgtccgggaccggtgacaggcgcggggtgcgccaagcagtcccatgtgtcccctccctctcgcagccgccgcagtcgctgcgccccgagcccctctccggctcctcaacagagggctcgccgccgccatgtctaccgcccagtcactcaaatccgtggactacgaggtgttcggaagagtgcagggtgtttgcttcagaatgtatacagaagatgaagctaggaaaataggagtggttggctgggtgaagaataccagcaaaggcaccgtgacaggccaagtgcaggggccagaagacaaagtcaattccatgaagtcctggctgagcaaggttggaagccctagttctcgcattgaccgcacaaacttttctaatgaaaaaaccatctctaagcttgaatactctaattttagtattagatactaatagaagagaaaaattgtaacacactgaacaatagatactgtatgttcttaagactatgtatactagaataatagtagcagagtagggtgaaaaggaactttctgttctgaaagctaagcgactgtacgtgctactaaaaatgtctgacactgaaataattttactcaactatgttttcaacaagcaaaaatatagtattctaagattaaaatgtcattacaaaatatttagtgtgaacatttaatttaaacttgtctcatggaatctttaatttcaatgaacattacagcatatatatgttatttggcgagacatcaaataaagttaaccatttaaaaattattttcatatactgttgtctatgttgaattataaaatcctctgaataatttgttactacggttatttgttattaaactcttcaaaaagaaccagtgattagaaataaatgtgatgatcaatataaccataaaatattatcaacaaagagttttaaaa

SEQ ID NO: 236563 - DNA, 1913 bp, Artificial Sequence
  derived and/or modified sequence
attaaatggtagggagcgctgtggagacagcatcctccccagtccgggaagagaggcctaggatgcctggggcccagcggcctcttccctcctggcgtccccggctgccctcgctcccaggccccgcagtctcatttgccgcttccgacgcgtgaccccggcgcgctagcgtccgggaccggtgacaggcgcggggtgcgccaagcagtcccatgtgtcccctccctctcgcagccgccgcagtcgctgcgccccgagcccctctccggctcctcaacagagggctcgccgccgccatgtctaccgcccagtcactcaaatccgtggactacgaggtgttcggaagagtgcagggtgtttgcttcagaatgtatacagaagatgaagctaggaaaataggagtggttggctgggtgaagaataccagcaaaggcaccgtgacaggccaagtgcaggggccagaagacaaagtcaattccatgctggagtgcagtggtctgatctagactcactgcagccttgaccttctgggctcaagtgatcttcccacgtcaacctcctgagtgcacatgctggctaatttgtgtgtgtgtgtgtgtgtgtgtgtgtgtatattttgttgttgttgttgttgttgttgttgttgttgctttgtagagatagtgtctcactatgttgctcaggctggtataggactcttggcttcaaatgactttcctgcctcagcctcccaaagtgctgggattacaaaaataaactttatttttgagaacagttttatatttacagaaaaattgtgaagatagtacagagactttccatatactccccacacagttttcctcctattaacattttacattaatatgatacgtatgttaacaattaatggaccaatatggatacattagtattaactaaaatccctatttatttagatttcaatttttacctaatgtccattttatgtcttaggatcccattattgtatttgctttttaattgggcattctcttgaaattaagagaagtgacattttggctgggtgcagtggctcatgcctgtaatcccagcacttcgggaggctgaggcgggcggatcacttgaggtcaggagttcaagaccagcctgtccaacacagcgagatcgtgtctctacaaaaaatacaaaaactagctggggttggtggcacacgcctgttgtcccagctacttgggaggctgaggcaagagaatcgcttgagtctgggaggcagaggttgcaatgagatgagattgcaccaccgcactccagtctgggcaatgggagtagcctgtcccaaaaaaaataaaataaaataaaaataaagacagaagtgacatttttatgatattaaatcttcccatttaagaacacacagatgttgttccatttgcttagattttaaaatttatccttcagtatgattttatggttttctttatataggtttttgtacttttcttgctaagttatttctaagtatcttaatgactttttcactattgcatatggatttctttcccatttatgcttctagttgttcatgcttaaatatggaatatctaatgacttttgtgtattaattagatatcatagtattaccttatcagatattcttattaattctatcagttttttaaaaaactatagtctattgggtttttaaaaaatacagttatgcaattagtaaaaatggtgtatctttgtttcagtgacttcatttgtcagacctgccatgacaatgttgaataataatagccatagcaggcatgcctgtttggtttctgactttatttaaaatagttttattgtttcacctagtaaaaagatgtttgctgttggttttaggtaaatatactttatcacaataaattttacttttgcattccttg

SEQ ID NO: 236564 - protein, 196 aa, Artificial Sequence
  derived and/or modified sequence
MGSVNSRGHKAEAQVVMMGLDSAGKTTLLYKLKGHQLVETLPTVGFNVEPLKAPGHVSLTLWDVGGQAPLRASWKDYLEGTDILVYVLDSTDEARLPESAAELTEVLNDPNMAGVPFLVLANKQEAPDALPLLKIRNRLSLERFQDHCWELRGCSALTGEGLPEALQSLWSLLKSRSCMCLQARAHGAERGDSKRS

SEQ ID NO: 236565 - DNA, 591 bp, Artificial Sequence
  derived and/or modified sequence
atgggatctgtcaattcacgcggccacaaagcagaggcccaggtggtgatgatgggattagattcagccggcaaaacaaccctgctgtataaacttaaaggtcaccagcttgtcgagaccctcccaaccgtgggcttcaatgttgaaccactcaaggcacctggtcatgtaagcctgacattgtgggatgtcggcggacaggcacccttgcgcgctagctggaaggattatctggagggaacagacattttggtttacgtgctggactccaccgacgaagcccggctcccggaaagtgcagctgaattgacggaagtacttaatgatcctaatatggcaggtgtgccattcctggtgctggccaataaacaggaagctccggacgctttacctttactcaagatcaggaacaggctatccttagaaaggttccaggatcattgctgggagcttagagggtgttccgcattgacaggcgaaggcctgccagaggctctccagtccctttggagtcttcttaaaagtcgctcttgcatgtgcctgcaggcacgggcccatggcgccgagagaggggactctaaacgctcgtag

SEQ ID NO: 236566 - DNA, 3760 bp, Artificial Sequence
  derived and/or modified sequence
cacccaagtctgagttgctaaaaaatggagctgtcactgggccttgctctgccaggacctgcagagccggggacctctctgtggcaagcccagcaagatgactgctctgaggcgccctagggctgagggaggggccgtgacaccagccccgccccccagccacctgggaaaaggaagcacaaaaaggagaagcagcaacggctgctctgcttccttcccatctcgctcttgggtcatgcctggccagcagaaagcagctccataggggaggagagccacgcaggatctcacagctgcagtctaatagtaacacagaggattcagcagtggccaccatgggttctgtgaattccagaggtcacaaggcggaagcccaggtggtgatgatgggcctggactcggcgggcaagaccacgctcctttacaagctgaagggccaccagctggtggagaccctgcccactgttggtttcaacgtggagcctctgaaagctcctgggcacgtgtcactgactctctgggacgttggggggcaggccccgctcagagccagctggaaggactatctggaaggcacagatatcctcgtgtacgtgctggacagcacagatgaagcccgcttacccgagtcggcggctgagctcacagaagtcctgaacgaccccaacatggctggcgtccccttcttggtgctggccaacaagcaggaggcacctgatgcacttccgctgcttaagatcagaaacaggctgagtctagagagattccaggaccactgctgggagctccggggctgcagtgccctcactggggaggggctgcccgaggccctgcagagcctgtggagcctcctgaaatctcgcagctgcatgtgtctgcaggcgagagcccatggggctgagcgcggagacagcaagagatcttgatccagacagagcagcatatctttgctcatacaaactagaagaaccagctgatccttgagaaatttacgcttagtctatcaaacaagaaatgctggcttggcccggtggctcatgcctgtaatcccagcactgtgggagaccacggtgggggaatcccttgagcccaggagttggagagcaacatcacaacaccccatttctactaataatcaaaaaattggccgggcatggtggcatgtgcctgtagtcccagctacttgggaggctgaggcaggagaatcgcttgagcccaagaggtagaggttgcagtgagccaagatcgcgccactgcactccagtctgggcaacagagtgagaccctgtctcaataataataataataataatgatgatactctaagaaaaaaatctcaacatacttcatttaatagctcgttaccaagtgtgaatgaagcaatatgtcataatagagtagccactggttgcataataatagagacctaaattctcaaatagggaaagaggttttaaaatcaaatttgaggccaggtgcagtggctcatgggcggaggagggcagattacttgaggctaggagttcaagaccagcctggccaacatggtgaaaccccatctctactgaaaatacaaaaattaggcatagtggtgcacgcctgcagtcccagctactcaggaggttgaggcagaagaatcgcttgaacccaggaagtggaggttgcagtgagccgagattgtgctgctgcactccagcctgggtgaaaaagacaggctgtgtctccaaaaagaaaaaaaaaagtcaaattcaaatatcatctggacatgtcacaatggatcgcggatccttatgagtgattttccccagtggcccctggggatgtgccactgtcactcagaagggcaagctaggcagggcccatacaacagcaggggtctgcaggttagacgttccctgccctgggacgctcacccctgggcaagaggctggaagttcacaccatccaaaatttatccttgttttttttctgatgctaattagcctctcccgattttatgacatcttgtgttgatctttttcaaaaactcattttcttttttttccttctcttttctccttcttgtagcacatatctttcgttaaagatcagatcaataaaatattttatttattcattaatttaacaaaaaaaacagagcatttagtttgtggcaaaaacactgagctttcgaatatgaatcatgtgctttaggtgggaattgtgaattctgaagatacagatgacagtgacgaatgccttctgtctcatgattgacagggaaaaggaaggttgaccatagcatcctagaaggctcatcaggtgatcattacctagcatccatgaagcacctgaaattatttgcaaaatgttacgctttggaccatttttccggggaaggagatccagaactttttaccagattttcaaagacatctgtgactcccaaaagttaacaatcactgatgtggttgttgtatccctcatccaaccccagaacactttctgtaatctgagttttttaatggcaagtggcctatatttagcacctgttctcatgttaaacagctctgaatgttagatattctttcttatcctggactggttctctctatctctggagtaatgcagtataaattggccatcagtaccctcctaaaatctgagatctgccaggcccctcttctaacaccaggttaggcatgcttggttatttccagtacttgtcagtcaacatgtttcaagacgctgtgttagacactagggatgcaaagatgaatgagataaggcctcaggcctcatggaaggtgagacagtaaagacattactcccataaaaatgtgaggagagagactcagttcagcaactgtttattctgtttattgagcacttacttggaccaagcactgtggtcttggtgttttacatagactgtctctaattctcacaactctgcaaaatatatatattcccattttataaaactacaaactgaggctcagagaaggtgtgacctcttgttgcttgaggcacagagttataaagtaacatatctggaatttgaaatcagatctgtttagggctaatgctgcatttttctacaacatcatgcctctagaaggtttaagctaggtaggctttcagccagcagacatgatggggagagccttctaataagagggaagagactgcttggaagcatgaagggaggtgtaagaaagataagtaagtcagtgtacttgcaacagaggcttgggatgaagggtgggtgaagttgacatcacgatagaaaacaaaactggaatgggagtttaggtccaatttgggcaaggttgtttgaatttcaataatcaggggtttgggtcaaggaagaaaaatcatgggacttgccatttaggaggataattttgtggtagtgtggaggtgaaataaagagaaaagggaaccttggagctgggaaggcaggaaaccggctagatgaccatcacacagcaaaggagggagtggaagagagatgagaaaattgagagctattattaagaaaaacagttgagagaggaagaatttgaagagggctcaagattttgagtccacatgacagaaggactggaatgccatgaactggagaaggtgagcgctgaagaaccaggatgggacggggctggaacagctgggttcagcttttgcagggtgggtacgtgtttggttatagctgctttcagattgttccattatctgtactcccaacaaccctgccggatatatttgttggctttcactc

SEQ ID NO: 236567 - DNA, 591 bp, Artificial Sequence
  derived and/or modified sequence
atgggctctgtgaacagccggggccacaaggccgaggcccaggtggtgatgatgggcctggacagcgctgggaagaccaccctgctgtacaagctgaagggccaccagctggtggagaccctgcccaccgtgggcttcaacgtggagcccctgaaggcccctggccacgtgtccctgaccctgtgggatgtgggcggccaggcccccctgcgggcctcctggaaggactacctggagggcacagacatcctggtgtatgtgctggacagcacagatgaggcccggctgcctgagagcgctgctgagctgacagaggtgctgaatgaccccaacatggccggcgtgcccttcctggtgctggccaacaagcaggaggccccagatgccctgcccctgctgaagatccggaaccggctgagcctggagcgcttccaggaccactgctgggagctgcggggctgcagcgccctgaccggggagggcctgcctgaggccctgcagagcctgtggagcctgctgaagagccgcagctgcatgtgcctgcaggcccgggcccacggggctgagcggggggacagcaagaggagctag

SEQ ID NO: 236568 - DNA, 591 bp, Artificial Sequence
  derived and/or modified sequence
atgggcagcgtgaacagccggggccacaaggccgaggcccaggtggtgatgatgggattggattctgccggcaaaacaacacttctgtataagctcaagggtcatcaattagtcgagactctgcctactgtcggatttaatgtcgagccgttgaaagctccgggtcacgtgtctttgaccctgtgggacgttggtggccaggcgccgttgcgggcaagttggaaagactacctggaaggtactgacatcctagtatacgtactggactctactgacgaagccaggctgccagaatccgccgccgagttaaccgaagtgctgaacgacccaaacatggctggagtaccgtttttagtactggcaaataagcaggaggcacctgacgcgctccccttgctgaagatcagaaataggttgtccctggagcggttccaagaccattgctgggagctgcggggctgtagcgccctgaccggagaaggcctgcccgaagctctgcaaagcttgtggtccctgcttaagtcacgctcttgcatgtgtctgcaggccagggctcacggcgcggaacgcggcgattcaaagagaagttag

SEQ ID NO: 236569 - DNA, 591 bp, Artificial Sequence
  derived and/or modified sequence
atgggctcagttaactctaggggacataaagcagaggcccaggtggtcatgatggggctggattctgcagggaaaaccactttattatataagctaaagggccaccagctcgtagaaaccctgcccacagtgggctttaatgttgagcctctgaaagctccgggtcacgttagtctgacactctgggatgtgggtggtcaggcaccactccgcgcttcatggaaggattacctggagggcaccgatattttggtgtacgtgctcgatagcacagacgaggcacgtttacccgagtcagcagcagagctgacggaagtcttgaatgacccgaacatggcgggagtcccctttcttgtactggccaacaaacaggaggccccagacgcccttcccctgcttaaaatccgcaaccgcctcagcctcgaaaggtttcaggaccactgctgggaactccgtgggtgctctgctcttactggcgagggcctgcccgaagccctccagagcctgtggtctcttctcaaatcacggagctgcatgtgtctgcaggccagagcccatggcgcagaacggggtgactctaaacggtcttag

SEQ ID NO: 236570 - DNA, 591 bp, Artificial Sequence
  derived and/or modified sequence
atgggcagcgtgaacagcagaggccacaaggccgaggcccaggtggtgatgatgggcctggacagcgccggcaagaccaccctgctgtacaagctgaagggccaccagctggtggagaccctgcccaccgtgggcttcaacgtggagcccctgaaggcccccggccacgtgagcctgaccctgtgggacgtgggcggccaggcccccctgagagccagctggaaggactacctggagggcaccgacatcctggtgtacgtgctggacagcaccgacgaggccagactgcccgagagcgccgccgagctgaccgaggtgctgaacgaccccaacatggccggcgtgcccttcctggtgctggccaacaagcaggaggcccccgacgccctgcccctgctgaagatcagaaacagactgagcctggagagattccaggaccactgctgggagctgagaggctgcagcgccctgaccggcgagggcctgcccgaggccctgcagagcctgtggagcctgctgaagagcagaagctgcatgtgcctgcaggccagagcccacggcgccgagagaggcgacagcaagagaagctag

SEQ ID NO: 236571 - protein, 212 aa, Artificial Sequence
  derived and/or modified sequence
MASLFSGRILIRNNSDQDELDTEAEVSRRLENRLVLLFFGAGACPQCQAFVPILKDFFVRLTDEFYVLRAAQLALVYVSQDSTEEQQDLFLKDMPKKWLFLPFEDDLRRDLGRQFSVERLPAVVVLKPDGDVLTRDGADEIQRLGTACFANWQEAAEVLDRNFQLPEDLEDQEPRSLTECLRRHKYRVEKAARGGRDPGGGGGEEGGAGGLF

SEQ ID NO: 236572 - DNA, 639 bp, Artificial Sequence
  derived and/or modified sequence
atggccagcctgttcagcggcagaatcctgatcagaaacaacagcgaccaggacgagctggacaccgaggccgaggtgagcagaagactggagaacagactggtgctgctgttcttcggcgccggcgcctgcccccagtgccaggccttcgtgcccatcctgaaggacttcttcgtgagactgaccgacgagttctacgtgctgagagccgcccagctggccctggtgtacgtgagccaggacagcaccgaggagcagcaggacctgttcctgaaggacatgcccaagaagtggctgttcctgcccttcgaggacgacctgagaagagacctgggcagacagttcagcgtggagagactgcccgccgtggtggtgctgaagcccgacggcgacgtgctgaccagagacggcgccgacgagatccagagactgggcaccgcctgcttcgccaactggcaggaggccgccgaggtgctggacagaaacttccagctgcccgaggacctggaggaccaggagcccagaagcctgaccgagtgcctgagaagacacaagtacagagtggagaaggccgccagaggcggcagagaccccggcggcggcggcggcgaggagggcggcgccggcggcctgttctag

SEQ ID NO: 236573 - DNA, 639 bp, Artificial Sequence
  derived and/or modified sequence
atggcgagcctgttctctggccggatattaatccggaacaactctgatcaggacgagctggatactgaagctgaagtctctcgccggctagagaaccggctcgtgcttctgtttttcggcgcaggtgcttgccctcagtgtcaggcgttcgtgcccatcctgaaggatttcttcgtcagacttactgacgaattctatgtgctccgggccgcacagttagctcttgtctatgtgtcacaagactcaactgaggaacagcaggatctcttcttgaaagacatgccaaaaaaatggctctttttgcctttcgaagacgatctacggagagatcttgggcggcagttttcggtcgagagactcccagccgtggtcgtactgaaacccgatggagatgtcttgacccgtgatggggctgacgagatccaaagactgggcaccgcgtgtttcgccaactggcaggaggctgcagaagtgctggatagaaattttcaactgcctgaggatttggaagatcaggagccccgctcactcacagagtgccttagaagacacaagtaccgggttgaaaaagcggcgcggggcgggcgagatccgggaggcgggggcggcgaagaggggggcgccggtggactcttttag

SEQ ID NO: 236574 - DNA, 639 bp, Artificial Sequence
  derived and/or modified sequence
atggccagcctcttcagcggccgcatcctgatccggaacaacagcgaccaggatgagctggacacagaggccgaggtgtcccggcggctggagaaccggctggtgctgctcttctttggagctggggcctgcccccagtgccaggcctttgtgcccatcctgaaggacttctttgtgcggctgacagatgagttctacgtgctgcgggccgcccagctggccctggtgtatgtgtcccaggacagcacagaggagcagcaggacctcttcctgaaggacatgcccaagaagtggctgttcctgccctttgaagatgacctgcggcgggacctgggccggcagttctctgtggagcggctgcctgctgtggtggtgctgaagccagatggagatgtgctgaccagagatggagcagatgagatccagaggctgggcacagcctgctttgccaactggcaggaggccgctgaggtgctggacaggaacttccagctgcctgaggacctggaggaccaggagcccaggagcctgacagaatgtctgcggcggcacaagtacagagtggagaaggccgcccggggcggccgggaccccggcggcggcggcggggaggagggcggggccggcggcctcttctag

SEQ ID NO: 236575 - DNA, 906 bp, Artificial Sequence
  derived and/or modified sequence
ccggggaccacacgccgcgctgtccccagcacccaacccaggttaccatggcctccctgttctctggccgcatcctgatccgcaacaatagcgaccaggacgagctggatacggaggctgaggtcagtcgcaggctggagaaccggctggtgctgctgttctttggtgctggggcttgtccacagtgccaggccttcgtgcccatcctcaaggacttcttcgtgcggctcacagatgagttctatgtactgcgggcggctcagctggccctggtgtacgtgtcccaggactccacggaggagcagcaggacctgttcctcaaggacatgccaaagaaatggcttttcctgccctttgaggatgatctgaggagggacctcgggcgccagttctcagtggagcgcctgccggcggtcgtggtgctcaagccggacggggacgtgctcactcgcgacggcgccgacgagatccagcgcctgggcaccgcctgcttcgccaactggcaggaggcggccgaggtgctggaccgcaacttccagctgccagaggacctggaggaccaggagccacggagcctcaccgagtgcctgcgccgccacaagtaccgcgtggaaaaggcggcgcgaggcgggcgcgaccccgggggagggggtggggaggagggcggggccggggggctgttctgacccgctagggtggaggagaggagtggggtttgttgatgaacctccacccccaccccacccccgcacgcctgtaatcccagcacttggggaggccaaggcgggaggatcgcttgagcccagaggttcgagatcaacctgggcaagagagtgagaccctgactctacgaaaattaaaagttagcccggtgtggtggcgcgcacctgtggcttagctaccctg

SEQ ID NO: 236576 - DNA, 639 bp, Artificial Sequence
  derived and/or modified sequence
atggccagcctgttcagcggccggatcctgatccggaacaacagcgatcaggatgaactggacaccgaagctgaagtgagcaggaggctggaaaatagactcgtgctactctttttcggagcaggagcatgcccacagtgccaggctttcgtgccaatcctcaaggacttctttgtaaggctgaccgatgagttttatgtgctgcgcgcggcccaattggcgctggtttatgtgtcccaggactcaaccgaagaacagcaggacctattcttaaaagatatgccgaaaaagtggctcttccttccctttgaggacgatctacgccgcgacctgggccggcagttttctgtggaacgccttcctgccgttgtggttctaaaacctgatggcgacgtattaactcgcgatggggctgacgagattcaacgtctgggcaccgcatgctttgctaattggcaggaagctgccgaggtgctggatcgcaattttcagcttcccgaggacctggaagaccaggagccacgctccctgactgagtgcctcagacgccacaagtacagggtcgaaaaggccgcccggggagggcgggaccctggaggtgggggtggtgaagagggtggcgctgggggcctcttctag

SEQ ID NO: 236577 - DNA, 639 bp, Artificial Sequence
  derived and/or modified sequence
atggcaagtttgtttagcgggcgtatcctgattaggaacaattccgatcaggacgagctggacactgaggctgaagtgagtcgccgtctggagaatcgactggttctcctatttttcggagcgggagcatgtccccaatgccaggccttcgtaccaatactcaaggacttcttcgtgcggctgacagatgagttttatgttttacgggcagcccagctggctctagtgtatgtgtctcaggatagcaccgaagaacagcaggatctctttctgaaggacatgccaaaaaaatggctttttctgccttttgaagatgacctgcggagagatctggggaggcagttttccgtagagaggctgcctgccgtggtggttctgaaacctgatggcgatgtccttacccgtgatggtgctgatgaaattcagagactgggaaccgcctgttttgccaactggcaggaggctgccgaggtgctggaccgcaactttcagctgccggaagatctggaagaccaggagcctcgcagcctgactgagtgcctgaggaggcacaagtaccgggtagagaaggccgcaaggggtggaagagaccccggaggtgggggtggagaagagggcggtgctggtggccttttctag

SEQ ID NO: 236578 - protein, 243 aa, Artificial Sequence
  derived and/or modified sequence
MRPQGPAASPQRLRGLLLLLLLQLPAPSSASEIPKGKQKAQLRQREVVDLYNGMCLQGPAGVPGRDGSPGANGIPGTPGIPGRDGFKGEKGECLRESFEESWTPNYKQCSWSSLNYGIDLGKIAECTFTKMRSNSALRVLFSGSLRLKCRNACCQRWYFTFNGAECSGPLPIEAIIYLDQGSPEMNSTINIHRTSSVEGLCEGIGAGLVDVAIWVGTCSDYPKGDASTGWNSVSRIIIEELPK

SEQ ID NO: 236579 - DNA, 732 bp, Artificial Sequence
  derived and/or modified sequence
atgagaccccagggtccagccgcttctcctcagaggctccggggccttcttcttctgctattactacaactgccagccccctcttcagcatctgagatccctaagggaaaacaaaaggcccaactaaggcagcgagaagtggtggacctgtacaatggcatgtgtctacaggggcccgccggtgttcccggtcgggatgggtcacccggtgctaatggtataccgggaactcctggaattcctggtagggatggtttcaaaggggagaagggggagtgtttgagggagtcctttgaagagtcctggacccctaactacaagcagtgctcctggtccagcctgaactatggtattgatctaggcaaaatcgccgaatgtacttttaccaagatgcgcagcaactctgcactacgggtcctgttctctgggtctttgcggctcaagtgcagaaatgcatgctgtcagcggtggtacttcacgtttaatggcgcagaatgttccggacctctcccgattgaggcaattatttatctggaccaagggtccccggaaatgaactccactataaatattcaccgcacgagttccgtcgagggactgtgcgagggtatcggagccggcctggtcgatgttgcaatttgggtggggacttgttccgattacccaaagggtgatgcatccactggctggaattccgtgagccgtataataattgaagagcttcccaagtag

SEQ ID NO: 236580 - DNA, 732 bp, Artificial Sequence
  derived and/or modified sequence
atgaggccccagggccctgctgccagcccccagaggctgcggggcctgctgctgctgctgctgctgcagctgcctgcccccagcagcgccagcgagatccccaagggcaagcagaaggcccagctgcggcagcgggaggtggtggacctgtacaacggcatgtgcctgcagggccctgctggggtgcccggcagagatggcagccctggggccaacggcatccctggcaccccaggcatccctggaagagatggcttcaagggggagaagggggagtgcctgcgggagagctttgaggagagctggacccccaactacaagcagtgctcctggagcagcctgaactacggcatcgacctgggcaagattgctgaatgtaccttcaccaagatgaggagcaacagcgccctgcgggtgctcttcagcggcagcctgcggctgaagtgcagaaatgcctgctgccagcgctggtacttcaccttcaacggggctgaatgttctggccccctgcccatcgaggccatcatctacctggaccagggcagccctgagatgaacagcaccatcaacatccacaggaccagctctgtggagggcctgtgtgagggcatcggggccggcctggtggatgtggccatctgggtgggcacctgcagcgactaccccaagggagatgccagcacaggctggaacagcgtgagccgcatcatcatcgaggagctgcccaagtag

SEQ ID NO: 236581 - DNA, 732 bp, Artificial Sequence
  derived and/or modified sequence
atgcggccccagggccccgccgccagcccccagcggctgcggggcttgctgctgctgctcctgttgcagctgcccgctccttcctccgcttccgagattcccaaaggcaaacagaaagcccagcttagacaacgcgaggtggtcgatttgtacaacggcatgtgcctgcagggtccagcaggagttccaggccgagacgggtctcccggcgccaacggtatccctgggacacccggaattccagggcgtgatggctttaagggagaaaaaggtgaatgcctccgcgagagcttcgaggagtcttggacacccaattataaacaatgctcatggagctctctgaactacggcatcgacctcggaaaaattgctgaatgtacttttacaaaaatgaggtcgaactcggcattgcgagtgctgttttcagggagcttgcggcttaaatgccggaatgcttgctgtcagaggtggtacttcacctttaacggagctgaatgtagcggtcccctgcctattgaggcaattatttacctggaccagggatctccagagatgaactccacgattaacatacacagaacttcatcagtggagggactctgcgaggggatcggagccgggctggttgacgtggcaatatgggttggcacgtgctcggactaccctaagggagacgcctcaaccggctggaatagcgtgtccaggataatcattgaggagctgcccaagtag

SEQ ID NO: 236582 - DNA, 732 bp, Artificial Sequence
  derived and/or modified sequence
atgagaccacagggaccagcggcttccccacaaaggctccggggactgctgcttctcctgctgctgcagttgccagctccgtcaagtgctagcgaaatccccaaggggaaacagaaggcacaattgcggcaacgagaagtcgtagatctgtataatggcatgtgcttacagggccctgcaggggtgcccggaagggacggatcaccaggagccaatggaattccagggacacctggcattccaggacgggacggctttaagggtgagaagggagagtgcctccgggagtctttcgaagagtcttggacccctaattacaagcagtgttcttggagctcactgaactacggaattgatctcggaaagatagcagagtgcaccttcacgaaaatgagatccaactctgccctccgtgtgctgttttccggctcgttgaggctcaagtgccgcaacgcttgctgccaacgatggtatttcacattcaatggtgccgaatgtagtgggccactccctatcgaggcaataatttatctggaccagggtagccccgagatgaattccaccattaacatccatcggacatcatctgtcgaaggcctgtgcgagggaatcggtgcgggactggtcgacgtcgcaatttgggtcggtacctgtagcgattatcctaagggggacgcaagcaccggctggaattccgtttccaggatcattattgaagaactcccaaagtag

SEQ ID NO: 236583 - DNA, 1271 bp, Artificial Sequence
  derived and/or modified sequence
gggagggagagaggcgcgcgggtgaaaggcgcattgatgcagcctgcggcggcctcggagcgcggcggagccagacgctgaccacgttcctctcctcggtctcctccgcctccagctccgcgctgcccggcagccgggagccatgcgaccccagggccccgccgcctccccgcagcggctccgcggcctcctgctgctcctgctgctgcagctgcccgcgccgtcgagcgcctctgagatccccaaggggaagcaaaaggcgcagctccggcagagggaggtggtggacctgtataatggaatgtgcttacaagggccagcaggagtgcctggtcgagacgggagccctggggccaatggcattccgggtacacctgggatcccaggtcgggatggattcaaaggagaaaagggggaatgtctgagggaaagctttgaggagtcctggacacccaactacaagcagtgttcatggagttcattgaattatggcatagatcttgggaaaattgcggagtgtacatttacaaagatgcgttcaaatagtgctctaagagttttgttcagtggctcacttcggctaaaatgcagaaatgcatgctgtcagcgttggtatttcacattcaatggagctgaatgttcaggacctcttcccattgaagctataatttatttggaccaaggaagccctgaaatgaattcaacaattaatattcatcgcacttcttctgtggaaggactttgtgaaggaattggtgctggattagtggatgttgctatctgggttggtacttgttcagattacccaaaaggagatgcttctactggatggaattcagtttctcgcatcattattgaagaactaccaaaataaatgctttaattttcatttgctacctctttttttattatgccttggaatggttcacttaaatgacattttaaataagtttatgtatacatctgaatgaaaagcaaagctaaatatgtttacagaccaaagtgtgatttcacactgtttttaaatctagcattattcattttgcttcaatcaaaagtggtttcaatattttttttagttggttagaatactttcttcatagtcacattctctcaacctataatttggaatattgttgtggtcttttgttttttctcttagtatagcatttttaaaaaaatataaaagctaccaatctttgtacaatttgtaaatgttaagaattttttttatatctgttaaataaaaattatttccaacaaccttaata

SEQ ID NO: 236584 - DNA, 732 bp, Artificial Sequence
  derived and/or modified sequence
atgagaccccagggccccgccgccagcccccagagactgagaggcctgctgctgctgctgctgctgcagctgcccgcccccagcagcgccagcgagatccccaagggcaagcagaaggcccagctgagacagagagaggtggtggacctgtacaacggcatgtgcctgcagggccccgccggcgtgcccggcagagacggcagccccggcgccaacggcatccccggcacccccggcatccccggcagagacggcttcaagggcgagaagggcgagtgcctgagagagagcttcgaggagagctggacccccaactacaagcagtgcagctggagcagcctgaactacggcatcgacctgggcaagatcgccgagtgcaccttcaccaagatgagaagcaacagcgccctgagagtgctgttcagcggcagcctgagactgaagtgcagaaacgcctgctgccagagatggtacttcaccttcaacggcgccgagtgcagcggccccctgcccatcgaggccatcatctacctggaccagggcagccccgagatgaacagcaccatcaacatccacagaaccagcagcgtggagggcctgtgcgagggcatcggcgccggcctggtggacgtggccatctgggtgggcacctgcagcgactaccccaagggcgacgccagcaccggctggaacagcgtgagcagaatcatcatcgaggagctgcccaagtag

SEQ ID NO: 236585 - protein, 274 aa, Artificial Sequence
  derived and/or modified sequence
MHLCGGNGLLTQTDPKEQQRQLKKQKNRAAAQRSRQKHTDKADALHQQHESLEKDNLALRKEIQSLQAELAWWSRTLHVHERLCPMDCASCSAPGLLGCWDQAEGLLGPGPQGQHGCREQLELFQTPGSCYPAQPLSPGPQPHDSPSLLQCPLPSLSLGPAVVAEPPVQLSPSPLLFASHTGSSLQGSSSKLSALQPSLTAQTAPPQPLELEHPTRGKLGSSPDNPSSALGLARLQSREHKPALSAATWQGLVVDPSPHPLLAFPLLSSAQVHF

SEQ ID NO: 236586 - DNA, 825 bp, Artificial Sequence
  derived and/or modified sequence
atgcatctttgtggaggaaacggcctgctgacgcaaacggacccaaaggaacagcagcggcagctgaagaaacaaaagaacagggctgccgcccagagatcccggcaaaagcatacagataaggccgacgccttgcatcagcagcacgagtccctggaaaaggataacctcgccctgcgaaaggagatccagtcactgcaagccgaactggcttggtggtcacggacactgcacgtccacgaacggctttgcccgatggactgtgcatcctgtagcgctccagggttattaggatgctgggatcaagcggagggtctgttgggcccaggcccacaagggcaacatggatgccgcgagcagttagaactatttcagacacccggcagttgttatcctgcacagccactcagccctggcccacaaccgcacgactctccatctctcctgcaatgtccgttaccatcattatccctgggacctgccgttgtagctgagcccccagtgcagttgtccccatcaccgctgttgttcgcatctcacacgggaagctcactgcagggcagctcaagcaagctaagcgcccttcagccatcactcaccgcccaaaccgcgcctcctcagcctctcgagttagaacatcccactaggggcaaacttggatcaagccccgataatcctagctcagcgctcggccttgcccggctccagtcaagagagcacaagcccgctctcagcgctgcgacctggcaagggcttgtggttgaccctagtcctcatcctttgctggcctttccactgctctcctcagcccaggtacatttttag

SEQ ID NO: 236587 - DNA, 825 bp, Artificial Sequence
  derived and/or modified sequence
atgcacctgtgtggcggcaatggcctgctgacccagacagaccccaaggagcagcagaggcagctgaagaagcagaagaacagagctgctgcccagaggagccggcagaagcacacagacaaggcagatgccctgcaccagcagcacgagagcctggagaaggacaacctggccctgaggaaggagatccagagcctgcaggccgagctggcctggtggagcaggaccctgcacgtgcatgagcggctgtgccccatggactgtgccagctgcagcgcccctggcctgctgggctgctgggaccaggccgagggcctgctgggccctggcccccagggccagcacggctgccgggagcagctggagctgttccagaccccaggcagctgctacccagcccagcccctgagccctggcccccagccccatgacagccccagcctgctgcagtgccccctgcccagcctgagcctgggccctgctgtggtggccgagccccctgtgcagctgagccccagccccctgctgtttgccagccacacaggcagcagcctgcagggcagcagcagcaagctgagcgccctgcagcccagcctgacagcccagacagccccaccccagcccctggagctggagcaccccacccggggcaagctgggcagcagcccagacaaccccagcagcgccctgggcctggcccggctgcagagccgggagcacaagccagccctgtctgctgccacctggcagggcctggtggtggaccccagcccccaccccctgctggccttccccctgctgagcagcgcccaggtgcacttctag

SEQ ID NO: 236588 - DNA, 825 bp, Artificial Sequence
  derived and/or modified sequence
atgcacctgtgcggcggcaacggcctgctgacccagaccgaccccaaagagcagcagcgtcagcttaaaaagcagaaaaacagagcagccgcacagcggagccgtcagaagcacacggataaagcagatgcactccaccagcagcacgaatcgctcgaaaaggataacctggccctccgcaaagagattcaaagcctccaggccgagttggcgtggtggtcaaggactctccacgtgcatgagcgcctgtgcccaatggattgcgcctcctgtagtgctccggggctgctcggatgctgggatcaggcggaagggctgctggggccaggtcctcaggggcagcacggctgccgagaacagctggaactgttccagacacccggcagttgctaccctgcccaacccctgagccctggccctcagccgcatgacagtccatctctgttacagtgcccgctcccatccttgagtctgggacccgctgtagtggcggaaccccctgttcaactgagcccttcgcctctgctcttcgcctcccatacagggagttctctgcagggttcttcttcaaagctttctgcgctgcaacctagccttacagcgcagaccgcccccccacagcctctggagctggagcatcccactagaggcaaactgggaagctcacccgacaacccctcatctgccctgggactggcccgtctgcaaagcagggagcacaaaccagccttgtctgcggctacctggcagggtttggtggttgacccctccccccaccccctgcttgcattccccctcttaagttcagcccaggtgcatttttag

SEQ ID NO: 236589 - DNA, 825 bp, Artificial Sequence
  derived and/or modified sequence
atgcacctgtgtgggggtaacggtctgctgacccagacggatcccaaggaacagcagaggcagctcaagaaacagaagaatagggccgctgcacagcggtctcgacaaaagcacaccgataaagccgacgccctccaccagcagcatgagtccctcgaaaaggacaacctggctctgcggaaggagatccagagcctgcaagcagagctggcttggtggagcaggaccctccacgttcacgagcggctgtgtccaatggactgtgcctcttgtagcgccccagggctcttgggctgttgggatcaggccgagggcctgctggggcctggaccccagggccagcacggatgccgcgaacagcttgagctgttccagactcctggctcctgttacccagctcagccactgagccccggaccccagccacacgattcccccagcctgctgcagtgcccactgccctcattgagcttagggcctgcagtggtcgctgaaccaccagtgcagttgagtcccagcccactgctgttcgcctcccataccgggtccagcctgcagggctcctccagcaagctgagcgccctgcagcctagtttgactgcacaaacagcccctcctcagccgttggagctagaacaccctacccgcggaaagctcggctcttctcccgataatccctccagtgcattgggactcgctcggctgcagagtcgagagcacaagcccgcactgagcgcggctacctggcaaggactggtggtggacccctcgccacacccactgctagctttcccgctactgagctccgcccaggtccacttctag

SEQ ID NO: 236590 - DNA, 2142 bp, Artificial Sequence
  derived and/or modified sequence
gaaactgaaacttggccctctgggggcggagtggccactggggatttaaagagctgccacttccttaggcctccagagggcactgggaagtcacagctgctgagggaccactctgctcccccgcctaagccatgcacctctgtgggggcaatgggctgctgacccagacagaccccaaggagcaacaaaggcagctgaagaagcagaagaaccgggcagccgcccagcgaagccggcagaagcacacagacaaggcagacgccctgcaccagcagcacgagtctctggaaaaagacaacctcgccctgcggaaggagatccagtccctgcaggccgagctggcgtggtggagccggaccctgcacgtgcatgagcgcctgtgccccatggattgtgcctcctgctcagctccagggctcctgggctgctgggaccaggctgaggggctcctgggccctggcccacagggacaacatggctgccgggagcagctggagctgttccagaccccgggttcctgttacccagctcagccgctctctccaggtccacagcctcatgattctcccagcctcctccagtgccccctgccctcactgtcccttggccccgctgtggttgctgaacctcctgtccagctgtcccccagccctctcctgtttgcctcgcacactggttccagcctgcaggggtcttcctctaagctcagtgccctccagcccagcctcacggcccaaactgcccctccacagcccctcgagctggagcatcccaccagagggaagctggggtcctctcccgacaacccttcctctgccctggggcttgcacgtctgcagagcagggagcacaaacctgctctctcagcagccacttggcaagggctggttgtggatcccagccctcaccctctcctggcctttcctctgctctcctctgctcaagtccacttctaacctggtcttcggagctgggttggccccttctttgggctcaggaagcagccttagcacacgggcctctcctccctcactactgggtgctgccctgcgtggctgaccagctggcccaggatttcacagtcgaaaaggaagccaccactgatgcctcccactgtgacaggccctgtcaccaccaatatcttatttcaacctcacagttgacctgagaaatcgagattatcactccactttttcagacaaggaaactgaggctcagggaagccaagtgacaagtccaaggtcacgaagactttcttggagcccgaaacaccaccctctgctcctccttctcctgtcctggcccaggcatcctaggggctgaaatcctggaaaccgtgggctggtgtgagaaggtttgcatgctcagagcagagaagggctctccccactgcttcgtgattccagggccagagccatgcagtcccagaaaccccaacctagctggggcaggtccagagtccaagccctggtgggtagaggccaagcagaagccctgaagtggactcttgcttcccctagtagtgttttcagtgccaagaagctgaaactgtgagctggagttggggagaggtctggaagaggaccatctgggatttctacagcctgggtacccatagccacaccaaggcttctgggagattctgcagggtcagctttccaggctgttcccaaatagctccctgcctccccactgcccctaaagccacagcagaagagccattcatctcataaacaaaaaggaagaggaaagaatgaggaaggaccctgtgcaaggttatttgcaggcagggatgggcttgtacctgacagcacccacccctgtgtggcccccaggccctcatcaccctcagacccctcctaagcagttccctcattgctctttggactaggctgacagcaggaagagcagggcccatgaccgggtggaagttcagttttggtgtctgcttcaagagggggttttacactctgattccaggacaagcactctgaggcgggtgggggagagaaaccctggctcttcacccaggtttcacacacatgtaaatgaaacactatgttagtatctaacacactcctggatacagaacacaagtcttggcacatatgtgatggaaataaagtgttttgcaatcttttc

SEQ ID NO: 236591 - DNA, 825 bp, Artificial Sequence
  derived and/or modified sequence
atgcacctgtgcggcggcaacggcctgctgacccagaccgaccccaaggagcagcagagacagctgaagaagcagaagaacagagccgccgcccagagaagcagacagaagcacaccgacaaggccgacgccctgcaccagcagcacgagagcctggagaaggacaacctggccctgagaaaggagatccagagcctgcaggccgagctggcctggtggagcagaaccctgcacgtgcacgagagactgtgccccatggactgcgccagctgcagcgcccccggcctgctgggctgctgggaccaggccgagggcctgctgggccccggcccccagggccagcacggctgcagagagcagctggagctgttccagacccccggcagctgctaccccgcccagcccctgagccccggcccccagccccacgacagccccagcctgctgcagtgccccctgcccagcctgagcctgggccccgccgtggtggccgagccccccgtgcagctgagccccagccccctgctgttcgccagccacaccggcagcagcctgcagggcagcagcagcaagctgagcgccctgcagcccagcctgaccgcccagaccgcccccccccagcccctggagctggagcaccccaccagaggcaagctgggcagcagccccgacaaccccagcagcgccctgggcctggccagactgcagagcagagagcacaagcccgccctgagcgccgccacctggcagggcctggtggtggaccccagcccccaccccctgctggccttccccctgctgagcagcgcccaggtgcacttctag

SEQ ID NO: 236592 - protein, 667 aa, Artificial Sequence
  derived and/or modified sequence
MMVESASETIRSAPSGQNGVGSLSGQADGSSGGATGTTASGTGREVTTGADSNGEMSPAELLHFQQQQALQVARQFLLQQASGLSSPGNNDSKQSASAVQVPVSVAMMSPQMLTPQQMQQILSPPQLQALLQQQQALMLQQLQEYYKKQQEQLHLQLLTQQQAGKPQPKEALGNKQLAFQQQLLQMQQLQQQHLLNLQRQGLVSLQPNQASGPLQTLPQAVCPTDLPQLWKGEGAPGQPAEDSVKQEGLDLTGTAATATSFAAPPKVSPPLSHHTLPNGQPTVLTSRRDSSSHEETPGSHPLYGHGECKWPGCETLCEDLGQFIKHLNTEHALDDRSTAQCRVQMQVVQQLEIQLAKESERLQAMMAHLHMRPSEPKPFSQPVTVSAADSFPDGLVHPPTSAAAPVTPLRPPGLGSASLHGGGPARRRSSDKFCSPISSELAQNHEFYKNADVRPPFTYASLIRQAILETPDRQLTLNEIYNWFTRMFAYFRRNTATWKNAVRHNLSLHKCFVRVENVKGAVWTVDEREYQKRRPPKMTGSPTLVKNMISGLSYGALNASYQAALAESSFPLLNSPGMLNPGSASSLLPLSHDDVGAPVEPLPSNGSSSPPRLSPPQYSHQVQVKEEPAEAEEDRQPGPPLGAPNPSASGPPEDRDLEEELPGEELS

SEQ ID NO: 236593 - protein, 668 aa, Artificial Sequence
  derived and/or modified sequence
MMVESASETIRSAPSGQNGVGSLSGQADGSSGGATGTTASGTGREVTTGADSNGEMSPAELLHFQQQQALQVARQFLLQQASGLSSPGNNDSKQSASAVQVPVSVAMMSPQMLTPQQMQQILSPPQLQALLQQQQALMLQQLQEYYKKQQEQLHLQLLTQQQAGKPQPKEALGNKQLAFQQQLLQMQQLQQQHLLNLQRQGLVSLQPNQASGPLQTLPQAAVCPTDLPQLWKGEGAPGQPAEDSVKQEGLDLTGTAATATSFAAPPKVSPPLSHHTLPNGQPTVLTSRRDSSSHEETPGSHPLYGHGECKWPGCETLCEDLGQFIKHLNTEHALDDRSTAQCRVQMQVVQQLEIQLAKESERLQAMMAHLHMRPSEPKPFSQPVTVSAADSFPDGLVHPPTSAAAPVTPLRPPGLGSASLHGGGPARRRSSDKFCSPISSELAQNHEFYKNADVRPPFTYASLIRQAILETPDRQLTLNEIYNWFTRMFAYFRRNTATWKNAVRHNLSLHKCFVRVENVKGAVWTVDEREYQKRRPPKMTGSPTLVKNMISGLSYGALNASYQAALAESSFPLLNSPGMLNPGSASSLLPLSHDDVGAPVEPLPSNGSSSPPRLSPPQYSHQVQVKEEPAEAEEDRQPGPPLGAPNPSASGPPEDRDLEEELPGEELS

SEQ ID NO: 236594 - DNA, 5926 bp, Artificial Sequence
  derived and/or modified sequence
gccgtccctgcggaccggacagtgcggccggcggccggcggccgggacggagcccccagcccgcgaggagggcgcggcgcaggcggcggcggcgcggcggggaggagcccgggccggaaccagggctgggccgggggcggggacgccggggtccgggagcccgggagccggagcgagctgacgagcgtcgcggaaggaccgggaaggaagagcggagccggagcgagccaagcagcccacaaagtgccatgccccggcggggttgaggcgcgcggcggtcggcccggcgcgctgggaggacgcccgggagctgcgcgacgcggggcggcgcggaagggcagccccggcgggcggcggcgggcccgggctgcgaccggagcgagccccatgccccgcgcgggctgacgggccggagcccgcacggagcggccgggcgggacaggtaccgctagagcgacatgatggtggaatctgcctcggagacaatcaggtcggctccatctggtcagaatggcgtgggcagcctctctgggcaagccgatggcagcagcggcggggccacagggacaactgcaagtggcacgggcagggaagtgaccacgggtgcagacagcaatggtgagatgagtcccgcagagctgctgcacttccagcagcaacaggctctccaagtggcccggcagttcctgctgcagcaggcctcaggcctgagctccccagggaacaatgacagcaaacagtctgcctctgctgtgcaggtgcctgtgtcggtggccatgatgtcgccgcagatgcttaccccgcaacagatgcagcagatcctgtcgcccccgcagctgcaggccttgctccagcagcagcaagccctcatgctccagcagctacaggagtactacaagaagcagcaggagcagctccacctgcagctcctcacccagcagcaggctgggaaaccgcagcccaaagaggcactggggaacaagcagctggccttccagcagcagctcctgcaaatgcaacagttgcagcagcagcacctgctcaacctgcagaggcaggggctggtcagcctgcagcccaaccaagcctcggggcccctccagacccttccgcaagctgtttgcccaacagacctgccccagctgtggaagggcgagggtgcccccgggcagcctgccgaggacagcgtcaagcaggaggggctggacctcactggcacggccgccaccgctacctcgtttgccgctccccccaaggtctcaccccccctctcccaccataccctgcccaacggacagcctactgtgctcacatctcggagagacagctcttcccacgaggagacccccggctcccaccccctgtacggacacggagagtgcaagtggccaggctgtgagaccctgtgtgaagacctgggccagtttatcaaacacctcaacacagagcacgccctggatgaccggagtacagcccagtgccgggtacagatgcaggtggtgcagcagctggagatccagctcgccaaggagagcgagcggctgcaggccatgatggcccacctgcacatgcggccctcggagcccaagcccttcagccagccagtgaccgtctctgcagcagactcattcccagatggtctcgtgcaccccccgacctcggccgcagcccctgtcacccctctacggccccctggcctgggctctgcctccctgcatggtgggggcccagcccgtcggagaagcagtgacaagttctgctcccccatctcctcagagctggcccagaatcatgagttctacaagaacgccgacgtccggccccccttcacctacgcctccctcatccgccaggccatcctggaaacccctgacaggcagctgaccctgaatgagatctataactggttcaccaggatgttcgcctatttccgcagaaacactgccacctggaagaacgccgtgcgccacaacctcagcctgcacaagtgcttcgtccgcgtggagaacgtcaagggtgccgtgtggactgtggacgagcgggagtatcagaagcggagaccgccaaagatgacagggagccccaccctggtgaagaacatgatctctggcctcagctatggagcacttaatgccagctaccaggccgccctggccgagagcagcttccccctcctcaacagccctggcatgctgaaccctggctccgccagcagcctgctgcccctcagccacgatgacgtgggtgcccccgtggagccgctgcccagcaacggcagcagcagccctcctcgcctctccccgccccagtacagccaccaggtgcaggtgaaggaggagccagcagaggcagaggaagacaggcagcccgggcctcccctgggcgcccctaaccccagcgcctcggggcctccggaagacagggacctggaggaggagctgccgggagaagaactgtcctaagggcctgtagtgaccggcagggctggggtgagacccctcccttccagaatccaggccccatctcccccaactccacagcccctcccgagcctcaaggcaagtccaggactcagaccggggaggcccgggccagcagctcccagtgtgacctgacaaaaacacgtaggggcagggacggtccccacccccagggacacaacccctggtcttggaccagtagaggacacggagggttcagacccctcctcagaccctccccacatctgaaactgcctccccccaaccaccagcagcagcagggccctcctcccccaccagctctccccacagggcccctcagcatcatggagacccgcaggcggggcttagccacccctcaaacccagggccccctggcacctggctctggccgtgttttctggccagaggcccccactttcctaactcgtgctcccttccgccttcttttccgtactgtgaagaaagaactctccaccccagctcccaccctgccctggcctgggtggaggaactgtgcctccatccccagaagaaacagccccctctgctgctggggtgggactgtctgtgtgccctgtgggggtccgtgtgagcaggcccacctggctccagacccgcccccaacctgagacagaaccaggctgagccaggcctccacccccacccccgtttgctgggggctcctccagccgcccccatgggaagaggcctggtaccgcctcacccacagaggtctgtgccaggtgcgcttctgcaggtggagccaagctctccctgaggccagaggcggggcctgggccgggagcccaggggaaggccaggctggaccccggctccacacccacatccagcctgcaggcctctctgcagtcctctcaccctccctcagctccccttcctctgcagtcaccctcagctccccttccttgcccgcctctccccccgccgccccaccagttaaacggatgaccaaagacctttcttatgccggaagcaaaaaccaaaactttttgttggctttttcctttgtcgcctccccagcacctgccctcccagtctcccaccccggccccaggctggaagccctccctccacttaagttattgttttaaaccaaagtttacagtgtctgttggtggccaagaccttctctctccacccctcctccatccaccctgaggaccctggggctcagtggaggcagggccctgcccccctcccttccgctcctgcccagcctgggggaaggagaaaggaggggagaaagcgggctctcaccccctcaggagtgggcacgggagcccttctccctgaccctgggctgcttcctgggggctctccagacccctctctaggaccaagtcacccgtcgtgctgggagtgtggattctagcaaaagagctggaaaaaagtcagactctccacagaccccctatgggggacccccaactcaaggccaaggactgggcgtatcggatgctcataacacccctggcctggcccctttactgagaagactccttggatatttcccaagaaccccccacatacacccctcacaagccacccctcctgagaggcagggggccctccgccccctccccatgtattccccacctgtgttccgtttgaccagcacagaaatattaaacgtcctctattcaccgggccctgtgtgtgtcaccgaggtgcgggaggggaggagcattaaagctgaaagatcgctctgctcggggagcctgggcagagcagcagcaacgtgagggtcgctgtggtggtggtttctgtgagtggatggaatgagcagccctgcaggggcgctgggcatgtgccctcactgtggacagggcccacccacctccggttcccctgtgcctcctgtcccttccacgcttaaacagggttctctgtcattttcctgttttcttccagagtcccaatcctttgccctagttctttcactagtttgaaatccaagttcttgccagagtgttggagcaaggcagctgatttgctgcagggatggagaggaccaccgccgcagggttcttttacctgtgccaccagctctggagacatccacacccattcccaggtgtccttccaggcccattgtccacgtcttcaagggggctgcctggataggcgtgtgtgtgtgtagtgcccaggtgtggtggtggcatcctgaagcagtaggaccattagtgtgcgtgcacacccacgtggcacactgtgtggtgaccatggtcatcatagtgggctcacggcggaaacgggatcattcaacctatacaaaggggaccctggataggctgcaaggaaagaggccaagggccaagctgctaagccaaagatggcccctgacacctcccccagccccagcacaccagcctgcacctcttatcccgtgttaagtcctggttccccacctgctgcccctcctcaacacagagcccctcccgccgcctcagacccctgtgcacatccccagggcctcagccgtctcattggtctttattttttattttttttaagatggagtttcgctcttattgcccagactggagtgcagtgatgctatctcggctcactgcaacctttgcctcccaggttcaagtgattctcctgcctcagcctcccaagtagctgggattacaggcgtgcaccaccacgccgggctaaatttttttgtatttttagtagagacggggtttctctatgttggtcaggctgatctcgaactcccgacctcaggtgatccgccagcctcagcctcccaaagtgctgggattacaggcgtgagccactgcacccggctctcactggtcttacgccaccttctggacactccctccttgagggcagaaaggagtcccaggcctgtccctagggacaaggcccagggaagagtgtatttggggagcaggggaggggagggtgttgagaaagctgaactggagtcaatcacccttcccacaaatcaccaaactgctggaactctccagccaaatgctgggagaaggacctggagggtgagtctttgctgacctctctctactctcaggcatgtcttttgtccttttcgtccatctatttctgtctgtcgctcactcgccccgctttctctgtctcaccttcatccactctgcaggcctgctccaccacagccctaatcctctggacgcttgtgtagggcctggggtgaattccctgtcccccatggtacctcgagaggggctggggagctcagcttggtctcagagtctccccaccagatactgtttaaaaaagtagcactgatgtgttttgtaatctgcccctcccagccctccgtggaggctgccagggccttgtacggtaaacctagctgcatgtaatctgtggacaatggcattctctacaatgcaataaaaacaattacccatgaaaaaaaaaaaaaaaaa

SEQ ID NO: 236595 - DNA, 5910 bp, Artificial Sequence
  derived and/or modified sequence
gccgtccctgcggaccggacagtgcggccggcggccggcggccgggacggagcccccagcccgcgaggagggcgcggcgcaggcggcggcggcgcggcggggaggagcccgggccggaaccagggctgggccgggggcggggacgccggggtccgggagcccgggagccggagcgagctgacgagcgtcgcggaaggaccgggaaggaagagcggagccggagcgagccaagcagcccacaaagtgccatgccccggcggggttgaggcgcgcggcggtcggcccggcgcgctgggaggacgcccgggagctgcgcgacgcggggcggcgcggaagggcagccccggcgggcggcggcgggcccgggctgcgaccggagcgagccccatgccccgcgcgggctgacgggccggagcccgcacggagcggccgggcgggacaggtaccgctagagcgacatgatggtggaatctgcctcggagacaatcaggtcggctccatctggtcagaatggcgtgggcagcctctctgggcaagccgatggcagcagcggcggggccacagggacaactgcaagtggcacgggcagggaagtgaccacgggtgcagacagcaatggtgagatgagtcccgcagagctgctgcacttccagcagcaacaggctctccaagtggcccggcagttcctgctgcagcaggcctcaggcctgagctccccagggaacaatgacagcaaacagtctgcctctgctgtgcaggtgcctgtgtcggtggccatgatgtcgccgcagatgcttaccccgcaacagatgcagcagatcctgtcgcccccgcagctgcaggccttgctccagcagcagcaagccctcatgctccagcagctacaggagtactacaagaagcagcaggagcagctccacctgcagctcctcacccagcagcaggctgggaaaccgcagcccaaagaggcactggggaacaagcagctggccttccagcagcagctcctgcaaatgcaacagttgcagcagcagcacctgctcaacctgcagaggcaggggctggtcagcctgcagcccaaccaagcctcggggcccctccagacccttccgcaagctgtttgcccaacagacctgccccagctgtggaagggcgagggtgcccccgggcagcctgccgaggacagcgtcaagcaggaggggctggacctcactggcacggccgccaccgctacctcgtttgccgctccccccaaggtctcaccccccctctcccaccataccctgcccaacggacagcctactgtgctcacatctcggagagacagctcttcccacgaggagacccccggctcccaccccctgtacggacacggagagtgcaagtggccaggctgtgagaccctgtgtgaagacctgggccagtttatcaaacacctcaacacagagcacgccctggatgaccggagtacagcccagtgccgggtacagatgcaggtggtgcagcagctggagatccagctcgccaaggagagcgagcggctgcaggccatgatggcccacctgcacatgcggccctcggagcccaagcccttcagccagccagtgaccgtctctgcagcagactcattcccagatggtctcgtgcaccccccgacctcggccgcagcccctgtcacccctctacggccccctggcctgggctctgcctccctgcatggtgggggcccagcccgtcggagaagcagtgacaagttctgctcccccatctcctcagagctggcccagaatcatgagttctacaagaacgccgacgtccggccccccttcacctacgcctccctcatccgccaggccatcctggaaacccctgacaggcagctgaccctgaatgagatctataactggttcaccaggatgttcgcctatttccgcagaaacactgccacctggaagaacgccgtgcgccacaacctcagcctgcacaagtgcttcgtccgcgtggagaacgtcaagggtgccgtgtggactgtggacgagcgggagtatcagaagcggagaccgccaaagatgacagggagccccaccctggtgaagaacatgatctctggcctcagctatggagcacttaatgccagctaccaggccgccctggccgagagcagcttccccctcctcaacagccctggcatgctgaaccctggctccgccagcagcctgctgcccctcagccacgatgacgtgggtgcccccgtggagccgctgcccagcaacggcagcagcagccctcctcgcctctccccgccccagtacagccaccaggtgcaggtgaaggaggagccagcagaggcagaggaagacaggcagcccgggcctcccctgggcgcccctaaccccagcgcctcggggcctccggaagacagggacctggaggaggagctgccgggagaagaactgtcctaagggcctgtagtgaccggcagggctggggtgagacccctcccttccagaatccaggccccatctcccccaactccacagcccctcccgagcctcaaggcaagtccaggactcagaccggggaggcccgggccagcagctcccagtgtgacctgacaaaaacacgtaggggcagggacggtccccacccccagggacacaacccctggtcttggaccagtagaggacacggagggttcagacccctcctcagaccctccccacatctgaaactgcctccccccaaccaccagcagcagcagggccctcctcccccaccagctctccccacagggcccctcagcatcatggagacccgcaggcggggcttagccacccctcaaacccagggccccctggcacctggctctggccgtgttttctggccagaggcccccactttcctaactcgtgctcccttccgccttcttttccgtactgtgaagaaagaactctccaccccagctcccaccctgccctggcctgggtggaggaactgtgcctccatccccagaagaaacagccccctctgctgctggggtgggactgtctgtgtgccctgtgggggtccgtgtgagcaggcccacctggctccagacccgcccccaacctgagacagaaccaggctgagccaggcctccacccccacccccgtttgctgggggctcctccagccgcccccatgggaagaggcctggtaccgcctcacccacagaggtctgtgccaggtgcgcttctgcaggtggagccaagctctccctgaggccagaggcggggcctgggccgggagcccaggggaaggccaggctggaccccggctccacacccacatccagcctgcaggcctctctgcagtcctctcaccctccctcagctccccttcctctgcagtcaccctcagctccccttccttgcccgcctctccccccgccgccccaccagttaaacggatgaccaaagacctttcttatgccggaagcaaaaaccaaaactttttgttggctttttcctttgtcgcctccccagcacctgccctcccagtctcccaccccggccccaggctggaagccctccctccacttaagttattgttttaaaccaaagtttacagtgtctgttggtggccaagaccttctctctccacccctcctccatccaccctgaggaccctggggctcagtggaggcagggccctgcccccctcccttccgctcctgcccagcctgggggaaggagaaaggaggggagaaagcgggctctcaccccctcaggagtgggcacgggagcccttctccctgaccctgggctgcttcctgggggctctccagacccctctctaggaccaagtcacccgtcgtgctgggagtgtggattctagcaaaagagctggaaaaaagtcagactctccacagaccccctatgggggacccccaactcaaggccaaggactgggcgtatcggatgctcataacacccctggcctggcccctttactgagaagactccttggatatttcccaagaaccccccacatacacccctcacaagccacccctcctgagaggcagggggccctccgccccctccccatgtattccccacctgtgttccgtttgaccagcacagaaatattaaacgtcctctattcaccgggccctgtgtgtgtcaccgaggtgcgggaggggaggagcattaaagctgaaagatcgctctgctcggggagcctgggcagagcagcagcaacgtgagggtcgctgtggtggtggtttctgtgagtggatggaatgagcagccctgcaggggcgctgggcatgtgccctcactgtggacagggcccacccacctccggttcccctgtgcctcctgtcccttccacgcttaaacagggttctctgtcattttcctgttttcttccagagtcccaatcctttgccctagttctttcactagtttgaaatccaagttcttgccagagtgttggagcaaggcagctgatttgctgcagggatggagaggaccaccgccgcagggttcttttacctgtgccaccagctctggagacatccacacccattcccaggtgtccttccaggcccattgtccacgtcttcaagggggctgcctggataggcgtgtgtgtgtgtagtgcccaggtgtggtggtggcatcctgaagcagtaggaccattagtgtgcgtgcacacccacgtggcacactgtgtggtgaccatggtcatcatagtgggctcacggcggaaacgggatcattcaacctatacaaaggggaccctggataggctgcaaggaaagaggccaagggccaagctgctaagccaaagatggcccctgacacctcccccagccccagcacaccagcctgcacctcttatcccgtgttaagtcctggttccccacctgctgcccctcctcaacacagagcccctcccgccgcctcagacccctgtgcacatccccagggcctcagccgtctcattggtctttattttttattttttttaagatggagtttcgctcttattgcccagactggagtgcagtgatgctatctcggctcactgcaacctttgcctcccaggttcaagtgattctcctgcctcagcctcccaagtagctgggattacaggcgtgcaccaccacgccgggctaaatttttttgtatttttagtagagacggggtttctctatgttggtcaggctgatctcgaactcccgacctcaggtgatccgccagcctcagcctcccaaagtgctgggattacaggcgtgagccactgcacccggctctcactggtcttacgccaccttctggacactccctccttgagggcagaaaggagtcccaggcctgtccctagggacaaggcccagggaagagtgtatttggggagcaggggaggggagggtgttgagaaagctgaactggagtcaatcacccttcccacaaatcaccaaactgctggaactctccagccaaatgctgggagaaggacctggagggtgagtctttgctgacctctctctactctcaggcatgtcttttgtccttttcgtccatctatttctgtctgtcgctcactcgccccgctttctctgtctcaccttcatccactctgcaggcctgctccaccacagccctaatcctctggacgcttgtgtagggcctggggtgaattccctgtcccccatggtacctcgagaggggctggggagctcagcttggtctcagagtctccccaccagatactgtttaaaaaagtagcactgatgtgttttgtaatctgcccctcccagccctccgtggaggctgccagggccttgtacggtaaacctagctgcatgtaatctgtggacaatggcattctctacaatgcaataaaaacaattacccatga

SEQ ID NO: 236596 - DNA, 3341 bp, Artificial Sequence
  derived and/or modified sequence
ggggtccgggagcccgggagccggagcgagctgacgagcgtcgcggaaggaccgggaaggaagagcggagccggagcgagccaagcagcccacaaagtgccatgccccggcggggttgaggcgcgcggcggtcggcccggcgcgctgggaggacgcccgggagctgcgcgacgcggggcggcgcggaagggcagccccggcgggcggcggcgggcccgggctgcgaccggagcgagccccatgccccgcgcgggctgacgggccggagcccgcacggagcggccgggcgggacaggtaccgctagagcgacatgatggtggaatctgcctcggagacaatcaggtcggctccatctggtcagaatggcgtgggcagcctctctgggcaagccgatggcagcagcggcggggccacagggacaactgcaagtggcacgggcagggaagtgaccacgggtgcagacagcaatggtgagatgagtcccgcagagctgctgcacttccagcagcaacaggctctccaagtggcccggcagttcctgctgcagcaggcctcaggcctgagctccccagggaacaatgacagcaaacagtctgcctctgctgtgcaggtgcctgtgtcggtggccatgatgtcgccgcagatgcttaccccgcaacagatgcagcagatcctgtcgcccccgcagctgcaggccttgctccagcagcagcaagccctcatgctccagcagctacaggagtactacaagaagcagcaggagcagctccacctgcagctcctcacccagcagcaggctgggaaaccgcagcccaaagaggcactggggaacaagcagctggccttccagcagcagctcctgcaaatgcaacagttgcagcagcagcacctgctcaacctgcagaggcaggggctggtcagcctgcagcccaaccaagcctcggggcccctccagacccttccgcaagcagctgtttgcccaacagacctgccccagctgtggaagggcgagggtgcccccgggcagcctgccgaggacagcgtcaagcaggaggggctggacctcactggcacggccgccaccgctacctcgtttgccgctccccccaaggtctcaccccccctctcccaccataccctgcccaacggacagcctactgtgctcacatctcggagagacagctcttcccacgaggagacccccggctcccaccccctgtacggacacggagagtgcaagtggccaggctgtgagaccctgtgtgaagacctgggccagtttatcaaacacctcaacacagagcacgccctggatgaccggagtacagcccagtgccgggtacagatgcaggtggtgcagcagctggagatccagctcgccaaggagagcgagcggctgcaggccatgatggcccacctgcacatgcggccctcggagcccaagcccttcagccagccagtgaccgtctctgcagcagactcattcccagatggtctcgtgcaccccccgacctcggccgcagcccctgtcacccctctacggccccctggcctgggctctgcctccctgcatggtgggggcccagcccgtcggagaagcagtgacaagttctgctcccccatctcctcagagctggcccagaatcatgagttctacaagaacgccgacgtccggccccccttcacctacgcctccctcatccgccaggccatcctggaaacccctgacaggcagctgaccctgaatgagatctataactggttcaccaggatgttcgcctatttccgcagaaacactgccacctggaagaacgccgtgcgccacaacctcagcctgcacaagtgcttcgtccgcgtggagaacgtcaagggtgccgtgtggactgtggacgagcgggagtatcagaagcggagaccgccaaagatgacagggagccccaccctggtgaagaacatgatctctggcctcagctatggagcacttaatgccagctaccaggccgccctggccgagagcagcttccccctcctcaacagccctggcatgctgaaccctggctccgccagcagcctgctgcccctcagccacgatgacgtgggtgcccccgtggagccgctgcccagcaacggcagcagcagccctcctcgcctctccccgccccagtacagccaccaggtgcaggtgaaggaggagccagcagaggcagaggaagacaggcagcccgggcctcccctgggcgcccctaaccccagcgcctcggggcctccggaagacagggacctggaggaggagctgccgggagaagaactgtcctaagggcctgtagtgaccggcagggctggggtgagacccctcccttccagaatccaggccccatctcccccaactccacagcccctcccgagcctcaaggcaagtccaggactcagaccggggaggcccgggccagcagctcccagtgtgacctgacaaaaacacgtaggggcagggacggtccccacccccagggacacaacccctggtcttggaccagtagaggacacggagggttcagacccctcctcagaccctccccacatctgaaactgcctccccccaaccaccagcagcagcagggccctcctcccccaccagctctccccacagggcccctcagcatcatggagacccgcaggcggggcttagccacccctcaaacccagggccccctggcacctggctctggccgtgttttctggccagaggcccccactttcctaactcgtgctcccttccgccttcttttccgtactgtgaagaaagaactctccaccccagctcccaccctgccctggcctgggtggaggaactgtgcctccatccccagaagaaacagccccctctgctgctggggtgggactgtctgtgtgccctgtgggggtccgtgtgagcaggcccacctggctccagacccgcccccaacctgagacagaaccaggctgagccaggcctccacccccacccccgtttgctgggggctcctccagccgcccccatgggaagaggcctggtaccgcctcacccacagaggtctgtgccaggtgcgcttctgcaggtggagccaagctctccctgaggccagaggcggggcctgggccgggagcccaggggaaggccaggctggaccccggctccacacccacatccagcctgcaggcctctctgcagtcctctcaccctccctcagctccccttcctctgcagtcaccctcagctccccttccttgcccgcctctccccccgccgccccaccagttaaacggatgaccaaagacctttcttatgccggaagcaaaaacc

SEQ ID NO: 236597 - DNA, 2004 bp, Artificial Sequence
  derived and/or modified sequence
atgatggtggagagcgcgtcagaaacaatcaggtcggccccaagcggacaaaatggcgtgggctcactgtcaggacaggccgacggaagtagtggtggagccactggaaccacagctagtgggacgggccgcgaagtaacaaccggcgctgactccaacggggaaatgagtccagccgaactgctacatttccagcagcagcaagctctccaagttgcaagacagtttttgcttcagcaggcatctgggttgagtagcccgggcaataatgactcaaaacagtcagcatctgctgtccaggtcccagttagcgtggcaatgatgagcccccaaatgctgacgccccagcagatgcagcaaatcctgagccccccacaactgcaggctttactgcaacagcagcaagcactgatgctgcagcaactacaggagtactacaaaaaacagcaggagcaactgcatctccaactgttgacccaacagcaggccgggaaaccacagcctaaagaagcgcttggtaataagcagttagccttccagcagcagctcctccagatgcaacaactgcagcagcagcacctgctgaacttacagagacaaggactggtttcgttacaacctaaccaggcctctggtcctctgcaaactttgccccaagccgtatgccccacagacctgccacagctttggaagggcgaaggggctccaggacagcccgccgaggactccgtaaagcaggaggggcttgacttaactggcaccgccgcgacagccacctcttttgctgcgccgcccaaagtgtctccaccattgagccaccatactctgccgaacggacagccaacagtgctaacctctcgccgagacagtagctcccacgaagaaacaccgggctctcaccctctgtacggccacggtgaatgtaagtggcctggctgtgagacgctatgcgaggacctgggtcaattcattaagcaccttaatacagagcatgcccttgatgataggtcaacagcccaatgtcgagtacagatgcaggtggtgcagcaattagagattcagctggccaaagagagtgagcgcttgcaggccatgatggctcacctgcacatgagaccatctgagccgaaacccttctctcagcctgtcacagtatctgcagccgattctttccccgatggtttggtccatcccccaacaagtgcggcggctccggttacgcctctcagacctccgggcttaggtagcgccagcctccacggtggcgggcctgccagaagacgctcttccgacaaattttgctcacccatttcttcagagttggcccagaaccatgagttctacaaaaacgccgacgttcgtcccccctttacatacgccagccttattagacaggcgattcttgagacccctgataggcagctgacactgaatgaaatatacaattggttcacccgaatgttcgcttactttcgacggaataccgctacttggaaaaatgccgtacgtcacaacctctcactacacaagtgcttcgttagagtggagaacgtcaaaggtgcggtttggactgttgacgagagggaataccagaaaaggaggccccccaaaatgaccggctctcctactctggtgaagaatatgatctctggattgagttacggcgcactaaatgcgtcttaccaagctgctcttgccgagagttctttccctctgttaaactccccggggatgttgaacccaggctctgcctcttcgctattgccgctgtctcatgacgacgtgggggctccagtcgagcctctaccttccaacggctcttcatctcccccaaggctctccccacctcagtactctcaccaggtccaggtgaaagaggagcccgccgaggccgaagaagataggcagcctggaccccctctcggggcccctaacccatccgccagcgggccaccagaagaccgggatctggaagaggaacttcccggcgaggagctgagttag

SEQ ID NO: 236598 - DNA, 2007 bp, Artificial Sequence
  derived and/or modified sequence
atgatggtggagtcagcaagcgagacaattcgctcagccccttctggccaaaacggggtggggtctctgagcggccaggctgacggaagcagcgggggagcaaccggcaccaccgcctcaggtaccgggagagaggtaacaacaggtgctgacagcaatggtgaaatgtcgccggcagaactgctgcactttcaacagcaacaggccttgcaggtcgcgcgccagtttctcttacagcaggcaagcggcctgtcttcacctggaaataatgacagcaaacagtcggcttccgcggtccaggtgccggtctcagtggccatgatgtcaccacagatgctgacaccacagcagatgcagcagattttatctccccctcaactccaggcactactgcagcagcagcaggctctcatgctacaacagctgcaagagtattacaagaagcaacaagaacagctgcacctgcagctgttgacgcagcaacaagcaggcaagccacaacctaaggaggctcttgggaacaagcaactcgcgttccagcaacagcttctgcagatgcagcagctgcaacagcagcatcttctgaacctgcagcgccagggactggtgagtctgcagccaaaccaggcctctggcccactccagacactgccccaggctgcagtgtgcccaacagacttgccacagctatggaagggcgaaggggccccaggacagcctgccgaggatagtgttaaacaggagggactggacttgaccggtaccgccgctactgccacaagcttcgccgcacctcccaaggttagccctcctctgtctcatcacacactacctaatggacagcctaccgtgcttacatccaggcgcgacagctctagtcacgaggagactcccgggagccacccattgtacggtcacggcgagtgtaagtggcctgggtgtgaaactctgtgcgaggatctgggacagtttatcaagcacttgaacaccgaacacgctttggatgatcggagtacagcacagtgtagggtacagatgcaggtggtgcaacagcttgaaatccaattagccaaggagagtgaaaggctgcaggcaatgatggctcatctccatatgaggccctctgagcctaagcctttttcacagccagtgaccgtgtccgctgctgactccttccccgatgggctagtgcaccctcccacctctgctgctgcccctgtcaccccgcttaggcctcccggactgggaagtgccagtctgcacggagggggaccagccagacgacgctccagtgacaagttctgcagccccatctcatcagaactggctcaaaaccacgagttctataaaaacgcagatgttcgccctccctttacctatgcctctttgatccgtcaggcaattctagaaacgccagacagacagttgacactaaatgaaatctataattggtttacacgcatgttcgcttactttcgcaggaataccgccacatggaaaaacgccgttagacacaatttatccctgcataagtgcttcgtgcgtgtggaaaatgtcaagggcgctgtgtggacagttgatgagcgcgaataccagaagcgtaggcctcccaagatgacaggttccccgacattggttaagaatatgatctctgggctgtcgtacggagcactcaatgcttcataccaggctgccctggccgaaagctcctttccgttgctcaattctccaggaatgcttaatcccggtagcgcctcaagtctactgcctctcagccacgacgacgttggagcacccgtagagcccttgccctccaacggatcctcgagtcccccccgtctgagtccgccccagtacagccatcaggtccaagtgaaagaagagcctgccgaggccgaggaggacaggcagcctggaccccccctgggcgcgccaaatccctctgcttccggaccccccgaggacagggacttagaggaggagttgccaggagaggagctgtcatag

SEQ ID NO: 236599 - DNA, 2004 bp, Artificial Sequence
  derived and/or modified sequence
atgatggtggagagcgccagcgagaccatccgcagcgcccccagcggccagaatggagtgggcagcctgagcggccaggctgatggcagcagtggaggagccaccggcaccacagccagcggcaccggccgggaggtgaccaccggggctgacagcaatggagagatgagccctgctgagctgctgcacttccagcagcagcaggccctgcaggtggcccggcagttcctgctgcagcaggccagcggcctgagcagccctggcaacaatgacagcaagcagagcgccagcgctgtgcaggtgcctgtgtctgtggccatgatgagcccccagatgctgaccccccagcagatgcagcagatcctgagccccccccagctgcaggccctgctgcagcagcagcaggccctgatgctgcagcagctgcaggagtactacaagaagcagcaggagcagctgcacctgcagctgctgacccagcagcaggccggcaagccccagcccaaggaggccctgggcaacaagcagctggccttccagcagcagctgctgcagatgcagcagctgcagcagcagcacctgctgaacctgcagaggcagggcctggtgtccctgcagcccaaccaggccagcggccccctgcagaccctgccccaggccgtgtgccccacagacctgccccagctgtggaagggggagggcgcccctggccagcctgcagaagattctgtgaagcaggagggcctggacctgaccggcacagctgccacagccaccagctttgctgccccacccaaggtgtccccacccctgagccaccacaccctgcccaacggccagcccaccgtgctgaccagcagaagagacagcagcagccatgaggagaccccaggcagccaccccctgtatggccatggagagtgcaagtggccaggctgtgagaccctgtgtgaggacctgggccagttcatcaagcacctgaacacagaacatgccctggatgacaggagcacagcccagtgccgggtgcagatgcaggtggtgcagcagctggagatccagctggccaaggagagcgagcggctgcaggccatgatggcccacctgcacatgaggcccagcgagcccaagcccttcagccagcctgtgacagtgtctgctgctgacagcttcccagatggcctggtgcacccccccaccagcgctgctgcccctgtgacccccctgcggcccccaggcctgggcagcgccagcctgcacggcggcggccctgccaggagaagaagcagtgacaagttctgcagccccatcagcagcgagctggcccagaaccacgagttctacaagaatgctgatgtgcggccccccttcacctacgccagcctcatccggcaggccatcctggagaccccagaccggcagctgaccctgaatgagatctacaactggttcaccaggatgtttgcctacttcagaagaaacacagccacctggaagaatgctgtgcgccacaacctgagcctgcacaagtgctttgtgcgggtggagaatgtgaagggagctgtgtggacagtggatgagcgggagtaccagaagagaagaccacccaagatgacaggcagccccaccctggtgaagaacatgatcagcggcctgtcctatggagccctgaatgccagctaccaggccgccctggccgagagcagcttccccctgctgaacagccctggcatgctgaaccctggcagcgccagcagcctgctgcccctgagccatgatgatgtgggcgcccctgtggagcccctgcccagcaatggcagcagcagccccccccggctgagccccccccagtacagccaccaggtgcaggtgaaggaggagcctgctgaggccgaggaggaccggcagcccggcccccccctgggcgcccccaaccccagcgccagcggccccccagaagatcgggacctggaggaggagctgcccggggaggagctgtcctag

SEQ ID NO: 236600 - DNA, 2007 bp, Artificial Sequence
  derived and/or modified sequence
atgatggtggagagcgccagcgagaccatccgcagcgcccccagcggccagaatggagtgggcagcctgagcggccaggctgatggcagcagtggaggagccaccggcaccacagccagcggcaccggccgggaggtgaccaccggggctgacagcaatggagagatgagccctgctgagctgctgcacttccagcagcagcaggccctgcaggtggcccggcagttcctgctgcagcaggccagcggcctgagcagccctggcaacaatgacagcaagcagagcgccagcgctgtgcaggtgcctgtgtctgtggccatgatgagcccccagatgctgaccccccagcagatgcagcagatcctgagccccccccagctgcaggccctgctgcagcagcagcaggccctgatgctgcagcagctgcaggagtactacaagaagcagcaggagcagctgcacctgcagctgctgacccagcagcaggccggcaagccccagcccaaggaggccctgggcaacaagcagctggccttccagcagcagctgctgcagatgcagcagctgcagcagcagcacctgctgaacctgcagaggcagggcctggtgtccctgcagcccaaccaggccagcggccccctgcagaccctgccccaggccgctgtgtgccccacagacctgccccagctgtggaagggggagggcgcccctggccagcctgctgaggacagcgtgaagcaggagggcctggacctgactggaacagctgccacagccaccagctttgctgccccacccaaggtgagcccccccctgagccaccacaccctgcccaacggccagcccaccgtgctgaccagccggcgggacagcagcagccatgaggagaccccaggcagccaccccctgtatggccacggggagtgcaagtggccaggctgtgagaccctgtgtgaggacctgggccagttcatcaagcacctgaacacagagcacgccctggatgacaggagcacagcccagtgccgggtgcagatgcaggtggtgcagcagctggagatccagctggccaaggagagcgagcggctgcaggccatgatggcccacctgcacatgaggccttctgagcccaagcccttcagccagcctgtgacagtgtctgctgctgacagcttcccagatggcctggtgcacccccccaccagcgctgctgcccctgtgacccccctgcggcccccaggcctgggcagcgccagcctgcatggaggcggccctgcccggcggcgcagcagtgacaagttctgcagccccatcagcagcgagctggcccagaaccacgagttctacaagaatgctgatgtgcggccccccttcacctacgccagcctcatccggcaggccatcctggagaccccagaccggcagctgaccctgaatgagatctacaactggttcaccaggatgtttgcctacttcagaagaaacacagccacctggaagaatgctgtgcgccacaacctgagcctgcacaagtgctttgtgcgggtggagaatgtgaagggagctgtgtggacagtggatgagcgggagtaccagaagaggcggccccccaagatgacaggcagccccaccctggtgaagaacatgatcagcggcctgtcctatggagccctgaatgccagctaccaggccgccctggccgagagcagcttccccctgctgaacagccctggcatgctgaaccctggcagcgccagcagcctgctgcccctgagccatgatgatgtgggcgcccctgtggagcccctgcccagcaatggcagcagcagccccccccggctgagccccccccagtacagccaccaggtgcaggtgaaggaggagcctgctgaggccgaggaggaccggcagcccggcccccccctgggcgcccccaaccccagcgccagcggccccccagaggaccgggacctggaggaggagctgcctggagaggagctgtcctag

SEQ ID NO: 236601 - DNA, 2004 bp, Artificial Sequence
  derived and/or modified sequence
atgatggtggagagcgccagcgagaccatccggagcgcccccagcggccagaacggagtagggtccctcagtggacaggcagacggatcaagcggaggcgctactggcaccaccgccagtggaaccggcagagaagtaacaactggcgctgactcgaacggcgaaatgtcccctgccgagctgctgcacttccagcagcagcaggcgctgcaggttgcccgccaatttctgctccagcaagccagcggtttatcgtcccccggcaacaatgattccaagcagagcgctagcgccgttcaggtgcctgtgtcagtcgcgatgatgtctccccaaatgcttacaccacagcagatgcagcagattctctcgccccctcagttgcaggcactgttgcagcagcagcaagctctgatgcttcaacagcttcaggagtattacaaaaagcagcaggaacaattacatcttcaacttctgacgcagcagcaggcaggcaagccgcagcccaaagaggcgctcggcaataagcagcttgcgtttcagcagcaactcctccaaatgcagcaactacagcagcagcatctgctgaatctgcagaggcaggggctggtgagcctgcagccaaaccaagcttctggaccactgcagacgctgccccaggctgtgtgcccaacggatctcccacagttgtggaaaggggaaggcgctcctggacagcccgctgaggacagcgtaaaacaagagggactggacctgactggtaccgctgcgaccgccacgagctttgccgccccaccgaaggtgtctcctcctttgagccaccatacactgcctaacggacagcctaccgttttgacctcccggcgtgactcttctagccacgaagagaccccgggaagccaccctctctatgggcatggcgaatgcaaatggcccgggtgtgaaactctctgcgaagacttgggccagttcatcaaacatctgaacactgagcacgccctagacgatagaagtacggcccagtgtcgggtgcagatgcaggttgtacagcaactagaaatccaactcgcaaaggaaagcgagcggttgcaggcaatgatggcacacctccacatgcgcccgagcgaaccaaagccgttttcacagccagttacagtgtcagctgccgattcattcccggacgggctggtgcacccaccaacgtccgctgccgcccctgtgactcccctgcgcccaccaggactaggcagcgcctcattgcatggcggtggacccgcgaggaggaggtcaagcgacaagttttgcagccccatcagtagcgagctagcacaaaaccacgagttttataagaacgccgatgttagaccaccatttacatacgcgagtctgataagacaggctatactcgaaacacccgatcgacagttaaccctgaatgagatctataactggtttacacggatgttcgcctacttccgtcggaataccgccacatggaagaacgccgttcggcacaacttgagtctgcacaagtgttttgtccgggttgagaatgtcaaaggcgccgtgtggacagtggacgagcgtgaatatcagaagaggcgccctccgaagatgactggctccccgaccctcgtgaagaacatgatcagcggactgagttacggtgcgttaaatgcaagttatcaggcagctctggcggagagctcctttccgctgctgaactccccaggcatgctgaatcctgggagcgcatctagcctattgcctcttagtcacgacgatgtaggtgctcccgtggagcctctcccttcaaatgggagcagttcccctcccagactcagcccgcctcaatacagccaccaagtgcaggttaaggaagagccagcagaggccgaggaggatagacagccaggcccccccttaggagcacccaacccatctgccagcgggccaccagaagatagggaccttgaggaggaacttccaggggaggaactgtcctag

SEQ ID NO: 236602 - DNA, 2007 bp, Artificial Sequence
  derived and/or modified sequence
atgatggtggagagcgccagcgagaccatccggagcgcccccagcggccagaatggggtgggcagtctctcagggcaggctgatggaagcagcggcggcgccactggcactactgcttctggaactggccgggaggtgaccaccggagccgattcaaatggcgaaatgagccctgcagaacttttgcactttcaacagcagcaggccctacaggtggcacgccagtttctgctgcagcaggctagtggcctgagtagccccggcaacaacgactctaaacagtctgccagtgcggtgcaggtcccagtcagcgtggccatgatgtcacctcagatgctgaccccacaacagatgcagcagattctgtcccctccccagctgcaggctctgctacagcagcaacaggcactgatgcttcagcagctccaggagtactacaaaaaacagcaagagcagctgcacttacaattgctcacccagcaacaggccggtaaacctcagccaaaagaggctctagggaacaaacagcttgctttccagcagcagctattacaaatgcaacagttgcagcaacagcacttactcaatctgcagcgacagggcctcgtgagtctacagccaaaccaggcttctggccccttacagaccctccctcaagcagcagtatgccccactgacctgccccagctttggaaaggcgaaggtgcccctggtcagccagcggaggattccgtgaagcaggagggtttagatctgaccgggaccgctgctaccgctacaagttttgcagcccctcctaaagtgtctcctcccctgtcccatcacacactgccaaacggacagccaaccgtgcttacatctcgaagagatagctcctctcatgaagaaactcctgggagccacccactctatggacatggcgaatgtaaatggccaggatgcgagacactttgtgaagacctgggccagtttatcaagcacctgaacacagaacatgccctagatgaccgctctaccgcccagtgcagggttcagatgcaggtggtgcagcagctcgaaatacagctggctaaagagtctgaaaggctgcaggcaatgatggcacatctgcatatgcgcccatccgaaccaaagccctttagccagcctgtgacagtctctgccgcagactccttccctgacggactggtgcaccccccaacctctgccgccgccccggttactcccctgcggcctcctggacttgggtccgcgagcttgcatggtgggggcccagcccggaggcggtctagtgacaagttttgtagccctatatcaagcgagctggcccagaatcacgaattttacaagaacgccgatgtccgccctccctttacatacgcctctcttattcgtcaggcgatccttgagactcctgatagacaactcacactgaatgaaatctataattggttcactcggatgtttgcctactttcgtcggaatacagcaacctggaaaaacgcagtccggcataatttatccttgcacaaatgttttgtgcgcgtggaaaacgttaagggggcggtgtggaccgtggatgagcgtgaataccaaaaacggcgtcccccaaagatgaccggaagccccacactggttaagaacatgatcagcggacttagctacggggctttgaacgcctcttatcaggcagcactggctgagtcttcattcccactcttgaactcccccggtatgctcaaccccggcagcgcgagctctctgctgccattgagccatgacgacgtcggagctccagtggaacctctcccctccaacggctcctcatctcctccacggctgtccccccctcagtatagccatcaggttcaggtcaaggaagagcccgctgaggcagaggaggatcgacagccaggacctccgttaggggcgcccaatccctccgctagcggtccaccggaggatcgggacctcgaggaggagttgcccggagaggaactgtcctag

SEQ ID NO: 236603 - DNA, 2004 bp, Artificial Sequence
  derived and/or modified sequence
atgatggtcgagagcgcgagtgagactataaggagtgctccttcgggccagaatggggtggggtctcttagcgggcaggcggacgggagtagcgggggagctaccggtactaccgcctcgggcaccggacgtgaggtgacaaccggagcagattcgaatggcgaaatgtctccagcagagctgctgcatttccagcagcaacaggcgctgcaggtggcccgacagtttctactccaacaggccagtgggctcagcagccccggaaataacgattccaagcagagtgcctcagccgtgcaagtgcctgtgagcgtcgctatgatgtcaccccagatgctcacccctcaacagatgcagcaaattctgtcaccacctcagctccaggccctcctgcagcagcaacaggcgctaatgctgcagcagttacaagagtactacaaaaagcagcaagagcagctccatcttcagctcctcacccagcaacaggcagggaaaccccagcctaaggaagcccttggcaataagcaattagcatttcaacagcagctgctacaaatgcagcagcttcagcaacagcatcttcttaatttacaacgtcaaggcctagtctcactgcagccaaaccaggctagtgggcctctccagacgttgccccaagcggtctgcccaacagacctaccacaactgtggaagggcgagggcgcacctgggcagccagctgaggatagtgtgaagcaagagggtctggacttaaccggcacggcagctaccgctacttccttcgcagcaccccctaaagtctccccacctctgagccaccatacgctgcccaacgggcagcccactgttttgacatcccgccgagactctagttctcatgaggaaacaccaggctcccacccactgtacggccacggagagtgtaagtggcctggctgtgagacactttgtgaagacctcggtcagtttattaaacacctcaacactgagcatgctctggacgacaggtcaaccgcacagtgtagagttcagatgcaggtcgttcagcaactggagatacagttggctaaagagtctgaacgcttacaagcgatgatggcccacctgcatatgagaccttctgagcctaagcccttcagccaacccgtgactgtttcagctgccgactcattccctgacggcctggttcatcctcccacctctgccgctgccccagtgacgccactgcgaccccctgggttaggtagtgccagtctgcacggcggaggtcccgcaaggagacgatcttctgataagttctgttcaccgatatcctctgaactggcacaaaaccacgaattttacaagaatgccgatgtacggcctccttttacctatgcgtctctgatcagacaggccattctcgaaacacccgatcgccaactgaccctgaatgaaatatataactggttcactagaatgtttgcgtacttcaggcggaatacagccacctggaaaaacgcagttagacacaacctgtcactccacaagtgtttcgttcgggttgagaacgtgaagggcgctgtgtggactgtggatgagagagaatatcaaaaaaggagacctcccaaaatgaccggctcccctaccctggttaaaaatatgatatccgggctctcctacggtgctttgaacgcctcttaccaggctgcactggcagagtcatcttttccccttcttaatagcccgggtatgctgaaccctggttcagcgtcttccttgttgcctctctctcatgatgacgtgggagcgcctgtcgagcctctgccaagcaatgggtctagctcgcctccccgattgtctccgccacagtactcacaccaagtacaagtaaaagaggaacctgccgaagccgaggaggaccggcagccgggacctcccctgggagccccaaatccgagcgcttccggtcctcccgaggatcgtgaccttgaggaggaactcccaggagaagaattaagctag

SEQ ID NO: 236604 - DNA, 2007 bp, Artificial Sequence
  derived and/or modified sequence
atgatggttgagtcagcttccgagaccatccgaagcgcaccttctgggcagaacggtgttggatctcttagcgggcaggccgacggctcctccggcggagctacaggaaccacagcctcggggacggggcgagaggttacgacgggggctgacagcaacggtgagatgagccccgcagagctccttcattttcaacagcagcaggccctacaggtggcccgacagttcctgttacagcaggcatccgggttatcgtcccctggcaacaacgactccaaacagtcagcttccgctgtacaggttccagtctctgtcgctatgatgagtcctcagatgcttacaccccagcagatgcagcaaatattgagtccaccgcagttgcaggccttactccagcaacagcaggctcttatgctgcagcagcttcaagagtactacaaaaagcaacaggagcagctgcacctgcagctgcttacccaacaacaggctggcaaacctcaacccaaggaggcactgggtaacaagcaactggcattccagcagcaactcctccagatgcaacaactccaacagcagcatcttctgaatcttcagaggcagggtctggtctccctgcaacctaaccaggcctcagggccattacaaacactcccccaggccgcagtttgcccaaccgacttaccccagttatggaaaggcgagggcgcacccggacagcctgcagaggattccgtcaaacaggaggggcttgacctgactgggaccgcggcaaccgcaacgagctttgctgccccacctaaggtgtcgccgccattaagtcatcatacgctgcctaacggacagcctaccgttctaacctcacgtagagactcaagctcccacgaagagacaccaggatcgcatcctctttatgggcatggcgagtgcaaatggcctggatgtgaaacattatgtgaagatttgggtcagttcataaagcacctgaataccgagcacgccctggacgaccgatccacggcccagtgtcgagtgcagatgcaggtggttcagcagctggaaatacagctggctaaggagtctgaaagactacaggctatgatggcccatctgcatatgcggccttccgagcctaagccctttagccagcccgtgacagtgtccgcggctgacagctttccagatggcttagttcatcctcctacaagtgcggcagccccagtcacccccctgagaccaccagggctcgggtctgcctccctgcatggcggaggcccagccagacgcaggagcagcgacaaattttgctcaccaatctccagcgaactcgctcagaatcacgaattttacaaaaatgcagatgtgagaccaccgttcacatatgcatccctgatcaggcaggccatactcgagactcctgatagacagcttactctgaatgagatttacaattggttcacccgaatgttcgcctacttcaggcgaaacaccgccacttggaagaatgcagttagacataacctgagcttgcataaatgttttgtacgggtcgagaatgtcaagggagccgtctggaccgtggacgagagggaatatcagaagaggcgccctcccaagatgacagggtcacccacactggtcaaaaatatgatcagtggactctcttatggtgctctgaatgccagttaccaggctgccctcgcggagagctccttcccacttcttaattctccgggaatgctgaatcccggtagcgcgagttcacttctcccactcagtcacgacgacgtaggcgcacctgtagaaccactgcctagcaatggctctagctctccaccccgtctctcaccaccccaatattcacaccaggtacaggtgaaggaggaaccagccgaagccgaggaggatcggcaacccggtccaccattaggggcacccaaccctagcgcctctggcccacctgaagatcgcgacctggaagaggaattacccggagaggaactgtcatag

SEQ ID NO: 236605 - DNA, 2004 bp, Artificial Sequence
  derived and/or modified sequence
atgatggtggagagcgccagcgagaccatcagaagcgcccccagcggccagaacggcgtgggcagcctgagcggccaggccgacggcagcagcggcggcgccaccggcaccaccgccagcggcaccggcagagaggtgaccaccggcgccgacagcaacggcgagatgagccccgccgagctgctgcacttccagcagcagcaggccctgcaggtggccagacagttcctgctgcagcaggccagcggcctgagcagccccggcaacaacgacagcaagcagagcgccagcgccgtgcaggtgcccgtgagcgtggccatgatgagcccccagatgctgaccccccagcagatgcagcagatcctgagccccccccagctgcaggccctgctgcagcagcagcaggccctgatgctgcagcagctgcaggagtactacaagaagcagcaggagcagctgcacctgcagctgctgacccagcagcaggccggcaagccccagcccaaggaggccctgggcaacaagcagctggccttccagcagcagctgctgcagatgcagcagctgcagcagcagcacctgctgaacctgcagagacagggcctggtgagcctgcagcccaaccaggccagcggccccctgcagaccctgccccaggccgtgtgccccaccgacctgccccagctgtggaagggcgagggcgcccccggccagcccgccgaggacagcgtgaagcaggagggcctggacctgaccggcaccgccgccaccgccaccagcttcgccgccccccccaaggtgagcccccccctgagccaccacaccctgcccaacggccagcccaccgtgctgaccagcagaagagacagcagcagccacgaggagacccccggcagccaccccctgtacggccacggcgagtgcaagtggcccggctgcgagaccctgtgcgaggacctgggccagttcatcaagcacctgaacaccgagcacgccctggacgacagaagcaccgcccagtgcagagtgcagatgcaggtggtgcagcagctggagatccagctggccaaggagagcgagagactgcaggccatgatggcccacctgcacatgagacccagcgagcccaagcccttcagccagcccgtgaccgtgagcgccgccgacagcttccccgacggcctggtgcacccccccaccagcgccgccgcccccgtgacccccctgagaccccccggcctgggcagcgccagcctgcacggcggcggccccgccagaagaagaagcagcgacaagttctgcagccccatcagcagcgagctggcccagaaccacgagttctacaagaacgccgacgtgagaccccccttcacctacgccagcctgatcagacaggccatcctggagacccccgacagacagctgaccctgaacgagatctacaactggttcaccagaatgttcgcctacttcagaagaaacaccgccacctggaagaacgccgtgagacacaacctgagcctgcacaagtgcttcgtgagagtggagaacgtgaagggcgccgtgtggaccgtggacgagagagagtaccagaagagaagaccccccaagatgaccggcagccccaccctggtgaagaacatgatcagcggcctgagctacggcgccctgaacgccagctaccaggccgccctggccgagagcagcttccccctgctgaacagccccggcatgctgaaccccggcagcgccagcagcctgctgcccctgagccacgacgacgtgggcgcccccgtggagcccctgcccagcaacggcagcagcagcccccccagactgagccccccccagtacagccaccaggtgcaggtgaaggaggagcccgccgaggccgaggaggacagacagcccggcccccccctgggcgcccccaaccccagcgccagcggcccccccgaggacagagacctggaggaggagctgcccggcgaggagctgagctag

SEQ ID NO: 236606 - DNA, 2007 bp, Artificial Sequence
  derived and/or modified sequence
atgatggtggagagcgccagcgagaccatcagaagcgcccccagcggccagaacggcgtgggcagcctgagcggccaggccgacggcagcagcggcggcgccaccggcaccaccgccagcggcaccggcagagaggtgaccaccggcgccgacagcaacggcgagatgagccccgccgagctgctgcacttccagcagcagcaggccctgcaggtggccagacagttcctgctgcagcaggccagcggcctgagcagccccggcaacaacgacagcaagcagagcgccagcgccgtgcaggtgcccgtgagcgtggccatgatgagcccccagatgctgaccccccagcagatgcagcagatcctgagccccccccagctgcaggccctgctgcagcagcagcaggccctgatgctgcagcagctgcaggagtactacaagaagcagcaggagcagctgcacctgcagctgctgacccagcagcaggccggcaagccccagcccaaggaggccctgggcaacaagcagctggccttccagcagcagctgctgcagatgcagcagctgcagcagcagcacctgctgaacctgcagagacagggcctggtgagcctgcagcccaaccaggccagcggccccctgcagaccctgccccaggccgccgtgtgccccaccgacctgccccagctgtggaagggcgagggcgcccccggccagcccgccgaggacagcgtgaagcaggagggcctggacctgaccggcaccgccgccaccgccaccagcttcgccgccccccccaaggtgagcccccccctgagccaccacaccctgcccaacggccagcccaccgtgctgaccagcagaagagacagcagcagccacgaggagacccccggcagccaccccctgtacggccacggcgagtgcaagtggcccggctgcgagaccctgtgcgaggacctgggccagttcatcaagcacctgaacaccgagcacgccctggacgacagaagcaccgcccagtgcagagtgcagatgcaggtggtgcagcagctggagatccagctggccaaggagagcgagagactgcaggccatgatggcccacctgcacatgagacccagcgagcccaagcccttcagccagcccgtgaccgtgagcgccgccgacagcttccccgacggcctggtgcacccccccaccagcgccgccgcccccgtgacccccctgagaccccccggcctgggcagcgccagcctgcacggcggcggccccgccagaagaagaagcagcgacaagttctgcagccccatcagcagcgagctggcccagaaccacgagttctacaagaacgccgacgtgagaccccccttcacctacgccagcctgatcagacaggccatcctggagacccccgacagacagctgaccctgaacgagatctacaactggttcaccagaatgttcgcctacttcagaagaaacaccgccacctggaagaacgccgtgagacacaacctgagcctgcacaagtgcttcgtgagagtggagaacgtgaagggcgccgtgtggaccgtggacgagagagagtaccagaagagaagaccccccaagatgaccggcagccccaccctggtgaagaacatgatcagcggcctgagctacggcgccctgaacgccagctaccaggccgccctggccgagagcagcttccccctgctgaacagccccggcatgctgaaccccggcagcgccagcagcctgctgcccctgagccacgacgacgtgggcgcccccgtggagcccctgcccagcaacggcagcagcagcccccccagactgagccccccccagtacagccaccaggtgcaggtgaaggaggagcccgccgaggccgaggaggacagacagcccggcccccccctgggcgcccccaaccccagcgccagcggcccccccgaggacagagacctggaggaggagctgcccggcgaggagctgagctag

SEQ ID NO: 236607 - protein, 293 aa, Artificial Sequence
  derived and/or modified sequence
MTGLYELVWRVLHALLCLHRTLTSWLRVRFGTWNWIWRRCCRAASAAVLAPLGFTLRKPPAVGRNRRHHRHPRGGSCLAAAHHRMRWRADGRSLEKLPVHMGLVITEVEQEPSFSDIASLVVWCMAVGISYISVYDHQGIFKRNNSRLMDEILKQQQELLGLDCSKYSPEFANSNDKDDQVLNCHLAVKVLSPEDGKADIVRAAQDFCQLVAQKQKRPTDLDVDTLASLLSSNGCPDPDLVLKFGPVDSTLGFLPWHIRLTEIVSLPSHLNISYEDFFSALRQYAACEQRLGK

SEQ ID NO: 236608 - DNA, 882 bp, Artificial Sequence
  derived and/or modified sequence
atgaccggactttatgaacttgtctggcgcgtcctgcacgcattactctgccttcatcggacccttacttcatggctgagggtgagatttgggacatggaattggatctggcgacggtgctgcagagcagcatcagcagcggtactggctccactcggcttcacactgaggaagccgccagcagtgggaaggaatcgcagacaccatcgacatccccggggcggctcctgcctggcagccgcccatcaccgaatgcgctggcgtgcagacggccggagcctcgagaagctacccgtccacatggggctcgtaattactgaggtcgagcaggaaccatctttctcggatatagcctctctggttgtttggtgcatggcagtcgggattagctacatatcagtctacgatcaccagggaatcttcaaaagaaacaactcccgactcatggacgagattcttaaacaacagcaggaacttctgggactggattgcagcaagtattcccctgaattcgccaactctaatgataaagacgaccaggtgctaaactgccatttggccgtgaaagtgttgtcaccagaggacggcaaagcggatatcgtgcgagctgcccaggacttctgccaactggtggctcaaaagcagaaacggccaactgacttggacgtcgataccctcgcaagcctactgtctagcaatgggtgtcccgacccagacctagtcctcaaattcggccctgtggacagcacactgggattccttccatggcacataagactgacagaaatagtgagccttccctcacacctcaacattagctacgaggatttcttctccgcactgagacaatatgctgcctgcgagcagcggttaggcaagtag

SEQ ID NO: 236609 - DNA, 882 bp, Artificial Sequence
  derived and/or modified sequence
atgacaggcctgtatgagctggtgtggagggtgctgcacgccctgctgtgcctgcacaggaccctgacctcctggctgcgggtgcgcttcggcacctggaactggatctggaggcgctgctgcagagctgccagcgctgctgtgctggcccccctgggcttcaccctgaggaagcccccagctgtgggcaggaacagaagacaccaccgccacccccggggcggcagctgcctggccgccgcccaccacaggatgcgctggagggcagatggccgcagcctggagaagctgcctgtgcacatgggcctggtgatcacagaggtggagcaggagcccagcttcagtgacatcgccagcctggtggtgtggtgcatggctgtgggcatctcctacatctctgtgtatgaccaccagggcatcttcaagaggaacaacagccggctgatggatgagatcctgaagcagcagcaggagctgctgggcctggactgcagcaagtacagccctgagtttgccaacagcaatgacaaggatgaccaggtgctgaactgccacctggccgtgaaggtgctgagcccagaagatggcaaggctgacatcgtgcgggccgcccaggacttctgccagctggtggcccagaagcagaagaggcccacagacctggatgtggacaccctggccagcctgctgagcagcaatggctgcccagaccctgacctggtgctgaagtttggacctgtggacagcaccctgggcttcctgccctggcacatccggctgacagaaattgtgtccctgcccagccacctgaacatctcctatgaggacttcttcagcgccctgcggcagtatgctgcctgtgagcagaggctgggcaagtag

SEQ ID NO: 236610 - DNA, 882 bp, Artificial Sequence
  derived and/or modified sequence
atgaccggcctgtacgagctggtgtggcgggtgctgcacgccctgctgtgtctgcacaggacccttacgtcctggctcagagtacggttcgggacctggaactggatctggagaagatgttgtcgagcagcgtcggcggcagtcctggctccgctcggctttactctgcgcaagccccctgccgtggggcggaatagaaggcaccatcgccacccccgaggaggctcctgtctcgccgccgcccaccatcgcatgagatggcgtgctgatggcagatccttggagaaactgccagttcacatgggccttgtaattacggaggtggaacaggaaccgtcttttagtgacattgctagcttggtagtctggtgcatggcagtgggcatatcatatatttcagtgtatgatcatcagggaatattcaaaaggaacaacagcaggctgatggacgagattctgaagcagcagcaagaactcctcggactggactgttctaagtactcccccgagtttgccaactcgaatgacaaagacgatcaggtcctgaattgtcatcttgcagtgaaagtcctctccccggaggatggcaaagctgatatcgtgagggctgcccaagacttctgccaactcgtggcccagaaacaaaaacgcccaactgacctggatgtagacactcttgcaagtttgcttagcagtaatgggtgccctgatcctgacttggtgctcaaattcggccccgttgactctaccctcggtttcctgccatggcacattagattgacggaaatcgtgtccttgccctcgcacctaaacatcagttacgaggacttctttagtgcgctaagacagtacgccgcctgtgagcagcggctaggaaagtag

SEQ ID NO: 236611 - DNA, 4676 bp, Artificial Sequence
  derived and/or modified sequence
gaagatggcggcgggggcgaggtgaggtgttggcagtggaaaggggttcgggctcggggggcggggggacgcggagcgatggcccgcgccggccgcaggggcggataaaaagccgtcgcgctgcgggagtgggcgggagggagagggggtgtctgagggccacaagagtatgacggggctgtacgagctggtgtggcgggtgctgcacgcgctgctctgtctgcaccgcacgctcacctcctggctccgcgttcggttcggcacctggaactggatctggcggcgctgctgccgcgccgcctctgccgcggtcctagcgccgctcggcttcacgctccgcaagcccccggcagtcggcaggaaccgccgtcaccaccggcacccgcgcggggggtcgtgcctggcagccgcacaccaccggatgcgctggcgcgcggacggtcgttccttggagaagctgcctgtgcatatgggcctggtgatcaccgaggtggagcaggaacccagcttctcggacatcgcgagcctcgtggtgtggtgtatggccgtgggcatctcctacattagcgtctacgaccaccaaggtattttcaaaagaaataattccagattgatggatgaaattttaaaacaacagcaagaacttctgggcctagattgttcaaaatactcaccagaatttgcaaatagtaatgacaaagatgatcaagttttaaattgccatttggcagtgaaggtgctgtctccggaagatggaaaagcagatattgtaagagctgctcaggacttttgccagttagtagcccagaagcaaaagagacccacagatttggatgtagatacgttagccagtttacttagttcaaatggttgtcctgatcctgatttagtattgaagttcggtcctgtggacagcacattaggctttcttccctggcacatcagattgactgagattgtctctttgccttcccacctaaacatcagttatgaggactttttctctgcccttcgtcaatatgcagcctgtgaacagcgtctgggaaagtagtggtcattggttgcataatttgatttgaggcttgtggaggaaaggaaccaagtgactctgatgtttacaaagcacctatgaaaccctgtacacacctagttcataatcctcataatttatcaacaaacacaaaaaagtgtcttacttgagagtgagtgtgtgtgtgtgcgtgtgcacgtgcacacatgtgcacgtttgtatgtatggaaataaacttataaatggggacgtattggagaaggaaatacatagacctacaactttgagcaaatagcagtgatgttttaggaactgaaatgtcacacttaaagtcttcagcccagctacttccctatttttgtggggagaagagggcctgattagaactgttctggttgtgtttggcgggaggggaataatttttgttcagtccttcttagtgaccaaactttaatttttaagaataatatattgacttactgaactgaagcattctgagttgaaaggagctccagaggagtggagttctgtgttgctcacatgttaaaatcttgctcaccttcagagcagagggaatacctatcttcagatatccgtccattttcatctcttaattgtagtcaaaagtatgacttgagagtgttgctctggtattctgggttctgaagtctggtattctggtattctgggttcaaaagtatgacttgagagtgttgctctggtattctgagagttgctctgtattctgggttctgaagattatttgaaaaataactcctactacattgaaatgcagacttaaaaatttaaacattggattaggcagtcaaaaaaaccaagcaagcataaaaggtcaataagttgtaatcttgatagtaaaggtggaaaacttattataaatggaaagaaagttttatttccttttttgtttgatgggcagtatgccatattatacccaaagttcttttaaaaaatatttccatcaaccatttttatttaaaataaacatttgagggaagttaccaaggcagcttttttcctcaaaagtaacctgttcctctttggaatagcacattttaggggcatggttaatacctgagatttttactcagtaaatcctgatggttactgtgtgtaaaatatctttaagtaggattgaaggcctctgtgggggaataaaatattaccaaagtctataaaaataaattttacatgttctcttttatgacagagagcagcactggttctgttatttttaaaatgaataattgatttcttgataggtgtttaatatttcttccctcactgctgattcttagatagaaaccattctttatatttgatagactgctttcagaaaacccttatcaacaagtgtacaatacttatctaaaactatacatttagaatggagcagtttaatactagatctcagaagttttgaaaaatagcaaagaagactggatttggaaagcatggtctacaattggttgttaaattctgaagctatgaagaataaatgtttcaactttggattatgaaaccccatttatgattttttaaatacacttgaaataaaaatgattaaactaaattttggtccagtgacattactttgcactgcataatccattatacgttgtacgactttttttttttgttttaatttattactgagagttttgtgtgaagctacagcatatctaaccagagaatttctgattccttatactgtgattatattatattgaggcatttgtagtgcagctgaagactgaatttatgccttttgtaaacatgataggtataaatgtcttataaacattctggagtatgtatagctttaatgaatgaaatttaatggacctgattaaaatgaagggatttaatcgttgttaaagttaagttagtcaaataaattacctactggaatatagcccaagccagtaaaggtttaatatttgcattttcgtgcttttattttctccttccattcataagtatatacttgaaagtacatctgtagcctatgatttgagtctcttgaagttctaggaagaggcaaactacaaactactaggattctgatttcagatgtagtcattccagaaccttctctttatgagttcacctgctagtacaatctccacaacttgaatggcattggttgttctgtaattcctgccaaaagcatcacaagttgtacatcatcaaggctccctttgcactcccaagaagaactggtaattttaaacaaaagtatgtgtctttatttgtattggaaaatactgtctttaaattgtttcttgttgacactccccacaatggaaaaattaccgaattaaacctgttttatggatggcagcttggagcatagcaagaagttggaggatttgaattccattcccagttctcattgtgttttgtttcttaaaactataataatcggttactgttataaagtttaaaaggtggttttaatgtgaatagcaaattctggtatatcgtgactaacgcttaagaatgcctgtctttgagaggaaggtgttataatattaatgaacagtgccaaatacactgtgcatatctgcaatttaatctttgaatgtatgttactggattagctccctcctcctgtgtgatggtaccatgcatagagtcaatcaaatccttgtgatgttttgtatggactttgacaatatgtaaataatgtgtaaagccagtttttatgattaaggaatcaaatttattgaattttattattgaaagttgaaacttaacatgtatgaacaaaaaccaataaaagaatatactcttttcattgactatagtattatgtgaatgctacatttgttctgaacacttaggggctgcaaaaatgtaataagaaatgcatatgactagatagcaatagtgttttttttagatggtatgctcttgattgaaatatattctcacttttaccaggttaaacatttggaatcttataatgttacttgctttttgatagataatagtgaaataaattcagctttgccattgctggagttgtcaaaattccacagtaattaaaatttgaatttttaccgaatatgaaatttccaaattaaaaacgtatatgtgtactcttttaaaaaggaatttgatagttcttgtcaaatgagaaaatttaaaggtaagagttatggtttgtcttatgctgcatagactattcacctcctaacttgaaggtctaatcataagacaattgtttttttgtgcatagttttcatctaaaattaagtttaccaaaggcaaataactgcttactaggaacttcctttagcaaaaattactataaagttcaggacagtttgaaataaaacccaggaaacaagattaatgtgagcagttctccaagatcctaactggtgggacataaactatgatgcaatggataggaaaaggtagtgcaaaaagaatttcttaaggtttaaaaaatacacttttcattataggaaaaagaagattcagagaaacaaaggaatgtaaccttattgattacatttttggtgatcaccgagaattttttgtactatattttaaaaaatgtattctactgtaacaagttaataaagagattttttaaaaaactataaactagaaa

SEQ ID NO: 236612 - DNA, 882 bp, Artificial Sequence
  derived and/or modified sequence
atgacaggcctgtacgagctcgtgtggcgagttctgcatgccctactttgtttacatcgtacgctgacgagttggctgcgggtcaggtttgggacctggaattggatctggcggaggtgctgtagggctgcatctgcagcggtgctcgcaccactcggctttactctgagaaaacctcccgctgtgggcaggaaccgccgacatcacagacaccctcggggtgggtcgtgcttagctgccgctcatcaccgaatgagatggagagcagatgggaggtctcttgagaaactgccggtgcacatgggcctggtcatcacagaggttgaacaggagcccagcttcagcgacatagcctctcttgtggtctggtgtatggccgtgggcataagctatattagtgtatacgatcaccaaggaatctttaagcgaaacaattcaaggctgatggacgaaattctcaaacaacagcaggaactgctgggactcgactgcagcaaatacagccccgaattcgccaacagtaacgacaaagacgaccaggtgttgaactgtcacctggcagtgaaggtcctttccccggaggacggaaaagctgacattgttcgcgcagcccaagatttttgccagttagtggctcagaaacaaaagcgccctacggacctggatgtcgataccctggcaagcctcctgtcgtccaatggctgtccagaccccgacctcgtactgaagttcggccctgtggacagcacactgggctttctgccttggcacatcaggctgaccgaaattgtgagccttccctctcatctcaatatttcctatgaggacttcttctcagccctgagacaatacgctgcatgcgagcagcgactaggcaaatag

SEQ ID NO: 236613 - DNA, 882 bp, Artificial Sequence
  derived and/or modified sequence
atgaccggcctgtacgagctggtgtggagagtgctgcacgccctgctgtgcctgcacagaaccctgaccagctggctgagagtgagattcggcacctggaactggatctggagaagatgctgcagagccgccagcgccgccgtgctggcccccctgggcttcaccctgagaaagccccccgccgtgggcagaaacagaagacaccacagacaccccagaggcggcagctgcctggccgccgcccaccacagaatgagatggagagccgacggcagaagcctggagaagctgcccgtgcacatgggcctggtgatcaccgaggtggagcaggagcccagcttcagcgacatcgccagcctggtggtgtggtgcatggccgtgggcatcagctacatcagcgtgtacgaccaccagggcatcttcaagagaaacaacagcagactgatggacgagatcctgaagcagcagcaggagctgctgggcctggactgcagcaagtacagccccgagttcgccaacagcaacgacaaggacgaccaggtgctgaactgccacctggccgtgaaggtgctgagccccgaggacggcaaggccgacatcgtgagagccgcccaggacttctgccagctggtggcccagaagcagaagagacccaccgacctggacgtggacaccctggccagcctgctgagcagcaacggctgccccgaccccgacctggtgctgaagttcggccccgtggacagcaccctgggcttcctgccctggcacatcagactgaccgagatcgtgagcctgcccagccacctgaacatcagctacgaggacttcttcagcgccctgagacagtacgccgcctgcgagcagagactgggcaagtag

SEQ ID NO: 236614 - protein, 156 aa, Artificial Sequence
  derived and/or modified sequence
MLSARDRRDRHPEEGVVAELQGFAVDKAFLTSHKGILLETELALTLIIFICFTASISAYMAAALLEFFITLAFLFLYATQYYQRFDRINWPCLDFLRCVSAIIIFLVVSFAAVTSRDGAAIAAFVFGIILVSIFAYDAFKIYRTEMAPGASQGDQQ

SEQ ID NO: 236615 - DNA, 471 bp, Artificial Sequence
  derived and/or modified sequence
atgctttccgctcgtgataggagagacaggcacccggaggagggagttgttgcggagcttcaaggattcgccgtggataaagcttttctcactagccataaaggaattctcctggagacagagttagcacttacgcttattatttttatatgtttcacagccagtatctccgcctatatggccgccgccctcctggagttttttattacactggcattcctttttctgtatgccacacagtattatcagcgcttcgaccgaattaactggccatgcctggactttcttcggtgcgtctcagctattatcattttcctggtggttagctttgctgctgttacatcaagggacggggcagccattgctgccttcgtgtttggtattatcctggtctccatttttgcatacgatgcatttaagatctatcgaacggaaatggcacccggcgcttcccagggtgaccagcagtag

SEQ ID NO: 236616 - DNA, 471 bp, Artificial Sequence
  derived and/or modified sequence
atgctgagcgcccgggacagaagagacagacaccctgaggagggcgtggtggccgagctgcagggctttgctgtggacaaggccttcctgaccagccacaagggcatcctgctggagacagagctggccctgaccctcatcatcttcatctgcttcaccgccagcatcagcgcctacatggccgccgccctgctggagttcttcatcaccctggccttcctgttcctgtatgccacccagtactaccagagatttgaccgcatcaactggccctgcctggacttcctgcgctgtgtgtctgccatcatcatcttcctggtggtgtcctttgctgctgtgaccagcagagatggagctgccatcgccgcctttgtgtttggcatcatcctggtgtccatctttgcctatgatgccttcaagatctacagaacagagatggcccctggggccagccagggcgaccagcagtag

SEQ ID NO: 236617 - DNA, 471 bp, Artificial Sequence
  derived and/or modified sequence
atgctgagcgcccgggaccggcgggaccggcaccccgaggagggcgtagtggctgagctacaagggttcgcagttgacaaagctttcttaacctctcataaaggaatccttctagaaaccgaattagccttgacactcataatttttatctgtttcacagcttctattagcgcatacatggcagcggccctgctggagttctttatcacactggccttcctgtttctgtacgccacccaatattatcagcgtttcgataggattaactggccgtgtctggatttcctgcggtgtgtgtctgcgattattattttcttagttgtaagtttcgcggcagttacttcaagggacggagccgcaattgctgcatttgtgttcggcatcattttggtctccatctttgcgtatgatgccttcaaaatctaccgcacagagatggcccccggggcttctcaaggcgatcagcagtag

SEQ ID NO: 236618 - DNA, 471 bp, Artificial Sequence
  derived and/or modified sequence
atgctgagtgctcgcgacaggcgagatcgacacccagaagagggagtggtcgcggaacttcaggggtttgcagtggacaaagcctttttaacttcacacaagggaattctcttagagaccgagctagcactcacgttaatcatatttatatgttttacagcaagcatcagcgcctacatggccgctgcgctgctggaattctttatcactttggctttcctcttcctgtatgccactcagtactaccagagatttgacagaattaattggccatgccttgatttcctgcgctgcgtgtcggctatcattattttcctcgtggtgtcctttgcggcagtaactagtcgagatggcgcagccatcgccgcattcgtcttcggcatcattctggtatctattttcgcatacgacgcattcaaaatttaccggactgaaatggcacctggcgcatcccagggggaccagcagtag

SEQ ID NO: 236619 - DNA, 1200 bp, Artificial Sequence
  derived and/or modified sequence
gttagagaagggggacacaaatgtcttcaggcttaggtccctgggggctcccagtcctgcccctgttcctctactcacatcccagctcctcccagtttcttttcggacctcctcctctccccttccttctctattccaggctgggttgggctctaagcaaggggagggattagagcctccttcctctctgcccctccccatgggtctctagggggctggtgcaggcagcagcagaggcactctgggcagctgggtgagggcccatctgggcaaggcccccagcgcctgccttctctcccggggccctgtgggcaagcctcctgcttcactttcaggtttctcgaagtgccttcttgctcctgtctgtttccccatcctgccagatttctgtttctcttgctgggcttttggcagtagggggctgtgttggtgggccctacgaagatgctcagtgctcgagatcgccgggaccggcaccctgaggagggggtagttgcagagctccagggcttcgcggtggacaaggccttcctcacctcccacaagggcatcctgctggaaaccgagctggccctgaccctcatcatcttcatctgcttcacggcctccatctctgcctacatggccgcggcgctactggagttcttcatcacacttgccttcctcttcctctatgccacccagtactaccagcgcttcgaccgaattaactggccctgtctggacttcctgcgctgtgtcagtgccatcatcatcttcctggtggtctcctttgcagctgtgacctcccgggacggagctgccattgctgcttttgtttttggcatcatcctggtttccatctttgcctatgatgccttcaagatctaccggactgagatggcacccggggccagccagggggaccagcagtgactctggggctacctggctcctaggcccagccagccagagaggacagtggagcccagacacgtctccttgggattcactagcccccagcccgccaaaccccaccccagccctacacagcagtctggcctgagacgtcactggggacttatctgtggagcctggtgctccaggatgtggcttctcatgaagctctggccagaggaggggaacttattgggggagggggggtggaggggaggaatctggacctctaagtcattcccaaattaaaatattcaaattcta

SEQ ID NO: 236620 - DNA, 471 bp, Artificial Sequence
  derived and/or modified sequence
atgctgagcgccagagacagaagagacagacaccccgaggagggcgtggtggccgagctgcagggcttcgccgtggacaaggccttcctgaccagccacaagggcatcctgctggagaccgagctggccctgaccctgatcatcttcatctgcttcaccgccagcatcagcgcctacatggccgccgccctgctggagttcttcatcaccctggccttcctgttcctgtacgccacccagtactaccagagattcgacagaatcaactggccctgcctggacttcctgagatgcgtgagcgccatcatcatcttcctggtggtgagcttcgccgccgtgaccagcagagacggcgccgccatcgccgccttcgtgttcggcatcatcctggtgagcatcttcgcctacgacgccttcaagatctacagaaccgagatggcccccggcgccagccagggcgaccagcagtag

SEQ ID NO: 236621 - protein, 785 aa, Artificial Sequence
  derived and/or modified sequence
MSDQDHSMDEMTAVVKIEKGVGGNNGGNGNGGGAFSQARSSSTGSSSSTGGGGQESQPSPLALLAATCSRIESPNENSNNSQGPSQSGGTGELDLTATQLSQGANGWQIISSSSGATPTSKEQSGSSTNGSNGSESSKNRTVSGGQYVVAAAPNLQNQQVLTGLPGVMPNIQYQVIPQFQTVDGQQLQFAATGAQVQQDGSGQIQIIPGANQQIITNRGSGGNIIAAMPNLLQQAVPLQGLANNVLSGQTQYVTNVPVALNGNITLLPVNSVSAATLTPSSQAVTISSSGSQESGSQPVTSGTTISSASLVSSQASSSSFFTNANSYSTTTTTSNMGIMNFTTSGSSGTNSQGQTPQRVSGLQGSDALNIQQNQTSGGSLQAGQQKEGEQNQQTQQQQILIQPQLVQGGQALQALQAAPLSGQTFTTQAISQETLQNLQLQAVPNSGPIIIRTPTVGPNGQVSWQTLQLQNLQVQNPQAQTITLAPMQGVSLGQTSSSNTTLTPIASAASIPAGTVTVNAAQLSSMPGLQTINLSALGTSGIQVHPIQGLPLAIANAPGDHGAQLGLHGAGGDGIHDDTAGGEEGENSPDAQPQAGRRTRREACTCPYCKDSEGRGSGDPGKKKQHICHIQGCGKVYGKTSHLRAHLRWHTGERPFMCTWSYCGKRFTRSDELQRHKRTHTGEKKFACPECPKRFMRSDHLSKHIKTHQNKKGGPGVALSVGTLPLDSGAGSEGSGTATPSALITTNMVAMEAICPEGIARLANSGINVMQVADLQSINISGNGF

SEQ ID NO: 236622 - DNA, 2358 bp, Artificial Sequence
  derived and/or modified sequence
atgagcgaccaggaccacagcatggacgagatgaccgccgtggtgaagatcgagaagggcgtgggcggcaacaacggcggcaacggcaacggcggcggcgccttcagccaggccagaagcagcagcaccggcagcagcagcagcaccggcggcggcggccaggagagccagcccagccccctggccctgctggccgccacctgcagcagaatcgagagccccaacgagaacagcaacaacagccagggccccagccagagcggcggcaccggcgagctggacctgaccgccacccagctgagccagggcgccaacggctggcagatcatcagcagcagcagcggcgccacccccaccagcaaggagcagagcggcagcagcaccaacggcagcaacggcagcgagagcagcaagaacagaaccgtgagcggcggccagtacgtggtggccgccgcccccaacctgcagaaccagcaggtgctgaccggcctgcccggcgtgatgcccaacatccagtaccaggtgatcccccagttccagaccgtggacggccagcagctgcagttcgccgccaccggcgcccaggtgcagcaggacggcagcggccagatccagatcatccccggcgccaaccagcagatcatcaccaacagaggcagcggcggcaacatcatcgccgccatgcccaacctgctgcagcaggccgtgcccctgcagggcctggccaacaacgtgctgagcggccagacccagtacgtgaccaacgtgcccgtggccctgaacggcaacatcaccctgctgcccgtgaacagcgtgagcgccgccaccctgacccccagcagccaggccgtgaccatcagcagcagcggcagccaggagagcggcagccagcccgtgaccagcggcaccaccatcagcagcgccagcctggtgagcagccaggccagcagcagcagcttcttcaccaacgccaacagctacagcaccaccaccaccaccagcaacatgggcatcatgaacttcaccaccagcggcagcagcggcaccaacagccagggccagaccccccagagagtgagcggcctgcagggcagcgacgccctgaacatccagcagaaccagaccagcggcggcagcctgcaggccggccagcagaaggagggcgagcagaaccagcagacccagcagcagcagatcctgatccagccccagctggtgcagggcggccaggccctgcaggccctgcaggccgcccccctgagcggccagaccttcaccacccaggccatcagccaggagaccctgcagaacctgcagctgcaggccgtgcccaacagcggccccatcatcatcagaacccccaccgtgggccccaacggccaggtgagctggcagaccctgcagctgcagaacctgcaggtgcagaacccccaggcccagaccatcaccctggcccccatgcagggcgtgagcctgggccagaccagcagcagcaacaccaccctgacccccatcgccagcgccgccagcatccccgccggcaccgtgaccgtgaacgccgcccagctgagcagcatgcccggcctgcagaccatcaacctgagcgccctgggcaccagcggcatccaggtgcaccccatccagggcctgcccctggccatcgccaacgcccccggcgaccacggcgcccagctgggcctgcacggcgccggcggcgacggcatccacgacgacaccgccggcggcgaggagggcgagaacagccccgacgcccagccccaggccggcagaagaaccagaagagaggcctgcacctgcccctactgcaaggacagcgagggcagaggcagcggcgaccccggcaagaagaagcagcacatctgccacatccagggctgcggcaaggtgtacggcaagaccagccacctgagagcccacctgagatggcacaccggcgagagacccttcatgtgcacctggagctactgcggcaagagattcaccagaagcgacgagctgcagagacacaagagaacccacaccggcgagaagaagttcgcctgccccgagtgccccaagagattcatgagaagcgaccacctgagcaagcacatcaagacccaccagaacaagaagggcggccccggcgtggccctgagcgtgggcaccctgcccctggacagcggcgccggcagcgagggcagcggcaccgccacccccagcgccctgatcaccaccaacatggtggccatggaggccatctgccccgagggcatcgccagactggccaacagcggcatcaacgtgatgcaggtggccgacctgcagagcatcaacatcagcggcaacggcttctag

SEQ ID NO: 236623 - DNA, 2358 bp, Artificial Sequence
  derived and/or modified sequence
atgagcgatcaagaccactccatggatgagatgaccgctgttgttaaaatcgagaaaggggtgggtggcaataacgggggaaatggcaacgggggcggcgccttctctcaggctcgctcctcaagcaccggtagcagcagttctaccggggggggcggtcaggagtcccagccatccccactggccctcctcgctgccacatgcagcagaatcgaaagtccaaacgagaatagtaataatagccaaggtccctcccaaagtgggggcactggagagctcgatctgactgccactcagctgtcacagggagcaaatggctggcagattattagctcctccagcggggccacacctacctcgaaggagcagtctggttcgtcgaccaatggatccaacggatccgaatcatcaaaaaacaggacagtctccggcggtcagtatgtggtggctgccgcccccaacctccagaaccagcaagtgctgacaggactgcctggcgtcatgccaaacatccagtaccaggtaattccacagtttcagacggtggacggccaacagcttcaattcgcagccacaggcgctcaggtgcagcaggatgggagcggacagattcagatcattcctggagccaaccagcagatcatcacaaaccgcgggagtggcggcaacattattgcagctatgcctaatctacttcagcaggcagtgcctctgcaagggctggctaataacgttctgagcggccaaacgcaatacgtcacgaatgtacccgtagcactgaatggaaacattacgctcctgcccgtcaactccgtgtccgcagccacactaacaccgtcttcccaggctgtaacaatcagctcttccggttcccaggagagcggctctcagcctgtcacctctggcactactatcagttcagccagcctggtcagctcccaagcatcctcatcatcttttttcacaaatgctaattcttactcaactactaccactactagtaatatggggattatgaatttcactaccagcggctcatctgggacaaactcccaaggtcagactccccagagagtgtcagggctgcagggcagcgacgccttaaatatccagcagaatcagacttctgggggtagtctccaagcaggccagcagaaagagggggagcagaatcaacagacgcagcagcaacagatcttgatacaaccacagcttgtgcaagggggacaagccctgcaggcattacaggcagccccattgtcagggcagacctttaccactcaagcaatctctcaggaaactctgcagaaccttcagctgcaggcagtgcctaacagcgggccaattattatccgtacacctactgtagggcctaatggccaggttagttggcagactctccagttgcagaatctgcaggtccaaaatccacaggcacagacaattactttggcacccatgcagggagtgagcctgggtcagacatcttccagcaacaccactctcactcctatagcaagtgccgcctctatccctgcggggaccgttactgtcaatgccgcccagctgtctagcatgcccggcttacaaacaattaatctgtcggccctcggcacatctgggatacaggtccacccaattcagggactgccattggccattgctaacgcgcccggagaccatggcgcccagttgggcctgcacggcgccggcggtgacgggatccatgacgatacagccggtggtgaagaaggagagaatagtcctgatgcacagccccaggctgggcgacggaccagacgtgaggcatgtacttgtccctattgtaaggattcggaagggcggggaagtggcgacccgggaaaaaagaagcagcatatctgtcatatccagggctgtggaaaggtgtacggtaaaacctctcacctgcgggcccatctgagatggcataccggggagagacccttcatgtgtacttggagctactgcgggaaaaggttcactaggtctgatgagctacagcggcataagaggactcatacaggcgaaaagaaatttgcatgccccgagtgcccaaaacgcttcatgcgcagtgatcatctgtctaagcatataaagacacaccagaataaaaaaggaggccccggggtagctcttagtgtaggaacacttccattggactctggggctggctctgagggctcaggcactgcaactcccagtgccctcatcaccaccaatatggtggccatggaggccatttgtccggaagggatagcacggctggctaattctgggatcaacgttatgcaggtggccgaccttcagagcatcaatatcagcggcaatggtttttag

SEQ ID NO: 236624 - DNA, 2358 bp, Artificial Sequence
  derived and/or modified sequence
atgtctgaccaggaccacagcatggatgagatgacagctgtggtgaagattgaaaaaggagtgggcggcaacaatggaggaaatggaaatggaggaggagccttcagccaggcccggagcagcagcacaggcagcagcagcagcactggaggcggcggccaggagagccagcccagccccctggccctgctggccgccacctgcagcagaattgagagccccaatgaaaacagcaacaacagccagggccccagccagagcggcggcaccggggagctggacctgacagccacccagctgagccagggcgccaacggctggcagatcatcagcagcagcagcggggccacccccaccagcaaggagcagagcggcagcagcaccaacggcagcaatggcagcgagagcagcaagaacagaacagtgtctgggggccagtatgtggtggccgccgcccccaacctgcagaaccagcaggtgctgaccggcctgcccggggtgatgcccaacatccagtaccaggtgatcccccagttccagacagtggatggccagcagctgcagtttgctgccaccggggcccaggtgcagcaggacggcagcggccagatccagatcatccctggggccaaccagcagatcatcaccaacagaggcagcggcggcaacatcatcgccgccatgcccaacctgctgcagcaggccgtgcccctgcagggcctggccaacaacgtgctgagcggccagacccagtatgtgaccaacgtgcctgtggccctgaatggaaacatcaccctgctgcctgtgaacagcgtgtctgctgccaccctgacccccagcagccaggccgtgaccatcagcagcagcggcagccaggagagcggcagccagcctgtgaccagcggcaccaccatcagcagcgccagcctggtgagcagccaggccagcagcagcagcttcttcaccaatgccaacagctacagcaccaccaccaccaccagcaacatgggcatcatgaacttcaccaccagcggcagcagcggcaccaacagccagggccagaccccccagagggtgtctggcctgcagggcagtgatgccctgaacatccagcagaaccagaccagcggcggcagcctgcaggccggccagcagaaggagggggagcagaaccagcagacccagcagcagcagatcctgatccagccccagctggtgcagggcggccaggccctgcaggccctgcaggccgcccccctgagcggccagaccttcaccacccaggccatcagccaggagaccctgcagaacctgcagctgcaggccgtgcccaacagcggccccatcatcatccgcacccccaccgtgggccccaacggccaggtgtcctggcagaccctgcagctgcagaacctgcaggtgcagaacccccaggcccagaccatcaccctggcccccatgcagggcgtgtccctgggccagaccagcagcagcaacaccaccctgacccccatcgccagcgctgccagcatcccagctggcaccgtgacagtgaatgctgcccagctgagctccatgcctggcctgcagaccatcaacctgagcgccctgggcaccagcggcatccaggtgcaccccatccagggcctgcccctggccatcgccaatgcccctggggaccatggagcccagctgggcctgcacggggctggaggagatggcatccatgatgacacagctggaggagaggagggggagaacagcccagatgcccagccccaggccggccgccgcacccggcgggaggcctgcacctgcccctactgcaaggacagcgagggccggggcagcggggaccccgggaagaagaagcagcacatctgccacatccagggctgcggcaaggtgtatggcaagaccagccacctgcgggcccacctgcgctggcacactggagagcggcccttcatgtgcacctggagctactgcggcaagcgcttcaccaggagtgatgagctgcagaggcacaagaggacccacactggagagaagaagtttgcctgcccagagtgccccaagcgcttcatgagaagtgaccacctgagcaagcacatcaagacccaccagaacaagaagggcggccctggggtggccctgtctgtgggcaccctgcccctggacagcggggccggcagcgagggcagcggcacagccaccccatctgccctgatcaccaccaacatggtggccatggaggccatctgcccagagggcatcgcccggctggccaacagcggcatcaacgtgatgcaggtggccgacctgcagagcatcaacatctctggaaatggcttctag

SEQ ID NO: 236625 - DNA, 2358 bp, Artificial Sequence
  derived and/or modified sequence
atgagcgaccaggaccacagcatggacgagatgaccgccgtggtgaagatcgagaaaggagttgggggcaacaacggagggaacggaaatggcggcggagcttttagccaggccagaagctcatcgactgggtcgagttctagtactggaggaggtggtcaggaatcccagccaagccctctcgccctgctcgccgccacatgttcacgaattgagtcacccaacgagaacagcaataattcccaagggccctcccaatctgggggcacaggtgagctagatctgaccgccacccagctctcccagggagctaatgggtggcagataatttcaagctcaagtggtgccactcctacctctaaggagcagagcggctccagcactaatggcagcaatggtagcgaatctagcaaaaacaggaccgttagtggaggacagtacgtggtggccgccgcccctaaccttcagaaccagcaggtgctgacaggactgccaggcgtgatgccaaatatacagtaccaagtcatcccgcagttccagaccgttgacggccagcagctccagtttgccgcaaccggagcacaagtgcagcaggacggctctggacagatccagatcattcccggtgctaaccagcagataatcactaatcgtggatcaggtggcaacatcattgctgccatgcctaaccttctgcaacaagcagtgcctctgcaggggcttgctaataatgtgctcagcggccagacacagtacgtaacaaatgtgccagtggccctgaacggaaatatcaccctgctgccagttaattccgtgtcggccgcaaccctaacaccttcttcccaggctgtgacgatcagcagcagtggcagccaggaatccggttcccagccagtgactagtggaactaccatcagctcagcatccttagtttctagccaggcttcaagcagctccttctttactaatgctaactcttattcaacaacaaccactactagcaatatgggcatcatgaattttacgacatccggctcatctgggactaactctcaggggcagacacctcagagggttagtggcctccagggcagcgatgctctgaatattcagcagaaccagaccagtggcggcagcctgcaagctggccagcagaaggaaggtgagcaaaatcagcagactcagcagcagcagattctaatacagccccagttagtacagggtggccaggccttgcaggcgttgcaggctgctccactgagtgggcagaccttcaccacgcaggctatttcccaagagacactccagaatttgcaactccaggccgtgccgaacagtggccctatcattattcgtaccccaaccgtcggccctaacggccaggtcagttggcagaccctccagcttcagaacttacaggttcagaatccacaagcccagacgattacactggctcctatgcagggcgtctcactgggacaaactagcagctctaacaccacactgaccccgattgcctctgccgccagcattccagccggtactgtaacagtgaacgcggcacaactctcctccatgcctggcctccagaccattaacttaagcgcccttggcacctccggaatccaagtccaccccatccagggactgcccctggccattgctaacgcgccaggcgatcatggagcccagcttgggctgcacggtgccggcggcgatggcatccacgacgacacagctggaggagaggagggggaaaacagtccagatgcccagccacaggctgggcgcaggactaggagagaagcttgcacatgcccgtattgcaaggactcagaaggtcgtggaagcggggacccgggcaagaaaaagcaacacatctgtcatatacagggctgcgggaaagtatacggaaaaacgagccatctcagagcacatttacggtggcacactggggaacggccttttatgtgtacctggtcttattgcggcaagagattcacccggagcgatgagttgcaaagacataagcgcacgcataccggcgaaaagaagtttgcatgccccgagtgccccaagaggttcatgcggagcgatcacctctccaagcatatcaagacccaccaaaataagaaaggcggacctggtgtggcgctgtcggtcggcacacttcccctggatagcggcgctgggtcagaaggaagtgggaccgccactccttccgctctgatcacaacgaacatggtcgccatggaagctatatgtcccgagggcatagcccgactggccaactccggcataaacgtcatgcaggtggccgacctgcaaagcattaacatatcagggaatggcttctag

SEQ ID NO: 236626 - DNA, 2358 bp, Artificial Sequence
  derived and/or modified sequence
atgtcagaccaagaccactcaatggacgagatgaccgctgttgtaaagatcgaaaagggcgttggaggtaacaatgggggtaacgggaatggcggaggggcattctcccaggctaggtccagcagcaccggctcctcatcaagtacaggaggtggtgggcaggagtcacagccttcacccttggcgttgctggctgctacatgttcgagaattgagagtccaaatgagaacagcaacaactcacagggcccaagccagtctggcggtacaggtgaattggacctgacggcaacgcagctatcacagggtgccaatggttggcagataatttcttcttcttcaggcgcaacccctacctccaaagagcagagtggcagtagtacgaatggatccaatggctctgagtcctccaaaaataggacggtgagcggaggccaatatgtcgtcgcggctgctcctaaccttcagaaccagcaggtgcttactgggttacccggtgttatgccaaatatacagtaccaggttatccctcagttccagacggtcgatggccagcagttgcaatttgccgctactggggctcaggttcagcaggacggctccgggcagattcagatcatccccggagcaaatcaacagattattacaaacagaggaagcggcggtaatattattgccgctatgcccaacttgcttcagcaagcagttccgctgcagggcctcgctaacaacgtgctttctggccagactcagtacgtcactaacgtgcccgtggcactcaatgggaatatcactctgctccctgtcaactcggtctccgcggcaactctgaccccttcctctcaagctgtgactatatcttcatcaggttcacaggagagcggctcacagccggtcacgagcggcacaaccattagctcagcttccctggtatctagtcaagctagctcatcgagtttcttcacgaatgctaactcatactcaaccaccactacaacatcaaatatgggtattatgaacttcacaacctcggggagtagtggcacaaattcccaggggcagaccccccagagggtgtctggacttcagggttccgatgcactgaatatacagcagaaccagacctcgggcggatctttacaggctggccagcaaaaagaaggcgaacagaatcaacagacccaacagcaacaaatacttattcagccgcagctggttcagggcggacaggctctgcaagcgcttcaagctgcccctctgtctgggcagacgtttactacgcaggctatcagccaggagacattgcagaatttacagctgcaggccgtccctaacagcggtccaatcattattcggaccccaaccgtgggaccaaatggtcaggtgagctggcagacactccagttgcagaatctgcaggtgcaaaacccccaggctcagaccattacactcgctcccatgcagggcgtttctctgggccagacctctagttccaatacaacattgacacctatcgcctctgcggcatccattccggcaggcacagtcactgtcaacgccgcacagctctcaagtatgcccggactgcagacaataaacctgagcgccctggggacttcggggatccaggtacacccaatccaagggttgccactcgccatagccaatgccccaggcgatcatggcgcacagctgggcctgcacggagccggaggcgatgggattcatgacgataccgctggcggagaggagggggagaactctcctgacgctcagccccaggcgggacgacgtacaaggagggaggcatgcacctgtccttattgtaaggatagcgagggcagaggcagtggggaccctggtaaaaagaagcagcacatttgccacatccaagggtgcggcaaggtgtacgggaaaacgtcccacctgcgtgcgcacttacgctggcacacgggggaacgacccttcatgtgtacatggtcctactgcggcaagcgcttcacgaggtctgacgaattgcaacgtcacaagcggactcatactggtgagaagaaatttgcctgtccagaatgccctaagagatttatgcggagtgaccatttatccaagcatataaagacccaccagaacaaaaagggaggtccaggagtcgctctgagcgttgggaccttacctctggattctggcgctggttctgaaggctcaggaacagcaactccaagtgcattgatcacaaccaatatggtcgcaatggaggcgatctgtcccgagggaatcgccagactcgccaattccggcatcaatgtgatgcaggtcgccgacctgcaatcgataaacatttccggcaatggcttctag

SEQ ID NO: 236627 - DNA, 2846 bp, Artificial Sequence
  derived and/or modified sequence
ggtccgggttcgcttgcctcgtcagcgtccgcgtttttcccggccccccccaacccccccggacaggacccccttgagcttgtccctcagctgccaccatgagcgaccaagatcactccatggatgaaatgacagctgtggtgaaaattgaaaaaggagttggtggcaataatgggggcaatggtaatggtggtggtgccttttcacaggctcgaagtagcagcacaggcagtagcagcagcactggaggaggagggcaggagtcccagccatcccctttggctctgctggcagcaacttgcagcagaattgagtcacccaatgagaacagcaacaactcccagggcccgagtcagtcagggggaacaggtgagcttgacctcacagccacacaactttcacagggtgccaatggctggcagatcatctcttcctcctctggggctacccctacctcaaaggaacagagtggcagcagtaccaatggcagcaatggcagtgagtcttccaagaatcgcacagtctctggtgggcagtatgttgtggctgccgctcccaacttacagaaccagcaagttctgacaggactacctggagtgatgcctaatattcagtatcaagtaatcccacagttccagaccgttgatgggcaacagctgcagtttgctgccactggggcccaagtgcagcaggatggttctggtcaaatacagatcataccaggtgcaaaccaacagattatcacaaatcgaggaagtggaggcaacatcattgctgctatgccaaacctactccagcaggctgtccccctccaaggcctggctaataatgtactctcaggacagactcagtatgtgaccaatgtaccagtggccctgaatgggaacatcaccttgctacctgtcaacagcgtttctgcagctaccttgactcccagctctcaggcagtcacgatcagcagctctgggtcccaggagagtggctcacagcctgtcacctcagggactaccatcagttctgccagcttggtatcatcacaagccagttccagctcctttttcaccaatgccaatagctactcaactactactaccaccagcaacatgggaattatgaactttactaccagtggatcatcagggaccaactctcaaggccagacaccccagagggtcagtgggctacaggggtctgatgctctgaacatccagcaaaaccagacatctggaggctcattgcaagcaggccagcaaaaagaaggagagcaaaaccagcagacacagcagcaacaaattcttatccagcctcagctagttcaagggggacaggccctccaggccctccaagcagcaccattgtcagggcagacctttacaactcaagccatctcccaggaaaccctccagaacctccagcttcaggctgttccaaactctggtcccatcatcatccggacaccaacagtggggcccaatggacaggtcagttggcagactctacagctgcagaacctccaagttcagaacccacaagcccaaacaatcaccttagccccaatgcagggtgtttccttggggcagaccagcagcagcaacaccactctcacacccattgcctcagctgcttccattcctgctggcacagtcactgtgaatgctgctcaactctcctccatgccaggcctccagaccattaacctcagtgcattgggtacttcaggaatccaggtgcacccaattcaaggcctgccgttggctatagcaaatgccccaggtgatcatggagctcagcttggtctccatggggctggtggtgatggaatacatgatgacacagcaggtggagaggaaggagaaaacagcccagatgcccaaccccaagccggtcggaggacccggcgggaagcatgcacctgcccctactgtaaagacagtgaaggaaggggctcgggggatcctggcaaaaagaaacagcatatttgccacatccaaggctgtgggaaagtgtatggcaagacctctcacctgcgggcacacttgcgctggcatacaggcgagaggccatttatgtgtacctggtcatactgtgggaaacgcttcacacgttcggatgagctacagaggcacaaacgtacacacacaggtgagaagaaatttgcctgccctgagtgtcctaagcgcttcatgaggagtgaccacctgtcaaaacatatcaagacccaccagaataagaagggaggcccaggtgtagctctgagtgtgggcactttgcccctggacagtggggcaggttcagaaggcagtggcactgccactccttcagcccttattaccaccaatatggtagccatggaggccatctgtccagagggcattgcccgtcttgccaacagtggcatcaacgtcatgcaggtggcagatctgcagtccattaatatcagtggcaatggcttctgagatcaggcacccggggccagagacatatgggccataccccttaaccccgggatgcaaggtagcatgggtccaagagacatggaagagagagccatgaagcattaaaatgcatggtgttgagaagaatcaggagagggatacaagagaggagatggggtcccggcacccatctgtatcatcagtgcctctttgaaggtgggaaacattagtgaaaattctgttggtgccacgctttgatgagcatttgtttgaccccagtttcttcttacacttcttaccccagcctacccttcctgcatttctcttctcagctcttccatgatggattcccccccctttcctaaagccatcatgccttgataaatatatatgatcattgaaatacttttt

SEQ ID NO: 236628 - DNA, 7603 bp, Artificial Sequence
  derived and/or modified sequence
agcgaaggccccgcccgggccaaccgcctgcctggtccgccctctgaccaagatcactccatggatgaaatgacagctgtggtgaaaattgaaaaaggagttggtggcaataatgggggcaatggtaatggtggtggtgccttttcacaggctcgaagtagcagcacaggcagtagcagcagcactggaggaggagggcaggagtcccagccatcccctttggctctgctggcagcaacttgcagcagaattgagtcacccaatgagaacagcaacaactcccagggcccgagtcagtcagggggaacaggtgagcttgacctcacagccacacaactttcacagggtgccaatggctggcagatcatctcttcctcctctggggctacccctacctcaaaggaacagagtggcagcagtaccaatggcagcaatggcagtgagtcttccaagaatcgcacagtctctggtgggcagtatgttgtggctgccgctcccaacttacagaaccagcaagttctgacaggactacctggagtgatgcctaatattcagtatcaagtaatcccacagttccagaccgttgatgggcaacagctgcagtttgctgccactggggcccaagtgcagcaggatggttctggtcaaatacagatcataccaggtgcaaaccaacagattatcacaaatcgaggaagtggaggcaacatcattgctgctatgccaaacctactccagcaggctgtccccctccaaggcctggctaataatgtactctcaggacagactcagtatgtgaccaatgtaccagtggccctgaatgggaacatcaccttgctacctgtcaacagcgtttctgcagctaccttgactcccagctctcaggcagtcacgatcagcagctctgggtcccaggagagtggctcacagcctgtcacctcagggactaccatcagttctgccagcttggtatcatcacaagccagttccagctcctttttcaccaatgccaatagctactcaactactactaccaccagcaacatgggaattatgaactttactaccagtggatcatcagggaccaactctcaaggccagacaccccagagggtcagtgggctacaggggtctgatgctctgaacatccagcaaaaccagacatctggaggctcattgcaagcaggccagcaaaaagaaggagagcaaaaccagcagacacagcagcaacaaattcttatccagcctcagctagttcaagggggacaggccctccaggccctccaagcagcaccattgtcagggcagacctttacaactcaagccatctcccaggaaaccctccagaacctccagcttcaggctgttccaaactctggtcccatcatcatccggacaccaacagtggggcccaatggacaggtcagttggcagactctacagctgcagaacctccaagttcagaacccacaagcccaaacaatcaccttagccccaatgcagggtgtttccttggggcagaccagcagcagcaacaccactctcacacccattgcctcagctgcttccattcctgctggcacagtcactgtgaatgctgctcaactctcctccatgccaggcctccagaccattaacctcagtgcattgggtacttcaggaatccaggtgcacccaattcaaggcctgccgttggctatagcaaatgccccaggtgatcatggagctcagcttggtctccatggggctggtggtgatggaatacatgatgacacagcaggtggagaggaaggagaaaacagcccagatgcccaaccccaagccggtcggaggacccggcgggaagcatgcacctgcccctactgtaaagacagtgaaggaaggggctcgggggatcctggcaaaaagaaacagcatatttgccacatccaaggctgtgggaaagtgtatggcaagacctctcacctgcgggcacacttgcgctggcatacaggcgagaggccatttatgtgtacctggtcatactgtgggaaacgcttcacacgttcggatgagctacagaggcacaaacgtacacacacaggtgagaagaaatttgcctgccctgagtgtcctaagcgcttcatgaggagtgaccacctgtcaaaacatatcaagacccaccagaataagaagggaggcccaggtgtagctctgagtgtgggcactttgcccctggacagtggggcaggttcagaaggcagtggcactgccactccttcagcccttattaccaccaatatggtagccatggaggccatctgtccagagggcattgcccgtcttgccaacagtggcatcaacgtcatgcaggtggcagatctgcagtccattaatatcagtggcaatggcttctgagatcaggcacccggggccagagacatatgggccataccccttaaccccgggatgcaaggtagcatgggtccaagagacatggaagagagagccatgaagcattaaaatgcatggtgttgagaagaatcaggagagggatacaagagaggagatggggtcccggcacccatctgtatcatcagtgcctctttgaaggtgggaaacattagtgaaaattctgttggtgccacgctttgatgagcatttgtttgaccccagtttcttcttacacttcttaccccagcctacccttcctgcatttctcttctcagctcttccatgatggattcccccccctttcctaaagccatcatgccttgataaatatatatgatcattgaaatactttttaacaaaaaacagattctatattattatatatatatatatatatataaagatatatagagatgcattcacaggggttggctgggaggaggaagaccattctgtgaccaaaataccttggtcattttttttatattgccttatttccctatggctgagccttgttgtgacacatcaagcttttctgtagatgttgtcttggcttcccaccagcttaagcgttcatatgctctgcttttagttcatatatacatacataatgtttttcctttcttaattttgtctttttgtttgggatcagcttcttgcactccttccctaactcaactgttgccgtctcatcttctctcatctgatcacttcatgttttgtttttgttactgcctggatgaggcacttctgtcaattttttcaggaccttagttccagcagcagaatggaaaaatccttgaagcccaggctgatgcttgaagtaactgtggagggagtgttcaaaatactactgacgcaggcaccttcttggcgctggagagtcaaaggcatctcccttcattagctgctctgagcatcaagaattagaagtctttcagtggaattgtacaagagtccctttgaagataataatcttggctcagtttgtataaactgtcaaattttcaaataataggtagggggctttcactaggaaaatcatgtgctcagaagaggaaatgactcgtagtcaggttcaggagttagtggagtatttggactttggtactgctgtcttccaaggtagctctaagttttgatgtgtgggcttctgagtttatattctgaaaggaaatacacttcttttgaacatccccactaggttcttttccattgtcaataaggagcatcagccagtgaatctgtttcaggtttccattctgcagaactcctccaaagcatgtgctagtggcaagacagtggttcttatgatgttttcccttaacttttccttgtatgttcttgggtggttcctaagggaaagggaagcacatgatcatgggaatgatagcccagaacaaaaagaaatcttgtcttaccacagtgttttataggagagattgggagaaatcatcctgttttctctgtgacctgatttcagaagagactgatccaaaaattataacggcagggaacctagtgcatttggcactgagatttaaatgcaaccagaattgtcctcaaggcccagccataaaagcattgtctctctcgaccttctggtatcttgttagagagcttttcactgtgaggaagtgtggaaaaatagctctgtgtgtgtgtgtgtgtgtgtgtgtgtgtgtgtgtgtaatctgttaggttggggataggttttctgctagccaatattaaaagagacctgcaataaaaaaattaccctgatctgatagaaagcaagtgtttttgtatgtgtgggtgaatgtgtgttcatgcccgtatatgtctacacacagatgacaaattatatttgaaatcgttggaaaataaattcagatcaaaatgcctttcaggcccattacctagaaatctatcttaaaacctgggtatgttcctaaggtcatttctttgcttatgctaaattaattacaattatgaatggaggatattctactgtacttttttaaaaagaaactatttttgtgtttgaaagtgaaaccaacatccagatctatagcagagtccttattcttctcataaatctttttactttggctacaaatagatgatggtatgattctattatatattttatataaaatccatccaaattaagttttgggtaagtgtgttgtttaatctgaactatagtaacttaatactctaaacaatagttcactccatttggtcctttctccacagatgtaattatgttttcaactcaggaactatggcaaggaactttccccagatcaaattctattaacgctgagatacaagtcatccatgcacagccactatcataccctttattctcactgaaaggcagaactcagaacctgttattttatgtctgtaatcatgtactttggcatcttttggaggaaaggggcaggataactcactggaatgtacagtattttgctagtgcatttcaaggaatggaatcttctccagtatgaaattaccagatataaaataatgtaatgatgctgaggatataagcttttagaaggtaatttgatggtatttctttctcgaatgaaaagctgctggtttaccctcaaccctattcattagcattaccatgagtgaatttatatctaattatttccacttgccctgttctcttcacaccaaggaagctccagatccagtatcttgtttggcctcaaaacagaagcagcttcttttgtctcccagcagtagtgagccactcagtctcttccacaggaagtttggagcctacattccttgagtcaggagcttattacagaaaaaccccgtttccctgaacttttggctaacagaaattaatttaactgacatgcatattgattctgaaatttttttcctaagtttttttcatttttttgaatgagttttttaaattttttagatgaccaaaacttgcagggcaggggatgcccagaagagtggtgagatagtaaaacacttattccctcatcctttcaggttttcaggttgcccatttatattcatttacatgtcatttgactgtctcactttttacccagaacagtaacaacccacaccgtcttccttcagggatttccaactggcactctgtgggtgctacacagaatgcaatttaatggatatttctcagcctggttcagaataaattgatcctttgatcccagaaagtatatactgaagtgtgggataaagattatgattaggggagggttggagacaaaagctgtaaattactatggctgatttatttctactatatacatatatattttttgcttttgtatatcctatataggaaactaagcattgtattttttttaacaaatctaaaaaagcactatgaactacaggtgtttgactttcaaaatatattttgtattgttaatatcttcacattgtgtgaatactggaagctgcagatctttgctaggacgcaataaatttatatactttttgaggggttcttctggggtgctaatcaggcccctgttatgcttagggggagccctggtgctacttgcttgaagttttcagtgtaagtaccctgatgccttttggaccttgggatcagatcaagagttttggagatcaggtaccaaggaaataaggacagtctagctgcctcaagtgaggggccctttgcatagctctccttccccctcactgaagctgggtagcctattggggttgagagggaaaatgtgaaatctcagaatttatctcccttagaagagagccagtaacttatgtacaaggatgaaagaaaggtcgcagcagtagctttggggaaagggaggaagatatggcacttctccaaccccggaaaacattgcttttgaaaactgctgataaaatatgagccggttattacttctgtttgggagactgtgctctctgtggtgcctctcttggctctactccacagataccagacctcttctaagaggatgagcagaccagctttgaggttgacctgtttctctttgtctgccttcccaaaacaccagcccccaggaagacattaagcagccttaagcttaaattcctactccctcttccaaatttggctcacttgccttagatccaaggcagggaaaggaaaagaaggggggtctctggctttattactcccctaagtctttactctgacttccccaaacccagaaagattttctccacagtgttcatttgaaagaggagtattttgtcccattttccccttcctcattatcaaacagccccagtcttccttgtctctgctaagaaagtagaggcatgatgatctgcctctcaactgccctaagtcctagctaagtatcaggggaaaaaaaaaaaaaaaaagcctaacaaatgggattagactagggctgcaagtagtgaggattttgttgatacctctgctgggatgtgtgctttcccatatcttgccttcaggaattacactgtgccttttccccagggatatgggctctgtctacccagtgctccagtttcccggtaactgctcttgaacattgtggacaagggcaggtcttcatatttttgatcatccctttctcccagtgaaatcccatagcccttacctagagtctagggcacaaagacttcggggaagatacactgagattgacctgaggagacatctacacacaccagtggcagctgccccagggcctgcttccccttcctaagtctgtcatcctctggaagggatgggtggtgctccaatctctggtgcctaaaaacccaagtttatttctctcttaacactggcaataaccagtccacaccactgttgccttttaaaacctcttaataatctcatgctgtgtttgttttgattccaatccaattatcaccagggctgtgtgggtaaatgcttttaaatgctctctcatcttgttcttccccctcaccccccactcttaggtatgtatgatgctaatcttgtccctaagtaagtttcttcctgctccttttgtatcttcctttcttgtctttcctcctaccttttgtctcttggtgttttgggacttttttttttttttttttggccttttgtacaaagattagtttcaatgtagtctgtagcctcctttgtaaaccaattaaaaagttttttaataaaaaa

SEQ ID NO: 236629 - protein, 1227 aa, Artificial Sequence
  derived and/or modified sequence
MAAVLESLLREEVSVAAVVRWIARSTQGSEDNAGEAAALSSLRALRKEFVPFLLNFLREQSSRVLPQGPPTPAKTPGASAALPGRPGGPPRGSRGARSQLFPPTEAQSTAAEAPLARRGGRRRGPGPARERGGRGLEEGVSGESLPGAGGRRLRGSGSPSRPSLTLSDPPNLSNLEEFPPVGSVPPGPTGTKPSRRINPTPVSEERSLSKPKTCFTSPPISCVPSSQPSALDTSPWGLGLPPGCRSLQEEREMLRKERSKQLQQSPTPTCPTPELGSPLPSRTGSLTDEPADPARVSSRQRLELVALVYSSCIAENLVPNLFLELFFVFQLLTARRMVTAKDSDPELSPAVLDSLESPLFQSIHDCVFFAVQVLECHFQVLSNLDKGTLKLLAENERLLCFSPALQGRLRAAYEGSVAKVSLVMPPSTQAVSFQPETDNRANFSSDRAFHTFKKQRDVFYEVLREWEDHHEEPGWDFEKGLGSRIRAMMGQLSAACSHSHFVRLFQKQLLQMCQSPGGAGGTVLGEAPDVLSMLGADKLGRLWRLQERLMAPQSSGGPCPPPTFPGCQGFFRDFILSASSFQFNQHLMDSLSLKIQELNGLALPQHEPNDEDGESDVDWQGERKQFAVVLLSLRLLAKFLGFVAFLPYRGPEPPPTGELQDSILALRSQVPPVLDVRTLLQRGLQARRAVLTVPWLVEFLSFADHVVPLLEYYRDIFTLLLRLHRSLVLSQESEGKMCFLNKLLLLAVLGWLFQIPTVPEDLFFLEEGPSYAFEVDTVAPEHGLDNAPVVDQQLLYTCCPYIGELRKLLASWVSGSSGRSGGFMRKITPTTTTSLGAQPSQTSQGLQAQLAQAFFHNQPPSLRRTVEFVAERIGSNCVKHIKATLVADLVRQAESLLQEQLVTQGEEGGDPAQLLEILCSQLCPHGAQALALGREFCQRKSPGAVRALLPEETPAAVLSSAENIAVGLATEKACAWLSANITALIRREVKAAVSRTLRAQGPEPAARGERRGCSRACEHHAPLPSHLISEIKDVLSLAVGPRDPDEGVSPEHLEQLLGQLGQTLRCRQFLCPPAEQHLAKCSVELASLLVADQIPILGPPAQYRLERGQARRLLHMLLSLWKEDFQGPVPLQLLLSPRNVGLLADTRPREWDLLLFLLRELVEKGLMGRMEIEACLGSLHQAQWPGDFAEELATLSNLFLAEPHLPEPQLRACELVQPNRGTVLAQS

SEQ ID NO: 236630 - DNA, 3684 bp, Artificial Sequence
  derived and/or modified sequence
atggcggccgtactggagagcctgctccgtgaggaagtcagcgtcgctgctgtggtcagatggatagctcggagtacgcagggttccgaagataacgctggagaggcggcggcattaagttctttaagggctctcaggaaggagtttgtaccttttctgctcaacttccttcgcgagcaatcctccagagttttaccgcagggaccaccaactccggccaaaacgcctggggcttccgccgcactcccaggcaggccaggtgggccgcctcgcggatccaggggcgccagatcccagttgtttcctcccactgaggctcagagtacagccgccgaggctcctctggctcgccggggaggacggcgtcggggtcccggccctgctcgtgagaggggcggccgaggactggaggaaggggtgtccggagagtccctacccggggcaggcggacggagactccgcggctctgggtccccttctaggccttctctgactctcagcgatcctccaaatctttcaaacctggaggaattcccaccagtgggcagcgttccccccggacccacaggtaccaagccctcccgccgaatcaatcctacacctgtgtctgaggagagatcactgtccaaacctaagacatgctttactagtccacctataagctgtgtgcctagctcacagccatctgccctcgacacatccccttggggtcttgggctgcctcctggatgtcgatctctgcaggaggagagagagatgctgaggaaagaacggtcaaagcaactgcagcaaagtccaaccccgacatgtccgacccccgagctgggctctccactgccctcgcgaacaggctccctgactgatgaaccagctgatcccgctcgcgttagtagcagacagcggttagagctcgtcgctcttgtatatagctcttgcatcgcggagaacctggtgcccaacctcttcctggagctgttcttcgtctttcaactattgaccgctcggagaatggttacagccaaggactcagaccccgagctcagtcccgctgtccttgatagtttggagtcccccctgttccagagcatccacgattgcgtcttttttgccgtgcaggtcttggagtgtcacttccaagtcctgtcaaacctggacaagggaacactgaagttactggctgagaacgaaagactgctgtgtttcagtcccgcgctccagggccggttacgggctgcttatgagggctccgtagccaaggtgtcattggtcatgccccctagtacccaggctgtgtccttccaacccgaaaccgataatcgagccaacttctcaagtgatagagcttttcacacttttaagaagcagcgcgatgtgttctacgaggtgctcagggaatgggaggatcatcacgaagagccaggctgggacttcgaaaagggcctgggctcacggattagagccatgatgggacaacttagcgccgcatgctcccactcccatttcgttagactatttcagaaacagctactccagatgtgtcagtcaccaggaggcgccggcggaactgtcttgggcgaagctccggatgtcctttccatgctgggagccgacaagctcgggaggctgtggcgtcttcaagagcgcttgatggcccctcagagcagcggcggcccctgtcccccacccacattcccaggatgccaagggtttttcagagattttatcctgtcagcttcatcttttcagtttaaccagcatctgatggattcgctcagcctgaagatccaagagctcaatggattggccctgccacagcatgagcctaacgatgaggacggggagtccgacgtcgactggcagggggagcgaaagcaatttgctgttgtgctgctcagcctcaggctcctcgccaagtttctgggcttcgtcgcctttttgccttatagaggccccgagcctcccccaaccggagagctccaggatagcatccttgctttgcgatcacaggtgccacccgtgctggacgttagaactctcctgcagcgcggacttcaagcacgacgagcagtgttaaccgtgccatggctagtcgagtttctgagtttcgccgaccacgtggtgcctctcctcgaatattatcgcgatatctttacgctgctccttaggctgcaccgatccctcgtgctgtctcaagagagtgaaggcaagatgtgcttcctgaacaaactcctgctattggctgtgttaggatggctcttccaaattccgaccgtgcccgaggacttgttttttctggaggaggggccaagttacgcgttcgaggtagatactgtggctcctgaacatggcctcgacaatgcccctgttgtggatcagcagctgctgtacacctgctgcccctacattggtgagctgagaaagttgctcgcatcttgggtgtccggatcctccggtcgctcaggtgggttcatgcggaaaataaccccaaccacgacaacatccctcggggcccagccttcacaaacgtcccagggcttacaagcccagcttgctcaagccttttttcacaatcagccaccaagtctccgccggacggtggagtttgtcgcggagagaatcggttctaactgtgttaagcacatcaaagccacactggtggcagacctagtgcgacaagctgaaagcctactacaggagcagctggtgacacagggcgaagaaggaggcgatccagcccagctgctcgagatactgtgttctcagctgtgtccacacggggcacaagcactggctttgggccgcgagttttgtcagaggaagtctcctggggccgttcgtgcgttgcttccagaagaaacccccgctgcggtcctctcctcagctgagaatatcgcggtgggacttgcaaccgaaaaagcttgcgcttggctgagcgctaacataactgcattaatccgacgcgaggtgaaagccgccgtttctcggactctgcgcgcacaggggccggaacctgccgctcgaggagagagacgcgggtgctctcgtgcttgcgagcaccatgctccactgccctctcatcttatatctgaaattaaggatgtgctgtctcttgcagtgggcccccgcgacccagacgagggagtgagtccagaacatctcgagcagctcctgggccagctgggccagacccttcgctgtcgtcaattcttatgtccaccggccgagcagcacctggctaagtgcagcgtcgagctggctagcctcttggtggcagatcagatacccatactgggcccacccgcccaatacaggcttgagcgcgggcaagcaagacgactgctccatatgctgctctcattgtggaaggaggacttccaaggacccgtgccccttcagttgttactttctcctcgcaacgtcggactgttggccgacacccgtccaagggaatgggatctgctgctgtttctgcttcgggagctggtcgagaaggggctaatgggccggatggaaattgaagcctgtttgggatctttgcaccaagcccaatggcccggtgacttcgcagaggagcttgctacactgagtaaccttttcctggctgagcctcatctgcctgagccgcagctccgggcctgcgaactcgtccagcccaaccggggtacggtactggcccagtcttag

SEQ ID NO: 236631 - DNA, 3684 bp, Artificial Sequence
  derived and/or modified sequence
atggctgctgtgctggagagcctgctgcgggaggaggtgtctgtggccgctgtggtgcgctggatcgcccggagcacccagggcagcgaggacaatgctggggaggccgccgccctgagcagcctgcgggccctgaggaaggagtttgtgcccttcctgctgaacttcctgcgggagcagagcagccgggtgctgccccagggcccccccaccccagccaagacccctggggccagcgctgccctgcccggccggcctgggggccccccccggggcagcagaggagcccggagccagctgttccccccaacagaggcccagagcacagctgctgaggcccccctggccaggagaggaggaagaagaagaggccctggccctgcccgggagcggggcggccggggcctggaggagggcgtgtctggagagagcctgcccggggccggcggccgccgcctgcggggcagcggcagccccagccggcccagcctgaccctgagtgacccccccaacctgagcaacctggaggagttcccccctgtgggctctgtgcccccaggccccaccggcaccaagcccagccgccgcatcaaccccacccctgtgtctgaggagaggagcctgagcaagcccaagacctgcttcaccagcccccccatcagctgtgtgcccagcagccagcccagcgccctggacaccagcccctggggcctgggcctgcccccaggctgccgcagcctgcaggaggagcgggagatgctgaggaaggagaggagcaagcagctgcagcagagccccacccccacctgccccaccccagagctgggcagccccctgcccagcaggacaggcagcctgacagatgagcctgctgaccctgcccgggtgagcagccggcagaggctggagctggtggccctggtgtacagcagctgcatcgccgagaacctggtgcccaacctcttcctggagctgttctttgtgttccagctgctgacagcccggaggatggtgacagccaaggacagcgaccctgagctgagccctgctgtgctggacagcctggagagccccctcttccagagcatccatgactgtgtgttctttgctgtgcaggtgctggagtgccacttccaggtgctgagcaacctggacaagggcaccctgaagctgctggccgagaatgaaaggctgctgtgcttctccccagccctgcagggccgcctgcgggccgcctatgagggctctgtggccaaggtgtccctggtgatgccacccagcacccaggccgtgtccttccagcctgagacagacaacagagccaacttcagcagtgaccgggccttccacaccttcaagaagcagagagatgtgttctatgaggtgctgcgggagtgggaggaccaccacgaggagcccggctgggactttgagaagggcctgggcagccgcatccgggccatgatgggccagctgtctgctgcctgcagccacagccactttgtgcggctcttccagaagcagctgctgcagatgtgccagagccctgggggcgccggcggcaccgtgctgggggaggccccagatgtgctgtccatgctgggcgctgacaagctgggccgcctgtggaggctgcaggagcggctgatggccccccagagcagcggcggcccctgccccccacccaccttccctggctgccagggcttcttccgggacttcatcctgagcgccagcagcttccagttcaaccagcacctgatggacagcctgagcctgaagatccaggagctgaatggcctggccctgccccagcacgagcccaatgatgaagatggagagagtgatgtggactggcagggcgagaggaagcagtttgctgtggtgctgctgagcctgcggctgctggccaagttcctgggctttgtggccttcctgccctaccggggccctgagcccccacccaccggggagctgcaggacagcatcctggccctgcggagccaggtgccccctgtgctggatgtgaggaccctgctgcagaggggcctgcaggccaggagagctgtgctgactgtgccctggctggtggagttcctgagctttgctgaccacgtggtgcccctgctggagtactacagagacatcttcaccctgctgctgcggctgcacaggagcctggtgctgagccaggagagcgagggcaagatgtgcttcctgaacaagctgctgctgctggccgtgctgggctggctgttccagatccccaccgtgcctgaggacctcttcttcctggaggagggccccagctatgcctttgaggtggacacagtggcccctgagcacggcctggacaatgcccctgtggtggaccagcagctgctgtacacctgctgcccctacatcggggagctgaggaagctgctggcctcctgggtgtctggcagcagcggccgcagcggcggcttcatgaggaagatcacccccaccaccaccaccagcctgggcgcccagcccagccagaccagccagggcctgcaggcccagctggcccaggccttcttccacaaccagccccccagcctgcggaggacagtggagtttgtggccgagagaattggcagcaactgtgtgaagcacatcaaggccaccctggtggccgacctggtgcggcaggccgagagcctgctgcaggagcagctggtgacccagggcgaggagggcggggaccctgcccagctgctggagatcctgtgcagccagctgtgcccccatggagcccaggccctggccctgggccgggagttctgccagaggaagagccctggagctgtgcgggccctgctgcctgaggagaccccagctgctgtgctgagcagcgctgagaacattgctgtgggcctggccacagagaaggcctgtgcctggctgagcgccaacatcacagccctgatccggcgggaggtgaaggctgctgtgtccaggaccctgcgggcccagggccctgagcctgctgcccggggggagcggcggggctgcagccgggcctgtgagcaccacgcccccctgcccagccacctgatcagcgagatcaaggatgtgctgagcctggccgtgggcccccgggaccctgatgaaggagtgtccccagagcacctggagcagctgctgggccagctgggccagaccctgcgctgccggcagttcctgtgccccccagctgagcagcacctggccaagtgcagcgtggagctggccagcctgctggtggccgaccagatccccatcctgggccccccagcccagtaccgcctggagcggggccaggcccggcggctgctgcacatgctgctgagcctgtggaaggaggacttccagggccctgtgcccctgcagctgctgctgagccccagaaatgtgggcctgctggccgacacccggccccgggagtgggacctgctgctcttcctgctgcgggagctggtggagaagggcctgatgggccgcatggagattgaggcctgcctgggcagcctgcaccaggcccagtggccaggggactttgctgaggagctggccaccctgagcaacctcttcctggccgagccccacctgcctgagccccagctgcgggcctgtgagctggtgcagcccaacagaggcaccgtgctggcccagagctag

SEQ ID NO: 236632 - DNA, 3684 bp, Artificial Sequence
  derived and/or modified sequence
atggccgccgtgctggagagcctgctgcgggaggaggtgagcgtggcggccgtggtaagatggatcgcccggtcaacgcagggaagtgaggataacgcaggggaggcagctgccttatcatcacttagggcactgcggaaagagtttgttccatttctgttgaattttctgcgcgagcagagcagtcgagtcctaccccaggggccccctacccccgcaaaaacacctggagcaagtgcagcgctacctggcaggccaggtggcccccccagaggcagcagaggggcacgctcccagcttttccccccaaccgaagctcagtccactgcagcagaggcccctttggccaggcgagggggccggcgtcgaggcccgggtccggcaagggaaaggggcggcagaggactagaggaaggagtctctggcgaaagcctcccaggcgctgggggccgacgcctgcgcggttctggttccccgagtcggccctcccttaccctatctgatccaccaaacctatccaatctggaagagttcccacccgttggctcagttcctcccggacccacaggtaccaagcctagccgaagaattaatccaaccccggtgagcgaggagaggtccctgtcaaaacctaagacatgcttcacctccccaccaatcagctgtgtcccatctagccaaccatcagcgctcgacacctctccctggggactgggtctcccacccggctgtaggtccctacaggaggagcgagaaatgctgcgtaaagagaggtccaagcaactacaacagtctccaactcccacctgtcctactccggagctgggctcccctctgccctccaggaccggaagtctgaccgatgagcctgctgatcccgctcgggtgagttctaggcagaggttggagctcgtggctctggtgtactctagctgcatcgcagagaatctggtacccaatctcttcctggagcttttctttgtatttcagctcctcaccgcacgcaggatggtgacagcgaaggactctgaccccgagctgagccccgcagttttagactcccttgagtcaccactatttcagtctatccacgattgtgtattctttgcggtccaggtcctggagtgccatttccaggttctttccaacctggacaaaggcaccctgaaattattggccgaaaacgagcgtctcttgtgcttctccccagcccttcaaggtcggctccgagcggcttacgaaggcagtgtagccaaggtttccctagtgatgcctcctagtactcaggctgttagctttcagcccgaaaccgacaatagggctaacttcagcagcgatagagccttccacacctttaagaagcagagagacgtgttctacgaggtgcttagagagtgggaagaccaccacgaagagcctggctgggacttcgagaagggcctggggtcccgcattagggctatgatgggacagctcagcgccgcctgttctcattcccactttgtaagactgtttcaaaaacagcttcttcagatgtgccaaagtcctggcggcgccggcggcaccgtgctcggggaggcccccgatgtattatcaatgctgggtgctgataagcttgggcgtctgtggaggctgcaggaacggttgatggcaccacagtccagtggtggtccctgcccccctccaacattcccagggtgccagggattcttcagagacttcattctgtccgcttcctcttttcagtttaatcagcaccttatggactctctttctctgaagatccaagaactgaacgggctcgccttaccccagcacgagccgaacgacgaggatggtgagagtgacgttgattggcagggcgagaggaagcagttcgccgttgtgctcctgagcttaaggttgttagcaaaatttctcggcttcgttgccttcctgccttacagagggccagagcccccgcccaccggagagctgcaggactcgattctggcattgaggtcccaggtacctcccgtgctggacgtgcgaacattgttgcaaaggggccttcaagctcgcagggcagtcctcacagtaccttggctagtggagtttctctcgtttgccgaccatgtcgttcctctgcttgaatactatagagacatatttaccttgctactgaggctgcatcggtctctagtactctcacaggagtctgaggggaaaatgtgcttcctcaacaagttactcttactcgctgtattaggctggctgttccaaatccctaccgttccagaggacttgttttttctcgaggaggggcccagctatgccttcgaagtcgacacggtagcccctgaacatggcttagacaacgcccccgtggtggaccagcagttactctatacttgctgtccctacatcggcgagctgcggaaattgctggcctcttgggtctccggatcttcgggcaggtcagggggtttcatgaggaagattactcccactacaaccactagcctcggcgcacagccctcccaaacatcccaaggcctgcaggcccagctggcgcaggccttcttccacaaccaaccccccagcctcagacgcacggtggagtttgtggcggagaggattgggagtaattgcgtcaagcacattaaggctaccttggtggccgacctggtgaggcaggccgagtcccttcttcaggagcagctagtcacacagggagaagaaggaggagaccccgcccagctcctggaaatattgtgcagccaactgtgcccacatggcgcccaggccctggcgctcggcagggaattttgccagcggaagtcccctggtgctgtacgcgctttgttaccagaagagactccagcggctgtgctttccagtgctgagaacattgcggtggggctcgcaacggaaaaagcctgtgcctggcttagcgccaacattactgccctcattagacgtgaggtcaaagctgctgtgagtcgcacgctgagagctcagggtcccgagcccgcagcccggggtgagagaaggggatgttcacgtgcttgcgagcaccacgccccactgccctcccacctgataagcgaaatcaaagatgttctgtctctggctgtggggccacgggatcctgacgagggcgtgtcacctgaacatctcgagcagttacttggacagctgggccagactctcagatgccgccagttcctctgccccccagccgaacaacatctcgccaaatgttccgtagagttagcttccctcctggtggctgatcagattcccatcctggggcctcctgctcagtaccgattggagagaggccaggctcggcgcctgctccacatgcttctgagcttgtggaaggaagacttccagggccctgttcctttacagctgctcctgagtccgagaaacgtgggccttctggcagacaccaggccacgcgaatgggacttgctgttgttcctgctcagagagcttgtggagaaagggctcatgggtaggatggaaatcgaggcatgtttgggctcactacaccaagcccagtggccaggggatttcgcggaggaattagcaaccctgtcgaacttattcctggcagaaccccacttaccagaaccacaactgagggcatgtgaacttgtccaaccaaataggggcaccgttttggcacagtcttag

SEQ ID NO: 236633 - DNA, 3684 bp, Artificial Sequence
  derived and/or modified sequence
atggccgcagtgctggaatccctgctccgggaggaggtttcagttgctgctgtcgtacggtggatagctcggtcaactcaaggttccgaagacaatgcgggagaagccgctgcactaagtagtcttagagcgttaagaaaggaatttgtgcccttccttcttaacttccttagggaacaatcttcacgggtccttcctcaggggccacctactcccgctaaaacacctggggcttctgccgctctgcctgggagaccaggcggacctcctcggggatcacggggagccaggtcccaactgtttcctccgactgaggcacagtccaccgcagcagaagccccactggccaggagagggggtcgaagaagaggccctggccctgcacgggaacgtgggggacgcggattggaagagggcgtaagcggggagtcactgcctggcgctggtgggcgtcgcctgcgtggcagtggctcccccagtagaccaagtttgacgctgagcgacccaccaaatctgagtaatctggaggagtttccaccagttggctcagtgcctccaggcccaaccggaacaaagcctagtcgacgaattaaccccactcccgtatcagaagagaggtcactctctaaaccgaaaacatgttttacatcccccccaatctcttgcgttccctcctcgcagccgtccgcactcgacacctctccttggggcttaggattaccaccgggatgtaggtccctgcaggaggaacgtgagatgctgaggaaggaacgctccaagcaactccagcagtctccaacgcccacatgccccactcctgagctcgggtcccctcttccctccagaacaggcagtctgacagatgagcccgctgaccccgcacgtgtttcttctaggcagcgcctggaacttgtggcactcgtgtactcctcctgcattgcagagaacctcgtgcccaatctgtttttagagctttttttcgttttccaactgctgacagctagacgcatggtgaccgcgaaggatagcgaccccgagctcagtcccgcagttctcgacagtctcgagtctcctctgttccagagcatccacgactgtgtcttcttcgccgtccaggtgctcgagtgtcacttccaggtgctttcaaacttggacaagggcacgctcaaactgctcgcagagaacgagagattactgtgcttttccccagcactgcaagggaggctgcgtgctgcttacgaaggatccgtagccaaggttagcctggtgatgccccctagtacccaggccgtgtccttccagccggaaacggataacagagcgaacttttcatctgatcgagccttccacacctttaaaaagcagagggatgtcttctatgaagtgttaagagagtgggaggatcaccatgaggaacccggatgggactttgaaaaaggtctaggtagcaggattagagctatgatgggccagctctcggccgcttgcagccattcacatttcgtgaggttatttcagaagcagctcttacagatgtgtcagagccctggtggcgctggtggcacagtgctgggtgaggcgcctgatgtactctccatgttgggtgcggataagctaggtcgtctgtggagactccaggagcgactgatggctccacagtcaagcggcggtccctgtcctccacctacgttcccaggctgtcaaggtttctttagagattttattctgtccgccagctcgtttcaatttaatcagcacttaatggactctctaagtctgaaaattcaggaactgaatgggctggctcttcctcagcacgaaccaaatgacgaggacggcgaatctgacgtcgattggcagggcgagcgcaaacagttcgcggtggttctgctctctctacgcctcctggctaagtttctgggattcgtggcctttcttccttacagaggacccgaaccaccgccaactggcgagctccaggatagtatcctggcccttaggtcacaggtccccccagtcctagatgtacgcaccctcctgcagagaggcctccaagcaaggagagctgttctaaccgtgccatggctggtggaatttctctcctttgccgatcatgtggtacctctgttggagtactaccgggatatttttactctcctgcttagactgcaccgttctcttgtgctgtcccaggagagcgaggggaaaatgtgcttcctgaacaagctgctgctacttgcagtcctgggctggctgttccagataccaactgttcccgaagatctgtttttccttgaagaaggtccatcctacgccttcgaggtcgatacagtcgctccagaacatggcctcgacaacgctccagtggtggatcaacaattattgtatacatgctgtccttatattggggaacttcgaaagctcttggcctcatgggtgtcaggtagcagtggacgctctggagggttcatgagaaaaatcaccccgacaacaaccaccagcctcggggctcagccctcacagacctcccaggggctacaagcccagctggcacaagccttctttcacaaccagcctcccagtctgcgcaggacagtggagttcgtggccgagagaataggaagcaattgcgtgaagcacattaaggccaccctcgtggctgatttggttagacaggctgagtccctcctacaggagcagctcgtgacgcagggcgaagaaggtggtgatcctgcgcagctcctggaaatcttgtgctcccaactttgcccacacggggcacaggccttggcactgggcagagaattttgtcagagaaagtcgcccggagccgtgagggctctgctacccgaggagacaccggcagccgttctgagttccgcagagaacatcgcggtcgggctggccacagagaaagcctgcgcctggcttagcgcaaacattaccgcccttattcgccgagaagtgaaggctgcagtcagcagaacactgagggcacagggcccagagcctgcagcacgcggtgaacgacgcggttgctctagagcgtgtgaacatcacgcccctttgccttcgcatctgatctccgaaatcaaagacgtgctttccctggccgttggtcctagggacccagacgagggcgtttcaccggaacacctggagcagctcttgggccagctgggtcaaaccctgcgttgtcggcagtttctgtgtcctcctgccgagcagcacttggcaaaatgctctgtggagctggcatccctgttggtcgctgatcagatcccaatactggggcctcccgctcagtaccggctcgaacgtggccaggccaggcgactgctacacatgctgctctccctgtggaaggaagatttccagggaccggtccctttacaactcctgctctcccctcgcaatgtggggctgttagcagacacaaggccacgagaatgggatctgctgttatttctcctccgcgagttagtcgaaaaaggcctcatgggaagaatggagatagaagcttgtcttggcagcttgcaccaggcccaatggcccggagactttgctgaggaattagctacgctctcaaacctatttctggccgaaccacacctgcctgagccccaattgcgggcttgcgaactggtacagcccaacagggggacagtcttggctcaaagctag

SEQ ID NO: 236634 - DNA, 491 bp, Artificial Sequence
  derived and/or modified sequence
gtctgtccgaacccagacacaagtcttcactccttcctgcgagccctgaggaagccttctttccccagacatggccaacaagggtccttcctatggcatgagccgcgaagtgcagccatcccgcttagcctgcctcacccacacccgtgtggtaccttcagccctggccaagctttgaggctctgtcactgagcaatggtaactgcacctgggcagctcctccctgtgcccccagcctcagcccaacttcttacccgaaagcatcactgccttggcccctccctcccggctgcccccatcacctctactgtctcctccctgggctaagcaggggagaagcgggctgggggtagcctggatgtgggccaagtccactgtcctccttggcggcaaaagcccattgaagaagaaccagcccagcctgccccctatcttgtcctggaatatttttggggttggaactcaaaaaaaaaaaaaaaaaatcaatcttt

SEQ ID NO: 236635 - DNA, 4728 bp, Artificial Sequence
  derived and/or modified sequence
ccgggtccctccccatcccgcgacccaacggtcgttccccgccgccggccccgcccctccctggccgcccgcggcgcgccggcgcctgcgcagtcgccccagagcgccccgaccgggatggcggccgttttggagtcgctgctgcgagaagaggtgtcggtcgcagccgtcgtgcggtggatcgcgcgcagcacccagggttcggaggataacgctggggaggcggccgcgctgagctcactccgggccctgcggaaagaattcgtaccgttcctgttgaacttcctgagggagcagagcagccgcgtcctcccgcaggggcccccgacccccgccaagaccccgggcgcctcggcagccttgccagggaggccgggaggcccgccgcggggtagccgcggggcgcgcagccagcttttccctccgaccgaggcccagagcaccgctgccgaggcccctctggcccgccgcgggggcaggaggcggggcccggggccggcccgcgagcgtggaggccgcggcctggaggagggggtcagcggggagagcctgcccggagccgggggccggaggcttaggggctctggcagccccagccgccccagcctcacgctgtctgatccgccaaacctcagcaacctggaggagttccctcccgtaggctcggttccccccggccctacagggacgaagccttctcgcaggatcaacccaactccggtgagcgaagagcggtcactctccaagcccaagacctgcttcacctcacccccaatcagctgtgtccccagttcccaaccctcagccctggacactagcccttggggccttggccttcccccagggtgcagaagtctgcaagaggagcgagagatgctcaggaaggagcgctctaagcagctgcagcagtcacctacccccacctgtcccaccccagaattggggtcgcccctccccagccggacaggaagcctcacagatgaacctgcagaccctgccagagtgtcttcccgccagcgcctggagcttgtagcccttgtttactcctcgtgcattgctgagaacctggtaccaaacctcttcttggagcttttcttcgtctttcagctcctcactgcccggaggatggtgactgccaaggacagcgaccctgaactaagtccagctgtcctagattccctggaaagtccactgttccaaagcatccacgattgtgtcttctttgcagtgcaggttttggagtgtcactttcaggttctttccaacctggacaaagggaccttgaagctgctggctgagaatgagcggctgctgtgcttctcaccagctctgcaaggccgccttcgagctgcctatgagggcagtgttgccaaggtctctctggtgatgcctccctctactcaagctgtctcctttcagccagagactgacaatcgtgccaacttctccagtgaccgagcctttcatacttttaagaaacagagggatgtgttttatgaggtgctgcgagagtgggaagatcaccatgaggagcctggctgggattttgagaagggcttgggcagcagaatcagggccatgatgggtcagctctccgcagcctgcagccacagccactttgttcggcttttccaaaaacaactactccagatgtgtcagagccctggtggtgctgggggcaccgtcttgggcgaggccccagatgtgttgagtatgctgggagctgacaagctggggcggttgtggcgcctacaggaacggcttatggctcctcagagcagtggggggccctgcccaccccccaccttcccaggctgtcaaggcttctttagggacttcatccttagtgccagcagcttccagtttaaccagcatctcatggacagtctgagcttgaagatccaggagctcaatggtcttgccctgccccagcatgagcccaatgatgaagacggggagtcagacgtagactggcagggtgagcggaagcaatttgctgtggtgcttcttagcctgagacttttggctaaattcctgggctttgtggctttcctgccataccgggggcctgaacctcccccgaccggtgagcttcaggactccattctggccctcaggagccaggtccctccggtcctggatgtgcggactctgctgcagcgagggctgcaggcccgccgggcggtgctcaccgtgccctggctggtggagtttctctcctttgctgaccatgttgttcccttgctggaatattaccgggacatcttcactctcctgctgcgcctgcaccggagcttggtgttgtcgcaggagagtgaggggaagatgtgtttcctgaacaagctgctgctacttgctgtcctgggctggcttttccagattcccacagtccctgaggacttgttctttctggaagagggtccctcatatgcctttgaggtggacacagtagccccagagcatggcttggacaatgcgcctgtggtggaccagcagctgctctacacctgctgcccctacatcggagagctccggaaactgctcgcttcgtgggtgtcaggcagtagtggacggagtgggggcttcatgaggaaaatcacccccaccactaccaccagcctgggagcccagccttcccagaccagccaggggctgcaggcacagctcgcccaggcctttttccacaaccagccgccctccttgcgccggaccgtagagttcgtggcagaaagaattggatcaaactgtgtcaaacatatcaaggctacactggtggcagatctggtgcgccaggcagagtcacttctccaagagcagctggtgacacagggagaggaagggggagacccagcccagctgttggagatcttgtgttcccagctgtgccctcacggggcccaggcattggccctggggcgggagttctgtcaaaggaagagccctggggctgtgcgggcgctgcttccagaggagaccccggcagccgttctgagcagtgcagagaacattgctgtggggcttgcaacagagaaagcctgtgcttggctgtcagccaacatcacagcactgatcaggagggaggtgaaagcagcagtgagtcgcacacttcgagcccagggtcctgaacctgctgcccggggggagcggaggggctgctcccgcgcctgtgagcaccatgctcccctcccctcccacctcatctccgagataaaagacgtgctctccttggccgtggggccacgggaccctgacgagggagtctccccagagcatctggaacagctcctaggccagctgggccagacgctgcggtgccgccagttcctgtgcccacctgctgagcagcatctggcaaagtgctctgtggagttagcttccctcctcgttgcagatcaaattcctatcctagggcccccggcacagtacaggctggagagagggcaggctcgaaggcttctgcacatgctgctttccttgtggaaggaagactttcaggggccggttccgctgcagctgctgctgagcccaagaaatgtggggcttctggcagacacaaggccaagggagtgggacttgctgctattcttgctacgggagctggtggagaagggtctgatgggacggatggagatagaggcctgcctgggcagcctccaccaggcccagtggccaggggactttgctgaagaattagcaacactgtctaatctgtttctagccgagccccacctgccagaaccccagctaagagcctgtgagttggtgcagccaaaccggggcactgtgctggcccagagctagggctgagaagtggccctgccttgggcattgcaccagaaccctggacccccgcctcacgaggaggcccaagtgcccaatgcagaccctcactggttggggtgtagctgggtctacagtcagacttcctgctctaagggtgtcactgcctggcatcccaccacgcgaatcctagaggaaggagagttggcctgatttgggattatggcagaaaagtccagagatgccagtcctggagtagaagaggtggtgtttgtttatctcttggatactaaatgaaatgaggtgtgtgggcttgtcaacacagaattcaagcctcatttgctatcccagcatctcttaaaactttgtagtcttggaattcatgacagaggcaaatgactcctgcttaacttatgaagaaagttaaaacatgaatcttgggagtctacattttcttatcaccaggagctggactgccatctccttataaatgcctaacacaggccgggtctggtggctcatgcctgtaatcccagcactttgagaggcctgaggtcggcggactgcctgaggtcaggaattcaagaccagcctggccaacatggcaaaaccccatctctactaaaaataaaaaaattattagctgggcatggtggtgtgtgcctgtaatcccagctactcaggaggatgaggcaggagacctgcttgaacctggaggtggaggttgcagtgagccgaggtcgcaccactgcactccagtctgggtaacagagcgagactttctagaaaaagcctaacaaacagataaggtaggactcaaccaactgaaacctgactttccccctgtaccttcagcccctgtgcaggtagtaacctcttgagacctctccctgaccagggaccaagcacagggcatttagagctttttagaataaactggttttcttt

SEQ ID NO: 236636 - DNA, 3684 bp, Artificial Sequence
  derived and/or modified sequence
atggccgccgtgctggagagcctgctgagagaggaggtgagcgtggccgccgtggtgagatggatcgccagaagcacccagggcagcgaggacaacgccggcgaggccgccgccctgagcagcctgagagccctgagaaaggagttcgtgcccttcctgctgaacttcctgagagagcagagcagcagagtgctgccccagggcccccccacccccgccaagacccccggcgccagcgccgccctgcccggcagacccggcggcccccccagaggcagcagaggcgccagaagccagctgttcccccccaccgaggcccagagcaccgccgccgaggcccccctggccagaagaggcggcagaagaagaggccccggccccgccagagagagaggcggcagaggcctggaggagggcgtgagcggcgagagcctgcccggcgccggcggcagaagactgagaggcagcggcagccccagcagacccagcctgaccctgagcgacccccccaacctgagcaacctggaggagttcccccccgtgggcagcgtgccccccggccccaccggcaccaagcccagcagaagaatcaaccccacccccgtgagcgaggagagaagcctgagcaagcccaagacctgcttcaccagcccccccatcagctgcgtgcccagcagccagcccagcgccctggacaccagcccctggggcctgggcctgccccccggctgcagaagcctgcaggaggagagagagatgctgagaaaggagagaagcaagcagctgcagcagagccccacccccacctgccccacccccgagctgggcagccccctgcccagcagaaccggcagcctgaccgacgagcccgccgaccccgccagagtgagcagcagacagagactggagctggtggccctggtgtacagcagctgcatcgccgagaacctggtgcccaacctgttcctggagctgttcttcgtgttccagctgctgaccgccagaagaatggtgaccgccaaggacagcgaccccgagctgagccccgccgtgctggacagcctggagagccccctgttccagagcatccacgactgcgtgttcttcgccgtgcaggtgctggagtgccacttccaggtgctgagcaacctggacaagggcaccctgaagctgctggccgagaacgagagactgctgtgcttcagccccgccctgcagggcagactgagagccgcctacgagggcagcgtggccaaggtgagcctggtgatgccccccagcacccaggccgtgagcttccagcccgagaccgacaacagagccaacttcagcagcgacagagccttccacaccttcaagaagcagagagacgtgttctacgaggtgctgagagagtgggaggaccaccacgaggagcccggctgggacttcgagaagggcctgggcagcagaatcagagccatgatgggccagctgagcgccgcctgcagccacagccacttcgtgagactgttccagaagcagctgctgcagatgtgccagagccccggcggcgccggcggcaccgtgctgggcgaggcccccgacgtgctgagcatgctgggcgccgacaagctgggcagactgtggagactgcaggagagactgatggccccccagagcagcggcggcccctgccccccccccaccttccccggctgccagggcttcttcagagacttcatcctgagcgccagcagcttccagttcaaccagcacctgatggacagcctgagcctgaagatccaggagctgaacggcctggccctgccccagcacgagcccaacgacgaggacggcgagagcgacgtggactggcagggcgagagaaagcagttcgccgtggtgctgctgagcctgagactgctggccaagttcctgggcttcgtggccttcctgccctacagaggccccgagcccccccccaccggcgagctgcaggacagcatcctggccctgagaagccaggtgccccccgtgctggacgtgagaaccctgctgcagagaggcctgcaggccagaagagccgtgctgaccgtgccctggctggtggagttcctgagcttcgccgaccacgtggtgcccctgctggagtactacagagacatcttcaccctgctgctgagactgcacagaagcctggtgctgagccaggagagcgagggcaagatgtgcttcctgaacaagctgctgctgctggccgtgctgggctggctgttccagatccccaccgtgcccgaggacctgttcttcctggaggagggccccagctacgccttcgaggtggacaccgtggcccccgagcacggcctggacaacgcccccgtggtggaccagcagctgctgtacacctgctgcccctacatcggcgagctgagaaagctgctggccagctgggtgagcggcagcagcggcagaagcggcggcttcatgagaaagatcacccccaccaccaccaccagcctgggcgcccagcccagccagaccagccagggcctgcaggcccagctggcccaggccttcttccacaaccagccccccagcctgagaagaaccgtggagttcgtggccgagagaatcggcagcaactgcgtgaagcacatcaaggccaccctggtggccgacctggtgagacaggccgagagcctgctgcaggagcagctggtgacccagggcgaggagggcggcgaccccgcccagctgctggagatcctgtgcagccagctgtgcccccacggcgcccaggccctggccctgggcagagagttctgccagagaaagagccccggcgccgtgagagccctgctgcccgaggagacccccgccgccgtgctgagcagcgccgagaacatcgccgtgggcctggccaccgagaaggcctgcgcctggctgagcgccaacatcaccgccctgatcagaagagaggtgaaggccgccgtgagcagaaccctgagagcccagggccccgagcccgccgccagaggcgagagaagaggctgcagcagagcctgcgagcaccacgcccccctgcccagccacctgatcagcgagatcaaggacgtgctgagcctggccgtgggccccagagaccccgacgagggcgtgagccccgagcacctggagcagctgctgggccagctgggccagaccctgagatgcagacagttcctgtgcccccccgccgagcagcacctggccaagtgcagcgtggagctggccagcctgctggtggccgaccagatccccatcctgggcccccccgcccagtacagactggagagaggccaggccagaagactgctgcacatgctgctgagcctgtggaaggaggacttccagggccccgtgcccctgcagctgctgctgagccccagaaacgtgggcctgctggccgacaccagacccagagagtgggacctgctgctgttcctgctgagagagctggtggagaagggcctgatgggcagaatggagatcgaggcctgcctgggcagcctgcaccaggcccagtggcccggcgacttcgccgaggagctggccaccctgagcaacctgttcctggccgagccccacctgcccgagccccagctgagagcctgcgagctggtgcagcccaacagaggcaccgtgctggcccagagctag

SEQ ID NO: 236637 - protein, 292 aa, Artificial Sequence
  derived and/or modified sequence
MAKERCLKKSFQDSLEDIKKRMKEKRNKNLAEIGKRRSFIAAPCQIITNTSTLLKNYQDNNKMLVLALENEKSKVKEAQDIILQLRKECYYLTCQLYALKGKLTSQQTVEPAQNQEICSSGMDPNSDDSSRNLFVKDLPQIPLEETELPGQGESFQIEATPPETQQSPHLSLKDITNVSLYPVVKIRRLSLSPKKNKASPAVALPKRRCTASVNYKEPTLASKLRRGDPFTDLCFLNSPIFKQKKDLRRSKKRALEVSPAKEAIFILYYVREFVSRFPDCRKCKLETHICLR

SEQ ID NO: 236638 - DNA, 879 bp, Artificial Sequence
  derived and/or modified sequence
atggctaaggagagatgtttaaaaaagtctttccaggactctctggaggacattaaaaagaggatgaaagagaaaagaaacaaaaatctggccgagattggtaagcgaaggagctttatagccgctccatgccaaatcataaccaacacatctacacttttgaagaactaccaggacaataacaagatgctggtactggctctggaaaacgagaagagtaaagtcaaggaagcccaagatataattctacagcttcgaaaagagtgttactacctcacctgtcagctgtatgcactgaagggcaagttgacttcccaacagaccgtggagccagcccagaaccaggaaatatgttcttccgggatggaccccaactccgatgattcatccagaaacctgttcgtgaaagacctgccgcaaattcccctcgaagaaaccgagttgcctggacagggcgaatccttccagattgaggccaccccccccgaaacccagcagtctccacaccttagcctcaaagacatcaccaacgtcagtttgtacccagtcgtgaagatcaggaggctctccctgtcccctaagaagaacaaggcaagccccgcagtggcactccccaagcgccgctgcacagcctctgtaaactacaaggagcccacccttgcttcaaagctcagacgcggcgatcccttcaccgacctgtgctttctgaactcacctatcttcaagcaaaagaaagatctgcgccgctcaaagaaacgcgctctcgaagtgtctccagctaaagaagccattttcatcctttattacgtacgggaatttgtatcccgtttccctgactgcagaaagtgcaagctggagactcatatttgtctgagatag

SEQ ID NO: 236639 - DNA, 879 bp, Artificial Sequence
  derived and/or modified sequence
atggcgaaagagcggtgtctcaagaaaagttttcaggactctctggaagacatcaaaaaacgcatgaaagagaagcgaaacaaaaatctggctgagatcggcaagagacgctcctttattgcggccccgtgtcaaataattacaaacacctctactcttctgaaaaactaccaggataacaacaaaatgctggttctggccctggaaaatgagaaatcgaaagtcaaagaggcccaagacatcatcctgcaactgcgcaaggaatgctattatttgacatgtcagctgtatgctctgaaaggcaagctgacatcccagcagactgtggagcccgcccagaaccaggagatatgtagctcaggtatggaccctaattcagatgactctagtcgcaatctatttgttaaggatcttccacagattccactcgaagagactgagttgccaggccaaggcgaatctttccagattgaggcaaccccccctgaaactcagcaatctccacatctctctctgaaggatataacaaacgtcagcctctatccagtggtcaaaatccgacgactgtctctgtccccaaagaaaaacaaagcctcccctgcggttgctctccccaaacgacggtgtacggcctcagtcaattataaggaaccaacactggccagtaagctgagacgcggggatcctttcactgacctgtgttttctaaattccccgattttcaaacaaaagaaagacctgcgcagaagtaaaaagcgggccctcgaggtgagccccgccaaggaagccatctttatcctctactatgtgcgcgagtttgttagtaggtttccggattgccgcaaatgtaagctggaaacccatatatgtctacgttag

SEQ ID NO: 236640 - DNA, 879 bp, Artificial Sequence
  derived and/or modified sequence
atggccaaggagcgctgcctgaagaagagcttccaggacagcctggaggacatcaagaagaggatgaaggagaagaggaacaagaacctggccgagatcggcaagaggaggagcttcatcgccgccccctgccagatcatcaccaacaccagcaccctgctgaagaactaccaggacaacaacaagatgctggtgctggccctggagaatgagaagagcaaggtgaaggaggcccaggacatcatcctgcagctgaggaaggagtgctactacctgacctgccagctgtatgccctgaagggcaagctgaccagccagcagacagtggagcccgcccagaaccaggagatctgcagcagcggcatggaccccaacagtgatgacagcagcaggaacctgtttgtgaaggacctgccccagatccccctggaggagacagagctgcccggccagggcgagagcttccagatcgaggccaccccacctgagacccagcagagcccccacctgagcctgaaggacatcaccaacgtgtccctgtaccctgtggtgaagatccggcggctgagcctgagccccaagaagaacaaggccagccctgctgtggccctgcccaagaggcgctgcacagcctctgtgaactacaaggagcccaccctggccagcaagctgcggcggggggaccccttcacagacctgtgcttcctgaacagccccatcttcaagcagaagaaggacctgcggcgcagcaagaagagggccctggaggtgtccccagccaaggaggccatcttcatcctgtactacgtgcgggagtttgtgagccgcttcccagactgcaggaagtgcaagctggagacccacatctgcctgaggtag

SEQ ID NO: 236641 - DNA, 879 bp, Artificial Sequence
  derived and/or modified sequence
atggccaaggagcggtgcctgaagaagagcttccaggacagcctggaggatatcaagaagcggatgaaggagaaacggaataagaatttagctgaaattgggaagcgtcggagcttcatcgccgcaccttgccagattataactaacacttcaactttgcttaagaattatcaggacaacaacaagatgttagtgctggcccttgagaatgagaaatctaaggtgaaggaggcacaggacatcatcctgcagctcaggaaggagtgttactatctcacatgccagctctacgctctgaaaggtaaacttaccagccaacaaacagtcgaacccgctcaaaatcaggagatctgctcatccggaatggacccaaacagtgatgatagttcacgcaacctgtttgtcaaagacctgccccagatcccactcgaggagaccgagttacctggacagggcgagtcatttcaaatcgaagccacacctcccgaaacgcagcaaagtccccatctgagcttgaaggacatcaccaatgtttctctatacccagtcgtgaaaattaggaggctgtcccttagtccaaaaaaaaacaaagcatctccggctgttgccttgccaaaaaggcgttgcactgcgagtgtgaattacaaggaacctactctggcctcgaagcttcgaagaggtgatcccttcacagacttgtgttttcttaactccccaatttttaaacagaagaaagacctgcggaggtccaaaaaacgcgctcttgaggtgtccccagccaaagaggctatttttattctgtattacgtgagggaattcgtgagtcgcttccccgactgtagaaagtgtaagctcgaaacacacatttgcctgcgctag

SEQ ID NO: 236642 - DNA, 879 bp, Artificial Sequence
  derived and/or modified sequence
atggccaaggagcggtgcctgaagaagagcttccaggacagcctggaggacatcaagaaaagaatgaaagaaaagagaaacaagaatctggctgagatcggcaaaagaaggtccttcatcgcagctccctgtcaaatcatcacgaacacctcaacactgctgaaaaattaccaagacaataacaagatgctcgtgctggctctcgaaaatgagaagagcaaagttaaagaggcacaggacatcatccttcagttacgaaaggagtgctattacctgacctgccagctctacgcactgaagggaaagctgacctctcagcagacagtggaaccagcccaaaatcaagagatctgcagctctggtatggaccctaacagtgatgattccagcagaaacctctttgtcaaggatttgccgcagatccccctggaggagacagagttaccaggccagggagagtctttccagattgaagcaacgcctccagagacacaacagagtccacacctcagcttaaaggacataaccaatgtgagtctgtatccagtcgtgaaaataaggcgactgagtctgtcccctaagaaaaacaaagcttctccagccgttgccctgccgaagcggaggtgcactgcttctgtgaattataaagagcctaccctggctagtaaactcaggcgcggggatccctttactgacctgtgctttttaaactcaccgatatttaaacagaaaaaagatctgaggcgtagtaagaaacgggccctggaggtctcaccagccaaggaggccatcttcatcctttactatgttagagaatttgtcagtcgcttccctgactgcaggaaatgtaaactggagacacatatctgcctgagatag

SEQ ID NO: 236643 - DNA, 879 bp, Artificial Sequence
  derived and/or modified sequence
atggctaaagaaagatgtctgaagaagtctttccaggatagcctggaagacattaagaagagaatgaaggagaagcgaaacaagaatcttgccgagattggaaaaagacgctctttcatagccgctccctgtcaaattatcactaataccagtactctgctgaagaactaccaggataataataagatgctggtgctagctctcgagaacgagaagtctaaagtaaaagaagcacaagacattattttgcagttgaggaaggaatgctactaccttacatgccagctttacgcgcttaagggcaaactcacgtctcagcagacagttgaacctgctcagaatcaagagatctgtagctccggaatggaccctaactctgacgattcttcccgaaacttattcgtcaaggatctaccgcagatccccttggaagagactgaactcccagggcagggagagtcattccaaatagaagcaactcctcctgaaacccaacagtcacctcatctgtcgctgaaagatattaccaacgtctccttatatcccgtggtcaaaattcggaggctcagcctgtcaccaaaaaagaacaaagcctctcctgctgtcgccctgcccaaaaggcggtgcacagcctctgtcaactataaagagccaacgttggcatctaagctgagacggggagacccatttacagacttgtgcttccttaatagccctatttttaaacagaaaaaagatctgcgacggtccaaaaagcgggcactggaagtttcccccgcaaaggaagccatcttcattttgtactacgtccgtgagtttgttagcaggttcccagactgccggaaatgtaagcttgaaacccacatctgcctcaggtag

SEQ ID NO: 236644 - DNA, 879 bp, Artificial Sequence
  derived and/or modified sequence
atggccaaggagagatgcctaaagaagagtttccaagactcattggaggacatcaaaaagcgcatgaaggaaaagcggaataaaaacctggccgaaatcggaaagaggaggtccttcatcgcagccccatgtcaaataatcaccaacaccagtactctcctcaaaaactatcaggacaacaataagatgctcgttctggccctagagaacgaaaagtcgaaggtgaaagaagctcaggacataatcctccagttgcggaaagagtgctattacctgacatgtcaattatacgcgctgaaagggaagctcacgtctcagcaaaccgttgaacccgctcaaaaccaagagatttgctccagtggaatggaccccaattcagacgactcatctcgtaatctgtttgtgaaggacctgccacagatcccattggaagaaacagagctgcctggccagggggaaagcttccagattgaagccacacctcctgagacccagcagtctccccacttgtcactcaaagatattactaacgttagtctgtaccccgtagtgaagatcaggcgtttaagtctgtcaccaaaaaagaataaagcatctccggctgtagctctcccaaaaagacggtgtaccgcctccgtgaactataaggagccaactctggcctcaaaactgagacgaggcgacccattcaccgacctgtgctttctgaacagccccatcttcaagcagaaaaaagacctacgtagatcaaaaaaacgcgcattggaggtgagtcccgctaaagaagcaatttttattctgtattatgttcgggagtttgtaagccggttccccgattgtcgtaaatgcaaattggagacacacatctgcctcaggtag

SEQ ID NO: 236645 - DNA, 1531 bp, Artificial Sequence
  derived and/or modified sequence
agttccaggcgacggcggacggtggtacggtcctggagggcccagtgcgcggggctagccgtggctggagagcttcgaagagccttgaaatgtgaggaggaggaagatagctgttgcagaagtagtggccaaggcaaaagatggccaaggaaagatgcctgaaaaagtcctttcaagatagtcttgaagacataaagaagcgaatgaaagagaaaaggaataaaaacttggcagagattggcaaacgcaggtcttttatagctgcaccatgccaaataatcaccaacacttctacactgctgaaaaattaccaagacaacaacaaaatgttagttttagctttggaaaatgaaaaatccaaagtgaaagaagcccaagatatcatcctacagctgagaaaagaatgttactatctcacatgtcagctatatgcattgaaaggaaaacttacatcacaacaaacagtagaacctgctcagaaccaggaaatatgttcctctggaatggaccccaatagtgatgacagctccagaaatttatttgtgaaggatttaccgcaaattcctcttgaagaaactgaacttccaggacaaggagaatcatttcaaatagaagctacaccacctgaaactcagcagtcacctcatcttagcctgaaggatatcaccaatgtctccttgtatcctgttgtgaaaatcagaagactttctctttctccaaaaaagaataaagcaagcccagcagtggctctgcctaaacgtaggtgcacagccagcgtgaactataaggagcccaccctcgcttcgaaactgagaagaggggacccttttacagatttgtgttttttgaattctcctattttcaagcagaaaaaggatttgagacgttctaaaaaaagagccctggaggtatcacctgccaaagaagcaatttttattttatattatgttcgagaatttgtttcgagattcccagactgtaggaaatgtaaacttgaaacccacatctgcttgaggtaaagtccacgggcttcacatccttagaaaacttttttagtccatgcattcactaatgtatgcagacctttaatagattctagctttatgtgttgggggagagatggaggggtgttgacagtctgtttcactcagcctacatacataataaaatctaagccctttaattagagatagcaactttcccagggtgaccgaggaatcagtacgtgttgaacccctcttttaagtttccttttggttgtgtcacttggagattgccttttctttcttgtaagctcagctgtgtcctcaaatatattgcattttacccagcatttccaggtgttttcaggggtcaaagtttttaagttatcttagtctttgatattgtgtaagcgaaattctccaatcccatctcctagatgatttttttttaaatcacaaaatgtgattatgcttaacagctgtttcctgtttctcttaaaataaaatccatttcctatttctcttaaaataaaatccattattcttaa

SEQ ID NO: 236646 - DNA, 1162 bp, Artificial Sequence
  derived and/or modified sequence
ctggagagcttcgaagagccttgaaatgtgaggaggaggaagatagctgttgcagaagtagtggccaaggtatcgttctggacgcgcctgcggcaggagggtcgccgcgtccacttccgccagccccacctccccccggccttcctggagtccctgaaagaggaagaagtaggttttaaggcaaaagatggccaaggaaagatgcctgaaaaagtcctttcaagatagtcttgaagacataaagaagcgaatgaaagagaaaaggaataaaaacttggcagagattggcaaacgcaggtcttttatagctgcaccatgccaaataatcaccaacacttctacactgctgaaaaattaccaagacaacaacaaaatgttagttttagctttggaaaatgaaaaatccaaagtgaaagaagcccaagatatcatcctacagctgagaaaagaatgttactatctcacatgtcagctatatgcattgaaaggaaaacttacatcacaacaaacagtagaacctgctcagaaccaggaaatatgttcctctggaatggaccccaatagtgatgacagctccagaaatttatttgtgaaggatttaccgcaaattcctcttgaagaaactgaacttccaggacaaggagaatcatttcaaatagaagctacaccacctgaaactcagcagtcacctcatcttagcctgaaggatatcaccaatgtctccttgtatcctgttgtgaaaatcagaagactttctctttctccaaaaaagaataaagcaagcccagcagtggctctgcctaaacgtaggtgcacagccagcgtgaactataaggagcccaccctcgcttcgaaactgagaagaggggacccttttacagatttgtgttttttgaattctcctattttcaagcagaaaaaggatttgagacgttctaaaaaaagagccctggaggtatcacctgccaaagaagcaatttttattttatattatgttcgagaatttgtttcgagattcccagactgtaggaaatgtaaacttgaaacccacatctgcttgaggtaaagtccacgggcttcacatccttagaaaacttttttagtccatgcattcactaatgtatgcagacctttaatagattctagctttatgtgttggggg

SEQ ID NO: 236647 - DNA, 879 bp, Artificial Sequence
  derived and/or modified sequence
atggccaaggagagatgcctgaagaagagcttccaggacagcctggaggacatcaagaagagaatgaaggagaagagaaacaagaacctggccgagatcggcaagagaagaagcttcatcgccgccccctgccagatcatcaccaacaccagcaccctgctgaagaactaccaggacaacaacaagatgctggtgctggccctggagaacgagaagagcaaggtgaaggaggcccaggacatcatcctgcagctgagaaaggagtgctactacctgacctgccagctgtacgccctgaagggcaagctgaccagccagcagaccgtggagcccgcccagaaccaggagatctgcagcagcggcatggaccccaacagcgacgacagcagcagaaacctgttcgtgaaggacctgccccagatccccctggaggagaccgagctgcccggccagggcgagagcttccagatcgaggccaccccccccgagacccagcagagcccccacctgagcctgaaggacatcaccaacgtgagcctgtaccccgtggtgaagatcagaagactgagcctgagccccaagaagaacaaggccagccccgccgtggccctgcccaagagaagatgcaccgccagcgtgaactacaaggagcccaccctggccagcaagctgagaagaggcgaccccttcaccgacctgtgcttcctgaacagccccatcttcaagcagaagaaggacctgagaagaagcaagaagagagccctggaggtgagccccgccaaggaggccatcttcatcctgtactacgtgagagagttcgtgagcagattccccgactgcagaaagtgcaagctggagacccacatctgcctgagatag

SEQ ID NO: 236648 - protein, 118 aa, Artificial Sequence
  derived and/or modified sequence
MTKKKRENLGVALEIDGLEEKLSQCRRDLEAVNSRLHSRELSPEAREGTEVSSAREPEEHAALCGHLYPPDARLCLLDHVSLALPHNQHRLPLGPLIRIKQALQASIGPRCWGVPLPT

SEQ ID NO: 236649 - protein, 97 aa, Artificial Sequence
  derived and/or modified sequence
MTKKKRENLGVALEIDGLEEKLSQCRRDLEAVNSRLHSRELSPEARRSLEKEKNSLMNKASNYEKELKFLRQENRKNMLLSVAIFILLTLVYAYWTM

SEQ ID NO: 236650 - protein, 114 aa, Artificial Sequence
  derived and/or modified sequence
MTKKKRENLGVALEIDGLEEKLSQCRRDLEAVNSRLHSRELSPEAREGTEVSSAREPEEHAALCGHLYPPDARLCLLDHVSLALPHNQHRLPLGPLIRIKQALQASIGPRCWGV

SEQ ID NO: 236651 - DNA, 565 bp, Artificial Sequence
  derived and/or modified sequence
atgcgcacatagcgacttggtgggcgcgtccagtgatgactgggggatcccggcaagtaacatgactaaaaagaagcgggagaatctgggcgtcgctctagagatcgatgggctagaggagaagctgtcccagtgtcggagagacctggaggccgtgaactccagactccacagccgggagctgagcccagaggccagagaaggaactgaagtttcttcggcaagagaaccggaagaacatgctgctctctgtggccatctttatcctcctgacgctcgtctatgcctactggaccatgtgagcctggcacttccccacaaccagcacaggcttccacttggccccttgatcaggatcaagcaggcacttcaagcctcaataggaccaaggtgctggggtgttcccctcccaacctagtgttcaagcatggcttcctggcggcccaggccttgcctccctggcctgctggggggttccgggtctccagaaggacatggtgctggtccctcccttagcccaagggagaggcaataaagaacacaaagctgttcccgtctgctgagt

SEQ ID NO: 236652 - DNA, 619 bp, Artificial Sequence
  derived and/or modified sequence
gcgcacatagcgacttggtgggcgcgtccagtgatgactgggggatcccggcaagtaacatgactaaaaagaagcgggagaatctgggcgtcgctctagagatcgatgggctagaggagaagctgtcccagtgtcggagagacctggaggccgtgaactccagactccacagccgggagctgagcccagaggccaggaggtccctggagaaggagaaaaacagcctaatgaacaaagcctccaactacgagaaggaactgaagtttcttcggcaagagaaccggaagaacatgctgctctctgtggccatctttatcctcctgacgctcgtctatgcctactggaccatgtgagcctggcacttccccacaaccagcacaggcttccacttggccccttgatcaggatcaagcaggcacttcaagcctcaataggaccaaggtgctggggtgttcccctcccaacctagtgttcaagcatggcttcctggcggcccaggccttgcctccctggcctgctggggggttccgggtctccagaaggacatggtgctggtccctcccttagcccaagggagaggcaataaagaacacaaagctgttcccgtctgctgagtaaa

SEQ ID NO: 236653 - DNA, 401 bp, Artificial Sequence
  derived and/or modified sequence
gcgcacatagcgacttggtgggcgcgtccagtgatgactgggggatcccggcaagtaacatgactaaaaagaagcgggagaatctgggcgtcgctctagagatcgatgggctagaggagaagctgtcccagtgtcggagagacctggaggccgtgaactccagactccacagccgggagctgagcccagaggccagagaaggaactgaagtttcttcggcaagagaaccggaagaacatgctgctctctgtggccatctttatcctcctgacgctcgtctatgcctactggaccatgtgagcctggcacttccccacaaccagcacaggcttccacttggccccttgatcaggatcaagcaggcacttcaagcctcaataggaccaaggtgctggggtgtt

SEQ ID NO: 236654 - DNA, 357 bp, Artificial Sequence
  derived and/or modified sequence
atgaccaagaagaagagagagaacctgggcgtggccctggagatcgacggcctggaggagaagctgagccagtgcagaagagacctggaggccgtgaacagcagactgcacagcagagagctgagccccgaggccagagagggcaccgaggtgagcagcgccagagagcccgaggagcacgccgccctgtgcggccacctgtacccccccgacgccagactgtgcctgctggaccacgtgagcctggccctgccccacaaccagcacagactgcccctgggccccctgatcagaatcaagcaggccctgcaggccagcatcggccccagatgctggggcgtgcccctgcccacctag

SEQ ID NO: 236655 - DNA, 294 bp, Artificial Sequence
  derived and/or modified sequence
atgaccaagaagaagagagagaacctgggcgtggccctggagatcgacggcctggaggagaagctgagccagtgcagaagagacctggaggccgtgaacagcagactgcacagcagagagctgagccccgaggccagaagaagcctggagaaggagaagaacagcctgatgaacaaggccagcaactacgagaaggagctgaagttcctgagacaggagaacagaaagaacatgctgctgagcgtggccatcttcatcctgctgaccctggtgtacgcctactggaccatgtag

SEQ ID NO: 236656 - DNA, 345 bp, Artificial Sequence
  derived and/or modified sequence
atgaccaagaagaagagagagaacctgggcgtggccctggagatcgacggcctggaggagaagctgagccagtgcagaagagacctggaggccgtgaacagcagactgcacagcagagagctgagccccgaggccagagagggcaccgaggtgagcagcgccagagagcccgaggagcacgccgccctgtgcggccacctgtacccccccgacgccagactgtgcctgctggaccacgtgagcctggccctgccccacaaccagcacagactgcccctgggccccctgatcagaatcaagcaggccctgcaggccagcatcggccccagatgctggggcgtgtag

SEQ ID NO: 236657 - DNA, 357 bp, Artificial Sequence
  derived and/or modified sequence
atgacgaagaagaagcgggaaaatctcggagtggcattagagatcgatgggctcgaagagaagctgtctcagtgcaggagggatctagaggctgtgaattctcggctccattctcgcgaactgtcacctgaggcacgggaagggaccgaggtttcatcagcccgagaaccggaggagcacgctgccctgtgtggccatctttatccgcccgatgcacggctttgccttctggatcatgtctctctcgcccttccccacaaccaacaccgtctcccacttggacctctcatccgtataaagcaggccctccaggcttccataggtcctcggtgctggggcgtgccactgcccacatag

SEQ ID NO: 236658 - DNA, 294 bp, Artificial Sequence
  derived and/or modified sequence
atgaccaagaaaaaaagagaaaacttgggtgttgcactggaaatcgatggactcgaagaaaagttgtcccaatgtcgtagggacctggaagctgtgaactcccgcctgcatagccgcgaactatccccggaagcacggcggtctcttgagaaggagaaaaactcattaatgaacaaggcttcgaattacgagaaggagttgaaatttttgcgacaagaaaaccgcaaaaacatgctgctctccgtcgcaattttcatactgcttaccctcgtgtacgcgtattggacaatgtag

SEQ ID NO: 236659 - DNA, 345 bp, Artificial Sequence
  derived and/or modified sequence
atgactaaaaagaaaagagagaatctgggagtggcactggagatagacgggctcgaggagaaactctcgcaatgccgccgtgacttggaggccgttaatagccgactccactcccgggagctaagcccggaggccagggaaggcaccgaggtgagcagtgccagggagcctgaagagcacgctgcattgtgcgggcatctgtatcctcctgacgcccggttgtgcttgctcgatcatgtttctttggcactcccccacaaccagcatcggctcccgttggggcctctcattcggattaagcaggccctgcaggcctccattggccccaggtgctggggtgtgtag

SEQ ID NO: 236660 - DNA, 357 bp, Artificial Sequence
  derived and/or modified sequence
atgaccaagaagaagcgggagaacctgggcgtggccctggagattgatggcctggaggagaagctgagccagtgccggcgggacctggaggccgtgaacagccggctgcacagccgggagctgagccctgaggcccgggagggcacagaggtgtcctctgcccgggagcctgaggagcacgccgccctgtgtggccacctgtaccccccagatgcccggctgtgcctgctggaccacgtgtccctggccctgccccacaaccagcaccggctgcccctgggccccctcatccgcatcaagcaggccctgcaggccagcatcggcccccgctgctggggcgtgcccctgcccacctag

SEQ ID NO: 236661 - DNA, 294 bp, Artificial Sequence
  derived and/or modified sequence
atgaccaagaagaagcgggagaacctgggcgtggccctggagattgatggcctggaggagaagctgagccagtgccggcgggacctggaggccgtgaacagccggctgcacagccgggagctgagccctgaggcccggcgcagcctggagaaggagaagaacagcctgatgaacaaggccagcaactatgagaaggagctgaagttcctgcggcaggagaacaggaagaacatgctgctgtctgtggccatcttcatcctgctgaccctggtgtatgcctactggaccatgtag

SEQ ID NO: 236662 - DNA, 345 bp, Artificial Sequence
  derived and/or modified sequence
atgaccaagaagaagcgggagaacctgggcgtggccctggagattgatggcctggaggagaagctgagccagtgccggcgggacctggaggccgtgaacagccggctgcacagccgggagctgagccctgaggcccgggagggcacagaggtgtcctctgcccgggagcctgaggagcacgccgccctgtgtggccacctgtaccccccagatgcccggctgtgcctgctggaccacgtgtccctggccctgccccacaaccagcaccggctgcccctgggccccctcatccgcatcaagcaggccctgcaggccagcatcggcccccgctgctggggcgtgtag

SEQ ID NO: 236663 - DNA, 357 bp, Artificial Sequence
  derived and/or modified sequence
atgaccaagaagaagcgggagaacctgggcgtggccctggagatcgacgggttggaagagaaactgtcccagtgtcgccgagatttggaggccgttaacagccggctccactcaagagagttatctcccgaggctcgcgagggtactgaagtgagcagcgctcgggagccagaggaacacgctgctctgtgtggtcatctgtaccccccagatgcccgactgtgtcttctcgaccacgtctctctggccttgccacataaccagcatcgccttcccctcggtccccttatcagaatcaagcaggctttgcaggctagcattggacccaggtgctggggtgtcccactaccaacgtag

SEQ ID NO: 236664 - DNA, 294 bp, Artificial Sequence
  derived and/or modified sequence
atgaccaagaagaagcgggagaacctgggcgtggccctggagatcgacggactagaggagaaattatcccagtgcagacgcgacctagaagccgttaattcaaggctgcattctcgcgagctgagtccagaagctcgcaggtccctcgagaaagaaaagaatagtctgatgaataaggctagtaattacgagaaagaactgaagttcttaagacaggagaaccgcaagaatatgctgttgtccgtggccatatttattctgctgaccctagtgtacgcctattggactatgtag

SEQ ID NO: 236665 - DNA, 345 bp, Artificial Sequence
  derived and/or modified sequence
atgaccaagaagaagcgggagaacctgggcgtggccctggagatcgacgggctcgaggagaagctctcccagtgcaggagagatcttgaagcagtcaattcacggctgcactctcgggaactctccccagaggccagggaagggaccgaggtctcatctgcaagagagcctgaggagcacgcagccctttgcggacacttgtaccccccggacgcacgcctgtgcctgcttgatcacgtcagtctagcactgccacacaatcaacataggctccctcttggacccctgatccgcattaaacaagcgctgcaagcatccataggtcctcggtgctggggggtctag

SEQ ID NO: 236666 - DNA, 357 bp, Artificial Sequence
  derived and/or modified sequence
atgactaagaagaaaagagagaacctgggggtggccctagagatcgatggtctggaagagaaactctcccagtgtcggcgagacctggaagccgtcaattcacgcctacatagtcgagaactctcaccggaagccagggaagggaccgaggtgtcgtccgctagggaacctgaggagcacgctgccctctgcggacacctctatcctcccgacgcccgtctgtgtctgttggaccatgtcagtcttgccctccctcacaatcagcaccgactacccctgggccctctcatccggattaagcaggcactgcaagcttccatcggcccacggtgttggggagtcccactgcctacgtag

SEQ ID NO: 236667 - DNA, 294 bp, Artificial Sequence
  derived and/or modified sequence
atgactaagaaaaagcgcgagaatttgggggtggcccttgaaattgacggtcttgaagaaaaactctcccagtgtagacgcgatctggaagccgtgaacagccggctgcacagtcgcgagctgtcacctgaagctcggaggagtctggaaaaggagaaaaattccttaatgaataaggctagcaattacgagaaggagctgaaatttctaagacaggagaatcgaaagaacatgctgctgagtgtcgcgatcttcatcctcctaacgttagtttatgcatactggacaatgtag

SEQ ID NO: 236668 - DNA, 345 bp, Artificial Sequence
  derived and/or modified sequence
atgactaaaaaaaagcgcgaaaatctgggagtggctcttgaaattgatggcttggaggaaaagctgtcgcagtgccgaagagatctcgaagccgtgaacagccgcctccatagtcgagaattgtcaccagaggctagggaaggtacagaggtcagcagtgctcgggagcctgaagaacacgctgcactgtgcggccatttgtacccaccagatgccaggttatgtttactggaccatgtaagtctcgcacttcctcacaatcagcaccgattgcctcttgggcctttgatacggatcaaacaggcgctccaggcgagtatcggtccccgatgctggggcgtgtag

SEQ ID NO: 236669 - protein, 590 aa, Artificial Sequence
  derived and/or modified sequence
MEPRAGCRLPVRVEQVVNGALVVTVSCGERSFAGILLDCTKKSGLFGLPPLAPLPQVDESPVNDSHGRAPEEGDAEVMQLGSSSPPPARGVQPPETTRPEPPPPLVPPLPAGSLPPYPPYFEGAPFPHPLWLRDTYKLWVPQPPPRTIKRTRRRLSRNRDPGRLILSTIRLRPRQVLCEKCKSTLSPPEASPGPPAAPRARRRLGSGPDRELRKPEEPENGEPTAAATARRSKRERREEDRAPAEQVPRSPVIKISYSTPQGKGEVVKIPSRVHGSLEPFRPQQAPQDDGSQDPEVLDRESRDRPSCAPSASIPKLKLTRPVPAGADLPPPKIRLKPHRLGDSEHEPVYRAELVGELNGYLRDSSPAPCADGPAGGLADLSSGSSGEDDDFKSCPQGPQGREGLAFLVSCPEGRADCASESACSSDSLDEARSSGSEGTPADTGDLSPGHGASAPSVSREARQTVPPLTVRLHTQSVSECITEDGRTVAVGDIVWGKIHGFPWWPARVLDISLGQKEDGEPSWREAKVSWFGSPTTSFLSISKLSPFSEFFKLRFNRKKKGMYRKAITEAANAARHVAPEIRELLTQFET

SEQ ID NO: 236670 - DNA, 1773 bp, Artificial Sequence
  derived and/or modified sequence
atggagcccagagccggctgcagactgcccgtgagagtggagcaggtggtgaacggcgccctggtggtgaccgtgagctgcggcgagagaagcttcgccggcatcctgctggactgcaccaagaagagcggcctgttcggcctgccccccctggcccccctgccccaggtggacgagagccccgtgaacgacagccacggcagagcccccgaggagggcgacgccgaggtgatgcagctgggcagcagcagccccccccccgccagaggcgtgcagccccccgagaccaccagacccgagccccccccccccctggtgccccccctgcccgccggcagcctgcccccctaccccccctacttcgagggcgcccccttcccccaccccctgtggctgagagacacctacaagctgtgggtgccccagcccccccccagaaccatcaagagaaccagaagaagactgagcagaaacagagaccccggcagactgatcctgagcaccatcagactgagacccagacaggtgctgtgcgagaagtgcaagagcaccctgagcccccccgaggccagccccggcccccccgccgcccccagagccagaagaagactgggcagcggccccgacagagagctgagaaagcccgaggagcccgagaacggcgagcccaccgccgccgccaccgccagaagaagcaagagagagagaagagaggaggacagagcccccgccgagcaggtgcccagaagccccgtgatcaagatcagctacagcaccccccagggcaagggcgaggtggtgaagatccccagcagagtgcacggcagcctggagcccttcagaccccagcaggccccccaggacgacggcagccaggaccccgaggtgctggacagagagagcagagacagacccagctgcgcccccagcgccagcatccccaagctgaagctgaccagacccgtgcccgccggcgccgacctgcccccccccaagatcagactgaagccccacagactgggcgacagcgagcacgagcccgtgtacagagccgagctggtgggcgagctgaacggctacctgagagacagcagccccgccccctgcgccgacggccccgccggcggcctggccgacctgagcagcggcagcagcggcgaggacgacgacttcaagagctgcccccagggcccccagggcagagagggcctggccttcctggtgagctgccccgagggcagagccgactgcgccagcgagagcgcctgcagcagcgacagcctggacgaggccagaagcagcggcagcgagggcacccccgccgacaccggcgacctgagccccggccacggcgccagcgcccccagcgtgagcagagaggccagacagaccgtgccccccctgaccgtgagactgcacacccagagcgtgagcgagtgcatcaccgaggacggcagaaccgtggccgtgggcgacatcgtgtggggcaagatccacggcttcccctggtggcccgccagagtgctggacatcagcctgggccagaaggaggacggcgagcccagctggagagaggccaaggtgagctggttcggcagccccaccaccagcttcctgagcatcagcaagctgagccccttcagcgagttcttcaagctgagattcaacagaaagaagaagggcatgtacagaaaggccatcaccgaggccgccaacgccgccagacacgtggcccccgagatcagagagctgctgacccagttcgagacctag

SEQ ID NO: 236671 - DNA, 1773 bp, Artificial Sequence
  derived and/or modified sequence
atggagccacgtgcaggatgtaggttacccgttcgagtcgagcaggtagtcaatggcgctctggtggtgacagtgtcctgcggcgaacgttcttttgccggcattttgctggactgcacaaaaaaatccgggctgttcggtttgccaccactggccccactgccccaggtagatgaaagtcctgtgaatgattcacacgggcgcgcccctgaggaaggagatgcagaggtaatgcaattggggtcctcgagccctccccccgctcgtggtgtccagcctccagaaacaacacggcctgaaccaccaccaccactggttcctcccctgccagcgggatccctccccccatatcctccttatttcgagggagcccctttccctcaccccctctggcttagggacacttacaaactctgggttcctcaaccccccccccgtacaattaaaaggacccgtcgaaggttgtctagaaaccgtgatcctggcaggctgattctctccaccattaggctgcggcctcgccaggtgttgtgcgagaagtgtaagtcaacgctgtcacctcccgaagctagcccagggcccccagccgcgccccgagctcgcagaagactggggagcgggcccgacagagagcttaggaagccggaagagcccgagaacggggagcctaccgcagctgcaaccgcgaggcgaagtaaaagggaaagacgcgaggaggaccgggcgccggccgagcaggtgccgcgctcccctgtaattaagatctcatattcaacacctcaaggaaaaggagaagtggtcaaaattccttccagagtgcacggctctctcgaaccattcaggcctcagcaggccccccaagatgatggctcacaggatcctgaagtccttgaccgcgagagcagagacagaccaagctgtgcccccagcgccagtatccctaaattaaaactaacaaggcctgtcccagcgggagccgacctgccaccaccgaaaattcggttgaagcctcaccgactgggggactcggaacacgaaccagtgtaccgagccgagctggtcggcgaactgaatgggtacttgcgcgattcgtcgcccgccccctgcgccgatggaccagccggggggttagccgacctaagcagtggttctagtggcgaagacgacgactttaaaagttgtccacaggggccccaggggcgcgagggcctggcctttctggtgagctgccccgagggaagggctgactgcgctagtgaaagcgcatgctcctcagactcattggatgaggcccgctctagcggcagcgagggaacaccggcagataccggggatctgagtcccggacacggcgcatccgccccttccgtgagtagggaggcacgccagactgtgcctccccttacagtccggctgcacacccagagcgtcagcgaatgcataacggaggatgggcggacagtagctgtcggggacattgtttgggggaaaattcacgggtttccgtggtggcctgcaagagtcttagatattagtttagggcaaaaagaggatggggagccatcttggcgagaagcaaaggtttcatggtttgggtctcctacaacatcatttctgagtatttcaaaactgtcccctttctcagaattctttaagctgcggtttaatcgcaagaaaaagggcatgtaccggaaagccataaccgaggctgcaaacgccgcgaggcacgtagcaccagagattcgggaactgttgactcagtttgaaacctag

SEQ ID NO: 236672 - DNA, 1773 bp, Artificial Sequence
  derived and/or modified sequence
atggagcccagggctggctgccgcctgcctgtgcgggtggagcaggtggtgaatggagccctggtggtgacagtgtcctgtggggagaggagctttgctggcatcctgctggactgcaccaagaagagcggcctgtttggcctgccccccctggcccccctgccccaggtggatgagagccctgtgaatgacagccacggccgggcccctgaggagggagatgctgaggtgatgcagctgggcagcagcagccccccaccagcccggggcgtgcagcccccagagaccaccaggcctgagcccccaccacccctggtgccccccctgcctgctggcagcctgcccccctacccaccctactttgaaggagcccccttcccccaccccctgtggctgcgggacacctacaagctgtgggtgccccagcccccacccaggaccatcaagaggacccggcggcggctgagcaggaacagagatcctggccgcctcatcctgagcaccatccggctgcggccccggcaggtgctgtgtgagaagtgcaagagcaccctgagccccccagaggccagccctggccccccagctgccccccgggcccggcggcggctgggcagcggccctgaccgggagctgaggaagccagaggagccagaaaatggagagcccacagctgctgccacagcccggcgcagcaagcgggagcggcgggaggaggaccgggccccagctgagcaggtgcccaggagccctgtgatcaagatctcctacagcaccccccagggcaaaggagaggtggtgaagatccccagccgggtgcacggcagcctggagcccttccggccccagcaggccccccaggatgatggcagccaggaccctgaggtgctggaccgggagagccgggaccggcccagctgtgcccccagcgccagcatccccaagctgaagctgaccaggcctgtgcctgctggagctgacctgcccccacccaagatccggctgaagccccaccggctgggggacagcgagcacgagcctgtgtacagagctgagctggtgggggagctgaatggctacctgcgggacagcagccctgccccctgtgctgatggccctgctgggggcctggccgacctgagcagcggcagcagtggagaagatgatgacttcaagagctgcccccagggcccccagggccgggagggcctggccttcctggtgtcctgcccagagggccgggctgactgtgccagcgagagcgcctgcagcagtgacagcctggatgaggcccggagcagcggcagcgagggcaccccagctgacacaggagacctgagccctggccacggggccagcgcccccagcgtgtcccgggaggcccggcagacagtgccccccctgactgtgcggctgcacacccagagcgtgtctgagtgcatcacagaagatggccgcacagtggccgtgggggacatcgtgtggggcaagatccacggcttcccctggtggccagcccgggtgctggacatcagcctgggccagaaggaggatggagagcccagctggagggaggccaaggtgtcctggtttggcagccccaccaccagcttcctgagcatcagcaagctgagccccttcagcgagttcttcaagctgcgcttcaacaggaagaagaagggcatgtacaggaaggccatcacagaggccgccaatgctgcccggcacgtggcccctgagatccgggagctgctgacccagtttgagacctag

SEQ ID NO: 236673 - DNA, 1773 bp, Artificial Sequence
  derived and/or modified sequence
atggagccccgggccggctgccggctgcccgtgcgggtggagcaggttgtgaatggggcgctcgtcgtgaccgttagctgtggtgaacggtcattcgcagggattttgctggactgcaccaaaaagagcggactctttggccttcccccactggctcccttgccacaagtcgacgagtcccccgtaaacgactcacatgggagagctcccgaggaaggcgacgcagaagtgatgcagcttggcagttccagccccccgcctgcccggggtgtgcagccccctgagaccacccggcccgagcctcctccccccctggtccctccactcccggcagggtctctgcccccataccccccctacttcgagggggctcctttcccccatcccttatggctgagagatacctacaagttatgggtgccacagcctccccctcgtaccatcaaacgtactcgacgccggctgtctcggaatagagacccggggcggctgattctttccaccatccgtttacgaccccgacaggtgttgtgtgagaagtgcaaaagcacactttccccgccagaggccagtcctgggccacccgctgcaccccgggctaggcggcgtctgggctctgggccggatagagaactgcggaagccagaagagcccgagaacggcgaacctacagcagccgcgacagcgcgcagaagcaaaagggagagaagagaagaagaccgtgcccctgcagaacaggtgccgcggtcccccgtaatcaaaataagttatagcacccctcagggaaaaggagaagtggtgaaaataccctcccgggtccatgggtctctcgagcctttccgtccgcagcaggctcctcaggacgacggctcccaggaccccgaggtgttggatagggaaagccgggacagaccctcctgtgcaccaagtgcatccattcccaagttaaagctgacccgaccagtcccagctggcgccgacctgccaccacctaagatccgtcttaagccccacagactgggagactctgagcacgaacctgtttatcgcgccgagctggttggggaactaaacgggtacctgcgggacagctctcctgccccctgcgcagacgggccagccggtgggctggctgacctgagcagcggctcttctggggaagacgatgatttcaagtcctgcccacaagggccccaaggacgggagggactcgccttcttggtttcctgtcccgagggtcgcgccgactgtgcctctgagtctgcttgcagcagcgactctctggatgaagcaagatcaagtgggtcggagggtacacccgccgacaccggcgatttgtcccctgggcatggcgctagcgcccccagcgtgagtagggaagcccggcagacggtgcctcccctcacagttagactccacacccagtcagttagcgagtgcatcaccgaggacggccgaaccgtggcggtcggggacatcgtgtggggaaaaattcacggtttcccctggtggccggctcgcgtcctagatatctcattggggcaaaaggaggacggtgaaccatcatggagggaggcaaaggtctcttggttcgggtcgccaacaactagcttcctgagtatttcaaagctgagtccattttccgagttttttaaactgcgctttaaccggaagaagaaggggatgtataggaaggccattaccgaggcagctaatgctgcgcgacacgtggccccggaaatccgggagctcctaactcagttcgagacttag

SEQ ID NO: 236674 - DNA, 1773 bp, Artificial Sequence
  derived and/or modified sequence
atggaacctagggccggttgccgccttcctgtcagggtggagcaggttgtcaatggtgctctagtggtcactgtgtcttgtggtgaaaggtcttttgccggaatcctgctggactgcaccaaaaaatcagggctctttgggttgccaccactggcacccctccctcaggtggacgaatccccagtgaatgacagccacggcagggctcctgaagaaggagatgccgaggtaatgcaattgggctcatcgtctccccctcctgcccgtggcgtgcagcccccagagaccacacggccagagcctccccctccattggtgcccccactgccagccggtagcctccccccatatcccccatatttcgagggtgccccatttccccaccctctttggcttcgggatacatacaagctgtgggttccgcagcccccacccagaaccattaagagaactcgcaggagattgtctagaaaccgagatcccggtcgtctgatcctgtcaactattcgattgcggccacggcaggtgctttgcgaaaagtgcaagagcactctctctcccccagaggcttctcccggtcctcctgctgccccaagagccagacgtagactgggttcaggtccagatagggagctcagaaagcccgaggagccagagaacggagaacccacggcagccgcaacagccaggagatcaaaaagagagaggagagaggaagaccgggcaccagcggagcaagtgccacgcagccccgtgatcaaaatcagctactccacaccacagggaaaaggtgaagtcgtcaaaataccaagcagggtgcacggtagcctcgagcctttccgccctcagcaagcaccacaggatgacggttcacaggacccagaggtgctagaccgagagtcccgggaccggccttcctgcgcccctagcgcctccattccaaaattaaagcttactaggcccgttcccgctggagccgatctgcctcctccaaagattcgattgaagccacaccgccttggcgattctgagcatgaacctgtgtaccgcgctgagctcgtgggcgaactcaacggataccttcgggattcatcccctgccccttgcgcagatggccctgccggagggctggccgacctctcctctgggagtagcggcgaagatgatgattttaagtcatgcccacagggtccgcagggcagggaaggcctcgctttccttgtgagctgtccagagggcagagctgattgcgccagcgagagtgcatgctcatcagactccctcgatgaagcacgatccagcggatccgagggcaccccagccgacactggggacttgagcccaggacacggcgcttctgctccatctgtctcccgggaagccaggcagactgtgcctcctttgacagtacggcttcacacccagtctgtatctgaatgcataaccgaggacggacgtacagtcgccgtcggagacatagtctgggggaagattcatggtttcccatggtggccagctcgggttttagacattagtctggggcagaaagaagacggagagccaagctggcgggaagcgaaggtcagttggttcgggtcccccactacctcctttctgagcattagcaagctgtcaccattcagtgaatttttcaaacttcggtttaaccggaagaagaaggggatgtatagaaaggccattacagaggcagctaacgcggctcggcatgttgcaccagaaattagagaactgttaacacagttcgagacttag

SEQ ID NO: 236675 - DNA, 2651 bp, Artificial Sequence
  derived and/or modified sequence
ggcggcggcggcggcggcggcggcggcggggcgggggcggcctgggacgcggcgggagcatggagccgcgcgccggctgccggctgccggtgcgggtggagcaggtcgtcaacggcgcgctggtggtcacggtgagctgcggcgagcggagcttcgcggggatcctgctggactgcacgaaaaagtccggcctctttggcctacccccgttggctccgctgccccaggtcgatgagtcccctgtcaacgacagccatggccgggctcccgaggagggggatgcagaggtgatgcagctggggtccagctccccccctcctgcccgcggggttcagccccccgagaccacccgccccgagccacccccgcccctcgtgccgccgctgcccgccggaagcctgcccccgtaccctccctacttcgaaggcgcccccttccctcacccgctgtggctccgggacacgtacaagctgtgggtgccccagccgccgcccaggaccatcaagcgcacgcggcggcgtctgtcccgcaaccgcgacccggggcgcctcatcctcagcaccatccgcctgcggccgcgccaggtgctctgtgagaagtgcaagagcacgctgagccccccggaggccagccccggacccccagccgcgcccagggcccgcaggaggctgggcagcggcccggacagggagctccgcaagccggaggagccggagaacggcgagcccacggctgcggccaccgccaggaggagcaagagggagaggcgcgaggaggacagggccccggcagagcaggtcccgcggagcccggtcatcaagatctcctacagcacgccccagggcaagggagaggtggtcaagatcccctcccgcgtgcacggctctctggagcccttccgtccccagcaggccccgcaggacgacggcagccaggaccccgaggtgctggacagagagtcccgggaccggccgtcctgcgcgccctcggcctccatccccaagttgaaactgacacggcctgtgccggccggcgcggacctgccgccccctaagatccgcctgaagccccaccgtctgggggacagcgagcacgagcccgtgtaccgggccgagctggtgggggagctgaacgggtacctgcgggacagctcgccggcgccctgtgcggacggccctgccggtgggctggcggacttgtcttctggaagttcgggtgaggacgatgacttcaagagctgtccccagggtccacagggacgcgagggcttggcttttctcgtcagctgccctgaggggagagcggactgtgccagtgagtcggcgtgcagcagcgacagcctggacgaggccagatcgtccggctcggaagggacgccggcagacacgggtgacctctcgcctggccacggcgcgtcagcgccctcggtgtccagagaggctcgccaaacggtgccgcccctgacggtcaggctgcacacacagagcgtgtcggagtgcatcacggaggacggcaggactgtggccgtgggggacatcgtctggggtaagatccatggttttccttggtggccggcgcgtgttcttgacatcagtctcggccagaaggaggacggagagccgtcttggcgagaagcgaaggtctcgtggtttggttctccgactacgtcgttcttgtctatttcaaaactctcccctttctctgaatttttcaaactgagatttaatcgtaagaagaaggggatgtatcggaaagctataaccgaggctgcaaatgccgcaagacacgtggccccggaaatcagggagctcttaacccagtttgaaacgtaactggttccctgaccaggtcaccgacgatgagggcgcacctgctgtcctggagcttccgatctctgttcggggaccctgtgagccttctggccggctgcgtgcagagcccactgggcacggtggtcggcctggtgtgaggccccccggggaccggcagtgtgtccagggaggggatggccctgagcccagcggctcctcccgctgagtgtatttcttcccaccactcagcgcatggctgccctggctcacgaggcagtcgggactcgtgacttgctggctgctggctgctgctgcctcgcgcgctggggttccatggaggaactgggcctgccgccccggcctcacctgctgcccgcatgctggggtcccatggaggaaccaggcctggcgccccggcctcgcccagcggctggtgtgggcagctgttccctgcctcgcagtgtcctggaggcagctgtctcgcagactcagcttggtctcccgcaggcttcagaaaaacccaattgcacgtgtgggattcttccccagcccttgggtgcggggtctctgtgcacttgagagctgggggacccacccaccgtctcccactccaagttcatcccagagcgtggggcccgctgggcacctggcacctggcctgcagatgctgctacgagtgaccagtgctgtgtggaggaggccaagggcggcccctgggaaaccgggcttcaacagtacaaggaaaagaaacttgctctgttttgtaagagcgtgttccttttcctcttttttgtcactttaaagaccaaaaagaataaagaaagaaaagaaaaaaattaa

SEQ ID NO: 236676 - protein, 308 aa, Artificial Sequence [sequence omitted]

SEQ ID NO: 236677 - DNA, 927 bp, Artificial Sequence
  derived and/or modified sequence
atgaagcactacgaggtggagatcctggacgccaagaccagagagaagctgtgcttcctggacaaggtggagccccacgccaccatcgccgagatcaagaacctgttcaccaagacccacccccagtggtaccccgccagacagagcctgagactggaccccaagggcaagagcctgaaggacgaggacgtgctgcagaagctgcccgtgggcaccaccgccaccctgtacttcagagacctgggcgcccagatcagctgggtgaccgtgttcctgaccgagtacgccggccccctgttcatctacctgctgttctacttcagagtgcccttcatctacggccacaagtacgacttcaccagcagcagacacaccgtggtgcacctggcctgcatctgccacagcttccactacatcaagagactgctggagaccctgttcgtgcacagattcagccacggcaccatgcccctgagaaacatcttcaagaactgcacctactactggggcttcgccgcctggatggcctactacatcaaccaccccctgtacaccccccccacctacggcgcccagcaggtgaagctggccctggccatcttcgtgatctgccagctgggcaacttcagcatccacatggccctgagagacctgagacccgccggcagcaagaccagaaagatcccctaccccaccaagaaccccttcacctggctgttcctgctggtgagctgccccaactacacctacgaggtgggcagctggatcggcttcgccatcatgacccagtgcctgcccgtggccctgttcagcctggtgggcttcacccagatgaccatctgggccaagggcaagcacagaagctacctgaaggagttcagagactacccccccctgagaatgcccatcatccccttcctgctgtag

SEQ ID NO: 236678 - DNA, 927 bp, Artificial Sequence
  derived and/or modified sequence
atgaagcattatgaagtcgaaatactcgacgccaaaacacgggagaaactctgctttctcgacaaagtcgaaccgcatgccaccattgccgagattaagaacctgttcactaagacacacccacaatggtatccagcacgacagtctttgagattggaccccaaaggcaaaagccttaaagatgaagatgtgctgcagaagcttccggtgggcactactgcaaccctctattttcgcgacttgggagcccagatcagttgggtcaccgtgttcctaacagaatacgcgggtccactgttcatctacctgctgttctatttccgcgtgcccttcatatacgggcataagtatgatttcacttcatcacgccataccgtggtccatctggcgtgcatttgtcattcgttccactacattaaaagactgctggaaacgctgtttgtccaccgcttctctcacggcaccatgccgctgagaaatattttcaagaactgcacgtattactggggcttcgctgcttggatggcttattacatcaatcatcctctttatacccctccaacgtacggggcccaacaagtaaaacttgctttggcaatttttgtaatctgtcagcttggcaacttcagtattcatatggctctgcgagatctgcgcccagctggttccaaaactcgcaagatcccttatcccaccaagaatccatttacctggcttttcctgctagtaagttgccccaattacacctacgaagtgggaagttggatcggcttcgcaatcatgactcagtgtctgcctgtggcactcttcagcttggtggggttcacgcaaatgaccatttgggcaaaaggcaaacatagaagctacctgaaggagttcagagactaccctcccctcaggatgcctattatacctttcctactatag

SEQ ID NO: 236679 - DNA, 927 bp, Artificial Sequence
  derived and/or modified sequence
atgaagcactatgaggtggagatcctggatgccaagacccgggagaagctgtgcttcctggacaaggtggagccccacgccaccatcgccgagatcaagaacctcttcaccaagacccacccccagtggtacccagcccggcagagcctgcggctggaccccaagggcaagagcctgaaggatgaagatgtgctgcagaagctgcctgtgggcaccacagccaccctgtacttccgggacctgggcgcccagatctcctgggtgacagtgttcctgacagaatatgccggccccctcttcatctacctgctcttctacttccgggtgcccttcatctacggccacaagtatgacttcaccagcagccgccacacagtggtgcacctggcctgcatctgccacagcttccactacatcaagaggctgctggagaccctgtttgtgcaccgcttcagccacggcaccatgcccctgaggaacatcttcaagaactgcacctactactggggctttgctgcctggatggcctactacatcaaccaccccctgtacaccccacccacctatggagcccagcaggtgaagctggccctggccatctttgtgatctgccagctgggcaacttcagcatccacatggccctgcgggacctgcggcctgctggcagcaagaccaggaagatcccctaccccaccaagaaccccttcacctggctgttcctgctggtgtcctgccccaactacacctatgaggtgggctcctggattggatttgccatcatgacccagtgcctgcctgtggccctcttcagcctggtgggcttcacccagatgaccatctgggccaagggcaagcacaggagctacctgaaggagttccgggactacccacccctgaggatgcccatcatccccttcctgctgtag

SEQ ID NO: 236680 - DNA, 927 bp, Artificial Sequence
  derived and/or modified sequence
atgaagcactacgaggtggagatcctggacgccaagacccgggagaaactgtgttttttagataaagtagaaccacacgccaccatcgcagaaatcaagaatctgttcactaaaactcacccacagtggtatcctgcgagacaatctctaagactagatccaaaaggcaagagcttgaaggacgaagacgtcctccaaaaactgccagtcgggactaccgccaccctgtactttcgggatctgggcgcccagattagctgggtcacagttttcctcacagaatacgccggacctctgtttatttacctcctgttctattttcgtgtcccatttatttacggccacaagtacgactttacatccagccggcatacggttgtgcatctcgcctgtatatgtcacagtttccattatatcaaaaggctccttgaaacgctgtttgtacaccgctttagtcatggcacaatgcccctgagaaacatcttcaagaactgcacatactactggggcttcgctgcatggatggcatactacatcaaccatcccctctacacaccgcctacgtatggcgcccaacaggtcaaacttgcactggccatctttgtcatctgccagttaggtaatttttccatccacatggcacttagggatttgcgtccagctggatctaaaaccagaaagataccttacccaactaagaatcctttcacttggttgttcctactagtatcgtgtccgaattacacctacgaggtgggttcatggattgggtttgctattatgactcagtgcctgccggttgcactgtttagtctggtggggttcacccagatgactatctgggccaaagggaaacacagaagctacctgaaggagttccgagactaccctcctctcaggatgcccattatcccattccttctgtag

SEQ ID NO: 236681 - DNA, 927 bp, Artificial Sequence
  derived and/or modified sequence
atgaagcactatgaggtggaaattttagacgctaaaacaagggagaagctatgcttcctggataaggtcgaacctcatgcgacaatcgcagagattaagaatctgttcaccaaaacccatccccagtggtaccctgcacgccagtcgttgaggctggaccctaaaggcaagtccctcaaagatgaagacgtgctccagaaactgcccgtcggaactaccgccaccttgtacttccgagacctaggcgcacaaatctcttgggtcaccgttttccttacggaatacgctggcccactgtttatctacctcttattttatttccgggtgcctttcatctacggccataagtatgattttactagctcccgacacacagtcgttcacttggcttgcatctgtcactccttccactacattaaacgcttactggagactctctttgtgcatagattctcccacggcactatgcctctgagaaacatcttcaagaactgtacttattactgggggttcgcagcatggatggcatactatatcaatcaccccttgtatactccaccaacatacggcgctcagcaggtgaaattggcccttgccatctttgtgatttgtcagttgggaaatttctctattcatatggcgctgagggacctgaggccggctggcagcaaaacccgaaagattccttaccctaccaaaaaccccttcacttggctgttcttattggtttcatgcccaaactatacctatgaggttgggtcatggatcggcttcgcaataatgactcagtgtctgccggtggcactgttcagtttggtaggctttacccaaatgactatttgggccaaaggtaagcataggtcctacctcaaggagttccgcgactacccaccactgaggatgccaatcattcccttcctgctgtag

SEQ ID NO: 236682 - DNA, 1162 bp, Artificial Sequence
  derived and/or modified sequence
ggggcggggcggacgcagagccgcgtttagtctatcgctgcggttgcgagcgctgtagggagcctgtgctgtgccgcgcagttaggcagcagcagccgcggagcagtagccgccgtgggagggagccatgaagcattacgaggtggagattctggacgcaaagacaagggagaagctgtgtttcttggacaaggtggagccccacgccaccattgcggagatcaagaacctcttcactaagacccatccgcagtggtaccccgcccgccagtccctccgcctggaccccaagggcaagtccctgaaggatgaggatgttctgcagaagctgcccgtgggcaccacggccacactgtacttccgggacctgggggcccagatcagctgggtgacggtcttcctaacagagtacgcggggccccttttcatctacctgctcttctacttccgagtgcccttcatctatggccacaaatatgactttacgtccagtcggcatacagtggtgcacctcgcctgcatctgtcactcattccactacatcaagcgcctgctggagacgctcttcgtgcaccgcttctcccatggcactatgcctttgcgcaacatcttcaagaactgcacctactactggggcttcgccgcgtggatggcctattacatcaatcaccctctctacactccccctacctacggagctcagcaggtgaaactggcgctcgccatctttgtgatctgccagctcggcaacttctccatccacatggccctgcgggacctgcggcccgctgggtccaagacgcggaagatcccataccccaccaagaaccccttcacgtggctcttcctgctggtgtcctgccccaactacacctacgaggtggggtcctggatcggtttcgccatcatgacgcagtgtctcccagtggccctgttctccctggtgggcttcacccagatgaccatctgggccaagggcaagcaccgcagctacctgaaggagttccgggactacccgcccctgcgcatgcccatcatccccttcctgctctgagcgctcacccctgctgaggctcagcccctcaacccggtggcattctgggggaggagtggggcccacagctctccagcacccggaataaagcccgcctgccccagtcgg

SEQ ID NO: 236683 - protein, 839 aa, Artificial Sequence
  derived and/or modified sequence
MMSASRLAGTLIPAMAFLSCVRPESWEPCVEVVPNITYQCMELNFYKIPDNLPFSTKNLDLSFNPLRHLGSYSFFSFPELQVLDLSRCEIQTIEDGAYQSLSHLSTLILTGNPIQSLALGAFSGLSSLQKLVAVETNLASLENFPIGHLKTLKELNVAHNLIQSFKLPEYFSNLTNLEHLDLSSNKIQSIYCTDLRVLHQMPLLNLSLDLSLNPMNFIQPGAFKEIRLHKLTLRNNFDSLNVMKTCIQGLAGLEVHRLVLGEFRNEGNLEKFDKSALEGLCNLTIEEFRLAYLDYYLDDIIDLFNCLTNVSSFSLVSVTIERVKDFSYNFGWQHLELVNCKFGQFPTLKLKSLKRLTFTSNKGGNAFSEVDLPSLEFLDLSRNGLSFKGCCSQSDFGTTSLKYLDLSFNGVITMSSNFLGLEQLEHLDFQHSNLKQMSEFSVFLSLRNLIYLDISHTHTRVAFNGIFNGLSSLEVLKMAGNSFQENFLPDIFTELRNLTFLDLSQCQLEQLSPTAFNSLSSLQVLNMSHNNFFSLDTFPYKCLNSLQVLDYSLNHIMTSKKQELQHFPSSLAFLNLTQNDFACTCEHQSFLQWIKDQRQLLVEVERMECATPSDKQGMPVLSLNITCQMNKTIIGVSVLSVLVVSVVAVLVYKFYFHLMLLAGCIKYGRGENIYDAFVIYSSQDEDWVRNELVKNLEEGVPPFQLCLHYRDFIPGVAIAANIIHEGFHKSRKVIVVVSQHFIQSRWCIFEYEIAQTWQFLSSRAGIIFIVLQKVEKTLLRQQVELYRLLSRNTYLEWEDSVLGRHIFWRRLRKALLDGKSWNPEGTVGTGCNWQEATSI

SEQ ID NO: 236684 - DNA, 2520 bp, Artificial Sequence
  derived and/or modified sequence
atgatgagcgccagcagactggccggcaccctgatccccgccatggccttcctgagctgcgtgagacccgagagctgggagccctgcgtggaggtggtgcccaacatcacctaccagtgcatggagctgaacttctacaagatccccgacaacctgcccttcagcaccaagaacctggacctgagcttcaaccccctgagacacctgggcagctacagcttcttcagcttccccgagctgcaggtgctggacctgagcagatgcgagatccagaccatcgaggacggcgcctaccagagcctgagccacctgagcaccctgatcctgaccggcaaccccatccagagcctggccctgggcgccttcagcggcctgagcagcctgcagaagctggtggccgtggagaccaacctggccagcctggagaacttccccatcggccacctgaagaccctgaaggagctgaacgtggcccacaacctgatccagagcttcaagctgcccgagtacttcagcaacctgaccaacctggagcacctggacctgagcagcaacaagatccagagcatctactgcaccgacctgagagtgctgcaccagatgcccctgctgaacctgagcctggacctgagcctgaaccccatgaacttcatccagcccggcgccttcaaggagatcagactgcacaagctgaccctgagaaacaacttcgacagcctgaacgtgatgaagacctgcatccagggcctggccggcctggaggtgcacagactggtgctgggcgagttcagaaacgagggcaacctggagaagttcgacaagagcgccctggagggcctgtgcaacctgaccatcgaggagttcagactggcctacctggactactacctggacgacatcatcgacctgttcaactgcctgaccaacgtgagcagcttcagcctggtgagcgtgaccatcgagagagtgaaggacttcagctacaacttcggctggcagcacctggagctggtgaactgcaagttcggccagttccccaccctgaagctgaagagcctgaagagactgaccttcaccagcaacaagggcggcaacgccttcagcgaggtggacctgcccagcctggagttcctggacctgagcagaaacggcctgagcttcaagggctgctgcagccagagcgacttcggcaccaccagcctgaagtacctggacctgagcttcaacggcgtgatcaccatgagcagcaacttcctgggcctggagcagctggagcacctggacttccagcacagcaacctgaagcagatgagcgagttcagcgtgttcctgagcctgagaaacctgatctacctggacatcagccacacccacaccagagtggccttcaacggcatcttcaacggcctgagcagcctggaggtgctgaagatggccggcaacagcttccaggagaacttcctgcccgacatcttcaccgagctgagaaacctgaccttcctggacctgagccagtgccagctggagcagctgagccccaccgccttcaacagcctgagcagcctgcaggtgctgaacatgagccacaacaacttcttcagcctggacaccttcccctacaagtgcctgaacagcctgcaggtgctggactacagcctgaaccacatcatgaccagcaagaagcaggagctgcagcacttccccagcagcctggccttcctgaacctgacccagaacgacttcgcctgcacctgcgagcaccagagcttcctgcagtggatcaaggaccagagacagctgctggtggaggtggagagaatggagtgcgccacccccagcgacaagcagggcatgcccgtgctgagcctgaacatcacctgccagatgaacaagaccatcatcggcgtgagcgtgctgagcgtgctggtggtgagcgtggtggccgtgctggtgtacaagttctacttccacctgatgctgctggccggctgcatcaagtacggcagaggcgagaacatctacgacgccttcgtgatctacagcagccaggacgaggactgggtgagaaacgagctggtgaagaacctggaggagggcgtgccccccttccagctgtgcctgcactacagagacttcatccccggcgtggccatcgccgccaacatcatccacgagggcttccacaagagcagaaaggtgatcgtggtggtgagccagcacttcatccagagcagatggtgcatcttcgagtacgagatcgcccagacctggcagttcctgagcagcagagccggcatcatcttcatcgtgctgcagaaggtggagaagaccctgctgagacagcaggtggagctgtacagactgctgagcagaaacacctacctggagtgggaggacagcgtgctgggcagacacatcttctggagaagactgagaaaggccctgctggacggcaagagctggaaccccgagggcaccgtgggcaccggctgcaactggcaggaggccaccagcatctag

SEQ ID NO: 236685 - DNA, 2520 bp, Artificial Sequence
  derived and/or modified sequence
atgatgtctgcatctcgcctggctgggacgctcatacccgccatggccttccttagctgtgtgaggcctgagtcgtgggaaccatgcgttgaggtagtgccaaatattacctaccagtgcatggagctgaatttctacaagatccctgataatctgcctttctcaacaaaaaatctcgaccttagcttcaatccgctcaggcacctgggaagttactctttttttagttttccggagctacaggtgctggacctgtctcgatgcgaaatacagactatcgaggacggggcttaccaatcattgtctcatctttcaacacttattctgaccgggaatcctatccaatctttagcgctgggcgccttctcgggactatcgagtctgcaaaagctcgtcgctgtggaaacgaatctggcttccctggagaacttccccattgggcaccttaagacgctcaaagaactcaatgtggcccataacttgattcaatcgttcaagcttcctgaatactttagcaaccttaccaatctggagcacctggatctgtcttcaaataagatccaaagcatttactgtaccgatctgagggtcctgcatcagatgcccctcctgaatctaagtctggaccttagtctgaatcccatgaatttcattcaacctggagcttttaaggaaatcaggctgcataagcttaccctgagaaataatttcgactctctaaacgtgatgaaaacctgtatccaagggctggcaggactcgaggtgcatcgactggtccttggcgagttccgaaatgaggggaaccttgagaaattcgacaagtctgcacttgagggcctgtgtaacctgaccattgaagagttccggctagcttatcttgactattaccttgatgacattatcgacttgtttaactgcctcaccaacgtcagctctttctctctggtgagtgtgactattgaaagggttaaagatttcagttacaactttgggtggcagcatttagagctggtgaattgtaagttcgggcaattcccaactctaaaactcaaatcgctgaagcggttaacattcacaagtaacaaaggcggaaatgcattttctgaggtggacctgccatcacttgagtttctggacctcagtagaaacggcctgtctttcaaagggtgttgcagccagtcagattttggcaccacgtcccttaagtatttagacctctctttcaacggagttatcacgatgtctagcaatttcctgggcttagagcagcttgaacatttagacttccaacatagtaatctaaagcagatgtctgaattcagcgtttttctttccctgagaaacctcatttatctcgatatctcacatacccatactagagtggcttttaatggtatttttaatggactgtcttcgctggaggtgctcaagatggccggaaactcatttcaagaaaacttcctgccagatatctttacagagctgagaaacctgacttttttagatctctcccagtgtcagctagagcagctctcacctactgctttcaatagtctatcctccctgcaggtcctcaacatgagtcataacaacttctttagcctggatacttttccatataagtgtctcaatagtcttcaagtactcgattactcactgaatcatattatgacgagcaaaaagcaggaactgcagcacttcccttcaagcttggcctttttaaatcttactcagaatgatttcgcttgcacgtgcgaacaccaatccttcctgcaatggatcaaggatcagaggcagcttctggttgaggtagagcgcatggaatgcgcgacaccatccgataaacagggaatgccggtactgagccttaacataacatgccagatgaacaaaactataattggtgtatccgtcctcagtgtgctggtagtgtcagtggtggctgttttagtttacaaattttacttccatctaatgttgctggctgggtgtatcaagtatggccgtggcgagaatatctacgatgccttcgtcatctattcttcccaggacgaggattgggtcaggaatgaactcgtgaagaatttggaagaaggtgttccacccttccagctttgcctacattacagagatttcattcctggcgtggccatcgctgctaatattattcacgaaggcttccataaatctcggaaagtcatcgtggtcgtgtcccagcattttatccagtcgagatggtgcatcttcgagtacgagattgcccagacatggcagtttctcagctcaagggcgggcatcatatttattgtactccagaaagttgagaaaacattactccgccaacaggtcgagctatacaggcttctgtcccggaacacctatttggaatgggaggactccgtgctgggaagacacatattctggagaaggcttcggaaggctctgttggatggcaagagttggaatcctgagggcaccgtgggcacaggctgtaactggcaagaagccacatccatatag

SEQ ID NO: 236686 - DNA, 2520 bp, Artificial Sequence
  derived and/or modified sequence
atgatgtctgccagccggctggccggcaccctcatcccagccatggccttcctgagctgtgtgcggcctgagagctgggagccctgtgtggaggtggtgcccaacatcacctaccagtgcatggagctgaacttctacaagatcccagacaacctgcccttcagcaccaagaacctggacctgtccttcaaccccctgcggcacctgggcagctacagcttcttctccttccctgagctgcaggtgctggacctgagccgctgtgagatccagaccattgaagatggagcctaccagagcctgagccacctgagcaccctcatcctgaccggcaaccccatccagagcctggccctgggcgccttcagcggcctgagcagcctgcagaagctggtggccgtggagaccaacctggccagcctggagaacttccccatcggccacctgaagaccctgaaggagctgaatgtggcccacaacctgatccagagcttcaagctgcctgagtacttcagcaacctgaccaacctggagcacctggacctgagcagcaacaagatccagagcatctactgcacagacctgcgggtgctgcaccagatgcccctgctgaacctgagcctggacctgagcctgaaccccatgaacttcatccagcccggggccttcaaggagatccggctgcacaagctgaccctgaggaacaactttgacagcctgaatgtgatgaagacctgcatccagggcctggccggcctggaggtgcaccggctggtgctgggggagttcagaaatgaaggcaacctggagaagtttgacaagagcgccctggagggcctgtgcaacctgaccatcgaggagttccggctggcctacctggactactacctggatgacatcatcgacctcttcaactgcctgaccaacgtgagcagcttcagcctggtgtctgtgaccatcgagcgggtgaaggacttctcctacaactttggctggcagcacctggagctggtgaactgcaagtttggccagttccccaccctgaagctgaagagcctgaagaggctgaccttcaccagcaacaagggcggcaatgccttcagcgaggtggacctgcccagcctggagttcctggacctgagcagaaatggcctgtccttcaagggctgctgcagccagagcgactttggcaccaccagcctgaagtacctggacctgtccttcaatggagtcatcaccatgagcagcaacttcctgggcctggagcagctggagcacctggacttccagcacagcaacctgaagcagatgtctgagttctctgtgttcctgagcctgaggaacctgatctacctggacatcagccacacccacaccagggtggccttcaacggcatcttcaacggcctgagcagcctggaggtgctgaagatggccggcaacagcttccaggagaacttcctgcctgacatcttcacagagctgaggaacctgaccttcctggacctgagccagtgccagctggagcagctgagccccacagccttcaacagcctgagcagcctgcaggtgctgaacatgagccacaacaacttcttcagcctggacaccttcccctacaagtgcctgaacagcctgcaggtgctggactacagcctgaaccacatcatgaccagcaagaagcaggagctgcagcacttccccagcagcctggccttcctgaacctgacccagaatgactttgcctgcacctgtgagcaccagagcttcctgcagtggatcaaggaccagaggcagctgctggtggaggtggagaggatggagtgtgccacccccagcgacaagcagggcatgcctgtgctgagcctgaacatcacctgccagatgaacaagaccatcatcggcgtgtctgtgctgtctgtgctggtggtgtctgtggtggccgtgctggtgtacaagttctacttccacctgatgctgctggccggctgcatcaagtatggaagaggagagaacatctatgatgcctttgtgatctacagcagccaggatgaggactgggtgagaaatgagctggtgaagaacctggaggagggcgtgccccccttccagctgtgcctgcactacagagacttcatccctggggtggccatcgccgccaacatcatccacgagggcttccacaagagcaggaaggtgattgtggtggtgtcccagcacttcatccagagccgctggtgcatctttgaatatgaaattgcccagacctggcagttcctgagcagccgggccggcatcatcttcatcgtgctgcagaaggtggagaagaccctgctgcggcagcaggtggagctgtaccgcctgctgagcaggaacacctacctggagtgggaggacagcgtgctgggccgccacatcttctggaggcggctgaggaaggccctgctggatggcaagtcctggaaccctgagggcaccgtgggcaccggctgcaactggcaggaggccaccagcatctag

SEQ ID NO: 236687 - DNA, 2520 bp, Artificial Sequence
  derived and/or modified sequence
atgatgagcgccagccggctggccggcaccctgatccccgccatggcattcctttcctgcgtgcgccccgagtcatgggaaccttgtgtggaggtcgtgccaaatatcacctatcagtgtatggaactgaacttttataaaattcccgataacctgcctttctcaactaaaaacttggacttgtcttttaatcctcttaggcatctaggctcgtactcctttttctctttccccgagctgcaagttctagatcttagccgatgcgagattcaaaccattgaagatggggcataccagtcactctcccacctgtctactctcatccttactgggaatccaatccaaagcctagctctgggggctttctccggtcttagttccctgcagaaattggtcgccgtggagacaaatttggcctccttggagaacttccccatcgggcacttgaagacattgaaggaactgaacgtcgcccacaatctaattcagtcctttaagctgcctgagtatttttcaaatcttactaatctcgagcacttggatttgagctccaacaagatccagtccatctattgtacggaccttagagtcctacatcaaatgccgctgctgaacctgtccctggacctctctcttaatcccatgaacttcatacaacctggggctttcaaagaaatccgactccacaaactgaccttgagaaataatttcgacagtctaaacgtgatgaagacctgcatccaagggctggctggccttgaggtccatagactggttcttggcgagtttcggaacgaaggcaatctggagaagttcgataagtccgcactagaggggctgtgtaatctaacaatcgaggagttcagacttgcataccttgattactacttagatgatattattgacctcttcaattgtttgactaatgtttcatcttttagcctggttagcgtgactattgaaagagtgaaggacttcagctataatttcggctggcaacaccttgagctggtcaattgtaagttcggacaattccctactttaaagctgaaaagcctgaagcgcctgacctttacttctaacaagggcgggaatgcattcagcgaagtcgatcttccgtcgctagaatttctcgacctttcccgtaatgggctgagttttaaagggtgttgttctcagtccgattttgggaccacgtcattgaagtatctggatttgagcttcaacggcgtgatcaccatgagtagtaattttctggggcttgagcagctcgaacacctcgatttccagcactctaacctaaagcagatgagtgagttttccgtattcctgagcctccggaatctgatttacctcgatatatcgcacactcatacccgagtggcctttaatggcatcttcaatggtctctcgtctttggaagtcctgaagatggccggaaacagctttcaggagaacttcctgcctgacatctttaccgagctaagaaacttaaccttcctagacttatcccagtgtcaactggagcagctgtcccccacagcttttaattcactgtcttctctccaagttcttaatatgagccataacaacttcttcagtctcgacacatttccatacaagtgcctaaactccctgcaggtccttgattacagcctgaatcacataatgacctccaagaagcaggaacttcaacactttcccagcagcctggcgtttcttaacctgacacaaaatgactttgcttgtacatgcgagcaccaatcgttcctccagtggataaaggaccagagacagctacttgttgaagtggaaaggatggagtgtgcaaccccaagtgacaaacaagggatgcccgtcctcagcttgaatattacttgccagatgaataaaaccatcattggagtaagtgtgcttagtgtgctggttgtaagcgtcgtggctgtgctggtctataaattttactttcatttgatgctgcttgcgggctgtatcaagtacgggcggggcgaaaacatctacgatgcctttgtgatttacagctctcaggacgaagattgggttaggaacgagctggtcaagaacttagaagaaggtgtgcctcctttccaactgtgcttacactatagggatttcatcccgggcgtggccattgcagcaaatattatccacgaaggcttccataaatcccgcaaggtgatcgtcgttgttagccaacactttatccagtcccgctggtgcatctttgaatatgaaatagctcagacgtggcaatttttgagttcacgagccgggatcatctttatcgtcttgcagaaggtcgaaaaaacactcttaaggcaacaggtggaactgtaccggctactgtcacggaatacgtacctagagtgggaggacagcgtgctgggtaggcatattttttggaggcgactgcgtaaagctttgctagacggtaaaagctggaatcccgaaggcaccgtcggcaccggatgcaattggcaggaggcaacaagcatctag

SEQ ID NO: 236688 - DNA, 2520 bp, Artificial Sequence
  derived and/or modified sequence
atgatgagcgctagccgccttgctggtactctgatcccggcaatggcctttctgtcttgcgtgaggcctgaatcatgggaaccatgtgtggaggttgttcctaatatcacctatcagtgcatggaattgaacttctacaaaatacccgacaatttgccgttctccacgaagaatctagatctcagttttaacccacttaggcacttgggatcctattcgttcttttccttcccagagctccaggtgctcgacctgagcaggtgtgagatacaaactattgaagatggcgcataccagtcactctctcacttgtccacgctcattttgacgggcaatcctatccaatcgttagccctgggcgctttttcagggcttagcagtcttcagaaactagtggctgtggagacgaatctggctagtctggagaactttccaatcgggcacctaaagactctcaaggaacttaacgtggcccataatctgatccagtccttcaagctgcccgagtacttctcgaatctgacaaatctggaacaccttgacctctcgtctaataagattcagtccatttattgcaccgacctcagagtactgcatcagatgccactcctgaatcttagcctggatttatctttgaatcccatgaactttatacagccaggggctttcaaggaaataaggctccataagctcaccctacggaacaatttcgattcacttaacgttatgaagacctgtatccaaggtctggccggactcgaagtgcataggcttgttctgggcgagttccgcaatgaaggcaacttagagaagttcgataagtccgcccttgagggactatgtaatctcacaatcgaggagttcagactcgcctatctcgattactacttggatgacatcatcgatttgttcaactgcctgaccaatgtgtctagtttcagtcttgtgtcggtgaccatcgagcgcgtcaaagatttttcttacaattttggttggcagcacttggagttagtcaactgtaaattcggccagtttcctacattgaagctcaaatccctgaagcgtcttacgttcacctcaaacaagggaggtaacgctttctccgaggttgatcttccttccctggagttcctggatcttagtagaaatggactaagcttcaagggatgttgctctcaatccgacttcgggacaacttcactgaagtacctggatctcagttttaatggcgtcatcacgatgtcctccaattttctcgggctggagcaattggaacatctggattttcagcattcaaatctgaagcaaatgagcgaattcagcgtgtttcttagcctgcgaaatcttatatacctggacatctcacatacacacacaagggtcgcctttaacggcatctttaacggattatccagtctggaggtccttaagatggctgggaattccttccaggagaacttcctgccagacatctttactgagctccgaaatttaacatttctcgatctctctcagtgccagctcgagcaattaagccccactgctttcaactctctgtcatctctgcaggtgttgaacatgagccacaataactttttttccctcgacaccttcccttataaatgcctgaacagtttgcaagtcttggattattccctgaaccacattatgacatccaagaaacaggagctgcagcattttccttcgagcttggcttttttgaatctcacccagaacgactttgcgtgcacctgtgaacaccagtctttcctgcagtggattaaagatcaacgccagctcttggtggaggtggaacgcatggagtgcgccacaccgagcgacaaacagggcatgcccgtgctgtcgctgaatatcacgtgtcagatgaacaaaaccatcatcggtgtgtcagtgctttctgtcttagtggtttccgtcgtggctgtgctggtctataaattctactttcacctgatgctgctagccggatgtattaaatatggccgaggcgaaaacatctacgacgcttttgtgatatacagctcacaggacgaagattgggttagaaacgagctggttaagaatctggaggagggcgtgccaccctttcagctttgtctgcactatagggatttcattccaggagttgctatcgcagcaaatatcatccacgagggctttcacaaatctaggaaagttatagttgttgtcagtcaacactttattcaaagccgttggtgtattttcgagtacgaaatcgcccagacatggcagtttctctcaagtcgggcagggatcatatttatcgtgctgcagaaagtcgaaaagaccctcctccgacagcaggtagaactctatagactactcagtcgtaatacctacctggaatgggaagactccgttctcggcagacacatcttttggcgtcgtctgagaaaggccctcctggacggcaaatcctggaaccctgagggaaccgtcgggaccggctgtaactggcaagaagcgacgtccatctag

SEQ ID NO: 236689 - DNA, 4844 bp, Artificial Sequence
  derived and/or modified sequence
aagacaccagtgcctcagaaactgctcggtcagacggtgatagcgagccacgcattcacagggccactgctgctcacagaagcagtgaggatgatgccaggatgatgtctgcctcgcgcctggctgggactctgatcccagccatggccttcctctcctgcgtgagaccagaaagctgggagccctgcgtggaggtggttcctaatattacttatcaatgcatggagctgaatttctacaaaatccccgacaacctccccttctcaaccaagaacctggacctgagctttaatcccctgaggcatttaggcagctatagcttcttcagtttcccagaactgcaggtgctggatttatccaggtgtgaaatccagacaattgaagatggggcatatcagagcctaagccacctctctaccttaatattgacaggaaaccccatccagagtttagccctgggagccttttctggactatcaagtttacagaagctggtggctgtggagacaaatctagcatctctagagaacttccccattggacatctcaaaactttgaaagaacttaatgtggctcacaatcttatccaatctttcaaattacctgagtatttttctaatctgaccaatctagagcacttggacctttccagcaacaagattcaaagtatttattgcacagacttgcgggttctacatcaaatgcccctactcaatctctctttagacctgtccctgaaccctatgaactttatccaaccaggtgcatttaaagaaattaggcttcataagctgactttaagaaataattttgatagtttaaatgtaatgaaaacttgtattcaaggtctggctggtttagaagtccatcgtttggttctgggagaatttagaaatgaaggaaacttggaaaagtttgacaaatctgctctagagggcctgtgcaatttgaccattgaagaattccgattagcatacttagactactacctcgatgatattattgacttatttaattgtttgacaaatgtttcttcattttccctggtgagtgtgactattgaaagggtaaaagacttttcttataatttcggatggcaacatttagaattagttaactgtaaatttggacagtttcccacattgaaactcaaatctctcaaaaggcttactttcacttccaacaaaggtgggaatgctttttcagaagttgatctaccaagccttgagtttctagatctcagtagaaatggcttgagtttcaaaggttgctgttctcaaagtgattttgggacaaccagcctaaagtatttagatctgagcttcaatggtgttattaccatgagttcaaacttcttgggcttagaacaactagaacatctggatttccagcattccaatttgaaacaaatgagtgagttttcagtattcctatcactcagaaacctcatttaccttgacatttctcatactcacaccagagttgctttcaatggcatcttcaatggcttgtccagtctcgaagtcttgaaaatggctggcaattctttccaggaaaacttccttccagatatcttcacagagctgagaaacttgaccttcctggacctctctcagtgtcaactggagcagttgtctccaacagcatttaactcactctccagtcttcaggtactaaatatgagccacaacaacttcttttcattggatacgtttccttataagtgtctgaactccctccaggttcttgattacagtctcaatcacataatgacttccaaaaaacaggaactacagcattttccaagtagtctagctttcttaaatcttactcagaatgactttgcttgtacttgtgaacaccagagtttcctgcaatggatcaaggaccagaggcagctcttggtggaagttgaacgaatggaatgtgcaacaccttcagataagcagggcatgcctgtgctgagtttgaatatcacctgtcagatgaataagaccatcattggtgtgtcggtcctcagtgtgcttgtagtatctgttgtagcagttctggtctataagttctattttcacctgatgcttcttgctggctgcataaagtatggtagaggtgaaaacatctatgatgcctttgttatctactcaagccaggatgaggactgggtaaggaatgagctagtaaagaatttagaagaaggggtgcctccatttcagctctgccttcactacagagactttattcccggtgtggccattgctgccaacatcatccatgaaggtttccataaaagccgaaaggtgattgttgtggtgtcccagcacttcatccagagccgctggtgtatctttgaatatgagattgctcagacctggcagtttctgagcagtcgtgctggtatcatcttcattgtcctgcagaaggtggagaagaccctgctcaggcagcaggtggagctgtaccgccttctcagcaggaacacttacctggagtgggaggacagtgtcctggggcggcacatcttctggagacgactcagaaaagccctgctggatggtaaatcatggaatccagaaggaacagtgggtacaggatgcaattggcaggaagcaacatctatctgaagaggaaaaataaaaacctcctgaggcatttcttgcccagctgggtccaacacttgttcagttaataagtattaaatgctgccacatgtcaggccttatgctaagggtgagtaattccatggtgcactagatatgcagggctgctaatctcaaggagcttccagtgcagagggaataaatgctagactaaaatacagagtcttccaggtgggcatttcaaccaactcagtcaaggaacccatgacaaagaaagtcatttcaactcttacctcatcaagttgaataaagacagagaaaacagaaagagacattgttcttttcctgagtcttttgaatggaaattgtattatgttatagccatcataaaaccattttggtagttttgactgaactgggtgttcactttttcctttttgattgaatacaatttaaattctacttgatgactgcagtcgtcaaggggctcctgatgcaagatgccccttccattttaagtctgtctccttacagaggttaaagtctagtggctaattcctaaggaaacctgattaacacatgctcacaaccatcctggtcattctcgagcatgttctattttttaactaatcacccctgatatatttttatttttatatatccagttttcatttttttacgtcttgcctataagctaatatcataaataaggttgtttaagacgtgcttcaaatatccatattaaccactatttttcaaggaagtatggaaaagtacactctgtcactttgtcactcgatgtcattccaaagttattgcctactaagtaatgactgtcatgaaagcagcattgaaataatttgtttaaagggggcactcttttaaacgggaagaaaatttccgcttcctggtcttatcatggacaatttgggctagaggcaggaaggaagtgggatgacctcaggaggtcaccttttcttgattccagaaacatatgggctgataaacccggggtgacctcatgaaatgagttgcagcagaagtttatttttttcagaacaagtgatgtttgatggacctctgaatctctttagggagacacagatggctgggatccctcccctgtacccttctcactgccaggagaactacgtgtgaaggtattcaaggcagggagtatacattgctgtttcctgttgggcaatgctccttgaccacattttgggaagagtggatgttatcattgagaaaacaatgtgtctggaattaatggggttcttataaagaaggttcccagaaaagaatgttcatccagcctcctcagaaacagaacattcaagaaaaggacaatcaggatgtcatcagggaaatgaaaataaaaaccacaatgagatatcaccttataccaggtagaatggctactataaaaaaatgaagtgtcatcaaggatatagagaaattggaacccttcttcactgctggagggaatggaaaatggtgtagccgttatgaaaaacagtacggaggtttctcaaaaattaaaaatagaactgctatatgatccagcaatctcacttctgtatatatacccaaaataattgaaatcagaatttcaagaaaatatttacactcccatgttcattgtggcactcttcacaatcactgtttccaaagttatggaaacaacccaaatttccattgaaaaataaatggacaaagaaaatgtgcatatacgtacaatgggatattattcagcctaaaaaaagggggaatcctgttatttatgacaacatgaataaacccggaggccattatgctatgtaaaatgagcaagtaacagaaagacaaatactgcctgatttcatttatatgaggttctaaaatagtcaaactcatagaagcagagaatagaacagtggttcctagggaaaaggaggaagggagaaatgaggaaatagggagttgtctaattggtataaaattatagtatgcaagatgaattagctctaaagatcagctgtatagcagagttcgtataatgaacaatactgtattatgcacttaacattttgttaagagggtacctctcatgttaagtgttcttaccatatacatatacacaaggaagcttttggaggtgatggatatatttattaccttgattgtggtgatggtttgacaggtatgtgactatgtctaaactcatcaaattgtatacattaaatatatgcagttttataatatcaa

SEQ ID NO: 236690 - DNA, 3908 bp, Artificial Sequence
  derived and/or modified sequence
tttgaatacaccaattgctgtggggcggctcgaggaagagaagacaccagtgcctcagaaactgctcggtcagacggtgatagcgagccacgcattcacagggccactgctgctcacagaagcagtgaggatgatgccaggatgatgtctgcctcgcgcctggctgggactctgatcccagccatggccttcctctcctgcgtgagaccagaaagctgggagccctgcgtggagacttggccctaaaccacacagaagagctggcatgaaacccagagctttcagactccggagcctcagcccttcaccccgattccattgcttcttgctaaatgctgccgttttatcacggaggtggttcctaatattacttatcaatgcatggagctgaatttctacaaaatccccgacaacctccccttctcaaccaagaacctggacctgagctttaatcccctgaggcatttaggcagctatagcttcttcagtttcccagaactgcaggtgctggatttatccaggtgtgaaatccagacaattgaagatggggcatatcagagcctaagccacctctctaccttaatattgacaggaaaccccatccagagtttagccctgggagccttttctggactatcaagtttacagaagctggtggctgtggagacaaatctagcatctctagagaacttccccattggacatctcaaaactttgaaagaacttaatgtggctcacaatcttatccaatctttcaaattacctgagtatttttctaatctgaccaatctagagcacttggacctttccagcaacaagattcaaagtatttattgcacagacttgcgggttctacatcaaatgcccctactcaatctctctttagacctgtccctgaaccctatgaactttatccaaccaggtgcatttaaagaaattaggcttcataagctgactttaagaaataattttgatagtttaaatgtaatgaaaacttgtattcaaggtctggctggtttagaagtccatcgtttggttctgggagaatttagaaatgaaggaaacttggaaaagtttgacaaatctgctctagagggcctgtgcaatttgaccattgaagaattccgattagcatacttagactactacctcgatgatattattgacttatttaattgtttgacaaatgtttcttcattttccctggtgagtgtgactattgaaagggtaaaagacttttcttataatttcggatggcaacatttagaattagttaactgtaaatttggacagtttcccacattgaaactcaaatctctcaaaaggcttactttcacttccaacaaaggtgggaatgctttttcagaagttgatctaccaagccttgagtttctagatctcagtagaaatggcttgagtttcaaaggttgctgttctcaaagtgattttgggacaaccagcctaaagtatttagatctgagcttcaatggtgttattaccatgagttcaaacttcttgggcttagaacaactagaacatctggatttccagcattccaatttgaaacaaatgagtgagttttcagtattcctatcactcagaaacctcatttaccttgacatttctcatactcacaccagagttgctttcaatggcatcttcaatggcttgtccagtctcgaagtcttgaaaatggctggcaattctttccaggaaaacttccttccagatatcttcacagagctgagaaacttgaccttcctggacctctctcagtgtcaactggagcagttgtctccaacagcatttaactcactctccagtcttcaggtactaaatatgagccacaacaacttcttttcattggatacgtttccttataagtgtctgaactccctccaggttcttgattacagtctcaatcacataatgacttccaaaaaacaggaactacagcattttccaagtagtctagctttcttaaatcttactcagaatgactttgcttgtacttgtgaacaccagagtttcctgcaatggatcaaggaccagaggcagctcttggtggaagttgaacgaatggaatgtgcaacaccttcagataagcagggcatgcctgtgctgagtttgaatatcacctgtcagatgaataagaccatcattggtgtgtcggtcctcagtgtgcttgtagtatctgttgtagcagttctggtctataagttctattttcacctgatgcttcttgctggctgcataaagtatggtagaggtgaaaacatctatgatgcctttgttatctactcaagccaggatgaggactgggtaaggaatgagctagtaaagaatttagaagaaggggtgcctccatttcagctctgccttcactacagagactttattcccggtgtggccattgctgccaacatcatccatgaaggtttccataaaagccgaaaggtgattgttgtggtgtcccagcacttcatccagagccgctggtgtatctttgaatatgagattgctcagacctggcagtttctgagcagtcgtgctggtatcatcttcattgtcctgcagaaggtggagaagaccctgctcaggcagcaggtggagctgtaccgccttctcagcaggaacacttacctggagtgggaggacagtgtcctggggcggcacatcttctggagacgactcagaaaagccctgctggatggtaaatcatggaatccagaaggaacagtgggtacaggatgcaattggcaggaagcaacatctatctgaagaggaaaaataaaaacctcctgaggcatttcttgcccagctgggtccaacacttgttcagttaataagtattaaatgctgccacatgtcaggccttatgctaagggtgagtaattccatggtgcactagatatgcagggctgctaatctcaaggagcttccagtgcagagggaataaatgctagactaaaatacagagtcttccaggtgggcatttcaaccaactcagtcaaggaacccatgacaaagaaagtcatttcaactcttacctcatcaagttgaataaagacagagaaaacagaaagagacattgttcttttcctgagtcttttgaatggaaattgtattatgttatagccatcataaaaccattttggtagttttgactgaactgggtgttcactttttcctttttgattgaatacaatttaaattctacttgatgactgcagtcgtcaaggggctcctgatgcaagatgccccttccattttaagtctgtctccttacagaggttaaagtctagtggctaattcctaaggaaacctgattaacacatgctcacaaccatcctggtcattctcgagcatgttctattttttaactaatcacccctgatatatttttatttttatatatccagttttcatttttttacgtcttgcctataagctaatatcataaataaggttgtttaagacgtgcttcaaatatccatattaaccactatttttcaaggaagtatggaaaagtacactctgtcactttgtcactcgatgtcattccaaagttattgcctactaagtaatgactgtcatgaaagcagcattgaaataatttgtttaaagggggcactcttttaaacgggaagaaaatttccgcttcctggtcttatcatggacaatttgggctagaggcaggaaggaagtgggatgacctcaggaggtcaccttttcttgattccagaaacatatgggctgataaacccggggtgacctcatgaaatgagttgcagcagaagtttatttttttcagaacaagtgatgtttgatggacctctgaatctctttagggagacacagatggctgggatccctcccctgtacccttctcactgccaggagaacta

SEQ ID NO: 236691 - protein, 960 aa, Artificial Sequence
  derived and/or modified sequence
MKSARAKTPRKPTVKKGSQTNLKDPVGVYCRVRPLGFPDQECCIEVINNTTVQLHTPEGYRLNRNGDYKETQYSFKQVFGTHTTQKELFDVVANPLVNDLIHGKNGLLFTYGVTGSGKTHTMTGSPGEGGLLPRCLDMIFNSIGSFQAKRYVFKSNDRNSMDIQCEVDALLERQKREAMPNPKTSSSKRQVDPEFADMITVQEFCKAEEVDEDSVYGVFVSYIEIYNNYIYDLLEEVPFDPIKPKPPQSKLLREDKNHNMYVAGCTEVEVKSTEEAFEVFWRGQKKRRIANTHLNRESSRSHSVFNIKLVQAPLDADGDNVLQEKEQITISQLSLVDLAGSERTNRTRAEGNRLREAGNINQSLMTLRTCMDVLRENQMYGTNKMVPYRDSKLTHLFKNYFDGEGKVRMIVCVNPKAEDYEENLQVMRFAEVTQEVEVARPVDKAICGLTPGRRYRNQPRGPVGNEPLVTDVVLQSFPPLPSCEILDINDEQTLPRLIEALEKRHNLRQMMIDEFNKQSNAFKALLQEFDNAVLSKENHMQGKLNEKEKMISGQKLEIERLEKKNKTLEYKIEILEKTTTIYEEDKRNLQQELETQNQKLQRQFSDKRRLEARLQGMVTETTMKWEKECERRVAAKQLEMQNKLWVKDEKLKQLKAIVTEPKTEKPERPSRERDREKVTQRSVSPSPVPLSSNYIAQISNGQQLMSQPQLHRRSNSCSSISVASCISEWEQKIPTYNTPLKVTSIARRRQQEPGQSKTCIVSDRRRGMYWTEGREVVPTFRNEIEIEEDHCGRLLFQPDQNAPPIRLRHRRSRSAGDRWVDHKPASNMQTETVMQPHVPHAITVSVANEKALAKCEKYMLTHQELASDGEIETKLIKGDIYKTRGGGQSVQFTDIETLKQESPNGSRKRRSSTVAPAQPDGAESEWTDVETRCSVAVEMRAGSQLGPGYQHHAQPKRKKP

SEQ ID NO: 236692 - DNA, 2883 bp, Artificial Sequence
  derived and/or modified sequence
atgaagtctgctagggctaagacaccacgaaaacctaccgtgaagaagggctcacagaccaacctcaaagaccccgtcggagtatattgcagggtccggcctctgggatttcccgaccaggaatgttgtattgaagtgattaacaatactaccgttcagcttcacacacctgagggatatcgcctgaatcggaacggtgattataaagaaacgcagtactcattcaagcaagtgttcggcacacatactacacagaaagaattattcgatgttgtcgcaaatcctctcgtaaatgacctgattcatggcaagaacgggctcttatttacctatggcgttaccgggtcaggaaagacccacactatgacaggcagtcctggcgaaggtggcttattgccaagatgcctggacatgatttttaatagcattggcagctttcaggctaaaaggtatgtcttcaagagcaacgacaggaactccatggatatccagtgtgaggtggacgccctcctcgagcgccagaaaagggaagctatgcctaacccaaaaaccagcagctctaagaggcaggtggatccagaatttgccgacatgatcacggtccaggagttttgcaaggccgaggaggttgacgaagacagcgtgtatggtgtgttcgtaagctacatcgagatctataacaattatatctatgacctcctggaagaggtgcccttcgaccccattaagccaaaacctcctcagagcaaattgctgagagaagataaaaaccataatatgtatgtggcaggttgtactgaggtcgaagttaagtcgacggaggaggccttcgaggtgttttggaggggacagaaaaaacgtcgaatcgccaatactcatctcaatcgtgaaagtagtcggtctcactcagtgttcaacatcaagcttgtgcaggccccgctggacgccgacggcgataatgtgctgcaggagaaagagcagatcaccatttcccagcttagccttgtcgacctggcaggatctgagcgcactaatcgcacaagggcagaaggcaaccggctgcgcgaggccggaaacatcaaccagtccttgatgacactccgaacttgcatggacgtattgagggagaatcagatgtatggtaccaataagatggtcccctacagggacagtaagctgacacatctgttcaagaactactttgatggggagggaaaggtgcgcatgatcgtgtgtgtcaacccgaaggcagaggactacgaagagaatctgcaggttatgagattcgctgaggttacccaggaggtcgaagtggcgcgcccagtcgataaggccatatgcggactgacccccggccgacggtatcggaaccagcctagagggcctgtcggcaatgagcctctcgtcactgacgtggttcttcagtcatttcctccgttgccatcgtgcgagatactggacattaacgatgagcagaccctgccccgcctgatcgaagcgcttgaaaaacgtcataatttaaggcagatgatgatcgatgagttcaacaagcagtccaacgcttttaaggcactgctgcaagagttcgataacgctgtcctcagcaaggagaatcacatgcagggcaaattaaatgagaaggaaaagatgatttcaggacaaaaactggagatagagagactcgagaagaagaataaaacgctggaatacaagattgaaatcctggagaagaccactaccatctatgaggaggataagcgcaatctgcagcaggaattggagacccagaaccagaagcttcaacgccagttttctgacaaacgccgcttggaggcacgactccagggcatggtcacagagaccacaatgaaatgggaaaaagaatgtgaacgtagggtagccgctaaacagctggaaatgcagaataagttatgggtgaaggatgaaaaactaaagcaacttaaggccattgtgacagagccgaagacagaaaaaccagagcgcccaagccgggaaagagatagggagaaagtgactcaaagatctgtgtcaccttcgccggttccattatcatccaactacattgctcagataagcaacggccagcaactcatgtctcaacctcagcttcataggcgaagtaatagttgctcctccatttccgtggctagttgcatttcagagtgggaacaaaaaatccccacatacaatactccactcaaagtgacatctattgcccgccggcgccagcaggagcccggacaatccaagacatgcatagtctccgaccggcgtcgcggtatgtactggacagaggggagggaagttgttcctaccttccggaacgaaattgagattgaggaagaccactgtgggagactcttgtttcaaccagatcagaatgccccccccattagactgcgccatcggcgtagtcggtcagcgggagaccgctgggtggatcataagccagcctcaaacatgcaaacggagaccgtgatgcaaccccatgtaccacacgccatcactgtgagcgtggccaatgagaaggctctcgctaagtgtgagaaatacatgcttactcatcaggaattagcttccgatggagaaatcgagacaaaactcattaagggggacatttataaaaccaggggaggaggccagtctgtccagttcactgacatagagactttgaagcaggagtcacctaatgggtcgcgtaagcgaagatcgagcacagtagcccccgcgcagcctgatggggcagagtccgaatggactgacgtggagaccaggtgcagcgttgcagtggaaatgagagctgggtctcagttggggccagggtaccagcatcacgcacaacccaaacgtaagaaaccgtag

SEQ ID NO: 236693 - DNA, 2520 bp, Artificial Sequence
  derived and/or modified sequence
atgaccggatctccaggcgaggggggtctgctccctagatgcctcgatatgatttttaattccatcggaagcttccaagccaaaagatatgtgtttaagtcaaacgatcggaatagcatggatattcagtgcgaggttgacgccttgctggaaagacagaaacgggaggccatgcccaatcctaagacttcctcaagcaagcgccaggtcgacccagagtttgcagacatgattaccgtgcaggagttctgtaaggccgaggaggtggatgaggatagtgtgtatggggtttttgtgtcgtacatcgagatctataacaattatatttatgatctcctggaagaagtcccattcgatcctattaagccaaagcccccgcagagcaagctgctgagggaggacaagaatcacaatatgtacgtagccggttgcactgaggttgaggtaaaaagcactgaggaagcgtttgaggtgttctggcggggacagaagaagaggcgcattgccaatacccatctgaatagggaaagcagtcgcagccatagtgtgttcaacattaagctggttcaggctcctcttgatgctgacggggacaacgtactgcaggaaaaggaacaaattacaataagccagctgtcactggtcgacttggccggttccgagcgcaccaaccgaactagggcagagggaaatcggctgcgagaggctggcaatattaaccaaagcctgatgaccttgagaacctgtatggacgtgcttagggagaaccaaatgtacggaacgaacaaaatggttccttacagagacagcaagctgacacaccttttcaagaactacttcgacggcgagggtaaagtgcggatgatagtttgcgtgaatcctaaggctgaggattacgaagaaaacctgcaagttatgcgcttcgcagaggtgacccaggaggtggaagtagcaagaccggtggataaagcaatttgcggtttaacacctggaaggcggtaccgcaaccaaccgcgtggccccgtcgggaatgagccccttgtcacggatgtggtgttacagtcttttccacccttaccatcttgtgagattttggacattaacgacgaacaaacattaccacggctaatcgaggccctcgagaaacgccacaatctgcggcaaatgatgatagatgagttcaataagcaatctaacgcattcaaagcgctgctgcaagaattcgataacgccgtcctgtctaaggagaaccatatgcagggcaaattgaatgagaaagagaagatgatctcagggcaaaagctggagatcgaaagactggaaaagaaaaacaagaccctcgaatacaagatcgaaatcctagagaaaaccactacaatatatgaggaggataaaagaaacctgcagcaggaattagaaacacaaaaccaaaagctgcaaaggcagtttagcgataaaaggcgtttagaggcaagacttcagggaatggtcacagaaaccacaatgaagtgggagaaggaatgtgaaagacgggttgccgcaaagcagctcgaaatgcagaacaaactgtgggtgaaagacgagaagctgaagcagctgaaggctatcgtcactgagcccaaaacggagaaaccggaacgcccttccagggagagggatcgcgaaaaagttacccagcgaagtgtatctccatccccagttcctctgtcttcaaactacatagctcagattagcaacggccagcagttgatgagccagcctcaactgcataggcgctctaactcatgctcttctatcagcgtggccagttgtatttcggaatgggagcaaaagatcccaacatacaacacccccctcaaggtaaccagcatcgccagacggaggcagcaggagccgggacaatctaagacgtgcattgtgtcagaccgtcgccgtgggatgtattggactgagggacgagaggtggtgccgacattccgcaacgaaatcgaaatcgaggaggaccattgcggacggctgttgttccagcctgaccaaaacgcaccccccattcggctgcgtcaccgaaggtccaggagcgctggtgacagatgggtggaccataagccagcttccaacatgcaaacagagaccgtgatgcagccccatgtcccgcacgctatcaccgtgtcggtggcaaacgaaaaagcgctggcaaaatgcgagaaatatatgctcacgcaccaagaacttgcaagcgatggggagattgagacgaagctgatcaaaggcgacatttataagacgcgaggcggcgggcaatcagtgcagttcaccgatattgaaaccctgaaacaggagagcccgaacggcagcagaaagagacggtcgtcaacagtcgcacccgcacagccagatggcgctgaaagcgagtggaccgacgtggagacacgctgcagcgtcgcggtggagatgcgcgcaggatcacaattgggtccaggttatcagcaccacgcacagcctaaaaggaagaaaccttag

SEQ ID NO: 236694 - DNA, 3610 bp, Artificial Sequence
  derived and/or modified sequence
gcagagcaccgcgccttagccgcgaagttctagttcttgctgccggtcctaacgtcccgcagtcttcgccagccagccgtcccgcatgcgcgtttgggcggcgtggagcctgctgccatgaagtcagcgagagctaagacaccccggaaacctaccgtgaaaaaagggtcccaaacgaaccttaaagacccagttggggtatactgtagggtgcgcccactgggctttcctgatcaagagtgttgcatagaagtgatcaataatacaactgttcagcttcatactcctgagggctacagactcaaccgaaatggagactataaggagactcagtattcatttaaacaagtatttggcactcacaccacccagaaggaactctttgatgttgtggctaatcccttggtcaatgacctcattcatggcaaaaatggtcttctttttacatatggtgtgacgggaagtggaaaaactcacacaatgactggttctccaggggaaggagggctgcttcctcgttgtttggacatgatctttaacagtatagggtcatttcaagctaaacgatatgttttcaaatctaatgataggaatagtatggatatacagtgtgaggttgatgccttattagaacgtcagaaaagagaagctatgcccaatccaaagacttcttctagcaaacgacaagtagatccagagtttgcagatatgataactgtacaagaattctgcaaagcagaagaggttgatgaagatagtgtctatggtgtatttgtctcttatattgaaatatataataattacatatatgatctattggaagaggtgccgtttgatcccataaaacccaaacctccacaatctaaattgcttcgtgaagataagaaccataacatgtatgttgcaggatgtacagaagttgaagtgaaatctactgaggaggcttttgaagttttctggagaggccagaaaaagagacgtattgctaatacccatttgaatcgtgagtccagccgttcccatagcgtgttcaacattaaattagttcaggctcccttggatgcagatggagacaatgtcttacaggaaaaagaacaaatcactataagtcagttgtccttggtagatcttgctggaagtgaaagaactaaccggaccagagcagaagggaacagattacgtgaagctggtaatattaatcagtcactaatgacgctaagaacatgtatggatgtcctaagagagaaccaaatgtatggaactaacaagatggttccatatcgagattcaaagttaacccatctgttcaagaactactttgatggggaaggaaaagtgcggatgatcgtgtgtgtgaaccccaaggctgaagattatgaagaaaacttgcaagtcatgagatttgcggaagtgactcaagaagttgaagtagcaagacctgtagacaaggcaatatgtggtttaacgcctgggaggagatacagaaaccagcctcgaggtccagttggaaatgaaccattggttactgacgtggttttgcagagttttccacctttgccatcatgcgaaattttggatatcaacgatgagcagacacttccaaggctgattgaagccttagagaaacgacataacttacgacaaatgatgattgatgagtttaacaaacaatctaatgcttttaaagctttgttacaagaatttgacaatgctgttttaagtaaagaaaaccacatgcaagggaaactaaatgaaaaggagaagatgatctcaggacagaaattggaaatagaacgactggaaaagaaaaacaaaactttagaatataagattgagattttagagaaaacaactactatctatgaggaagataaacgcaatttgcaacaggaacttgaaactcagaaccagaaacttcagcgacagttttctgacaaacgcagattagaagccaggttgcaaggcatggtgacagaaacgacaatgaagtgggagaaagaatgtgagcgtagagtggcagccaaacagctggagatgcagaataaactctgggttaaagatgaaaagctgaaacaactgaaggctattgttaccgaacctaaaactgagaagccagagagaccctctcgggagcgagatcgagaaaaagttactcaaagatctgtttctccatcacctgtgcctctttctagtaactatattgctcagatttccaacggccagcaactcatgagccagccacagctacataggcgctctaactcttgcagcagcatttctgtagcttcctgtatttcggaatgggagcagaaaattcctacgtacaacacacctctcaaagtcacatctattgcaaggcgtaggcagcaggagccaggacaaagcaaaacttgtatcgtgtcagacagaaggcgagggatgtactggactgaaggcagggaggtggttcctacattcagaaatgagatagaaatagaagaggatcattgcggcaggttactctttcaacctgatcagaacgcaccaccaattcgtctccgacacagacgatcacgctctgcaggagacagatgggtagatcataagcccgcctctaacatgcaaactgaaacagtcatgcagccacatgtccctcatgccatcacagtatctgttgcaaatgaaaaggcactagctaagtgtgagaagtacatgctgacccaccaggaactagcctccgatggggagattgaaactaaactaattaagggtgatatttataaaacaaggggtggtggacaatctgttcagtttactgatattgagactttaaagcaagaatcaccaaatggtagtcgaaaacgaagatcttccacagtagcacctgcccaaccagatggtgcagagtctgaatggaccgatgtagaaacaaggtgttctgtggctgtggagatgagagcaggatcccagctgggacctggatatcagcatcacgcacaacccaagcgcaaaaagccatgaactgacagtcccagtactgaaagaacattttcatttgtgtggatgatttctcgaaagccatgccagaagcagtcttccaggtcatcttgtagaactccagctttgttgaaaatcacggacctcagctacatcatacactgacccagagcaaagctttccctatggttccaaagacaactagtattcaacaaaccttgtatagtatatgttttgccatatttaatattaatagcagaggaagactccttttttcatcactgtatgaattttttataatgtttttttaaaatatatttcatgtatacttataaactaattcacacaagtgtttgtcttagatgattaaggaagactatatctagatcatgtctgattttttattgtgacttctccagccctggtctgaatttcttaaggttttataaacaaatgctgctatttattagctgcaagaatgcactttagaactatttgacaattcagactttcaaaataaagatgtaaatgactggccaataataaccattttaggaaggtgttttgaattctgtatgtatatattcactttctgacatttagatatgccaaaagaattaaaatcaaaagcact

SEQ ID NO: 236695 - DNA, 3493 bp, Artificial Sequence
  derived and/or modified sequence
caggagagctaagacaccccggaaacctaccgtgaaaaaagggtcccaaacgaaccttaaagacccagttggggtatactgtagggtgcgcccactgggctttcctgatcaagagtgttgcatagaagtgatcaataatacaactgttcagcttcatactcctgagggctacagactcaaccgaaatggagactataaggagactcagtattcatttaaacaagtatttggcactcacaccacccagaaggaactctttgatgttgtggctaatcccttggtcaatgacctcattcatggcaaaaatggtcttctttttacatatggtgtgacgggaagtggaaaaactcacacaatgactggttctccaggggaaggagggctgcttcctcgttgtttggacatgatctttaacagtatagggtcatttcaagctaaacgatatgttttcaaatctaatgataggaatagtatggatatacagtgtgaggttgatgccttattagaacgtcagaaaagagaagctatgcccaatccaaagacttcttctagcaaacgacaagtagatccagagtttgcagatatgataactgtacaagaattctgcaaagcagaagaggttgatgaagatagtgtctatggtgtatttgtctcttatattgaaatatataataattacatatatgatctattggaagaggtgccgtttgatcccataaaacccaaacctccacaatctaaattgcttcgtgaagataagaaccataacatgtatgttgcaggatgtacagaagttgaagtgaaatctactgaggaggcttttgaagttttctggagaggccagaaaaagagacgtattgctaatacccatttgaatcgtgagtccagccgttcccatagcgtgttcaacattaaattagttcaggctcccttggatgcagatggagacaatgtcttacaggaaaaagaacaaatcactataagtcagttgtccttggtagatcttgctggaagtgaaagaactaaccggaccagagcagaagggaacagattacgtgaagctggtaatattaatcagtcactaatgacgctaagaacatgtatggatgtcctaagagagaaccaaatgtatggaactaacaagatggttccatatcgagattcaaagttaacccatctgttcaagaactactttgatggggaaggaaaagtgcggatgatcgtgtgtgtgaaccccaaggctgaagattatgaagaaaacttgcaagtcatgagatttgcggaagtgactcaagaagttgaagtagcaagacctgtagacaaggcaatatgtggtttaacgcctgggaggagatacagaaaccagcctcgaggtccagttggaaatgaaccattggttactgacgtggttttgcagagttttccacctttgccatcatgcgaaattttggatatcaacgatgagcagacacttccaaggctgattgaagccttagagaaacgacataacttacgacaaatgatgattgatgagtttaacaaacaatctaatgcttttaaagctttgttacaagaatttgacaatgctgttttaagtaaagaaaaccacatgcaagggaaactaaatgaaaaggagaagatgatctcaggacagaaattggaaatagaacgactggaaaagaaaaacaaaactttagaatataagattgagattttagagaaaacaactactatctatgaggaagataaacgcaatttgcaacaggaacttgaaactcagaaccagaaacttcagcgacagttttctgacaaacgcagattagaagccaggttgcaaggcatggtgacagaaacgacaatgaagtgggagaaagaatgtgagcgtagagtggcagccaaacagctggagatgcagaataaactctgggttaaagatgaaaagctgaaacaactgaaggctattgttaccgaacctaaaactgagaagccagagagaccctctcgggagcgagatcgagaaaaagttactcaaagatctgtttctccatcacctgtgcctctttctagtaactatattgctcagatttccaacggccagcaactcatgagccagccacagctacataggcgctctaactcttgcagcagcatttctgtagcttcctgtatttcggaatgggagcagaaaattcctacgtacaacacacctctcaaagtcacatctattgcaaggcgtaggcagcaggagccaggacaaagcaaaacttgtatcgtgtcagacagaaggcgagggatgtactggactgaaggcagggaggtggttcctacattcagaaatgagatagaaatagaagaggatcattgcggcaggttactctttcaacctgatcagaacgcaccaccaattcgtctccgacacagacgatcacgctctgcaggagacagatgggtagatcataagcccgcctctaacatgcaaactgaaacagtcatgcagccacatgtccctcatgccatcacagtatctgttgcaaatgaaaaggcactagctaagtgtgagaagtacatgctgacccaccaggaactagcctccgatggggagattgaaactaaactaattaagggtgatatttataaaacaaggggtggtggacaatctgttcagtttactgatattgagactttaaagcaagaatcaccaaatggtagtcgaaaacgaagatcttccacagtagcacctgcccaaccagatggtgcagagtctgaatggaccgatgtagaaacaaggtgttctgtggctgtggagatgagagcaggatcccagctgggacctggatatcagcatcacgcacaacccaagcgcaaaaagccatgaactgacagtcccagtactgaaagaacattttcatttgtgtggatgatttctcgaaagccatgccagaagcagtcttccaggtcatcttgtagaactccagctttgttgaaaatcacggacctcagctacatcatacactgacccagagcaaagctttccctatggttccaaagacaactagtattcaacaaaccttgtatagtatatgttttgccatatttaatattaatagcagaggaagactccttttttcatcactgtatgaattttttataatgtttttttaaaatatatttcatgtatacttataaactaattcacacaagtgtttgtcttagatgattaaggaagactatatctagatcatgtctgattttttattgtgacttctccagccctggtctgaatttcttaaggttttataaacaaatgctgctatttattagctgcaagaatgcactttagaactatttgacaattcagactttcaaaataaagatgtaaatgactggccaataataaccattttaggaaggtgttttgaattctgtatgtatatattcactttctgacatttagatatgccaaaagaattaaaatcaaaagcactaagaaata

SEQ ID NO: 236696 - DNA, 2883 bp, Artificial Sequence
  derived and/or modified sequence
atgaagagcgcccgggccaagacccccaggaagcccaccgtgaagaagggcagccagaccaacctgaaggaccctgtgggcgtgtactgccgggtgcggcccctgggcttcccagaccaggagtgctgcatcgaggtgatcaacaacaccaccgtgcagctgcacaccccagagggctaccgcctgaacagaaatggagactacaaggagacccagtacagcttcaagcaggtgtttggcacccacaccacccagaaggagctgtttgatgtggtggccaaccccctggtgaatgacctgatccacggcaagaatggcctgctcttcacctatggagtgacaggcagcggcaagacccacaccatgacaggcagccctggagagggcggcctgctgccccgctgcctggacatgatcttcaacagcatcggcagcttccaggccaagagatatgtgttcaagagcaatgacaggaacagcatggacatccagtgtgaggtggatgccctgctggagcggcagaagcgggaggccatgcccaaccccaagaccagcagcagcaagaggcaggtggaccctgagtttgctgacatgatcaccgtgcaggagttctgcaaggccgaggaggtggatgaggacagcgtgtatggagtgtttgtgtcctacatcgagatctacaacaactacatctatgacctgctggaggaggtgccctttgaccccatcaagcccaagccaccccagagcaagctgctgcgggaggacaagaaccacaacatgtatgtggccggctgcacagaggtggaggtgaagagcacagaggaggcctttgaggtgttctggaggggccagaagaagagaagaattgccaacacccacctgaaccgggagagcagccgcagccacagcgtcttcaacatcaagctggtgcaggcccccctggatgctgatggagacaacgtgctgcaggagaaggagcagatcaccatcagccagctgagcctggtggacctggccggcagcgagaggaccaacagaaccagggctgagggcaaccggctgcgggaggccggcaacatcaaccagagcctgatgaccctgcggacctgcatggatgtgctgcgggagaaccagatgtatggcaccaacaagatggtgccctacagagacagcaagctgacccacctgttcaagaactactttgatggagagggcaaggtgaggatgattgtgtgtgtgaaccccaaggccgaggactatgaggagaacctgcaggtgatgagatttgctgaggtgacccaggaggtggaggtggcccggcctgtggacaaggccatctgtggcctgaccccaggaagacgctacagaaaccagccccggggccctgtgggcaatgagcccctggtgacagatgtggtgctgcagagcttcccccccctgcccagctgtgagatcctggacatcaatgatgagcagaccctgcccaggctcatcgaggccctggagaagaggcacaacctgcggcagatgatgattgatgagttcaacaagcagagcaatgccttcaaggccctgctgcaggagtttgacaatgctgtgctgagcaaagaaaaccacatgcagggcaagctgaatgagaaggagaagatgatcagcggccagaagctggagattgaaaggctggagaagaagaacaagaccctggagtacaagattgagatcctggagaagaccaccaccatctatgaggaggacaagaggaacctgcagcaggagctggagacccagaaccagaagctgcagaggcagttcagtgacaagaggcggctggaggcccggctgcagggcatggtgacagagaccaccatgaagtgggagaaggaatgtgaaagaagagtggccgccaagcagctggagatgcagaacaagctgtgggtgaaggatgagaagctgaagcagctgaaggccatcgtgacagagcccaagacagagaagccagagcggcccagccgggagcgggaccgggagaaggtgacccagaggtctgtgagccccagccctgtgcccctgagcagcaactacatcgcccagatcagcaatggccagcagctgatgagccagccccagctgcaccggcgcagcaacagctgcagcagcatctctgtggccagctgcatcagcgagtgggagcagaagatccccacctacaacacccccctgaaggtgaccagcatcgcccggcggcggcagcaggagcccggccagagcaagacctgcatcgtgtctgacagaagaagaggcatgtactggacagagggccgggaggtggtgcccaccttcagaaatgaaattgaaattgaggaggaccactgcggccgcctgctcttccagcctgaccagaatgccccacccatccggctgcggcaccggcgcagccgctctgctggggaccgctgggtggaccacaagccagccagcaacatgcagacagagaccgtgatgcagccccacgtgccccacgccatcaccgtgtctgtggccaatgagaaggccctggccaagtgtgagaagtacatgctgacccaccaggagctggccagtgatggagaaattgagaccaagctgatcaagggggacatctacaagacccggggcggcggccagagcgtgcagttcacagacatcgagaccctgaagcaggagagccccaacggcagcaggaagagaagaagcagcacagtggccccagcccagccagatggagctgagagcgagtggacagatgtggagacccgctgcagcgtggccgtggagatgagagctggcagccagctgggccctggctaccagcaccacgcccagcccaagaggaagaagccctag

SEQ ID NO: 236697 - DNA, 2520 bp, Artificial Sequence
  derived and/or modified sequence
atgacaggcagccctggagagggcggcctgctgccccgctgcctggacatgatcttcaacagcatcggcagcttccaggccaagcgctacgtgttcaagagcaatgacagaaattccatggacatccagtgtgaggtggatgccctgctggagcggcagaagcgggaggccatgcccaaccccaagaccagcagcagcaagaggcaggtggaccctgagtttgctgacatgatcaccgtgcaggagttctgcaaggccgaggaggtggatgaagattctgtgtatggagtgtttgtgtcctacatcgagatctacaacaactacatctatgacctgctggaggaggtgccctttgaccccatcaagcccaagccaccccagagcaagctgctgcgggaggacaagaaccacaacatgtatgtggccggctgcacagaggtggaggtgaagagcacagaggaggcctttgaggtgttctggaggggccagaagaagaggcgcatcgccaacacccacctgaaccgggagagcagccgcagccacagcgtcttcaacatcaagctggtgcaggcccccctggatgctgatggagacaacgtgctgcaggagaaggagcagatcaccatcagccagctgagcctggtggacctggccggcagcgagaggaccaacagaaccagggctgagggcaaccggctgcgggaggccggcaacatcaaccagagcctgatgaccctgcggacctgcatggatgtgctgcgggagaaccagatgtatggcaccaacaagatggtgccctacagagacagcaagctgacccacctgttcaagaactactttgatggagagggcaaggtgaggatgattgtgtgtgtgaaccccaaggcagaagattatgaggagaacctgcaggtgatgagatttgctgaggtgacccaggaggtggaggtggcccggcctgtggacaaggccatctgtggcctgaccccaggccgccgctacagaaaccagccccggggccctgtgggcaatgagcccctggtgacagatgtggtgctgcagagcttcccccccctgcccagctgtgagatcctggacatcaatgatgagcagaccctgccccggctgattgaggccctggagaagaggcacaacctgcggcagatgatgattgatgagttcaacaagcagagcaatgccttcaaggccctgctgcaggagtttgacaatgctgtgctgagcaaggagaaccacatgcagggcaagctgaatgagaaggagaagatgatcagcggccagaagctggagattgagcggctggagaagaagaacaagaccctggagtacaagattgagatcctggagaagaccaccaccatctatgaggaggacaagaggaacctgcagcaggagctggagacccagaaccagaagctgcagaggcagttcagtgacaagaggcggctggaggcccggctgcagggcatggtgacagagaccaccatgaagtgggagaaggaatgtgagcggcgggtggccgccaagcagctggagatgcagaacaagctgtgggtgaaggatgagaagctgaagcagctgaaggccatcgtgacagagcccaagacagagaagccagagcggcccagccgggagcgggaccgggagaaggtgacccagaggtctgtgagccccagccctgtgcccctgagcagcaactacatcgcccagatcagcaatggccagcagctgatgagccagccccagctgcacagaagaagcaacagctgcagcagcatctctgtggccagctgcatcagcgagtgggagcagaagatccccacctacaacacccccctgaaggtgaccagcatcgcccggcggcggcagcaggagcccggccagagcaagacctgcatcgtgtctgacagaagaagaggcatgtactggacagagggccgggaggtggtgcccaccttcagaaatgaaattgaaattgaggaggaccactgcggccgcctgctcttccagcctgaccagaatgccccacccatccggctgcggcacagaagaagccgctctgctggggaccgctgggtggaccacaagccagccagcaacatgcagacagaaacagtgatgcagccccacgtgccccacgccatcaccgtgtctgtggccaatgagaaggccctggccaagtgtgagaagtacatgctgacccaccaggagctggccagtgatggagaaattgagaccaagctgatcaagggggacatctacaagacccggggcggcggccagagcgtgcagttcacagacatcgagaccctgaagcaggagagccccaacggcagcaggaagaggaggagcagcacagtggccccagcccagccagatggagctgagagcgagtggacagatgtggagacccgctgcagcgtggccgtggagatgagagctggcagccagctgggccctggctaccagcaccacgcccagcccaagaggaagaagccctag

SEQ ID NO: 236698 - DNA, 2883 bp, Artificial Sequence
  derived and/or modified sequence
atgaagagcgcccgggccaagaccccccggaagcccaccgtgaagaagggcagccagacaaacctgaaggaccctgtaggcgtctattgtagggttcgcccgttgggattccccgatcaagagtgctgtatcgaagtgattaacaacaccacagtccaactacatacacccgaaggatatcggctgaaccgcaatggagattataaagagacccagtatagtttcaagcaggtattcgggacccatacaacacaaaaagagctgtttgacgtggttgcaaatcccttagttaacgacctgattcacggaaagaacgggcttttgtttacatatggagtgacaggttccgggaagacccacaccatgactggtagtcccggcgagggaggcttactgccccgctgcctggatatgattttcaacagtattggttctttccaggcaaagcgttatgtgttcaaaagtaatgatcgcaactcaatggatattcagtgcgaggtggacgcattgctggagagacagaagagggaagcaatgcccaacccaaaaacgtcctctagcaagcgtcaggtggaccccgaatttgctgacatgatcacagttcaggagttctgtaaggcagaggaggttgacgaggacagcgtgtacggagtcttcgtgtcttatatcgagatttataacaattacatctatgatctcttagaagaagtgccattcgatcccattaagccaaagcccccgcaaagtaagctattgcgagaagacaaaaatcacaatatgtatgtggcggggtgtacggaagtggaagtgaaaagtacggaagaggcatttgaagttttttggcgtgggcagaaaaaacggaggatagcaaacacacacctcaatcgagaatcttctcgatcccactccgtgttcaacattaaattagtacaggcaccgctcgatgccgatggagacaacgtgcttcaggaaaaagagcagattaccatctcacagctctctctggtcgacctggccgggtcagaacgaacaaatcgaaccagagcagaaggaaatcggcttcgcgaggcggggaatatcaaccagtcccttatgaccctgagaacttgtatggatgttttgcgtgagaaccagatgtatggcaccaataaaatggtcccctaccgtgacagtaagctgacccacctcttcaagaattattttgatggagagggaaaggtgcgcatgatcgtctgcgtcaacccgaaggccgaagactatgaggagaacctgcaggtgatgagattcgccgaagtgactcaagaggtggaggtggcacgcccagtggataaagctatttgcggcctgacacctggccgccgttacaggaaccagccacgcgggccagtcggcaacgagcctctggtgacagacgtggtgcttcagtcatttccgcccctgccgtcctgcgaaatcctggatataaacgatgagcagaccttgcctagattgattgaggccctcgaaaagaggcataacttaaggcagatgatgatcgacgaatttaacaaacagagcaatgcattcaaggctttactgcaggagttcgataacgccgtgttgtctaaggagaaccacatgcagggaaaactgaatgagaaggagaaaatgattagtgggcagaaattggaaatcgagcgcctcgaaaagaaaaacaagaccctcgagtataagatcgaaattctcgagaagacaacaacaatttacgaggaggataagaggaacctgcaacaggagctggaaacccagaatcagaagctgcaacgacagttctccgacaagcgaagactcgaggctagattgcaaggcatggtcacagaaacgaccatgaagtgggaaaaagaatgtgagcggcgggtggccgcaaagcaacttgagatgcaaaacaaactctgggtgaaggacgaaaagctgaaacagttgaaggccattgtgaccgaacctaaaaccgaaaaaccagagcgtccctctcgggaaagggatcgggagaaggtcacacagaggtctgtcagcccctctcccgtgccactatcctcaaactacatagcccaaatttcaaacgggcagcagctgatgtcacaaccacagctgcatcgacgatctaattcatgttcttctataagtgtggcctcatgcatcagtgaatgggaacagaagatccccacatataacactcctctgaaagttacgtcaatcgcaaggagacggcagcaggagcctgggcagtccaaaacctgtattgtttctgacaggcgacggggcatgtattggacagagggacgggaggtcgtgccaaccttccggaatgagatcgagattgaagaggatcattgcggcagactcttatttcagccagaccaaaatgcccctcccattcgtctcaggcacaggaggtctcgatcagccggagaccgttgggtggaccacaagccggcatctaacatgcagaccgaaacagtaatgcaaccccacgttccccacgctatcacggttagcgtcgccaacgagaaggccctggcgaagtgcgagaaatatatgttaacccatcaggaattagccagcgacggggagattgaaacaaagctgattaagggcgacatctacaagactaggggaggtggacagagtgtgcagttcaccgacattgagactcttaagcaggagtcaccaaacggaagtcgaaagagaagatcgtcaaccgttgctcctgcacagcctgacggcgctgaatccgagtggacggacgttgagaccaggtgtagtgtggccgtggaaatgcgcgcaggttcccaactcggcccaggctaccagcaccacgcacagcctaaaagaaagaagccctag

SEQ ID NO: 236699 - DNA, 2520 bp, Artificial Sequence
  derived and/or modified sequence
atgaccggcagccccggcgagggcggcctgctgccccggtgcctggacatgatatttaactccataggctctttccaagcaaagagatacgtatttaagagcaacgataggaactctatggatatccagtgtgaggtcgacgctctgctcgagcgccagaagagggaggcgatgcctaacccaaagaccagttcgagcaaacgtcaggtggatccagagttcgccgacatgataaccgtgcaggagttctgcaaggcagaagaggtggacgaggactctgtgtacggtgttttcgtatcctacatcgaaatctacaataactacatttacgatctactcgaagaggttcctttcgaccccattaagcctaaaccacctcaaagcaaactgctgcgggaggacaaaaaccacaatatgtacgttgccggttgcacggaggttgaggtgaaatccactgaggaggctttcgaggtgttctggcgtggccaaaagaagaggcggatcgcaaatacgcacctcaatcgcgagtctagtcgctcacacagcgtgttcaacattaagctcgtgcaggctcccctagatgctgatggcgacaatgtacttcaggaaaaagaacaaatcacaatctctcagctttctctggttgaccttgcgggaagcgagcgcaccaaccgcacacgcgccgagggcaatagactgagggaggcaggcaacataaaccagtctctgatgacccttcgtacttgcatggacgttctcagggaaaaccaaatgtacggcactaacaagatggttccatacagggacagtaagttgacacacctattcaaaaattatttcgacggtgaaggcaaagtccgtatgatcgtgtgcgtgaatcccaaggctgaagactacgaggagaatctgcaggtcatgcgcttcgcagaagtgacgcaagaggtcgaagtggccaggccagtcgataaggccatctgcggcctaacacctggacgtcgataccgaaatcagcctagggggcccgtaggcaatgaacctctggttaccgacgttgtgcttcagagctttcctcccttgccctcctgtgagatactggatattaacgatgagcaaaccctccctagactaatcgaggccctcgagaaacgtcataatcttcgacaaatgatgatcgacgaattcaacaaacaaagcaacgctttcaaagctttacttcaggaatttgacaacgcggtcctgagcaaggagaaccatatgcagggcaaactgaatgagaaggagaaaatgattagcggacagaaactcgaaatagaaagactggagaagaagaacaaaacactggaatataagatcgagatactggagaagacaaccacgatttacgaggaggacaaacgcaacttgcagcaggagctggagacacagaatcagaaattacagcgccagttttctgataagcggcgtctggaagcaagactgcagggcatggttacggagaccactatgaagtgggagaaagagtgtgagcgccgcgtggccgccaaacagctggaaatgcagaacaaactatgggtcaaagatgaaaagctgaaacagttaaaagcaatcgtcactgagcctaaaactgagaaacccgagcggcccagccgcgagagggaccgggaaaaagtgactcaaagatcagtgtctccctcacctgtccctctgagcagcaattacattgcccaaatttctaatgggcaacagctgatgagccagcctcagttacaccgccggtctaattcctgcagcagtatcagtgtagcctcttgtatttccgagtgggagcaaaagatacctacatacaacaccccgctaaaggtgaccagcatcgcacggagaagacagcaagagcctggccaaagtaagacatgcatcgtcagcgaccgtcgcagaggtatgtattggactgaaggccgggaggttgtgccaacattccgcaatgagattgaaatcgaagaggaccactgtggcaggctgctctttcagcctgaccagaatgccccacctattaggctccgtcatcggagaagtaggtccgctggcgatagatgggttgatcacaagcccgcttccaacatgcagaccgagaccgtcatgcagccacatgtcccacatgctatcacggtatctgtggcgaatgaaaaagccctagcaaagtgtgaaaaatatatgctgactcatcaggaattagccagtgacggcgagattgagacaaagcttatcaagggggatatctacaagacccgagggggcggacagagcgtacagttcactgacatcgagactcttaagcaagaatctcccaacggctcaagaaagcggcgcagctctacagtggcgccagcccagccagatggggccgaatcagagtggactgacgtggaaaccaggtgcagcgtggcagtagagatgcgagccggctcccagttaggtcccggctaccagcaccacgcacagcctaagcgtaaaaaaccttag

SEQ ID NO: 236700 - DNA, 2883 bp, Artificial Sequence
  derived and/or modified sequence
atgaagtcagctagagccaagactcctcgaaaacctacggtgaaaaaaggatctcagacgaacttaaaggacccggttggtgtatattgccgcgtgcggccacttgggttccctgatcaagaatgctgtatcgaggttattaataataccacagtccagctccacacacccgagggctatagactgaatcggaacggagactacaaagaaacgcagtacagttttaaacaggtgtttggaacccacacgacccaaaaggagctttttgacgtggtcgccaacccactcgtgaatgatctgattcatggcaaaaatggtctgttgttcacctatggagtcaccggaagcggaaaaacccatacaatgacaggttctcccggtgaaggcggactcctgccacgttgtttggatatgattttcaacagcatcggaagttttcaagcgaagaggtatgtgttcaagtccaacgaccggaactccatggacatccaatgcgaggtcgatgccctgttggagcgccaaaaacgagaagcgatgccaaaccccaagacatcatctagcaaacggcaggtcgacccagaattcgctgacatgatcaccgtacaggagttttgcaaagcagaggaggtggatgaagactcagtgtatggggtctttgtgtcctatatagaaatttataacaactacatctacgatttgctagaagaagtgccattcgacccaataaagcccaaacccccacagagcaagctgctaagggaggacaagaaccataacatgtatgtggccggatgcacagaagtggaagtcaaaagcacagaagaggcttttgaggtgttctggagaggacagaaaaagcggagaattgcaaatactcatttgaacagggaatcatcgcggtcgcatagtgtctttaacatcaagctcgtgcaggctcctctggacgccgacggagataacgtgctccaggaaaaggaacagataaccatctcccagttaagcctagtcgacctggcgggatcagagcgaactaataggacgcgagcggagggcaatagactgcgagaggcaggcaacattaaccagagtctgatgaccctgaggacctgcatggatgtcctccgtgagaatcagatgtacggcacaaataagatggtcccgtatcgcgacagcaaactgacccacctcttcaagaattattttgatggggaagggaaggtgcgcatgatcgtctgcgttaatcccaaggctgaagactatgaggagaatctgcaggtgatgagatttgccgaggttactcaggaggtggaagtggccaggcctgtggataaggcaatctgcgggctgacccccggacgacgataccgtaaccagccaagggggcctgtgggaaacgaaccacttgtcactgatgttgtgctgcaaagcttcccacctcttccctcctgcgaaattctggacatcaacgatgaacagactcttcccagattgatcgaagccctggagaaacgccacaatctgcgccaaatgatgatcgacgagtttaacaaacaaagcaatgctttcaaggcactgctacaagagtttgacaatgccgtgctatccaaggagaatcatatgcagggcaaactgaatgagaaagaaaagatgatttcaggccagaagctcgagatcgagcggctagaaaaaaagaataaaactttggagtataaaatcgaaatcttagagaagacaaccacaatttatgaggaagataaacgaaacctgcaacaggaactcgaaacgcagaatcagaaactgcagagacagttttccgacaagcggagactggaagctagactgcaaggtatggtcaccgaaaccaccatgaaatgggagaaggaatgcgagcgacgggtagccgcaaaacaactcgaaatgcagaataagctttgggtcaaggacgagaagctcaagcagttgaaagcaattgtgacagaacccaaaactgaaaaacctgagcgcccttcgagggaaagagatcgcgagaaggtgactcagcgctctgtgagccccagtccagtacctctcagcagtaactatatcgctcagatttctaacggacagcagctgatgtctcaacctcagctccaccgcagatctaactcatgtagctctatctctgtggccagctgcatctccgagtgggaacagaaaatccccacatacaatacacctcttaaggtaacctctattgcaagaagacgacagcaggagcctgggcagagcaagacttgcattgtaagtgatcggagacggggtatgtactggaccgagggtagggaggtggtgccgaccttcagaaatgagattgagattgaggaggatcactgcggaaggctcctgttccagcctgaccaaaatgcgcctcccatcagactacggcatcgcagatcaaggagcgcaggagatagatgggtggaccataagcctgcatctaatatgcagaccgaaaccgttatgcagccgcatgttccacacgccataacagtgtccgtggctaacgaaaaagctctggccaagtgtgagaagtacatgctgactcatcaggaattggcgtccgatggcgaaatcgagacgaagctcatcaaaggggacatctacaagacacgtggaggaggacagagcgtgcaatttactgatatcgaaaccctgaagcaggaatcaccaaatggttctcgtaagcggcgaagttccacagtggctcctgctcagcccgacggagccgaaagcgaatggaccgacgttgaaacccggtgttccgtcgctgtggagatgcgagcaggatcccagttgggaccaggctaccagcatcatgcccaaccaaagagaaagaagccatag

SEQ ID NO: 236701 - DNA, 2520 bp, Artificial Sequence
  derived and/or modified sequence
atgaccggtagtcccggtgaaggaggccttttgccgaggtgtctcgacatgatctttaactccatcggcagtttccaggccaaacggtacgtgttcaagtcaaacgaccgtaattccatggatatccagtgcgaggtggacgccttgctggaaaggcaaaagcgggaggccatgccgaatcccaagacgagtagctcaaagcgccaggtcgaccctgagttcgcagacatgatcaccgttcaagagttttgtaaggccgaagaagtagacgaggactccgtgtacggcgtattcgtcagctatatagaaatttataataattacatctatgacctactcgaggaggtgcctttcgacccaataaagcccaagcccccacaaagtaagctgctgagagaggacaaaaatcataatatgtatgtcgcagggtgcaccgaggtcgaggtgaaatctacagaagaagcctttgaggtgttttggcgtggtcagaagaagcggcgtatcgcaaacactcatctgaatcgggagagttccagatcgcactccgtgttcaatattaagcttgtgcaagctccactggacgccgacggcgataatgtgctgcaggaaaaggagcagatcactatctctcaactctcattggtcgacctggcagggtccgagcgcactaatcggacgcgtgcagagggtaacaggctgcgggaggctgggaatattaatcagtccctgatgacacttcgtacttgtatggacgtcctcagggagaaccagatgtatgggaccaataagatggtaccttacagggacagcaaactgacccacctcttcaagaactacttcgacggagagggcaaagtgcgcatgatcgtatgtgtaaatcccaaggctgaggattatgaagagaacctccaggtgatgcgatttgcagaggttacgcaggaagttgaggtggcaagacccgtggataaggccatctgtggcctcactccagggagaagatacaggaatcaacctcggggacccgtggggaacgagcctcttgtaactgacgtagtgttgcagagttttccaccgctccctagttgcgagatcttggacattaacgacgagcagactctgcctcggctaattgaagctctcgaaaagcgccacaacttacggcagatgatgatagacgaatttaataaacaaagcaacgccttcaaggccctgttacaggagttcgacaatgcggtgctgagtaaggagaaccatatgcagggaaaactgaacgagaaagagaaaatgatctcggggcagaaactggagattgagcggctggagaaaaaaaataaaaccttagagtacaagatagaaatactcgaaaagactacgactatctatgaagaggacaagcggaacctgcaacaggagctagaaacccagaatcagaagctccagaggcagttctctgataaacggagactggaagcccgtctgcagggcatggtgacagagaccactatgaagtgggaaaaggagtgtgaacgccgtgtcgcggcaaaacagttagagatgcaaaacaaactgtgggttaaagatgagaaactcaaacagctgaaggcgatcgtgaccgaacccaagacagaaaaaccagagcggccatcaagagaaagggaccgggaaaaggtgactcagaggtctgtctctccttcccccgtgcccctctcgtctaattatattgcccagattagcaacggccagcagctgatgtcacaaccacagttgcatcgcaggtcaaactcctgctctagcatttccgttgcctcttgcatctctgagtgggagcagaagatccccacatacaacacacccttgaaagttacctctatcgcccgacggaggcaacaggaacccggacagtcaaaaacatgcattgtgtccgatcggagacgcggaatgtactggaccgagggacgtgaagtggttccaacctttagaaacgaaatcgagatcgaagaggatcactgtggtcggcttctcttccaaccggaccagaacgcgcctcccattcgcctgaggcatcgacgctctaggtccgccggagacagatgggttgatcacaaacccgctagtaatatgcaaaccgagacagtaatgcagcctcacgtgccacacgctattaccgtgtctgtggcgaatgagaaagccttggctaaatgcgagaaatatatgcttacccatcaagaacttgcatccgatggagagattgagacgaagctcatcaaaggcgacatctacaagaccagaggcggaggccaatcggtgcaattcacagatattgagaccctgaagcaagaatcccctaacggcagcaggaagcgaaggtcctcaacagtcgcgccagcccaacctgatggagccgaatctgagtggactgacgtagaaaccagatgtagcgtggccgtggaaatgcgtgccggttcccagctcgggccagggtaccagcaccacgcacagccaaagagaaagaagccatag

SEQ ID NO: 236702 - DNA, 2883 bp, Artificial Sequence
  derived and/or modified sequence
atgaagagcgccagagccaagacccccagaaagcccaccgtgaagaagggcagccagaccaacctgaaggaccccgtgggcgtgtactgcagagtgagacccctgggcttccccgaccaggagtgctgcatcgaggtgatcaacaacaccaccgtgcagctgcacacccccgagggctacagactgaacagaaacggcgactacaaggagacccagtacagcttcaagcaggtgttcggcacccacaccacccagaaggagctgttcgacgtggtggccaaccccctggtgaacgacctgatccacggcaagaacggcctgctgttcacctacggcgtgaccggcagcggcaagacccacaccatgaccggcagccccggcgagggcggcctgctgcccagatgcctggacatgatcttcaacagcatcggcagcttccaggccaagagatacgtgttcaagagcaacgacagaaacagcatggacatccagtgcgaggtggacgccctgctggagagacagaagagagaggccatgcccaaccccaagaccagcagcagcaagagacaggtggaccccgagttcgccgacatgatcaccgtgcaggagttctgcaaggccgaggaggtggacgaggacagcgtgtacggcgtgttcgtgagctacatcgagatctacaacaactacatctacgacctgctggaggaggtgcccttcgaccccatcaagcccaagcccccccagagcaagctgctgagagaggacaagaaccacaacatgtacgtggccggctgcaccgaggtggaggtgaagagcaccgaggaggccttcgaggtgttctggagaggccagaagaagagaagaatcgccaacacccacctgaacagagagagcagcagaagccacagcgtgttcaacatcaagctggtgcaggcccccctggacgccgacggcgacaacgtgctgcaggagaaggagcagatcaccatcagccagctgagcctggtggacctggccggcagcgagagaaccaacagaaccagagccgagggcaacagactgagagaggccggcaacatcaaccagagcctgatgaccctgagaacctgcatggacgtgctgagagagaaccagatgtacggcaccaacaagatggtgccctacagagacagcaagctgacccacctgttcaagaactacttcgacggcgagggcaaggtgagaatgatcgtgtgcgtgaaccccaaggccgaggactacgaggagaacctgcaggtgatgagattcgccgaggtgacccaggaggtggaggtggccagacccgtggacaaggccatctgcggcctgacccccggcagaagatacagaaaccagcccagaggccccgtgggcaacgagcccctggtgaccgacgtggtgctgcagagcttcccccccctgcccagctgcgagatcctggacatcaacgacgagcagaccctgcccagactgatcgaggccctggagaagagacacaacctgagacagatgatgatcgacgagttcaacaagcagagcaacgccttcaaggccctgctgcaggagttcgacaacgccgtgctgagcaaggagaaccacatgcagggcaagctgaacgagaaggagaagatgatcagcggccagaagctggagatcgagagactggagaagaagaacaagaccctggagtacaagatcgagatcctggagaagaccaccaccatctacgaggaggacaagagaaacctgcagcaggagctggagacccagaaccagaagctgcagagacagttcagcgacaagagaagactggaggccagactgcagggcatggtgaccgagaccaccatgaagtgggagaaggagtgcgagagaagagtggccgccaagcagctggagatgcagaacaagctgtgggtgaaggacgagaagctgaagcagctgaaggccatcgtgaccgagcccaagaccgagaagcccgagagacccagcagagagagagacagagagaaggtgacccagagaagcgtgagccccagccccgtgcccctgagcagcaactacatcgcccagatcagcaacggccagcagctgatgagccagccccagctgcacagaagaagcaacagctgcagcagcatcagcgtggccagctgcatcagcgagtgggagcagaagatccccacctacaacacccccctgaaggtgaccagcatcgccagaagaagacagcaggagcccggccagagcaagacctgcatcgtgagcgacagaagaagaggcatgtactggaccgagggcagagaggtggtgcccaccttcagaaacgagatcgagatcgaggaggaccactgcggcagactgctgttccagcccgaccagaacgccccccccatcagactgagacacagaagaagcagaagcgccggcgacagatgggtggaccacaagcccgccagcaacatgcagaccgagaccgtgatgcagccccacgtgccccacgccatcaccgtgagcgtggccaacgagaaggccctggccaagtgcgagaagtacatgctgacccaccaggagctggccagcgacggcgagatcgagaccaagctgatcaagggcgacatctacaagaccagaggcggcggccagagcgtgcagttcaccgacatcgagaccctgaagcaggagagccccaacggcagcagaaagagaagaagcagcaccgtggcccccgcccagcccgacggcgccgagagcgagtggaccgacgtggagaccagatgcagcgtggccgtggagatgagagccggcagccagctgggccccggctaccagcaccacgcccagcccaagagaaagaagccctag

SEQ ID NO: 236703 - DNA, 2520 bp, Artificial Sequence
  derived and/or modified sequence
atgaccggcagccccggcgagggcggcctgctgcccagatgcctggacatgatcttcaacagcatcggcagcttccaggccaagagatacgtgttcaagagcaacgacagaaacagcatggacatccagtgcgaggtggacgccctgctggagagacagaagagagaggccatgcccaaccccaagaccagcagcagcaagagacaggtggaccccgagttcgccgacatgatcaccgtgcaggagttctgcaaggccgaggaggtggacgaggacagcgtgtacggcgtgttcgtgagctacatcgagatctacaacaactacatctacgacctgctggaggaggtgcccttcgaccccatcaagcccaagcccccccagagcaagctgctgagagaggacaagaaccacaacatgtacgtggccggctgcaccgaggtggaggtgaagagcaccgaggaggccttcgaggtgttctggagaggccagaagaagagaagaatcgccaacacccacctgaacagagagagcagcagaagccacagcgtgttcaacatcaagctggtgcaggcccccctggacgccgacggcgacaacgtgctgcaggagaaggagcagatcaccatcagccagctgagcctggtggacctggccggcagcgagagaaccaacagaaccagagccgagggcaacagactgagagaggccggcaacatcaaccagagcctgatgaccctgagaacctgcatggacgtgctgagagagaaccagatgtacggcaccaacaagatggtgccctacagagacagcaagctgacccacctgttcaagaactacttcgacggcgagggcaaggtgagaatgatcgtgtgcgtgaaccccaaggccgaggactacgaggagaacctgcaggtgatgagattcgccgaggtgacccaggaggtggaggtggccagacccgtggacaaggccatctgcggcctgacccccggcagaagatacagaaaccagcccagaggccccgtgggcaacgagcccctggtgaccgacgtggtgctgcagagcttcccccccctgcccagctgcgagatcctggacatcaacgacgagcagaccctgcccagactgatcgaggccctggagaagagacacaacctgagacagatgatgatcgacgagttcaacaagcagagcaacgccttcaaggccctgctgcaggagttcgacaacgccgtgctgagcaaggagaaccacatgcagggcaagctgaacgagaaggagaagatgatcagcggccagaagctggagatcgagagactggagaagaagaacaagaccctggagtacaagatcgagatcctggagaagaccaccaccatctacgaggaggacaagagaaacctgcagcaggagctggagacccagaaccagaagctgcagagacagttcagcgacaagagaagactggaggccagactgcagggcatggtgaccgagaccaccatgaagtgggagaaggagtgcgagagaagagtggccgccaagcagctggagatgcagaacaagctgtgggtgaaggacgagaagctgaagcagctgaaggccatcgtgaccgagcccaagaccgagaagcccgagagacccagcagagagagagacagagagaaggtgacccagagaagcgtgagccccagccccgtgcccctgagcagcaactacatcgcccagatcagcaacggccagcagctgatgagccagccccagctgcacagaagaagcaacagctgcagcagcatcagcgtggccagctgcatcagcgagtgggagcagaagatccccacctacaacacccccctgaaggtgaccagcatcgccagaagaagacagcaggagcccggccagagcaagacctgcatcgtgagcgacagaagaagaggcatgtactggaccgagggcagagaggtggtgcccaccttcagaaacgagatcgagatcgaggaggaccactgcggcagactgctgttccagcccgaccagaacgccccccccatcagactgagacacagaagaagcagaagcgccggcgacagatgggtggaccacaagcccgccagcaacatgcagaccgagaccgtgatgcagccccacgtgccccacgccatcaccgtgagcgtggccaacgagaaggccctggccaagtgcgagaagtacatgctgacccaccaggagctggccagcgacggcgagatcgagaccaagctgatcaagggcgacatctacaagaccagaggcggcggccagagcgtgcagttcaccgacatcgagaccctgaagcaggagagccccaacggcagcagaaagagaagaagcagcaccgtggcccccgcccagcccgacggcgccgagagcgagtggaccgacgtggagaccagatgcagcgtggccgtggagatgagagccggcagccagctgggccccggctaccagcaccacgcccagcccaagagaaagaagccctag

SEQ ID NO: 236704 - protein, 243 aa, Artificial Sequence
  derived and/or modified sequence
MSRRKQGKPQHLSKREFSPEPLEAILTDDEPDHGPLGAPEGDHDLLTCGQCQMNFPLGDILIFIEHKRKQCNGSLCLEKAVDKPPSPSPIEMKKASNPVEVGIQVTPEDDDCLSTSSRGICPKQEHIADKLLHWRGLSSPRSAHGALIPTPGMSAEYAPQGICKDEPSSYTCTTCKQPFTSAWFLLQHAQNTHGLRIYLESEHGSPLTPRVLHTPPFGVVPRELKMCGSFRMEAREPLSSEKI

SEQ ID NO: 236705 - DNA, 732 bp, Artificial Sequence
  derived and/or modified sequence
atgtcaagacggaagcaggggaagccacagcatctctccaagagagagttcagcccagagccacttgaagcaattctgactgatgatgaacccgatcatgggcccctcggagccccagagggtgaccatgatctattgacatgcggacagtgtcagatgaatttcccactgggagacatactaatcttcattgaacacaagaggaagcaatgtaatggtagcctctgtctggaaaaagccgtcgacaaacctccgagcccatctccaattgagatgaaaaaggcttccaaccccgttgaagtgggaatccaagtcactccagaagatgacgattgcctgtcaacttcatcccggggcatatgtccaaaacaggagcacatagctgacaaactcctccattggcggggactgagctcccctagatcagcccatggtgcactcattcccacacccggtatgtcggccgaatatgccccgcaggggatctgcaaagatgagccgtcctcctacacttgcacaacctgtaagcagcctttcacatctgcatggttcctgttgcagcacgcacagaacacgcatggcctcagaatctacctcgaatcagaacacgggtctccgttaactcccagagtgttgcacacgcccccatttggggtggtcccccgcgagctgaaaatgtgtggctccttccggatggaagcaagggaaccgttatcgagtgagaagatctag

SEQ ID NO: 236706 - DNA, 732 bp, Artificial Sequence
  derived and/or modified sequence
atgagcaggaggaagcagggcaagccccagcacctgagcaagcgggagttcagccctgagcccctggaggccatcctgacagatgatgagccagaccacggccccctgggcgcccctgagggggaccatgacctgctgacctgtggccagtgccagatgaacttccccctgggggacatcctgatcttcatcgagcacaagaggaagcagtgcaatggcagcctgtgcctggagaaggctgtggacaagccacccagccccagccccatcgagatgaagaaggccagcaaccctgtggaggtgggcatccaggtgaccccagaagatgatgactgcctgagcaccagcagccggggcatctgccccaagcaggagcacatcgctgacaagctgctgcactggaggggcctgagcagccccaggtctgcccacggggccctgatccccaccccaggcatgtctgcagaatatgccccccagggcatctgcaaggatgagcccagcagctacacctgcaccacctgcaagcagcccttcaccagcgcctggttcctgctgcagcacgcccagaacacccacggcctgcgcatctacctggagagcgagcacggcagccccctgaccccccgggtgctgcacaccccaccatttggagtggtgccccgggagctgaagatgtgtggcagcttcaggatggaggcccgggagcccctgagcagcgagaagatctag

SEQ ID NO: 236707 - DNA, 732 bp, Artificial Sequence
  derived and/or modified sequence
atgagccggcggaagcagggcaagccccagcacctgagcaagcgggagtttagtccggagccattggaggctatactgactgatgacgaaccagatcacgggcctttgggcgcccccgagggtgaccatgatctgctgacctgcggccaatgccaaatgaattttcctcttggagatatcttgatcttcattgagcacaagcgaaaacagtgcaatggctctctttgcctggaaaaagccgttgacaaaccaccatctcctagccctattgaaatgaagaaggcctccaacccagtggaagtggggatacaggtcacccctgaggatgacgattgcctgagcacttctagtaggggcatatgtcccaagcaggaacatatcgctgataagttgcttcactggcgcggcctttcttccccgcgaagtgcacatggggccctgatcccgacccccggaatgagtgctgaatatgccccccagggcatttgtaaggatgaaccttcatcttacacgtgtacgacttgcaagcagcctttcaccagcgcgtggttcctgttgcagcacgcccagaacacacatgggctgcgcatataccttgaatcagagcacggttcaccacttacacctagggtgctgcataccccgccttttggggtcgtcccacgcgagttaaagatgtgtggctcctttaggatggaggctcgagaaccgctctcttcagagaagatatag

SEQ ID NO: 236708 - DNA, 732 bp, Artificial Sequence
  derived and/or modified sequence
atgagtcgccgaaagcagggcaagccccagcatttatctaagagagagttcagccccgagccactggaggccatcctaacagatgacgagccagatcacggcccactaggtgcccctgagggagatcacgaccttctaacttgtggccagtgtcagatgaacttccccctaggtgacatcctaattttcatcgaacacaagcgcaaacaatgcaacggatccctatgcctcgaaaaagcagtcgacaaacctcctagtccttcacccattgagatgaagaaggcctctaacccggtggaagtgggaatccaggtgacaccagaggatgatgactgtttgagtacatcttccagagggatctgtcctaagcaggaacatatcgctgataaactgctccactggcgaggactgtcctcccccaggtctgctcacggcgctctcataccaacacctggaatgtcagccgagtacgcccctcaggggatctgtaaggacgagccctcttcatatacatgcaccacttgtaaacagccctttacaagtgcctggttcctgctccagcatgctcagaatacccacggacttcgaatttatctggaaagcgagcacggaagtcctcttacacctcgcgtgctccacactcccccttttggcgtggtccctagagaacttaagatgtgtgggagttttagaatggaagctagggagcctctgagtagcgaaaaaatttag

SEQ ID NO: 236709 - DNA, 2427 bp, Artificial Sequence
  derived and/or modified sequence
tttttttcatctctctctctctctctccctctatctctcttctctctctctccctctttttttttttttttttttttttttttttgcttaaaaaaaagccatgacggctctcccacaattcatcttccctgcgccatctttgtattatttctaatttattttggatgtcaaaaggcactgatgaagatattttctctggagtctccttctttctaacccggctctcccgatgtgaaccgagccgtcgtccgcccgccgccgccgccgccgccgccgccgcccgccccgcagcccaccatgtctcgccgcaagcaaggcaaaccccagcacttaagcaaacgggaattctcgcccgagcctcttgaagccattcttacagatgatgaaccagaccacggcccgttgggagctccagaaggggatcatgacctcctcacctgtgggcagtgccagatgaacttcccattgggggacattcttatttttatcgagcacaaacggaaacaatgcaatggcagcctctgcttagaaaaagctgtggataagccaccttccccttcaccaatcgagatgaaaaaagcatccaatcccgtggaggttggcatccaggtcacgccagaggatgacgattgtttatcaacgtcatctagaggaatttgccccaaacaggaacacatagcagataaacttctgcactggaggggcctctcctcccctcgttctgcacatggagctctaatccccacgcctgggatgagtgcagaatatgccccgcagggtatttgtaaagatgagcccagcagctacacatgtacaacttgcaaacagccattcaccagtgcatggtttctcttgcaacacgcacagaacactcatggattaagaatctacttagaaagcgaacacggaagtcccctgaccccgcgggttcttcacacacccccattcggcgtagtacccagagagctcaagatgtgtggcagttttcggatggaagctcgagagcccttaagttctgagaaaatttgaagcccccaggggtggggtggacgcgtgccgcccagtcgacgtcagcgtggtctgtcatcctgctagtttgtgatgttttctgacagtagcctccaagaagccgttgtgcgaagacagagtcctgcagagtccttccagcctaggcctgcagcgccattttatttatattttttaataaaaagtaaaaacaaaaaaacagacccacattggaacagtgaatcagtcccatagagagggcccgtggaccatcgctgtcatgagtgatgccctggcccttctgaaaccagccaacctaattacctgtattgtggaaatgcgcatgagtccccaaccccttgtttctatacattctatgttgtcttttaaaaagtgtgcttaacattgacacaataaatgttggagctttaggtggtgtttgcttgttctttaatttttaatgcttataagacaatgaggctgcttatgattttgtacttctgtacctgtttcctacagacacccatcgggtgggtaggaggaacagatttgagaaatgggcaggagatgtaggaggggaactaggttaccgcttatcagatggcataaattttcaaggagaatcaaaatgcaaaacttgggaataaatcatagcaatatcataattaatgtagtagtaatattgctgtttattaatgctgaagtgtggttttcctaactgtctgacttataatttgcataccattaaataatgcataatatggcacgccgaatcctgtttttcaaatatatgcttttggtggctaccatgcaggatttgaatttgtcttttaatttagcttaggaaagaacatcactgggcgagcggtaaatcctaaagaaggtgataaatgtcagtagtttcttattaaatattctaattttaggttcccaaaccttcaggaaatatatcttaatgcagacaaacaaacataaaacttctttagtacttacatcaggaaatttggggcagattttagaggggggaaattataggaggaaagaagttcacatcagaacagacaatcacagcaatgctctattccttagaaattagtgccacaaataagttacatctacaaacaggtggtaaaaattctttctggcccagttaatttgcacagaacttttctcagtttggtattttttactgcttggagatccagaagagaattagaaacaacatagcaaattaaaataggtttgtcaataatagagctcagacacctgtgtgctgtagattcacatacaggccgtgaacctaagtggggaaaatcctacctatccaccttctggctagattacctagcttagtgaaaagatagccaaataattggcatgtgaattatttcctgcttattcataataaataatgactgtcta

SEQ ID NO: 236710 - DNA, 732 bp, Artificial Sequence
  derived and/or modified sequence
atgagcagaagaaagcagggcaagccccagcacctgagcaagagagagttcagccccgagcccctggaggccatcctgaccgacgacgagcccgaccacggccccctgggcgcccccgagggcgaccacgacctgctgacctgcggccagtgccagatgaacttccccctgggcgacatcctgatcttcatcgagcacaagagaaagcagtgcaacggcagcctgtgcctggagaaggccgtggacaagccccccagccccagccccatcgagatgaagaaggccagcaaccccgtggaggtgggcatccaggtgacccccgaggacgacgactgcctgagcaccagcagcagaggcatctgccccaagcaggagcacatcgccgacaagctgctgcactggagaggcctgagcagccccagaagcgcccacggcgccctgatccccacccccggcatgagcgccgagtacgccccccagggcatctgcaaggacgagcccagcagctacacctgcaccacctgcaagcagcccttcaccagcgcctggttcctgctgcagcacgcccagaacacccacggcctgagaatctacctggagagcgagcacggcagccccctgacccccagagtgctgcacaccccccccttcggcgtggtgcccagagagctgaagatgtgcggcagcttcagaatggaggccagagagcccctgagcagcgagaagatctag

SEQ ID NO: 236711 - protein, 513 aa, Artificial Sequence
  derived and/or modified sequence
MWKASAGHAVSIAQDDAGADDWETDPDFVNDVSEKEQRWGAKTVQGSGHQEHINIHKLRENVFQEHQTLKEKELETGPKASHGYGGKFGVEQDRMDKSAVGHEYQSKLSKHCSQVDSVRGFGGKFGVQMDRVDQSAVGFEYQGKTEKHASQKDYSSGFGGKYGVQADRVDKSAVGFDYQGKTEKHESQRDYSKGFGGKYGIDKDKVDKSAVGFEYQGKTEKHESQKDYVKGFGGKFGVQTDRQDKCALGWDHQEKLQLHESQKDYSKGFGGKYGVQKDRMDKNASTFEDVTQVSSAYQKTVPVEAVTSKTSNIRANFENLAKEKEQEDRRKAEAERAQRMAKERQEQEEARRKLEEQARAKTQTPPVSPAPQPTEERLPSSPVYEDAASFKAELSYRGPVSGTEPEPVYSMEAADYREASSQQGLAYATEAVYESAEAPGHYPAEDSTYDEYENDLGITAVALYDYQAAGDDEISFDPDDIITNIEMIDDGWWRGVCKGRYGLFPANYVELRQ

SEQ ID NO: 236712 - DNA, 1542 bp, Artificial Sequence
  derived and/or modified sequence
atgtggaaggccagcgccggccacgccgtgagcatcgcccaggacgacgccggcgccgacgactgggagaccgaccccgacttcgtgaacgacgtgagcgagaaggagcagagatggggcgccaagaccgtgcagggcagcggccaccaggagcacatcaacatccacaagctgagagagaacgtgttccaggagcaccagaccctgaaggagaaggagctggagaccggccccaaggccagccacggctacggcggcaagttcggcgtggagcaggacagaatggacaagagcgccgtgggccacgagtaccagagcaagctgagcaagcactgcagccaggtggacagcgtgagaggcttcggcggcaagttcggcgtgcagatggacagagtggaccagagcgccgtgggcttcgagtaccagggcaagaccgagaagcacgccagccagaaggactacagcagcggcttcggcggcaagtacggcgtgcaggccgacagagtggacaagagcgccgtgggcttcgactaccagggcaagaccgagaagcacgagagccagagagactacagcaagggcttcggcggcaagtacggcatcgacaaggacaaggtggacaagagcgccgtgggcttcgagtaccagggcaagaccgagaagcacgagagccagaaggactacgtgaagggcttcggcggcaagttcggcgtgcagaccgacagacaggacaagtgcgccctgggctgggaccaccaggagaagctgcagctgcacgagagccagaaggactacagcaagggcttcggcggcaagtacggcgtgcagaaggacagaatggacaagaacgccagcaccttcgaggacgtgacccaggtgagcagcgcctaccagaagaccgtgcccgtggaggccgtgaccagcaagaccagcaacatcagagccaacttcgagaacctggccaaggagaaggagcaggaggacagaagaaaggccgaggccgagagagcccagagaatggccaaggagagacaggagcaggaggaggccagaagaaagctggaggagcaggccagagccaagacccagaccccccccgtgagccccgccccccagcccaccgaggagagactgcccagcagccccgtgtacgaggacgccgccagcttcaaggccgagctgagctacagaggccccgtgagcggcaccgagcccgagcccgtgtacagcatggaggccgccgactacagagaggccagcagccagcagggcctggcctacgccaccgaggccgtgtacgagagcgccgaggcccccggccactaccccgccgaggacagcacctacgacgagtacgagaacgacctgggcatcaccgccgtggccctgtacgactaccaggccgccggcgacgacgagatcagcttcgaccccgacgacatcatcaccaacatcgagatgatcgacgacggctggtggagaggcgtgtgcaagggcagatacggcctgttccccgccaactacgtggagctgagacagtag

SEQ ID NO: 236713 - DNA, 3272 bp, Artificial Sequence
  derived and/or modified sequence
ggccgggctagcgcttagccagctgcgggcggacccccgggactcttgcgggccaagacgcgggaggaggcggggcagggggcggggtcgcgcggggacccggatgcggccccgcccccgccctcggaaccggaagtagagcctggtgcctgggagcggctggcgcggcggaatccagggccgacccgggccggaccgaccccaggcggcgacggaatcagtccccaatgcctggaaattcctcattggattactgtgttttaaacagaatttcgtgaacagccttttatctccaagcggaaagaaagatgtggaaagcttcagcaggccacgctgtgtccatcgcccaggatgacgcgggggccgatgactgggagaccgaccctgattttgtgaatgatgtgagtgagaaggagcaaagatggggtgccaagacggtgcagggctccgggcaccaggagcatatcaacatacacaagctgagggagaatgtctttcaagagcatcagacccttaaggagaaggaacttgaaacaggaccaaaagcttcccatggctatggagggaaatttggtgtggaacaagaccgaatggataagtcagctgtcggccacgaatatcagtcgaaactttccaagcactgctcgcaggtggactcggtccgtggcttcggaggcaagtttggtgtccagatggacagagttgatcagtctgctgtaggctttgaataccaggggaagactgagaagcatgcctcccagaaagactactccagtggttttggcggcaagtatggcgtgcaggccgaccgagtagacaagagcgcggtgggcttcgactaccagggcaagacggagaagcacgagtcacagagagattactccaaaggtttcggcggcaaatacggtatcgacaaggacaaagtggataagagcgccgttggctttgagtatcaaggcaaaacggagaagcacgagtcccagaaagactatgtgaaagggtttggaggaaaatttggtgtgcagacagacagacaagacaaatgtgcccttggctgggatcaccaggagaaattgcagctgcatgaatcccaaaaagactactccaaaggattcggcgggaagtatggggtgcagaaggatcggatggataagaatgcgtcaacctttgaggatgtcacccaggtgtcctctgcctaccagaagacagtacctgtcgaagctgtgaccagcaaaacaagtaacatcagagctaactttgaaaacctcgctaaggagaaagagcaggaggacaggcggaaggcggaggcggagagagcccagcggatggccaaggagcggcaggagcaggaagaggccaggaggaagctggaggagcaagccagagccaaaacgcaaacgccccctgtgtcgcccgcacctcagccaaccgaggagaggctgccctcgagccccgtctatgaggatgcggcttccttcaaggcagagctgagctacagaggccctgtgagtgggacggagccggagcccgtgtacagcatggaggccgctgactaccgagaggccagcagccagcagggcctggcctatgccacagaggctgtctatgaaagcgcagaggccccgggccactatcccgcagaggacagcacctacgatgagtacgagaacgatctggggatcacagccgtcgccctgtacgactaccaggctgcgggcgatgatgagatctcatttgaccctgatgacatcatcaccaacatcgagatgattgacgacggctggtggcgcggggtgtgcaagggccggtacgggctcttcccagccaactatgtggagctgcggcagtagggcccccagcccccccccggagctgcgccctggatcctcacactacagatcaggccttctttggttcttgggtggttttgggttttttctgtttttttttttttttttttttttttgaaggtggggaggggaatatacacattgcttttatatttaatacttttgctgatgcttttgaaaatgtttatgccacagaatttgctaatatattgtaatcacattccttaggaggactttggtaattggttttatgcattgatggttttttttttcttttttgccaaattgactgtcacgcggcagcttcagggagctcgcattctcttgtgttcgtgttgccctcgtgcccatcaagtgcagtcgggacctcccaggacaagcacgaggcctcaggtcggccctgtggcgggtaggcaggaaggactgtcccagacgaggggcttcctctagagtctcactgctggggaggagaggactgggcctgatggaagttaacccggagctaagtcacccagagcacaggagctgccatgtcagatgggaaatctgcctatgtcataccgtgacagcccgcaggatcaggtgacttctagcagagaccctggtttttttcctgtgcccactccggcttgtcctcatctctacccatcccctgatgcccaggtcaccgggagggctgctgggagcctctcctgtccccgccgggcagtgtcactgagtccttgaaatcctcccctgccccgcgggtctctggattgggacgcacagtgcagttgaggtctgcgtcgggcttggcttttcacaaaggctgatgtcttaactgtcacccatatggtccctgggccaccgggcagcctggggcggtgtgtgtgccatgtcacagcatggcctctcggccttgggaaggaaggcagtgcctgctctgctgtgagccgccaggaaccctcctcctgtcaatgggggtgtagtatttttgccaaaatatcatgttcaatttcagtagtttgatcagttgaaggctagaagtgtgaagtgcagatgagtgtgtgttcttccccaaggtccccccacagctccaggacaccgctgtcctggcatttgtggccactcactttgtaggaaactcatctccttcctgaggagccgggaggctggaccagtcccgtcgtgcagtcaggtgggcggtgtgtctttccagaaggtcacgtggaaatgtctcgggacttgggtcccggagtgcccgtgaagcgtgtttttgctcctgaggtgcattttctcatcatccttgctttaccacaatgagcaatgaggtcgggttttatatgcaacttattgtatctgaattcctgtagcacacctcataggtatgatttttttaaattaaagaattcagaataaacattttttgatccacttgcgtga

SEQ ID NO: 236714 - DNA, 1542 bp, Artificial Sequence
  derived and/or modified sequence
atgtggaaagcttctgccggtcatgcagtttctattgctcaggatgatgcaggcgctgacgattgggagactgatccggactttgttaacgatgtctctgagaaggagcagcgctggggggctaaaacagtacaggggtccggacaccaggagcacattaatatccacaaacttcgggagaacgttttccaagagcaccagacgctcaaagagaaggagctggagaccggcccgaaagcctcccatgggtacggtggcaaatttggtgtggagcaggatcggatggacaagagcgctgtgggccatgagtaccaatcaaagctgtcaaagcactgctcacaggttgactcggtgcgcggcttcggcggcaaattcggcgtgcaaatggacagagtggaccagagcgccgtgggcttcgagtaccagggtaaaacagagaaacatgcgtcccagaaagactactccagcggttttggagggaaatatggcgtgcaggcagatcgggtcgataagtcggccgttggatttgactaccaaggcaagaccgaaaaacacgagagccaaagagactattccaaaggattcggaggtaaatacgggatcgacaaggataaggttgacaagtcggccgtaggcttcgaatatcagggcaagactgagaagcacgaatctcagaaagactatgttaaaggctttggggggaaattcggtgtgcaaacggatcgacaggataagtgtgccctgggatgggatcatcaggaaaaattacagttgcacgaatcacagaaggactattcaaagggattcggcggcaagtacggcgtacagaaggacagaatggacaagaatgcttccacatttgaagatgtgacccaagtgtccagtgcttaccagaagacggttccggttgaggctgtgacctccaaaactagtaacataagagccaactttgagaaccttgcgaaggagaaagagcaggaagatcggcgaaaggctgaggccgaaagggcccagaggatggccaaggaacggcaagaacaggaagaagcccgtagaaaattggaggagcaggcaagagccaagacccagacccctccagtgtctcccgcccctcagcccacagaagaaagattgccttcgtcgccagtctatgaggacgctgcctcctttaaggccgagctgtcgtaccggggcccggtgagtggcacagagcccgaaccggtttattcaatggaagccgcggactatagggaggcttcctctcagcagggtcttgcgtatgcaactgaagccgtctacgagtccgccgaggcacctggacactaccctgctgaagattctacttacgatgaatacgaaaacgatctcggcattacagccgtggccttgtatgattatcaagccgcaggggatgatgaaattagctttgaccctgacgacattattacgaatattgagatgatcgacgatgggtggtggcgaggagtgtgcaaaggccgctacggactgttcccggcgaattacgtcgaactccgccagtag

SEQ ID NO: 236715 - DNA, 1542 bp, Artificial Sequence
  derived and/or modified sequence
atgtggaaggccagcgctggccatgctgtgtccatcgcccaggatgatgctggagcagatgactgggagacagatcctgactttgtgaatgatgtgtctgagaaggagcagcgctggggcgccaagacagtgcagggcagcggccaccaggagcacatcaacatccacaagctgcgggagaatgtgttccaggagcaccagaccctgaaggagaaggagctggagaccggccccaaggccagccacggctacggcggcaagtttggagtggagcaggacaggatggacaagtctgctgtgggccacgagtaccagagcaagctgagcaagcactgcagccaggtggacagcgtgcggggctttggaggcaagtttggagtgcagatggacagagtggaccagagcgctgtgggctttgagtaccagggcaagacagagaagcacgccagccagaaggactacagcagcggctttggaggcaagtatggagtgcaggccgacagagtggacaagtctgctgtgggctttgactaccagggcaagacagagaagcatgagagccagagggactacagcaaaggatttggaggcaagtatggaattgacaaggacaaggtggacaagtctgctgtgggctttgagtaccagggcaagacagagaagcatgagagccagaaggactatgtgaagggctttggaggcaagtttggagtgcagacagaccggcaggacaagtgtgccctgggctgggaccaccaggagaagctgcagctgcacgagagccagaaggactacagcaaaggatttggaggcaagtatggagtgcagaaggacaggatggacaagaatgccagcacctttgaagatgtgacccaggtgtcctctgcctaccagaagacagtgcctgtggaggccgtgaccagcaagaccagcaacatccgggccaactttgagaacctggccaaggagaaggagcaggaggacaggaggaaggccgaggccgagcgggcccagaggatggccaaggagcggcaggagcaggaggaggcccggaggaagctggaggagcaggcccgggccaagacccagaccccacctgtgtccccagccccccagcccacagaggagcggctgcccagcagccctgtgtatgaagatgctgccagcttcaaggccgagctgagctaccggggccctgtgtctggaacagagcctgagcctgtgtacagcatggaggccgctgactaccgggaggccagcagccagcagggcctggcctatgccacagaagctgtgtatgaatctgctgaggcccctggccactacccagctgaggacagcacctatgatgaatatgaaaatgacctgggcatcacagctgtggccctgtatgactaccaggccgctggagatgatgagatcagctttgatcctgatgacatcatcaccaacatcgagatgattgatgatggctggtggaggggcgtgtgcaagggccgctatggcctcttccctgccaactacgtggagctgcggcagtag

SEQ ID NO: 236716 - DNA, 1542 bp, Artificial Sequence
  derived and/or modified sequence
atgtggaaggccagcgccggccacgccgtgagcatcgcccaggacgacgctggggctgacgactgggagactgacccagattttgtgaacgacgtctccgagaaggagcagcgctggggggcaaaaacagtgcagggttcaggacaccaggagcacattaacattcataaattaagagagaacgtattccaggaacatcagactctcaaggaaaaagagctcgagactggtccaaaggcgagccacggatacgggggcaagttcggtgtggaacaggaccgcatggacaagtctgctgtcggacacgagtaccagagtaaactgtctaagcactgcagccaagtggactcggtcagagggtttggcggaaagttcggcgtccaaatggaccgtgtcgaccaaagtgctgtgggctttgagtatcagggaaagacggaaaagcacgcttcccagaaggactatagcagcggatttggaggcaaatacggagtgcaagccgaccgcgtggataagtctgctgtcgggtttgattatcaggggaaaaccgaaaagcacgaaagtcaacgagattacagcaaagggtttggcgggaagtatggcattgacaaagataaggtggacaaaagtgctgtggggttcgaataccaggggaagaccgagaagcatgagtcccagaaggactatgtgaagggcttcggcgggaaattcggggtgcaaacagacaggcaggataagtgcgccctgggatgggatcaccaggaaaaactccagctgcatgagtctcagaaggactattctaagggtttcgggggcaaatatggggtgcagaaagatcgaatggacaagaacgccagcactttcgaagacgtgacacaggtctcaagcgcttatcagaaaaccgtcccagtggaagcggtaacctctaaaacatcaaatatcagggcaaattttgagaatctggccaaagaaaaggagcaggaggatcggagaaaggccgaggcggagcgtgcccagaggatggccaaggaaagacaggaacaggaggaagctaggagaaaactcgaagaacaagcccgagccaagacccaaacgccacctgtaagccccgcgccacaacccactgaagagagactccctagtagccctgtctatgaagatgctgcctcctttaaggctgaactgtcttacagaggacctgtgtccggcacagagccggagcctgtgtactctatggaggcagccgattatcgagaggcatcttcccaacaggggcttgcatacgccaccgaggccgtttatgagagtgctgaagctccaggccactacccagccgaagatagcacctatgatgagtacgagaatgatctcgggatcaccgccgtggccctgtacgactatcaagcagcaggggacgacgagatctcattcgatccggacgatattatcaccaacatagaaatgattgacgacggctggtggcgaggagtatgcaagggccgttatggtctgtttcctgccaattatgtggagttgcgacaatag

SEQ ID NO: 236717 - DNA, 1542 bp, Artificial Sequence
  derived and/or modified sequence
atgtggaaagcctccgctggccatgcagtgtccatcgcgcaagacgatgcaggtgccgacgactgggagacagatcccgacttcgttaacgacgtgtccgagaaggaacagcggtggggtgcaaaaactgtgcagggaagcggccatcaggaacatataaacattcataaactgcgggaaaacgtttttcaggagcaccagaccctcaaagaaaaagagctggagactgggcctaaggcatcccatgggtacgggggaaaatttggagttgagcaggatcgaatggacaagagcgcagtcgggcatgaatatcaaagcaaactctcaaaacattgctcacaggtcgacagcgtgagagggttcggagggaaattcggcgttcaaatggaccgggtggatcaatccgccgtgggtttcgaataccagggtaagacggaaaagcatgcaagtcagaaggattattctagtggcttcgggggtaagtatggtgtccaagccgaccgggtggacaaaagcgctgtgggtttcgattaccagggaaaaacagagaaacacgaaagtcagcgtgactattccaaaggctttggtggcaagtatggcatcgacaaagacaaagttgacaaaagcgcagtcggcttcgagtaccagggaaaaaccgaaaaacatgaatcccagaaggattatgtgaaaggttttgggggaaagttcggagtccaaactgacagacaagacaaatgtgcattaggatgggaccaccaggaaaagctccagctccacgagagtcagaaagactacagtaaaggctttggaggcaaatacggagtacaaaaggatagaatggataagaatgcgtccacgtttgaggacgtgacccaggtctcttccgcctaccagaagactgttcctgtcgaggccgttacaagcaagaccagcaacattcgggctaacttcgagaatctggcaaaggaaaaggaacaggaagatagacggaaagcagaagccgagcgcgctcagcgaatggcgaaagagcgccaggagcaggaagaagcgcgaaggaagcttgaagagcaggctcgggctaaaacacagacccctcccgtgtccccagctccacagccaactgaggagcggctaccttcttcacccgtgtatgaggatgccgcatcttttaaggctgaattaagctatcggggacctgtttccggaaccgaaccagagcccgtgtactccatggaggcagccgactatcgcgaggctagcagccagcaggggctggcgtatgctacagaagccgtatatgagtcagcagaggctcccggtcactaccctgccgaagacagtacctatgacgagtacgagaacgatctgggcattaccgccgtcgcactctacgactaccaggccgctggagatgatgaaattagttttgaccctgatgatatcataaccaacatagaaatgattgatgacggctggtggcgcggtgtgtgcaaaggtcgctatggtctctttccagcgaactatgttgaactgaggcagtag

SEQ ID NO: 236718 - protein, 409 aa, Artificial Sequence
  derived and/or modified sequence
MAALENGELGPLLSPGTLRGLEDECVTDVKAQTRAALLRVLQEDEEHWGSLEDQPSSLAQDVCELLEEHTERAPRISQEFGERMAHCCLGGLAEFLQSFQQRVERFHENPAVREMLPDTYISKTIALVNCGPPLRALAERLARVGPPESEPAREASASALDHVTRLCHRVVANLLFQELQPHFNKLMRRKWLSSPEALDGIVGTLGAQALALRRMQDEPYQALVAELHRRALVEYVRPLLRGRLRCSSARTRSRVAGRLREDAAQLQRLFRRLESQASWLDAVVPHLAEVMQLEDTPSIQVEVGVLVRDYPDIRQKHVAALLDIRGLRNTAARQEILAVARDLELSEEGALSPPRDRAFFADIPVPRPSFCLSLPLFLGRLPLSRLARPSLACLPRPRPPSLARPRAQR

SEQ ID NO: 236719 - DNA, 1230 bp, Artificial Sequence
  derived and/or modified sequence
atggccgccctggagaacggcgagctgggccccctgctgagccccggcaccctgagaggcctggaggacgagtgcgtgaccgacgtgaaggcccagaccagagccgccctgctgagagtgctgcaggaggacgaggagcactggggcagcctggaggaccagcccagcagcctggcccaggacgtgtgcgagctgctggaggagcacaccgagagagcccccagaatcagccaggagttcggcgagagaatggcccactgctgcctgggcggcctggccgagttcctgcagagcttccagcagagagtggagagattccacgagaaccccgccgtgagagagatgctgcccgacacctacatcagcaagaccatcgccctggtgaactgcggcccccccctgagagccctggccgagagactggccagagtgggcccccccgagagcgagcccgccagagaggccagcgccagcgccctggaccacgtgaccagactgtgccacagagtggtggccaacctgctgttccaggagctgcagccccacttcaacaagctgatgagaagaaagtggctgagcagccccgaggccctggacggcatcgtgggcaccctgggcgcccaggccctggccctgagaagaatgcaggacgagccctaccaggccctggtggccgagctgcacagaagagccctggtggagtacgtgagacccctgctgagaggcagactgagatgcagcagcgccagaaccagaagcagagtggccggcagactgagagaggacgccgcccagctgcagagactgttcagaagactggagagccaggccagctggctggacgccgtggtgccccacctggccgaggtgatgcagctggaggacacccccagcatccaggtggaggtgggcgtgctggtgagagactaccccgacatcagacagaagcacgtggccgccctgctggacatcagaggcctgagaaacaccgccgccagacaggagatcctggccgtggccagagacctggagctgagcgaggagggcgccctgagcccccccagagacagagccttcttcgccgacatccccgtgcccagacccagcttctgcctgagcctgcccctgttcctgggcagactgcccctgagcagactggccagacccagcctggcctgcctgcccagacccagaccccccagcctggccagacccagagcccagagatag

SEQ ID NO: 236720 - DNA, 1230 bp, Artificial Sequence
  derived and/or modified sequence
atggccgcattagagaacggagagttgggcccactgctgtcacccggcacactgcgcgggctggaggatgaatgcgtgaccgatgtcaaagcacagacaagagcggcactgctgcgggtcctgcaagaggacgaagaacactggggatccctggaggaccaaccctcctctctggcgcaagacgtttgcgaacttcttgaagaacataccgaacgggcccctcggatcagtcaagaatttggagaaagaatggcacactgttgcctgggaggcctggccgaattcttgcagagttttcagcagagggtggaacggttccatgaaaaccccgcagtccgtgagatgttaccggatacatacatatccaagaccatcgctttggtgaattgtggccctcccctgagggccctcgcagaaaggctcgcgcgggtaggcccacctgagtcagagcctgccagagaagcttctgcatctgcactggatcacgtgacaagactttgccacagagtggtggctaacctactctttcaagagctgcaacctcactttaataaactcatgcggagaaagtggctatccagtccagaagcactggacggaatagtgggtacccttggagcacaagccctggctctcaggaggatgcaggacgaaccttaccaagctcttgtagccgagctgcatagaagagctttggtggaatatgtgaggccgctgttgaggggacgcctgaggtgctcctccgcacgcaccagaagccgcgtggcaggtcgcttgcgagaagatgccgcgcaacttcagcgactattccggcgactagaatcacaggcgtcctggttagatgcagttgttccacacttggcggaagtgatgcagctcgaggacaccccttccatccaagtggaagtgggcgtgttggtgcgtgattatccggacatccgccagaaacacgtggcagcactgctggatattagaggattacgcaatacggccgcccgacaggagatcttggccgttgcaagggacttagaactgagcgaagagggtgcgctgagtcccccccgtgatcgagcgttctttgctgacatccccgtgcctcggccctccttctgcctctctctgcccctttttcttggaagactgcctctgagtagacttgcaaggccatcattagcgtgcttgccacggccaaggccaccctccctcgcgagaccacgcgcacagaggtag

SEQ ID NO: 236721 - DNA, 1230 bp, Artificial Sequence
  derived and/or modified sequence
atggccgccctggagaacggggaattagggccgctgcttagtcccggcacattgcgcgggctcgaagacgagtgtgtgacggacgttaaggcacagacccgagcggccctcttgcgggtgctgcaggaggatgaagagcattgggggtccctggaagaccagccgagttctctcgcacaggatgtgtgcgaacttttggaagaacacaccgagcgcgctcccaggattagccaggagtttggagaaagaatggcgcactgctgcctcggtggcttggccgagttcctgcagtcattccagcaacgtgtcgaaaggttccacgaaaaccccgcagtgcgggaaatgctgcctgatacttatatcagtaaaaccatcgccctggtgaactgcggccctcccctccgggcactcgcggaaagacttgccagggtaggccctcccgaaagcgagccagcaagggaggccagcgcctcggcgctcgatcacgtgacgcggctgtgtcatagagtagtcgcaaacctgctcttccaggagttgcaacctcattttaataagcttatgcggcggaagtggctatcgtcccctgaagctctagacggcattgtgggaacactgggagcacaggccctggcccttagacgcatgcaggatgagccttatcaagccctcgtggccgaattgcaccgccgggccctggtggaatatgtgcgacctttactccgcggcaggctccgttgttcttccgcacgcacaaggagcagggtcgcagggagactgagagaagatgcagcacagcttcaacgtctgttcaggcgcttagaaagtcaggccagctggctggatgcggtagtgccacacctggcggaagtgatgcagcttgaggacacgccatctattcaggtcgaagttggcgtgttggtgcgtgattaccctgatatcagacagaaacatgttgctgccctgctagacatccgaggattgagaaataccgctgccaggcaggaaatcttagcggtcgcacgagacctggagctgtccgaagaaggcgcattgtcccctcctagggatcgtgccttctttgcagatatcccagtccctcggccgtcattctgtctgtctctcccgttgttcctgggccgtctcccactatcccggcttgctagaccgtccctagcctgtctccccagaccccgacctccttcccttgctagaccaagggcgcagaggtag

SEQ ID NO: 236722 - DNA, 1706 bp, Artificial Sequence
  derived and/or modified sequence
ccccagagaggtcctagggctggtggacatggccgccctggagaatggggagctggggccccttctctcccctggcaccctgcggggtttggaggatgaatgcgtcacagatgttaaggctcagacccgggctgcccttctccgtgtgctgcaggaggacgaagagcactgggggagcctggaggaccagcccagcagcctggcccaggatgtgtgtgagctgctggaagagcacacagagcgagcaccccgcatcagccaggagtttggggagcggatggcccactgctgcctaggcgggctggcagagttcctgcagagcttccagcagcgtgtggagcgattccatgagaacccagcagtccgggagatgctacctgacacctatatcagcaagaccatcgccctggtcaactgcggccccccactgagagctctggccgagcgcctggcccgggtggggcccccagaaagcgagccggcccgggaagcatctgctagtgctctggaccatgtgacccggctctgccaccgtgtcgtggccaacctgctgttccaggagctgcagccacacttcaacaagctgatgcgccggaagtggctgagcagcccggaggccctggatggcatcgtgggcacgctgggtgcccaggccctggccctgcgcagaatgcaggacgagccttaccaggcgctggtagccgagctacaccggcgggcgctggtcgagtacgtgcggcccctgctccgtgggcgcctgcgctgcagctcggcgcggacccgcagccgcgtggccggcaggctccgggaggacgcggcgcaactgcagaggctgttccggcggctggagtcccaggcctcgtggctggatgccgtggtgccccatttggctgaagtcatgcagctggaagacacgcccagcatccaggtggaggtgggagtgttggtgcgcgactacccagacatcaggcagaagcacgtggcagccctcctcgacatccgtggcctgcgcaacacagccgcccgccaggagatcctggccgtggcccgggacctggaactctctgaggagggagccctgtcaccccctcgggaccgtgccttctttgcagacatccctgtgccccgcccatctttctgtctcagcctccctctcttcctgggccgcctccccctctcccggctggccaggcccagtttggcctgtctgcctcggccccggcctccgtctctagcgcgacctcgggcccagcgctgagggtcacccaaccgccggccttagtgaccccatctatgctgctgacaagccaacctcccgtacggcgcccctcctgactccctgcctgggaccacacacccctgggatagaaagacccttagatgtcttttcacccaaccccaaactccctgtacagaagggaaacaaacgccaggcacggtggctcatgcctgtaatcccaacactttgggaggctgaggccggaggattgcttgagcccaggagttcaagaccagcctgggcaacatagtgagacctgccccctatctctacaaaaaataaaaaattagctgggcacggtggtgtgtgcctgtagtcccagctactggtgaggctgaggctggaggatcactggagttcgaggctgcagtgagctatgactgtgccactgcactccagcctggtcaacaaagcaagaccctttctc

SEQ ID NO: 236723 - DNA, 1719 bp, Artificial Sequence
  derived and/or modified sequence
acaatcaggtctaccccagagaggtcctagggctggtggacatggccgccctggagaatggggagctggggccccttctctcccctggcaccctgcggggtttggaggatgaatgcgtcacagatgttaaggctcagacccgggctgcccttctccgtgtgctgcaggaggacgaagagcactgggggagcctggaggaccagcccagcagcctggcccaggatgtgtgtgagctgctggaagagcacacagagcgagcaccccgcatcagccaggagtttggggagcggatggcccactgctgcctaggcgggctggcagagttcctgcagagcttccagcagcgtgtggagcgattccatgagaacccagcagtccgggagatgctacctgacacctatatcagcaagaccatcgccctggtcaactgcggccccccactgagagctctggccgagcgcctggcccgggtggggcccccagaaagcgagccggcccgggaagcatctgctagtgctctggaccatgtgacccggctctgccaccgtgtcgtggccaacctgctgttccaggagctgcagccacacttcaacaagctgatgcgccggaagtggctgagcagcccggaggccctggatggcatcgtgggcacgctgggtgcccaggccctggccctgcgcagaatgcaggacgagccttaccaggcgctggtagccgagctacaccggcgggcgctggtcgagtacgtgcggcccctgctccgtgggcgcctgcgctgcagctcggcgcggacccgcagccgcgtggccggcaggctccgggaggacgcggcgcaactgcagaggctgttccggcggctggagtcccaggcctcgtggctggatgccgtggtgccccatttggctgaagtcatgcagctggaagacacgcccagcatccaggtggaggtgggagtgttggtgcgcgactacccagacatcaggcagaagcacgtggcagccctcctcgacatccgtggcctgcgcaacacagccgcccgccaggagatcctggccgtggcccgggacctggaactctctgaggagggagccctgtcaccccctcgggaccgtgccttctttgcagacatccctgtgccccgcccatctttctgtctcagcctccctctcttcctgggccgcctccccctctcccggctggccaggcccagtttggcctgtctgcctcggccccggcctccgtctctagcgcgacctcgggcccagcgctgagggtcacccaaccgccggccttagtgaccccatctatgctgctgacaagccaacctcccgtacggcgcccctcctgactccctgcctgggaccacacacccctgggatagaaagacccttagatgtcttttcacccaaccccaaactccctgtacagaagggaaacaaacgccaggcacggtggctcatgcctgtaatcccaacactttgggaggctgaggccggaggattgcttgagcccaggagttcaagaccagcctgggcaacatagtgagacctgccccctatctctacaaaaaataaaaaattagctgggcacggtggtgtgtgcctgtagtcccagctactggtgaggctgaggctggaggatcactggagttcgaggctgcagtgagctatgactgtgccactgcactccagcctggtcaacaaagcaagaccctttctc

SEQ ID NO: 236724 - DNA, 1230 bp, Artificial Sequence
  derived and/or modified sequence
atggccgccctggagaatggagagctgggccccctgctgagccctggcaccctgcggggcctggaggatgaatgtgtgacagatgtgaaggcccagaccagggctgccctgctgcgggtgctgcaggaggatgaggagcactggggcagcctggaggaccagcccagcagcctggcccaggatgtgtgtgagctgctggaggagcacacagagcgggccccccgcatcagccaggagtttggagagaggatggcccactgctgcctgggcggcctggccgagttcctgcagagcttccagcagagggtggagcgcttccacgagaacccagctgtgcgggagatgctgcctgacacctacatcagcaagaccatcgccctggtgaactgtggcccccccctgcgggccctggccgagcggctggcccgggtgggccccccagagagcgagcccgcccgggaggccagcgccagcgccctggaccacgtgacccggctgtgccaccgggtggtggccaacctgctcttccaggagctgcagccccacttcaacaagctgatgaggaggaagtggctgagcagccctgaggccctggatggcatcgtgggcaccctgggcgcccaggccctggccctgcggaggatgcaggatgagccctaccaggccctggtggccgagctgcacagaagagccctggtggagtatgtgcggcccctgctgcggggccgcctgcgctgcagcagcgcccggaccaggagccgggtggccggccgcctgagagaagatgctgcccagctgcagaggctcttccggcggctggagagccaggcctcctggctggatgctgtggtgccccacctggccgaggtgatgcagctggaggacacccccagcatccaggtggaggtgggcgtgctggtgcgggactacccagacatccggcagaagcacgtggccgccctgctggacatccggggcctgaggaacacagctgcccggcaggagatcctggccgtggcccgggacctggagctgtctgaggagggcgccctgagccccccccgggaccgggccttctttgctgacatccctgtgccccggcccagcttctgcctgagcctgcccctcttcctgggccgcctgcccctgagccggctggcccggcccagcctggcctgcctgccccggcccaggcctcccagcctggcccggccccgggcccagaggtag

SEQ ID NO: 236725 - DNA, 1230 bp, Artificial Sequence
  derived and/or modified sequence
atggccgccctggagaacggcgagctgggccccctgctgagccccggaactctccgcggactggaggatgagtgtgtgactgatgtgaaggcacagacgcgggctgccctgttacgcgtactacaggaagatgaggagcattggggctcactggaagatcaaccatcatccttggcgcaggatgtttgtgagctgctggaggagcacaccgaacgtgccccccggatcagccaggaattcggagaacggatggcacattgttgtcttggaggactggcggaattcctccagagctttcagcagcgggtggagagattccacgagaacccagctgtacgagaaatgcttccagacacctatatctcaaaaaccatcgcattggtgaattgcggccctcctttgcgagccctggctgagcggttggcccgagttggtcctcccgaatccgaacccgccagagaagccagcgcatcagcactggatcacgtgacaaggctgtgccatcgggtagtggcaaacctcctttttcaggaacttcagccacacttcaacaagctgatgcggcgcaaatggctgtcatcacccgaggctctcgatggcatagtcggcaccctcggcgcccaagcacttgcactgcgacgtatgcaggatgagccataccaagctctggtcgcggaactgcaccgcagagccctcgtggaatacgtgaggccgctgttgcgaggaagactgagatgttcctcagctcgcacacgaagccgagtggccggcagactgcgggaagacgctgcccagctgcagaggcttttcagacgcctggagagccaggcttcttggttggacgccgtggtaccacatctggccgaggtcatgcagctggaagataccccaagtattcaagtagaggtaggggtgctggttagggactaccctgacatccgccagaaacatgtggctgccctcctagacatccgcggcctgcggaacactgcagcaaggcaggagattctcgccgtggcccgggacctggagctctccgaagagggggccctgtcccctccgcgtgacagagcgttcttcgcagacataccagtgccacggccttccttctgcctcagcctgccattatttctgggccgccttcctctgagcaggctagcacgcccaagtctagcctgtctgccacgaccgagacccccttctttggcccgcccacgagctcagaggtag

SEQ ID NO: 236726 - DNA, 1230 bp, Artificial Sequence
  derived and/or modified sequence
atggccgccctggagaacggcgagctgggccccctgctgagccccggcaccctaaggggcttggaagatgagtgcgtgacagacgtgaaagctcagaccagggctgccctactaagagttttgcaggaagatgaggagcattggggaagccttgaagatcaaccatcttccctggcacaagacgtatgcgagctgttggaggagcataccgagagggcgccccgtattagccaagagtttggcgaacgaatggcccattgctgcctcggggggctagcagagttccttcagagctttcagcagagagttgagaggtttcacgaaaatcctgccgtcagagaaatgctgcccgatacctatatctcgaaaacaatcgccttggttaactgtggtccacccctcagagcgctcgcagaaagattagcccgggtgggaccacccgagtcagagcctgcccgggaagcaagtgccagcgccttggaccatgtaacccgattgtgtcacagagtggtagccaacctgctgtttcaggaactgcagccacactttaacaaacttatgcgccggaagtggctgtccagccctgaggccttggatggcattgtcgggacacttggcgcccaggctctcgctttaagaaggatgcaggatgagccgtaccaggcactggttgcagaactccacagaagggccctggtggaatacgtcaggccactactgagggggcgtttacgctgttcttccgcgcggacccgatccagagttgcaggacggctccgtgaggatgcagcacagctgcagagattgttcagaaggctagagagtcaagccagctggctggacgctgtggttccacatctggccgaagtgatgcagttggaggacactccctcaatccaggtggaagtgggagtccttgtccgggactacccagatatccggcagaaacatgtggctgctctcctggatatacgtggcctccgtaacacggctgcccgccaggagattctggctgttgcacgagatctcgagctgtctgaagagggtgctctgtcgccaccacgcgacagagcgtttttcgctgatatccctgtgcctcggccaagtttctgtttgtccctgcccttgtttcttggcagactccccttgagccggctagcaaggccttctttggcttgcctgcctcgcccccggcccccatcactggcaaggccccgtgcacaaaggtag

SEQ ID NO: 236727 - DNA, 1230 bp, Artificial Sequence
  derived and/or modified sequence
atggctgctctcgaaaacggcgaactgggcccattgctttcccccggtactctgcgcggtctggaggatgagtgcgtcactgatgtgaaagcacagacaagagccgctcttctacgcgtgttgcaggaagacgaagagcattggggttccctcgaagaccagccctcaagcctggctcaggatgtatgtgagcttcttgaagagcacacggagcgcgctccgaggatcagtcaggagtttggagagcggatggcccattgctgtctgggcggacttgccgagttcctgcaatctttccagcagagggtggagaggtttcacgagaaccccgctgtgcgggagatgctgcccgacacttatatttccaagacgatcgcactggtcaattgtggtccaccactgcgagccctggcagagagactagctagggtgggcccacctgaatcagaacccgcaagggaggcgtccgcgagtgcccttgaccatgtgactcgcctctgccatagagtggtggccaatttgctcttccaggagctgcagcctcactttaataaactgatgcgcagaaaatggctatctagtcctgaggctctagatggaatcgtcggaacacttggggctcaggccttagccctccgcaggatgcaggacgaaccctaccaggccttggtcgcagagttgcataggcgagccctcgtcgagtatgttcggcctctcttacggggtaggcttcgatgttcatccgctagaacacggagtagggtagccggaagactgagagaagatgcagcccagctgcagaggctgtttcgacgattggaaagtcaggctagctggctcgatgcagttgttccgcacctggccgaagtgatgcagctggaggacaccccatctatacaagttgaagtgggtgtcctggtgagggattaccccgatattaggcagaaacacgtggcagcattattggatatcaggggattgcgtaataccgcagccagacaagaaatcttagcagtagctcgcgatctggagctgtctgaggaaggcgcactgtctcctccccgagacagagcgttttttgccgacattccagtcccacgcccttcattttgcctctctctgcccctcttcttaggccgtctgcccctgagtcgcctggccagacctagcctcgcctgtctgcctagaccaagacctccttccctggccaggccgcgagcccagaggtag

SEQ ID NO: 236728 - DNA, 1230 bp, Artificial Sequence
  derived and/or modified sequence
atggccgctttggagaacggagaattggggccacttctgagtcccggaacgctaagagggctggaggatgagtgcgtgacggatgtgaaggcgcaaactagagcagccctgttacgcgtactccaggaagatgaagaacactggggctcacttgaggatcagcccagttcactggcgcaagacgtatgtgagctgctcgaggagcacaccgaacgggctcccagaataagccaggagtttggcgagcgtatggctcactgctgtcttggcggattagccgagttcctccaatcgtttcagcagagagtcgaacggttccatgagaacccagccgtgcgagaaatgttgcctgatacatacataagcaaaacaattgccctggtcaattgtgggcctccacttcgcgctctcgccgaacgactcgccagagtgggaccacctgaatctgagcccgcacgtgaggccagtgcctccgctctggatcacgtcactagactgtgccatagggtcgtcgcaaatttgcttttccaagagctgcaaccccactttaacaagctgatgcgtaggaaatggctgagctccccagaggctctggacggcatcgtgggaactctcggcgcacaggctttggctctgcggcgaatgcaggacgaaccctaccaggcgctcgtggccgagttacacagacgtgcactagttgagtatgtgcgccctcttttgaggggcaggctgcggtgcagtagtgccaggactcgaagtagggtggctggtcgccttagagaagatgccgcacagctacagagactgttccggaggcttgaatcacaggcctcatggctggatgccgtggtgccccacttagcagaagttatgcaactggaagataccccgagcatccaggtcgaagtgggcgtgttggtccgtgattacccagatattcggcagaaacatgtggccgcactcttggacatcagagggcttcgaaatacggccgctagacaggaaattcttgcagtggcccgagatctggaattgtccgaggagggtgccttgagcccgccaagggaccgagccttcttcgcagacattccggtcccgagaccctctttctgtctctctctccctctgtttctgggtaggctgcctctgtctcgcttagccagacccagcctggcatgcctgccacgtcctcgtcctccaagcttggctcgcccaagagctcagaggtag

SEQ ID NO: 236729 - protein, 310 aa, Artificial Sequence
  derived and/or modified sequence
MADAAATAGAGGSGTRSGSKQSTNPADNYHLARRRTLQVVVSSLLTEAGFESAEKASVETLTEMLQSYISEIGRSAKSYCEHTARTQPTLSDIVVTLVEMGFNVDTLPAYAKRSQRMVITAPPVTNQPVTPKALTAGQNRPHPPHIPSHFPEFPDPHTYIKTPTYREPVSDYQVLREKAASQRRDVERALTRFMAKTGETQSLFKDDVSTFPLIAARPFTIPYLTALLPSELEMQQMEETDSSEQDEQTDTENLALHISMEDSGAEKENTSVLQQNPSLSGSRNGEENIIDNPYLRPVKKPKIRRKKSLS

SEQ ID NO: 236730 - protein, 174 aa, Artificial Sequence
  derived and/or modified sequence
MADAAATAGAGGSGTRSGSKQSTNPADNYHLARRRTLQVVVSSLLTEAGFESAEKASVETLTEMLQSYISEIGRSAKSYCEHTARTQPTLSDIVVTLVEMGFNVDTLPAYAKRSQRMVITAPPVTNQPVTPKALTAGQNRPHPPHIPSHFPEFPDPHTYIKTPVSDEALGLRVV

SEQ ID NO: 236731 - DNA, 933 bp, Artificial Sequence
  derived and/or modified sequence
atggccgacgccgccgccaccgccggcgccggcggcagcggcaccagaagcggcagcaagcagagcaccaaccccgccgacaactaccacctggccagaagaagaaccctgcaggtggtggtgagcagcctgctgaccgaggccggcttcgagagcgccgagaaggccagcgtggagaccctgaccgagatgctgcagagctacatcagcgagatcggcagaagcgccaagagctactgcgagcacaccgccagaacccagcccaccctgagcgacatcgtggtgaccctggtggagatgggcttcaacgtggacaccctgcccgcctacgccaagagaagccagagaatggtgatcaccgccccccccgtgaccaaccagcccgtgacccccaaggccctgaccgccggccagaacagaccccaccccccccacatccccagccacttccccgagttccccgacccccacacctacatcaagacccccacctacagagagcccgtgagcgactaccaggtgctgagagagaaggccgccagccagagaagagacgtggagagagccctgaccagattcatggccaagaccggcgagacccagagcctgttcaaggacgacgtgagcaccttccccctgatcgccgccagacccttcaccatcccctacctgaccgccctgctgcccagcgagctggagatgcagcagatggaggagaccgacagcagcgagcaggacgagcagaccgacaccgagaacctggccctgcacatcagcatggaggacagcggcgccgagaaggagaacaccagcgtgctgcagcagaaccccagcctgagcggcagcagaaacggcgaggagaacatcatcgacaacccctacctgagacccgtgaagaagcccaagatcagaagaaagaagagcctgagctag

SEQ ID NO: 236732 - DNA, 933 bp, Artificial Sequence
  derived and/or modified sequence
atggctgatgctgctgccaccgctggcgcaggaggttccggtactcggtctggtagtaagcagtcgactaaccctgccgacaactaccatctggctagaaggagaacgctccaggtagtggtatcctccctcctgaccgaggccggttttgagagtgccgagaaagcaagtgtggaaaccctcactgagatgctgcaaagctatatatcagagatcggacgctccgcaaaatcttattgcgagcatactgcacgtactcagcccaccctttctgacatcgttgttaccttggtggagatgggatttaatgtcgacaccctccctgcttatgctaaacgatcccagagaatggttattaccgcccctccagtgacgaatcaacctgttacacccaaagctctgacggccgggcagaacaggccccaccctccacacatcccctctcactttccggagtttccggatccacacacctatatcaagacaccgacatatagagagcctgtgagtgattaccaggtgttaagggagaaggcggccagtcagcggagggacgtggaacgcgcgctgacaaggttcatggccaaaaccggcgaaactcaatccctttttaaagatgatgtatccactttcccattaatcgctgcacggccgtttactatcccttacttaacggcgcttttgccttctgaattggaaatgcagcaaatggaagagactgactccagtgagcaggacgagcagaccgatacagaaaatcttgctctacacattagtatggaggactcaggggccgagaaggaaaacacaagcgtgctccaacagaacccttcactctccggctcgaggaacggagaagaaaatatcattgacaatccctacctccggcctgtcaaaaaacctaaaattagacgtaagaagagcctctcttag

SEQ ID NO: 236733 - DNA, 6680 bp, Artificial Sequence
  derived and/or modified sequence
acactacgccagaacaagatggccgacgcggcggccacagctggggccggtggctccggaacgagatcgggaagtaaacagtccactaaccctgccgataactatcatctggcccggaggagaaccctgcaggtggttgtgagctccttgctgacagaggcagggtttgagagtgccgagaaagcatccgtggaaacgctgacagagatgctgcagagctacatttcagaaattgggagaagtgccaagtcttactgtgagcacacagccaggacccagcccacactgtccgatatcgtggtcacacttgttgagatgggtttcaatgtggacactctccctgcttatgcaaaacggtctcagaggatggtcatcactgctcctccggtgaccaatcagccagtgacccccaaggccctcactgcagggcagaaccgaccccacccgccgcacatccccagccattttcctgagttccctgatccccacacctacatcaaaactccgacgtaccgtgagcccgtgtcagactaccaggtcctgcgggagaaggctgcatcccagaggcgcgatgtggagcgggcacttacccgtttcatggccaagacaggcgagactcagagtcttttcaaagatgacgtcagcacatttccattgattgctgccagacctttcaccatcccctacctgacagctcttcttccgtctgaactggagatgcaacaaatggaagagacagattcctcggagcaggatgaacagacagacacagagaaccttgctcttcatatcagcatggaggattctggagccgagaaggagaacacctctgtcctgcagcagaacccctccttgtcgggtagccggaatggggaggagaacatcatcgataacccttatctgcggccggtgaagaagcccaagatccgcaggaagaagtccctctcctgagctgagaaggaaacctggcttgtacaggggcgcagattccaccctcccggggagttaaagccactcaagggaagaagagggtgacctcctcatggccaagccgaggctgcagggtgtgatcggacatgattttcatggcaaaccgtcttattaagatgacctattttcactggatgtttgggttgaggaagatatgaacagaataatgagaatttttttttttattttgagatggagtcttactctatcacccaggctggaatgcagtggtgtgatctcagctcactgcagtctcagcaaccctgggtccaagtgattctcctgccttggcctcccgagtagctgggactagaggcaagcgccaccatgctggctaatttttgtattttgagtagagatagggtttcgccatgttggccaggctggtcttgaactcctgacctcaagtgatccacccgcattggcctcccaaagagttgcgattacaggtgtgagccaccacgcccagctaatttttgtatttttaatagagataaggtttcgccatgttggccaggctggtcttgaactcctgacctcaagtgataacccgcctcggcctcccaaagtgctgagattacaggcgtgagccaccgcaccccaccagagactttcttaatcaatcaggctatgtggtggggcatagcagcagccagtgacttcgttcattatcacaggatttgattcctttgaaactcaagagaccagggaaagtgacaggaaggaaagggctctttgctgctgtgcttattacaaggaagactgtttgtccagcgtgtatttcaggatatctggatcccttttattgactcacaatttgtggcaccactttctcatcccagaacttcattcttatttctctcctcatctggcctcccaagtgctccgttgagctgatgaaaagttctttgtactccctcaacgtgtcggaaacaggaggccacacagcacagctttgtttggggtgggcaggagtcaggagtcttgagcagatgcatcactgtgaagaagaacgacatgtcggggctgcacctgtcctcccgtcggcatttgacgaaagctccctgaagcggggcagcactctcctcctgagagatttaccatttattgcccctgtgaggaatgtgtgcttgggaactgccaagtcttaccccttctggaagaagaggttttctctgacaagagcctagagcgtcggctctattatgctgggacttgacagaggagccatggggtttaaacagtaggaaagaggggctacgcgcagtggctcacgcctgtaatcccagcacttcgggaggcgaaggcaggtggatcacttgaggtcaggagttcgagaccagcctggccaacatagtgaaaccccgtctctactaaaaatacaaaaattagccgggtgtggttactcatgcctgtaatcccagctactcgggaggctgaggcaggagaatcacttgaacctgggaggcggaggttgcagtgagccgagatcgtgccactgcactccagcctgggtgacagagcgagactccatttcaaaaaaataaaaaaaggataaagtaaacaataggaaaggatttggtggggtgagggtggggtgttgagggctgggcctcatcttgtattctgaaagctgagaaacggctggtcagctggaaggctggtggatgggcaggagtgagccaagctgaggcgttctgcaagaagcaggtctgagtctgtccaaccaatttgtatcctgtggggagaacaacttcattcttaacataccctacaaaccagaaaacaagtttttaaggaagatgctgggcatgctgatagcttttctggtctcctaaggaagagtttttaaaactaaatccaaggaagaaaaatgtaacaacacgtggaagtgaacactggatgaataagcttgtttcccaaattagaatcctaacgtccatatttagcttcatgtattcccctttggcttccacagttcaactccttttattttgagacagggtctcgctgtgtcgccccagctggagtatagtggcactacctcggctcactgcaacctccactccccgggttcaagcaattctcagagtagctgggattacagatgcccgccaccacatctggctaattttttttttttttttttagtagacacgggattttgctatgttgcccaggctggtcttgaactcctggcctcaagtgatccacccgccttggccttccaaagtgttgagattacaggcgtgagccacggtgcccagcccatctcttagtcttccattcccttggtgaatttggaaacttgaaaaacttggggacttgacagcaggctccatgttcttctggcctcactgtactgtgtaaggaaagagctgcttgtcaggaacggaagaggggacgctagtaaaaaaaaaaaaattggattccccaactggactaaataggagtttttcaggtttgtagtaacgtgaaactctcctagatcgaagcagttagactggcctatgtggccttctcagggtttgtgattcagttcttagcgattcttggcctgataagtttatgaacacagccccacattcaagccgtggccaatcccagctgttctcactgctcttgggaggtgttgtcccagtcagtgtttctgcagcttccatttgttgttgttatccagtgtaagcacctgttgaatgcagatgtgctgagttagaggtgggatttggaaaagggctgctatttctgctgttgagatttcagaggctatactctttttttttcttttcttttttttttttttttgagacggcatctcactcttatcgcccaggctggagtgcaatggcgtgatctcggctcactgcaacctccacctcctgggttcaagggattctcctgcctcagcctcctgagtagctgggattacaggcacctaccacaattctcggctaattttttttgtatttttggtagagacggggtttcaccaggttggccagggtggtctcgaacacctgacctcagatgatccacccacctcggcctcccagtgtgggtgggattacaggcatgagccaccgcgcctggcctcagaggctatactcttataattttgttctgaggggagacagggaaagggttagacaacttgaaacattgaccctgtataaaaatgcaaaattctcaatgtgtatttataaatttctattttttataactttatgggacttcttagaggccaaaagtagtaaacatgcagattaaaaatgtttatgaaaatctcaataaaaattcataataaaaactttgtaaataaatagaactgtaagctttgaacttaatttgtgttcaaaagttaacagcaatgtggacaaataagtcaggcttagcccttgtgttggcctaagcacacctgggaacttagtaaaacttttattttggaaattttcaaatacaaaattagagagcaaaatatatgaacccctgtatatgcctcatcaagcttccacacttgtcagtagcttgttgattctgtttcatctgtttctcccactttttgtcctttattttctttcctcctggagtgtgtgtgtgtgtgtgtgtgcgtgtgtgtgcgtgtgagacagagtttcgcgctggagtgcaatggtgcaatcttggcccactgcaacttctgcctcccgggttcaaatgattctactgcctcagcttcctgagtagctgggattataggtatctaccaccaccaccacgcctggctaattttttcttttttttttggagacggagtctcgctctgtcgcccaggctggattgcagtggattgtcaagattgcagtggtgcaatctcagctcaccgcaagctccgccacccaggttcacgccattctcctgcctcagcctcccaagtagctgggactacaggtgcctgctaccacgcccagctaattttttgtatttttcagtagagatggagtttcactgcattagccaggatggtctcgatctcctgacctcatgatccgcccgcctcggcctcccaaagtgctgggattacaggcatgagccaccgcacctggcctaatttttttgtaggtttagtagagatggggtttcaccatgttggccagactggtctccaactcctgacctcaggtgatcacctgcctcagcctcctaaagtgctgaggttacaggcgtgagcccccgcgcctggctcttctggagtatttttaaatgcaaactccagacctgtgtcatttaatctaaatgtgtctatacgtatctctgattgatctttctttaaattttaattttggaataattatagattcacaagatgttgcaaaaaatgttgagagagatcctatgtacccatcacccactttctcccagtggtagcatcttgcataactgtggtgcaatatcaaaacccttgcattcagtttcagtgtacaatgtagatggtatattagtacaatgcatagagcttatttagttttcaccatgtgcacgtgtgtgttatgtgtgtgttgttccgtgcagtttcatcgtgtagatttgtgtaaccaccagcacacaaatggtgaagacacagaaccattgcatcagtacagttctccctcatgctgtctctttgcaatcacatccacctctctgctcttccacttctctcctggcagccactactctgttctctatctctaatgttattgaaagaatgttataaattgaatcataaagtatgtgacttttttctttttgagacagagtcttgctctatcgcctaggctggatggagtgcagtggagcgatcccagctcactgcaactcctccacctcccgggttcaagagattctcctgcctcagcctcccaagtagctgggattacaggcatgtgccaccacacccagctaacttttgtatttttagtagagatggggtttcaccatgttggccaggttggtctccaactcctgacctcaagtgatccgcccacctcagcctcccaaagtgctaggattataggtatgacccaccgcacctggccgagtatgggactttttgacgttggctttttcagttctgcataattctcttgaggtccatctaggtggttgtgtgtatcagtagttcctttctttttattgctgagtagcatggaggcaccatagtttaacacagtttctttaaccattcacgcattgagacaaaaaaagttcttaattctgcgaacatcaacttcctgtgcccaggtgcaagtgcgggggcagctggcccagggtagagctttaccatggaccctggcgctcctggaaaaaaattcaaggtatttttcctcctcttggagcgtgtggcctacctcatctccatttgattactagcttttctttttctcctttgttaaacagttatttaattttgaagagataatatatgtatacagtataaaatttaaaagacagaaaaagatataagtgataacaaaatatcttcctcctcccctgtttcccagaggctcagacctcatccctggcagctgctattatgttactgtcaatatgaccttatgtattcttccagaagtattctgtgcatcaaatgcaaatacttatattttctacttctcagtgtattttttggtgatgttccatgtcagtaataaagagcttctctgtttcgtggc

SEQ ID NO: 236734 - DNA, 933 bp, Artificial Sequence
  derived and/or modified sequence
atggctgatgctgctgccacagctggggccggcggcagcggcaccaggagcggcagcaagcagagcaccaacccagctgacaactaccacctggcccggcggaggaccctgcaggtggtggtgagcagcctgctgacagaggccggctttgagagcgctgagaaggcctctgtggagaccctgacagagatgctgcagagctacatcagcgagatcggccgcagcgccaagagctactgtgagcacacagcccggacccagcccaccctgagtgacatcgtggtgaccctggtggagatgggcttcaacgtggacaccctgcctgcctatgccaagaggagccagaggatggtgatcacagcccctcctgtgaccaaccagcctgtgacccccaaggccctgacagctggccagaaccggccccaccccccccacatccccagccacttccctgagttcccagacccccacacctacatcaagacccccacctaccgggagcctgtgtctgactaccaggtgctgcgggagaaggccgccagccagaggagagatgtggagcgggccctgacccgcttcatggccaagacaggagagacccagagcctcttcaaggatgatgtgtccaccttccccctgattgctgcccggcccttcaccatcccctacctgacagccctgctgcccagcgagctggagatgcagcagatggaggagacagacagcagcgagcaggatgagcagacagacacagagaacctggccctgcacatctccatggaggacagcggggctgagaaggagaacacctctgtgctgcagcagaaccccagcctgagcggcagcagaaatggagaggagaacatcatcgacaacccctacctgcggcctgtgaagaagcccaagatccggaggaagaagagcctgtcctag

SEQ ID NO: 236735 - DNA, 933 bp, Artificial Sequence
  derived and/or modified sequence
atggccgacgccgccgccaccgccggcgccggcggcagcggcacccgcagtgggagtaaacagagcacaaaccccgccgataactatcacttagccagaagaagaactctgcaagtggtggtttcctccctcctgaccgaggcggggttcgaaagcgccgagaaagccagtgtggaaactttgacagaaatgctgcagtcctacatctctgaaattggccgaagcgctaaaagttactgtgagcacaccgccaggacacagcctacactctctgatatcgtggtcaccctcgtagaaatgggattcaacgtagacaccctgcctgcttatgcaaagcgatcccagcggatggtgattaccgccccacccgtgaccaaccagccagttacccctaaggctctgactgctggacagaatagacctcaccctcctcacatccctagtcatttccccgagtttccagacccacacacatacattaagaccccgacctatcgggagccagtgtcagactatcaagtcttaagggagaaggccgcttcgcaacgtcgcgacgtggagagagctttgactagattcatggcgaaaaccggtgagacccagagcttattcaaagatgatgtttccaccttccctctgatcgccgctcggccttttacaataccttaccttacggcgctcctgccgagcgagttagaaatgcagcagatggaggagactgactcttccgagcaggatgaacaaacagataccgagaacttggctctgcatatcagtatggaagattccggagctgagaaagagaatacgagtgtgctccagcaaaatccatctctgtcgggcagtaggaatggagaagagaatattatcgataacccgtatctccggccagtcaaaaaaccaaagatccgtcgcaaaaagtcccttagctag

SEQ ID NO: 236736 - DNA, 933 bp, Artificial Sequence
  derived and/or modified sequence
atggctgatgcagcggctactgcaggagccggtggctcagggacacgatctgggagcaaacaatcaaccaacccagcagacaattatcacctggcaaggagaagaaccctgcaggtggtggtctctagtcttctcacagaagccggattcgaaagcgctgaaaaggccagcgtcgagacactgacagaaatgctacagagctacatctctgagattggcaggagtgcaaaaagctactgcgaacacacagcccgtacccagcccactttaagcgacatagtcgtgacattggtagagatgggattcaatgtagataccctccctgcatacgcaaagcgatcgcagaggatggttattactgcgcctccagtaactaaccagcccgtcactcccaaggcactgactgcgggtcagaaccgacctcaccctccccatattccttcacacttccccgagtttcctgatccccatacatatatcaagacacctacttacagagagcccgtctcagattatcaagtgctgagagaaaaagctgccagccagcggagagatgttgagcgagcacttacccgcttcatggctaagaccggcgaaactcagtcactatttaaagatgatgtgtcaacattcccacttatcgctgctcgtccatttacaatcccttacctcacagcactgctgccatcagagctagagatgcagcagatggaggagactgattcctccgagcaggatgagcagactgatacagagaacctcgcgctgcatatttccatggaggattccggggctgaaaaggagaatactagcgtgcttcagcagaatcccagcctaagcggctctagaaatggtgaggagaacatcattgacaacccctacctaagaccagttaagaagccaaaaatccggaggaagaagagcctcagttag

SEQ ID NO: 236737 - protein, 56 aa, Artificial Sequence
  derived and/or modified sequence
MPTDHEEPCGPSHKSFCLNGGLCYVIPTIPSPFCSLHENENDNNEDLYDDLLPLNE

SEQ ID NO: 236738 - protein, 115 aa, Artificial Sequence
  derived and/or modified sequence
MPTDHEEPCGPSHKSFCLNGGLCYVIPTIPSPFCRCVENYTGARCEEVFLPGSSIQTKSNLFEAFVALAVLVTLIIGAFYFLCRKGHFQRASSVQYDINLVETSSTSAHHSHEQH

SEQ ID NO: 236739 - protein, 90 aa, Artificial Sequence
  derived and/or modified sequence
MPTDHEEPCGPSHKSFCLNGGLCYVIPTIPSPFCRCVENYTGARCEEVFLPGSSIQTKSNLFEAFVALAVLVTLIIGAFYFLCRCGNTCM

SEQ ID NO: 236740 - DNA, 171 bp, Artificial Sequence
  derived and/or modified sequence
atgcccacggatcacgaagaaccttgcggcccaagccataaatccttctgcctgaatgggggcctctgctatgttatacccacaatccctagccccttctgcagtctgcacgaaaacgagaatgacaacaatgaggacctttatgacgatctgctgcccttgaacgagtag

SEQ ID NO: 236741 - DNA, 348 bp, Artificial Sequence
  derived and/or modified sequence
atgccaacagaccacgaagaaccgtgcgggccaagtcacaaaagtttttgcctgaacggtggattgtgttatgttatccctactatcccttctcccttttgtaggtgtgtagagaactataccggcgctaggtgtgaggaggtcttcttgcccggcagtagcatccagactaaaagcaacctgtttgaagcttttgtggccctcgccgtcctggttaccctcatcatcggagccttctactttctctgccggaagggacacttccagagggccagcagcgtgcagtatgatattaacctggttgagacatcctccacctccgcccaccatagtcacgagcagcactag

SEQ ID NO: 236742 - DNA, 273 bp, Artificial Sequence
  derived and/or modified sequence
atgcccactgaccacgaggagccttgtggaccctcacacaagagcttttgcttgaacggaggcctgtgctacgtgattccgactatccctagccctttctgtcgctgcgtggaaaattacactggtgcccgctgcgaggaggttttcctcccggggagctctattcagacaaagtctaacctcttcgaggccttcgtggcattggccgttttagtgacactcatcatcggagcgttctattttctgtgtcgctgtgggaacacatgtatgtag

SEQ ID NO: 236743 - DNA, 171 bp, Artificial Sequence
  derived and/or modified sequence
atgcccacagaccacgaggagccctgtggccccagccacaagagcttctgcctgaatggaggcctgtgctacgtgatccccaccatccccagccccttctgcagcctgcatgaaaatgaaaatgacaacaatgaagacctgtatgatgacctgctgcccctgaatgaatag

SEQ ID NO: 236744 - DNA, 348 bp, Artificial Sequence
  derived and/or modified sequence
atgcccacagaccacgaggagccctgtggccccagccacaagagcttctgcctgaatggaggcctgtgctacgtgatccccaccatccccagccccttctgccgctgtgtggagaactacacaggagcccgctgtgaggaggtgttcctgcccggcagcagcatccagaccaagagcaacctgtttgaggcctttgtggccctggccgtgctggtgaccctcatcatcggggccttctacttcctgtgcaggaagggccacttccagagggccagctctgtgcagtatgacatcaacctggtggagaccagcagcaccagcgcccaccacagccatgagcagcactag

SEQ ID NO: 236745 - DNA, 273 bp, Artificial Sequence
  derived and/or modified sequence
atgcccacagaccacgaggagccctgtggccccagccacaagagcttctgcctgaatggaggcctgtgctacgtgatccccaccatccccagccccttctgccgctgtgtggagaactacacaggagcccgctgtgaggaggtgttcctgcccggcagcagcatccagaccaagagcaacctgtttgaggcctttgtggccctggccgtgctggtgaccctcatcatcggggccttctacttcctgtgccgctgtggcaacacctgcatgtag

SEQ ID NO: 236746 - DNA, 171 bp, Artificial Sequence
  derived and/or modified sequence
atgcccaccgaccacgaggagccctgcggccccagccacaagagcttttgtctgaatgggggactgtgttacgtgataccaacgataccctcgcctttttgctcactgcacgagaatgaaaacgacaataatgaggacctttacgatgatctattgcccctcaatgaatag

SEQ ID NO: 236747 - DNA, 348 bp, Artificial Sequence
  derived and/or modified sequence
atgcccaccgaccacgaggagccctgcggccccagccacaagagcttctgcttgaacgggggactgtgttacgtaatccccactattccttcgcccttttgccgatgcgtcgaaaactacacaggagctcgatgcgaggaggtgttcttgcctgggagtagcatccagaccaaatccaacctcttcgaggcttttgttgcccttgctgtgttagtcactttgattattggcgccttctactttctgtgccggaagggacacttccagagagctagcagtgtgcagtacgacataaatcttgtcgagacaagcagcacctcagcacaccactctcacgaacaacactag

SEQ ID NO: 236748 - DNA, 273 bp, Artificial Sequence
  derived and/or modified sequence
atgcccaccgaccacgaggagccctgcggccccagccacaagagcttctgtctgaacggggggttgtgttacgtgatacccaccattcccagccccttttgtagatgcgtggagaattacacaggcgcgagatgcgaggaggtgtttctgcccgggtcatcaatccagaccaagagtaatcttttcgaggccttcgtcgctctggctgtgttggtaacattgataatcggcgccttctatttcctgtgccgctgcggcaacacctgcatgtag

SEQ ID NO: 236749 - DNA, 506 bp, Artificial Sequence
  derived and/or modified sequence
gagctgggcagggggcggaggcgggggctcggctgtctccggggctgccacgcagagcgggcttcgtggcgtggactaaaagtgaatcagaaaaataaagaaccagcatcaaatttgaagtggccacaaattctattaaagcagaagaaatagtggtgaaccataaaagagaaccagtttcctctctattctgcaatttagaggaaaaattttcatccaaggacagatcaggtggtggacctagatgggaaacccaaattataatcaagagatttcttggtactgtttttcaaccctactctcttgaccaagaatgaaactatttacaaattaagatgccaacagatcacgaagagccctgtggtcccagtcacaagtcgttttgcctgaatggggggctttgttatgtgatacctactattcccagcccattttgtagtctacacgaaaatgaaaatgacaacaatgaagacctttatgatgatctacttccacttaatgaatag

SEQ ID NO: 236750 - DNA, 1159 bp, Artificial Sequence
  derived and/or modified sequence
acactgcagccatataaatcagatttttgacatgttataaaatgcaagtcacagctgctgttgtctgcggtattcaaaaacttttgaaacactgcatgtccaacaaaatttattttttgtgtgaatgtactgtttttcaaccctactctcttgaccaagaatgaaactatttacaaattaagatgccaacagatcacgaagagccctgtggtcccagtcacaagtcgttttgcctgaatggggggctttgttatgtgatacctactattcccagcccattttgtaggtgcgttgaaaactatacaggagctcgttgtgaagaggtttttctcccaggctccagcatccaaactaaaagtaacctgtttgaagcttttgtggcattggcggtcctagtaacacttatcattggagccttctacttcctttgcaggaaaggccactttcagagagccagttcagtccagtatgatatcaacctggtagagacgagcagtaccagtgcccaccacagtcatgaacaacactgaagaaacgtcaaagtgaaccaaatcattgtttttattttacaaaggcagaaaatgaaacaccactaggtaaaagaattaaaaatctaatcctttatttcttaaataaaacgcttgtgtaactcgtatcatgaaccataatccattctgctgcaaggtgtgtgtgcttctgtaatgtgcatcagtccatcggcaactgctaagtagggggtgataccagtataattcgaagtcacattggttcaacatgactctccccagaaagctgatgtgctgaagcaaccagaggcaaatgttcacacacctagagagaaaccctaagggatatatgaagatcttatgaaaaaggatgaaaaccctttaaatgcaaggagtagctggcttagtggcttcaaaaccacctcattcctgctgttatctgagaagctgcaagtactgatgaaaaaactgagaagacatttcacctggcaattagaaaaaagcgctgactgatagatacctctgtatcattctttcaatattgatgaaaatgctttctactagaagtgactgatttcaaggatctgtctctcaaaggaagaaacaaaaacccaaaattttgactgcaaaagattgactaattctaggtgcaa

SEQ ID NO: 236751 - DNA, 388 bp, Artificial Sequence
  derived and/or modified sequence
tttctgtttaggtcagaagtgttctttatagaacagaactgggagcttgtaatcataatgtactgtttttcaaccctactctcttgaccaagaatgaaactatttacaaattaagatgccaacagatcacgaagagccctgtggtcccagtcacaagtcgttttgcctgaatggggggctttgttatgtgatacctactattcccagcccattttgtaggtgcgttgaaaactatacaggagctcgttgtgaagaggtttttctcccaggctccagcatccaaactaaaagtaacctgtttgaagcttttgtggcattggcggtcctagtaacacttatcattggagccttctacttcctttgcaggtgtggtaacacatgcatgtag

SEQ ID NO: 236752 - DNA, 171 bp, Artificial Sequence
  derived and/or modified sequence
atgcccacagatcatgaagagccatgcgggccatctcataaaagcttttgtctgaacggcggactttgctacgtcatcccaacaatcccaagccctttctgttcactacacgagaacgagaatgataacaacgaggatctttacgatgatcttctacctcttaacgagtag

SEQ ID NO: 236753 - DNA, 348 bp, Artificial Sequence
  derived and/or modified sequence
atgcctactgaccacgaagagccgtgcggaccctcccataagtcgttctgtctgaatgggggactatgttacgtgattccaaccattcccagcccattctgccgttgtgtggaaaattacacgggagcccgttgtgaggaagtgtttctaccaggaagcagcattcagaccaagtccaacttatttgaagctttcgtggcgctggctgttttggtcaccctgatcatcggcgcattctacttcctgtgccgaaaagggcactttcagcgggcttcttccgtccaatacgacattaatctggttgaaacaagttctaccagtgcgcaccactctcacgagcagcattag

SEQ ID NO: 236754 - DNA, 273 bp, Artificial Sequence
  derived and/or modified sequence
atgcccaccgatcatgaggaaccctgcggcccatctcacaaaagcttttgcctgaacggcggattgtgttacgtaatacctaccatcccctctcccttttgccggtgcgtcgagaactacactggcgctagatgcgaggaggttttcttgcctggctcctctatccagacgaagtctaacctgtttgaggctttcgtagctttagccgttctggtaacactgattatcggcgcattctatttcctatgtcgctgcgggaacacctgcatgtag

SEQ ID NO: 236755 - DNA, 171 bp, Artificial Sequence
  derived and/or modified sequence
atgcccaccgaccacgaggagccctgcggccccagccacaagagcttctgcctgaacggcggcctgtgctacgtgatccccaccatccccagccccttctgcagcctgcacgagaacgagaacgacaacaacgaggacctgtacgacgacctgctgcccctgaacgagtag

SEQ ID NO: 236756 - DNA, 348 bp, Artificial Sequence
  derived and/or modified sequence
atgcccaccgaccacgaggagccctgcggccccagccacaagagcttctgcctgaacggcggcctgtgctacgtgatccccaccatccccagccccttctgcagatgcgtggagaactacaccggcgccagatgcgaggaggtgttcctgcccggcagcagcatccagaccaagagcaacctgttcgaggccttcgtggccctggccgtgctggtgaccctgatcatcggcgccttctacttcctgtgcagaaagggccacttccagagagccagcagcgtgcagtacgacatcaacctggtggagaccagcagcaccagcgcccaccacagccacgagcagcactag

SEQ ID NO: 236757 - DNA, 273 bp, Artificial Sequence
  derived and/or modified sequence
atgcccaccgaccacgaggagccctgcggccccagccacaagagcttctgcctgaacggcggcctgtgctacgtgatccccaccatccccagccccttctgcagatgcgtggagaactacaccggcgccagatgcgaggaggtgttcctgcccggcagcagcatccagaccaagagcaacctgttcgaggccttcgtggccctggccgtgctggtgaccctgatcatcggcgccttctacttcctgtgcagatgcggcaacacctgcatgtag

SEQ ID NO: 236758 - protein, 251 aa, Artificial Sequence
  derived and/or modified sequence
MSAYGMPMYKSGDLVFAKLKGYAHWPARIEHMTQPNRYQVFFFGTHETAFLSPKRLFPYKECKEKFGKPNKRRGFSAGLWEIENNPTVQASDCPLASEKGSGDGPWPEPEAAEGDEDKPTHAGGGGDELGKPDDDKPTEEEKGPLKRSAGDPPEDAPKRPKEAAPDQEEEAEAERAAEAERAAAAAAATAVDEESPFLVAVENGSAPSEPGLVCEPPQPEEEELREEEVADEEASQEWHAEAPGGGDRDSL

SEQ ID NO: 236759 - DNA, 756 bp, Artificial Sequence
  derived and/or modified sequence
atgagcgcctacggcatgcccatgtacaagagcggcgacctggtgttcgccaagctgaagggctacgcccactggcccgccagaatcgagcacatgacccagcccaacagataccaggtgttcttcttcggcacccacgagaccgccttcctgagccccaagagactgttcccctacaaggagtgcaaggagaagttcggcaagcccaacaagagaagaggcttcagcgccggcctgtgggagatcgagaacaaccccaccgtgcaggccagcgactgccccctggccagcgagaagggcagcggcgacggcccctggcccgagcccgaggccgccgagggcgacgaggacaagcccacccacgccggcggcggcggcgacgagctgggcaagcccgacgacgacaagcccaccgaggaggagaagggccccctgaagagaagcgccggcgacccccccgaggacgcccccaagagacccaaggaggccgcccccgaccaggaggaggaggccgaggccgagagagccgccgaggccgagagagccgccgccgccgccgccgccaccgccgtggacgaggagagccccttcctggtggccgtggagaacggcagcgcccccagcgagcccggcctggtgtgcgagcccccccagcccgaggaggaggagctgagagaggaggaggtggccgacgaggaggccagccaggagtggcacgccgaggcccccggcggcggcgacagagacagcctgtag

SEQ ID NO: 236760 - DNA, 756 bp, Artificial Sequence
  derived and/or modified sequence
atgtccgcatatgggatgcccatgtacaaatcgggggatctcgtgttcgccaagcttaaggggtacgcccattggcctgctaggatagaacatatgacgcagccgaatagataccaggtttttttcttcggcacacacgaaaccgcttttttaagtcctaagcgactgtttccgtacaaggagtgcaaagaaaaatttgggaaaccgaacaagcgtcggggcttttcagccgggctctgggaaatcgagaacaatccaactgttcaggccagcgactgcccacttgcttctgaaaagggtagcggagacggcccctggccagaaccagaagccgccgagggggacgaggataagccgacacatgcaggtggggggggggatgaactcggaaaaccagatgacgacaaacccaccgaggaggaaaagggccccttaaagcggtctgctggggatcccccagaggacgctcccaagaggcctaaggaagcggcccccgatcaagaagaggaggctgaggcagagagggccgccgaggctgagcgcgctgcagcggccgctgccgctacagctgtggacgaagagtctccattcctcgttgccgtggagaatggatcagcacccagcgaaccaggcctggtgtgtgagccaccccagccagaagaagaagagctcagagaggaggaggtggcagacgaggaggcgagccaggaatggcacgctgaggctccaggcgggggagaccgggatagcctctag

SEQ ID NO: 236761 - DNA, 756 bp, Artificial Sequence
  derived and/or modified sequence
atgtctgcctacggcatgcccatgtacaagagcggggacctggtgtttgccaagctgaagggctacgcccactggccagccagaattgagcacatgacccagcccaaccgctaccaggtgttcttcttcggcacccatgaaacagccttcctgagccccaagaggctcttcccctacaaggagtgcaaggagaagtttgggaagcccaacaagaggcggggcttctctgctggcctgtgggagattgagaacaaccccaccgtgcaggccagtgactgccccctggccagcgagaagggcagcggagatggcccctggccagagcctgaggccgcagaaggagatgaggacaagcccacccacgccggcggcggcggagatgagctgggcaagccagatgatgacaagcccacagaggaggagaagggccccctgaagaggtctgctggggaccccccagaagatgcccccaagaggcccaaggaggccgccccagaccaggaggaggaggccgaggccgagagagctgctgaggccgagagagctgctgctgctgctgctgccacagctgtggatgaggagagccccttcctggtggccgtggagaatggaagtgcccccagcgagcccggcctggtgtgtgagcccccccagcctgaggaggaggagctgcgggaggaggaggtggctgatgaggaggccagccaggagtggcacgccgaggcccctgggggcggggaccgggacagcctgtag

SEQ ID NO: 236762 - DNA, 1073 bp, Artificial Sequence
  derived and/or modified sequence
ttaggtggcgccggtcccctcgaacaggtcgctcaacaactcccgcccagcagccgcccttactgcgcgcgcgcagacttcggcgtctacttccggtgtggcccaggcggggtccgcagaaccagctatgtcggcctacggcatgcccatgtacaagagcggggacctggtgtttgccaagttaaagggctatgcccactggccggcgaggatagagcacatgacccagcccaaccgctaccaggtgtttttcttcgggacccacgagacggccttcctgagtcccaaacgcctgttcccgtacaaggagtgcaaggagaagttcggcaagcccaacaagaggcgcggcttcagcgcggggctgtgggaaatcgagaacaaccccacggtccaggcctccgactgcccattagcctcagagaagggcagcggagacgggccttggccggagcccgaggccgcagagggcgacgaggacaagccgacccacgctggtggcggcggcgacgaattggggaagccggacgacgacaagcccactgaggaggagaaggggccgctgaagaggagcgcgggggacccgccggaggacgcccccaaacgacccaaggaggcagcccccgaccaagaggaggaggcggaggcggagagggcggcggaagcggagagggcggcggcggcggcggcggcgacggccgtcgacgaggagagtccgttcctcgtggcggtggagaacggcagcgcccctagcgagccgggcctggtctgcgagccgcctcagccagaggaggaggagctccgggaggaagaagtcgcggacgaggaggcctcccaggagtggcatgccgaggcaccgggcggcggagatcgcgacagcctgtagttaccagcgtttccagaagagcccctgccccgttcctgctgcggcctggccgttcttggggaatctgaccacggcgtgcaaactgggactgcctttccctctcctcagcccgtcctcctccaacccgcgctcctttgccctgccgggccccaggatggcaggccacctgactctcacctctgtgccccca

SEQ ID NO: 236763 - DNA, 2034 bp, Artificial Sequence
  derived and/or modified sequence
agaaccagctatgtcggcctacggcatgcccatgtacaagagcggggacctggtgtttgccaagttaaagggctatgcccactggccggcgaggatagagcacatgacccagcccaaccgctaccaggtgtttttcttcgggacccacgagacggccttcctgagtcccaaacgcctgttcccgtacaaggagtgcaaggagaagttcggcaagcccaacaagaggcgcggcttcagcgcggggctgtgggaaatcgagaacaaccccacggtccaggcctccgactgcccattagcctcagagaagggcagcggagacgggccttggccggagcccgaggccgcagagggcgacgaggacaagccgacccacgctggtggcggcggcgacgaattggggaagccggacgacgacaagcccactgaggaggagaaggggccgctgaagaggagcgcgggggacccgccggaggacgcccccaaacgacccaaggaggcagcccccgaccaagaggaggaggcggaggcggagagggcggcggaagcggagagggcggcggcggcggcggcggcgacggccgtcgacgaggagagtccgttcctcgtggcggtggagaacggcagcgcccctagcgagccgggcctggtctgcgagccgcctcagccagaggaggaggagctccgggaggaagaagtcgcggacgaggaggcctcccaggagtggcatgccgaggcaccgggcggcggagatcgcgacagcctgtagttaccagcgtttccagaagagcccctgccccgttcctgctgcggcctggccgttcttggggaatctgaccacggcgtgcaaactgggactgcctttccctctcctcagcccgtcctcctccaacccgcgctcctttgccctgccgggccccaggatggcaggccacctgactctcacctctgtgcccccaccttccggctccctcttctcccccctctacccgccaccccaccccaccccacccccgcccactcgttgcctgattccgtttccgacttggggttcaggcaggctgttttcacctctagacacccctctccacccctcctgcttccccaggcattatgaacctctgcttaggaatatgggtaggagtgaaaggcctggcagataaagagcagagggcacttgcagggcctgggatgagcagtcttcaagctgtggtagttagcgggcaggagagcgacatcttcctgagctcctgtccatgcctgccatacctgccagcttcagacatttagggaaaaggggcagcatgtggggaatgccccccgccttccacaaatccttttgctgacccaggaagttctgggagttgccgtttttcatcaaaacgtttgggggcttccaagttgtttgtgagatctgaaaacttaactttgcccaatatcctggttggggaccgtgagaaatatctgtcccatttagatctctggggccactgatgggatgccctgggaagatccttggctgccgctttctctccccacagcctcaaggccaccctaccgtcatatatatcactcaggcgtagaagaaaagacacatattttataaaatctttttaataaaaggaagttccaagaagaatttttaagaactacctctaggtgtgcctccacgctggccctagctttcccattgctgttccattgctgagacaaactggaaggctccctttctgtttgaagttttatgacttgtagtcaggctttgctgttcgtcacagtgtcattttccattcaggtaccatcacctggtcccatcaacaggtctagtatgtagctcactgataacagaggaagatgtgtctcctcccaccctcttcctaatggtcattatgcctttctccatctattgtctctttcaccccttcccctctcccttgggctctgatgaaaaattgttgactgcagtttcggaagtttgatctgagaaccaaccatagaatgtttcagttctaggaaataaaaccagttgattaaagc

SEQ ID NO: 236764 - DNA, 756 bp, Artificial Sequence
  derived and/or modified sequence
atgagcgcctacggcatgcccatgtacaagagcggcgacctggtgtttgctaagctgaaagggtacgcgcattggccggcaagaatagagcatatgactcagcccaatcgctatcaagtttttttttttggtacacatgaaactgcatttctgtcccctaagcgactttttccttacaaggaatgcaaagaaaagttcggtaagccgaacaagcgtagaggattctctgccggcctctgggaaatcgagaataatcctaccgttcaggcctcagactgcccgctggctagtgagaaagggtcaggcgacggcccatggcctgagcctgaagcagccgagggcgacgaagataaacccacgcatgcagggggtggcggtgacgagctgggaaagcctgatgacgataaacccaccgaagaggaaaaggggcctttaaagcggagcgcaggcgacccaccagaagacgctcctaaacgcccaaaagaggccgcacctgaccaggaggaggaggcggaagctgaaagagcagccgaagctgaacgggcagccgccgcggcagccgcaaccgccgtagatgaggagtcaccattcctggtggccgttgaaaatgggagtgccccctccgagcctggcctcgtgtgtgagccccctcagcctgaggaggaggagctgagagaggaagaagtggccgacgaggaggcttctcaggagtggcacgccgaagctcctggagggggagacagagactccctgtag

SEQ ID NO: 236765 - DNA, 756 bp, Artificial Sequence
  derived and/or modified sequence
atgtccgcgtacgggatgcccatgtacaaatctggtgacctggtgttcgcaaagttgaaaggttacgctcactggcctgccagaattgagcacatgacgcagccaaacagataccaggtgttcttctttggcactcatgaaacagcctttctgagtccgaagaggctgtttccatacaaggagtgcaaggaaaagtttgggaagccaaacaagagacggggattctccgcaggcctgtgggagatcgagaacaaccctaccgttcaggcaagtgattgcccgctggcgtctgagaaagggtccggagatgggccatggcctgaaccagaggccgctgagggcgacgaggacaagccgacacacgctggtggaggtggcgacgaactgggcaaacctgacgacgacaaacccactgaagaggaaaagggtcccttaaagagatccgctggtgatcccccagaagatgccccaaagcgccctaaagaagcagctcctgatcaggaggaggaggccgaagctgaaagagccgcagaagccgagagagccgcagccgctgcagcggcaaccgctgtggacgaggaaagtccattccttgtggctgtagagaacggatctgctccttctgagcccggattagtttgcgaaccgccacagccggaggaggaagagctacgggaggaggaggtggcggacgaggaggcctctcaggaatggcacgccgaggccccaggcggaggggacagagattctctctag

SEQ ID NO: 236766 - DNA, 756 bp, Artificial Sequence
  derived and/or modified sequence
atgtccgcatatggtatgcccatgtataagtccggagacctggtttttgctaagttgaaggggtatgcccattggcccgcacgaattgagcacatgacccagcccaaccggtaccaagtgttctttttcgggactcatgaaaccgcctttcttagccccaagagactgttcccttataaggaatgtaaggaaaaattcggaaagcctaacaagagaagaggcttttcggcaggactatgggagatagaaaacaacccgacggtgcaagcttctgactgtccgctcgcaagcgagaagggctctggcgacggaccgtggccagagcctgaggccgccgagggcgacgaggataagcctactcacgcaggcggaggcggggatgaactcggaaagccggatgatgacaagccgacagaagaggagaaagggccactgaagcgctcagctggtgaccccccagaagatgctcccaagaggccgaaagaggcagctcctgaccaggaggaggaggctgaggcagagcgagcagccgaagccgaacgggccgcagccgctgccgccgcgaccgccgtggatgaggaaagcccattcttggtggccgtggaaaatgggtccgctccttcggagcccgggttagtgtgcgagccgccgcagcctgaggaagaggaacttcgagaggaggaggtggcagatgaggaagcttcccaagagtggcacgccgaggccccaggggggggcgaccgagactccctgtag

SEQ ID NO: 236767 - DNA, 756 bp, Artificial Sequence
  derived and/or modified sequence
atgagcgcctacggcatgcccatgtacaagagcggcgacctggtgtttgccaagttaaagggctacgctcactggcctgcccgaatcgagcatatgacacagcccaatagatatcaagtcttcttcttcggaacgcatgagaccgcctttctttccccaaagcgtttattcccatacaaggagtgcaaggagaaatttggcaagcctaacaaacgccgcggattttccgccggcctgtgggaaatagaaaataaccccaccgtccaggcaagtgattgcccactcgcgagcgagaagggatctggggacggaccatggccggaacctgaagctgcagagggggatgaggataaaccgacccacgcaggagggggcggtgatgagctgggcaaaccagatgatgataaacctaccgaagaggagaagggccctctcaagagaagcgccggtgaccccccagaagatgcccctaagaggccaaaagaggctgctcctgatcaggaggaggaggccgaggctgagcgagctgcggaagccgaacgcgcagctgccgcagcagcagctacagccgtggatgaagagagtcctttcctggtggccgtcgagaacggctccgccccatctgaacccgggctggtctgtgaaccccctcagcccgaggaagaagaactccgcgaggaggaagttgccgacgaagaggcctctcaagaatggcacgctgaggctcccgggggaggtgacagagattcgctttag

SEQ ID NO: 236768 - DNA, 756 bp, Artificial Sequence
  derived and/or modified sequence
atgtccgcatacgggatgcccatgtacaagtccggggatctggtcttcgccaaactgaagggatacgcccattggcccgctcgaatagaacatatgacccagccaaatcgctaccaggtcttttttttcggtacccacgagaccgcatttctttctccaaagcgcctgtttccttacaaggagtgcaaggagaagtttggcaagcctaataagaggcggggtttctccgcaggactctgggagatagaaaataatcctacggtccaggcgtccgactgtcctctcgcatccgagaagggctctggtgacggaccctggccagagccagaagccgctgagggtgacgaggacaaacccacacatgccggtgggggtggagatgaacttggaaagcccgacgacgacaagcccacagaagaagagaaggggccactgaaaaggtcagccggtgaccccccagaggatgcacctaagagaccaaaggaggcagctccagaccaggaggaagaggccgaggcagagcgggctgctgaagctgagcgtgctgctgctgcggcagccgctacagcagttgatgaggagtcgccgttcctggtggctgtcgagaacggtagcgcgccttctgaacctgggcttgtgtgtgaaccccctcagccggaggaggaagagctccgtgaagaggaggtggccgacgaggaggcatcccaagaatggcacgccgaagctccaggtggaggtgaccgggactctctctag

SEQ ID NO: 236769 - protein, 894 aa, Artificial Sequence
  derived and/or modified sequence
MSRRKQGNPQHLSQRELITPEADHVEAAILEEDEGLEIEEPSGLGLMVGGPDPDLLTCGQCQMNFPLGDILVFIEHKRKQCGGSLGACYDKALDKDSPPPSSRSELRKVSEPVEIGIQVTPDEDDHLLSPTKGICPKQENIAGPCRPAQLPAVAPIAASSHPHSSVITSPLRALGALPPCLPLPCCSARPVSGDGTQGEGQTEAPFGCQCQLSGKDEPSSYICTTCKQPFNSAWFLLQHAQNTHGFRIYLEPGPASSSLTPRLTIPPPLGPEAVAQSPLMNFLGDSNPFNLLRMTGPILRDHPGFGEGRLPGTPPLFSPPPRHHLDPHRLSAEEMGLVAQHPSAFDRVMRLNPMAIDSPAMDFSRRLRELAGNSSTPPPVSPGRGNPMHRLLNPFQPSPKSPFLSTPPLPPMPPGGTPPPQPPAKSKSCEFCGKTFKFQSNLIVHRRSHTGEKPYKCQLCDHACSQASKLKRHMKTHMHKAGSLAGRSDDGLSAASSPEPGTSELAGEGLKAADGDFRHHESDPSLGHEPEEEDEEEEEEEEELLLENESRPESSFSMDSELSRNRENGGGGVPGVPGAGGGAAKALADEKALVLGKVMENVGLGALPQYGELLADKQKRGAFLKRAAGGGDAGDDDDAGGCGDAGAGGAVNGRGGGFAPGTEPFPGLFPRKPAPLPSPGLNSAAKRIKVEKDLELPPAALIPSENVYSQWLVGYAASRHFMKDPFLGFTDARQSPFATSSEHSSENGSLRFSTPPGDLLDGGLSGRSGTASGGSTPHLGGPGPGRPSSKEGRRSDTCEYCGKVFKNCSNLTVHRRSHTGERPYKCELCNYACAQSSKLTRHMKTHGQIGKEVYRCDICQMPFSVYSTLEKHMKKWHGEHLLTNDVKIEQAERS

SEQ ID NO: 236770 - DNA, 2685 bp, Artificial Sequence
  derived and/or modified sequence
atgagccgaagaaaacaggggaatccccagcacctgtcacagagagagcttattactcccgaggctgaccacgtcgaggcagccatactggaagaagacgagggattagaaatcgaggagccctctggactgggcctgatggtgggcggccctgaccctgatctgctgacttgcggacagtgccagatgaatttccctctgggggatattctcgtgtttatcgaacataagaggaagcagtgtgggggaagtctgggagcttgttatgacaaagcgttggacaaagactcaccgccacccagcagtcgctccgagttgcgaaaggtgtccgagccggtggaaatcggaatccaggtcacacctgacgaagacgaccacctgctttctcccaccaagggaatctgtccaaaacaagaaaacatagccgggccatgtcgcccagcccagctgcctgccgtcgcaccaatagcggcaagttcccaccctcattcctcagttattaccagtccactgcgagccctcggcgcactgcccccatgcttgcccctaccatgctgcagcgcgaggcccgtctccggagacggaactcagggcgaaggacagactgaagccccttttgggtgtcagtgtcaactttccggaaaagacgagcccagctcctatatttgcaccacttgtaagcagccctttaactccgcctggtttctgctgcagcacgcgcagaacacccacggatttcggatctacctggagccgggccccgcaagcagctccctgaccccacgactgaccatccctcctcccctcgggcccgaagctgttgcacagtctcctctgatgaatttcctgggggatagcaaccctttcaatctgttgcgcatgacagggccgatcctgagggatcatcccggatttggcgaaggaaggctgccaggaaccccgcccttattttcccccccacctaggcatcacctggacccacacaggctgtccgccgaggaaatgggacttgtggcccagcatccttctgctttcgacagagttatgcgccttaaccccatggcaatagacagccccgctatggacttctctagaaggctcagggagctggcaggaaattctagcactccaccgccagtgagtcccggaaggggcaaccccatgcacagactcttaaacccctttcagccatcacctaagagcccatttctctccacgcctccattacccccaatgcctcctggcgggactcctccaccccagcctcccgccaaatcgaagtcttgtgagttctgcggaaagacattcaagttccagtcaaatctgatcgttcaccgcagatctcacacaggagaaaagccatataagtgtcagctttgtgatcacgcatgttcccaggctagtaagctgaagcgccatatgaagacacacatgcacaaggcaggcagcctggccggtagaagcgatgacggcctgtctgctgcctcctcaccagaaccagggacatccgagctggcaggtgaaggactgaaagccgccgatggggatttccggcatcacgagtccgatccatcactggggcacgagcccgaggaggaagatgaggaagaggaagaggaggaagaagagctgctgctagaaaatgaatctcggccagaatctagtttttccatggattccgaactgagtcgcaaccgggagaatggcggcggtggggttcccggcgttcccggcgccggaggcggtgcagctaaagcactggccgatgagaaagctttggtacttgggaaggtgatggaaaacgtaggcttgggggcgcttccccaatatggtgaacttctggccgacaagcaaaagcgcggcgcattcctcaaacgggctgctggtggaggcgacgccggcgatgatgacgatgctggaggatgcggcgacgcgggtgcgggaggggcggtgaacgggcggggagggggctttgcgcccgggaccgagccgtttccaggcctgtttccacgcaaacctgcccccctcccgtcacccggactgaactctgcggctaaaaggattaaggtggaaaaggacctggaactcccgcccgccgcccttatcccatctgagaacgtgtattcacagtggttggttgggtacgccgcatccaggcatttcatgaaggacccattcttaggctttacagatgctcggcagtccccatttgctacttcctccgagcacagctctgagaatggaagtctgcgcttttcgacgccacccggtgatctcctggacggcgggctgtccggacgttcaggtaccgcgagtggggggagtacacctcatttaggagggcccggtcccgggcgcccgtcctcaaaggagggaaggagaagtgacacttgtgaatattgcggaaaggttttcaagaactgttcaaaccttacagtccatcggaggtcccataccggcgaaagaccttacaaatgtgaactgtgtaactacgcctgtgcccagtcctccaagctgactagacacatgaaaactcacggccaaataggcaaggaagtgtaccgctgtgacatttgtcagatgcctttttccgtttatagcacgctcgaaaaacacatgaagaagtggcacggcgaacacctactgaccaatgatgtgaaaatcgaacaggcagagcgctcctag

SEQ ID NO: 236771 - DNA, 2685 bp, Artificial Sequence
  derived and/or modified sequence
atgagcaggaggaagcagggcaacccccagcacctgagccagcgggagctgatcaccccagaggccgaccacgtggaggccgccatcctggaggaggatgagggcctggagattgaggagcccagcggcctgggcctgatggtgggcggccctgaccctgacctgctgacctgtggccagtgccagatgaacttccccctgggggacatcctggtgttcatcgagcacaagaggaagcagtgtggcggcagcctgggcgcctgctatgacaaggccctggacaaggacagccccccacccagcagccgctctgagctgaggaaggtgtctgagcctgtggagatcggcatccaggtgaccccagatgaagatgaccacctgctgagccccaccaagggcatctgccccaagcaggagaacattgctggcccctgcaggcctgcccagctgcctgctgtggcccccatcgccgccagcagccacccccacagcagcgtcatcaccagccccctgcgggccctgggcgccctgcccccctgcctgcccctgccctgctgcagcgcccggcctgtgtctggagatggcacccagggcgagggccagacagaggcccccttcggctgccagtgccagctgagcggcaaggatgagcccagcagctacatctgcaccacctgcaagcagcccttcaacagcgcctggttcctgctgcagcacgcccagaacacccacggcttccgcatctacctggagcccggccctgccagcagcagcctgaccccccggctgaccatccccccacccctgggccctgaggccgtggcccagagccccctgatgaacttcctgggggacagcaaccccttcaacctgctgaggatgacaggccccatcctgcgggaccaccctggctttggagagggccgcctgcccggcaccccacccctcttcagccccccacccaggcaccacctggacccccaccggctgtctgctgaggagatgggcctggtggcccagcaccccagcgcctttgacagagtgatgaggctgaaccccatggccatcgacagccctgccatggacttcagccggcggctgcgggagctggccggcaacagcagcaccccacctcctgtgtccccaggccggggcaaccccatgcaccggctgctgaaccccttccagcccagccccaagagccccttcctgagcaccccacccctgccccccatgcctcctgggggcaccccaccaccccagcccccagccaagagcaagagctgtgagttctgtgggaagaccttcaagttccagagcaacctgattgtgcaccggcgcagccacactggagagaagccctacaagtgccagctgtgtgaccacgcctgcagccaggccagcaagctgaagaggcacatgaagacccacatgcacaaggccggcagcctggccggccgcagtgatgatggcctgtctgctgccagcagccctgagcccggcaccagcgagctggccggggagggcctgaaggctgctgatggagacttccgccaccacgagagtgaccccagcctgggccacgagcctgaggaggaggatgaggaggaggaggaggaggaggaggagctgctgctggagaatgaaagcaggcctgagagcagcttctccatggacagcgagctgagcaggaacagagaaaatggaggcggcggcgtgcctggggtgcctggagctgggggcggggccgccaaggccctggctgatgagaaggccctggtgctgggcaaggtgatggagaatgtgggcctgggcgccctgccccagtacggggagctgctggccgacaagcagaagagaggagccttcctgaagagagctgctggaggaggagatgctggagatgatgatgatgctgggggctgtggagatgctggagctggaggagctgtgaatggccggggcggcggctttgcccctggaacagagcccttccctggcctcttccccaggaagccagcccccctgcccagccctggcctgaacagcgctgccaagaggatcaaggtggagaaggacctggagctgcccccagctgccctgatccccagtgaaaatgtgtacagccagtggctggtgggctacgccgccagccgccacttcatgaaggaccccttcctgggcttcacagatgcccggcagagcccctttgccaccagcagcgagcacagcagtgaaaatggcagcctgcgcttcagcaccccacctggggacctgctggatggcggcctgagcggccgcagcggcacagccagcggcggcagcaccccccacctgggcggccctggccctggccggcccagcagcaaggagggcagaagaagtgacacctgtgagtactgcggcaaggtgttcaagaactgcagcaacctgactgtgcacagaagaagccacactggagagcggccctacaagtgtgagctgtgcaactatgcctgtgcccagagcagcaagctgaccaggcacatgaagacccacggccagatcggcaaggaggtgtaccgctgtgacatctgccagatgcccttctctgtgtacagcaccctggagaagcacatgaagaagtggcatggagagcacctgctgaccaatgatgtgaagattgagcaggccgagaggagctag

SEQ ID NO: 236772 - DNA, 2685 bp, Artificial Sequence
  derived and/or modified sequence
atgagccggcggaagcagggcaacccccagcacctgagccagcgggaactcattaccccagaagctgatcacgtcgaggcagcaatactggaggaggatgaggggctcgagatcgaggagcccagcggcttgggcctgatggtcgggggccctgaccccgacttgttaacctgcgggcagtgccagatgaatttccctctgggggatatactcgtctttatagagcacaagaggaagcagtgcgggggaagtcttggtgcatgctatgataaagctttggataaggactcgcccccaccttcatcgcgaagcgaacttaggaaggtcagtgagccagtggagatcggtatccaggtgacacccgacgaggacgaccatctgctctcccctactaaggggatttgccccaagcaggagaacattgcaggtccgtgtaggcccgctcagctacccgcggtagcacccatagccgcctcatcccaccctcattcatcagtgattacctccccgcttcgcgctcttggcgccctgcccccctgcctgcccctaccatgctgctcagctcgccccgtgtcgggcgatggtacccagggagagggacaaactgaggcaccattcggatgtcagtgccaactcagcggaaaagacgagccttcttcgtacatctgtacgacgtgcaaacagccttttaactccgcttggtttctgcttcagcacgcccagaacacacatggattccggatttacctggagcctggacccgccagttctagccttacccctcggcttacaatacctcccccactgggacctgaagccgtggctcagtcacccctcatgaatttccttggcgattcaaatccctttaatctgctgcgcatgacaggacctatcctacgggaccatcccggatttggggaaggccgcttgcctgggaccccgccactattttctcccccacccagacaccacctcgatcctcaccggctgtccgcagaggagatgggcttagtggcccagcatcctagtgccttcgatagagttatgcgccttaatcctatggctatcgattcacccgccatggacttcagtcgccgcttgcgcgagcttgccggtaacagctcaacacccccacccgtgagcccaggcagaggcaaccctatgcacagactattaaatccattccagccttcccctaagtcccctttcctgtctacacccccacttcccccgatgccaccagggggaaccccccctccacagcctcctgccaagtcaaagtcctgtgaattctgtggaaagacatttaagtttcaatccaatctgatcgtccacagacgctcacacacaggagagaaaccctacaaatgccagttgtgtgaccacgcttgcagtcaggcttctaaactcaaacgacacatgaagacccatatgcataaggccggatccttggcaggaagaagcgatgacggcctgtcggccgcctccagccctgagcctggcacctcagagcttgccggcgaggggttgaaggccgctgacggagactttagacaccatgagtcagatccttcacttggacacgaacccgaagaagaagatgaagaagaagaagaggaggaggaggagctgctcctggagaacgagtctcggcccgagagtagcttcagcatggattctgagctctcacgcaacagggaaaacggcgggggcggagtcccaggggtgcctggggctgggggcggagcagccaaagccctcgccgatgagaaagcattagtactgggcaaggtcatggaaaacgtgggactcggggctttaccacagtacggtgaactcctagcagataaacagaagcgcggagccttcctgaaacgtgctgccgggggaggcgacgcaggagacgacgacgatgccggaggttgcggtgacgctggagccggcggagcagtgaacgggcggggtggcggatttgctcctggcacggaaccctttcccggcctgttcccccggaagccggctccgttaccatcacccggcctcaattccgccgccaagagaatcaaagtggaaaaagatttggagctccctccagccgctctaataccgagcgagaacgtgtacagtcagtggctcgtgggatatgccgcttcgcgccactttatgaaagatcccttcctgggctttaccgatgcaagacaaagcccctttgctacctcttccgaacatagcagtgaaaacggatctctgcgtttcagtacacctccgggcgatctactggatggcgggttgagtggcaggagcggtactgcctccggcggatctactccccacctcggcgggccaggtcccggccggccttcctctaaggaaggcagacgatcggacacgtgtgagtactgtgggaaggtgttcaagaactgtagcaacttgacggtccatagacggtcccatacaggcgaacgcccttataagtgcgagctgtgcaactatgcctgtgctcaatcgtctaagcttacgcggcatatgaaaacccatgggcagatcggcaaagaggtgtaccggtgtgacatttgccagatgccgttttctgtttactctacattggagaaacacatgaagaaatggcatggtgagcacctcctgaccaatgatgttaaaatcgagcaggctgagaggtcatag

SEQ ID NO: 236773 - DNA, 2685 bp, Artificial Sequence
  derived and/or modified sequence
atgagtagaagaaagcagggaaacccgcagcacctgtctcagcgcgagctgattacccccgaggctgatcacgtggaagctgcaattctggaagaagatgagggactggaaatcgaggaacctagtggcttaggtctgatggtaggtggccctgacccagatctgctcacatgcggccagtgccagatgaacttccctttgggtgacatactggtgttcattgaacataagagaaagcagtgcggcggtagccttggagcatgctacgataaagcactggataaagacagcccacctcctagctccagatcagagctgcgcaaggtgtcagagcctgtcgaaatcggcatccaggtgaccccagacgaagacgaccacctactctccccaactaaaggcatctgcccaaagcaagaaaacatcgctggtccttgcagaccagcacagcttcctgcagttgccccaatcgcagcgagttcccacccccactcaagcgtcattaccagccctctgcgcgctctcggcgcactgccaccctgcctgccattgccatgctgctcagccagacccgtgtccggagacggaacgcagggcgaagggcaaaccgaagccccttttggttgccagtgccagctttccgggaaggatgaaccgagctcttatatctgcaccacctgtaagcagccttttaactcagcttggtttctgctacagcatgcacagaacacccacggctttcgcatctatctcgagccagggccagcctcgtcaagtctgactcctaggctcaccatcccccctcccttggggcctgaagccgtggcgcagagcccactcatgaatttcttgggggactcgaaccccttcaatctgctgcgtatgaccggtcccatcctgcgggaccaccccggattcggggagggaagactgccgggaacacccccactgttttcaccgcctcccagacatcacctggatcctcatcggttatctgcagaggaaatgggcctggtggcccagcacccgagcgcattcgacagagtcatgcggctgaacccaatggctatcgattcccccgcaatggatttctcacgcagactgagagagcttgcagggaatagttctactcccccacccgtgagtcctgggagagggaatccaatgcataggctgctgaatcccttccagccatctccgaaaagcccttttctgtcaaccccacccctcccacctatgccccctggcggaacccccccaccacagccacctgctaaatcaaagagttgtgagttctgtggcaagacgttcaaattccaatctaacctgattgtacatcgtcgaagccacaccggggagaagccttacaagtgtcagctgtgcgaccatgcgtgcagtcaggcaagcaaacttaagaggcatatgaaaactcatatgcacaaggcgggaagcctggccggacgaagcgacgacgggttgagtgccgcttcaagccccgagcccggtaccagtgaactggccggtgagggcctgaaagccgctgatggtgactttcgacaccacgaaagtgatccctccctcggacacgagcccgaagaggaggatgaggaggaagaggaagaagaagaagaactcttgctggagaatgaaagccggccagaatcatctttttctatggactctgaactgagtcgcaatagggaaaacggcggaggtggggtgcccggagtccccggagctgggggaggtgctgccaaagcactcgcagacgagaaggccctcgtcctgggtaaagtgatggagaatgtagggctcggagcccttcctcaatacggagaactgctcgcggataagcaaaagcggggagcttttcttaaacgggcagccggaggaggtgacgctggtgacgatgacgatgctggcggatgcggagacgcgggagcaggtggggctgtcaacgggcgaggtggcggattcgcgccaggcaccgagccctttcctggattgttcccgcgaaagcccgcaccgcttccctccccaggcctgaattccgccgctaagaggattaaggtcgaaaaagaccttgaactgccacccgctgcccttatcccttccgaaaacgtgtattctcagtggctggtgggatacgccgcttcgcgccacttcatgaaagacccatttctcggctttaccgacgccagacagtcaccttttgccacttctagtgaacattccagcgagaacggatcactgcggttttctacaccaccaggggacctgctcgacggaggtctgagcggcaggtcgggcacggcttccggcggatctacacctcacttggggggaccaggtcccggtaggccttcatctaaagaggggcgtcgttccgacacctgcgagtattgtggaaaggtgttcaaaaattgttccaatctgaccgttcatagaaggtctcacaccggcgagcggccttacaaatgcgaactgtgcaactacgcgtgcgcccagtccagtaaactcaccagacatatgaagacgcacggccagatcggtaaagaagtctatcgatgtgacatatgccaaatgcccttctctgtgtattccacccttgagaagcacatgaaaaaatggcatggtgagcatctgctgaccaacgatgtgaaaatcgagcaggcagaaagaagctag

SEQ ID NO: 236774 - DNA, 7559 bp, Artificial Sequence
  derived and/or modified sequence
tgccggggcaatgtcccgccgcaaacagggcaacccgcagcacttgtcccagagggagctcatcaccccagaggctgaccatgtggaggccgccatcctcgaagaagacgagggtctggagatagaggagccaagtggcctggggctgatggtgggtggccccgaccctgacctgctcacctgtggccagtgtcaaatgaacttccccttgggggacatcctggtttttatagagcacaaaaggaagcagtgtggcggcagcttgggtgcctgctatgacaaggccctggacaaggacagcccgccaccctcctcacgctccgagctcaggaaagtgtccgagccggtggagatcgggatccaagtcacccccgacgaagatgaccacctgctctcacccacgaaaggcatctgtcccaagcaggagaacattgcagggccgtgcaggcctgcccagctgccagcggtggcccccatagctgcctcctcccaccctcactcatccgtgatcacttcacctctgcgtgccctgggcgctctcccgccctgcctccccctgccgtgctgcagcgcgcgcccggtctcgggtgacgggactcagggtgagggtcagacggaggctccctttggatgccagtgtcagttgtcaggtaaagatgagccttccagctacatttgcacaacatgcaagcagcccttcaacagcgcgtggttcctgctgcagcacgcgcagaacacgcacggcttccgcatctacctggagcccgggccggccagcagctcgctcacgccgcggctcaccatcccgccgccgctcgggccggaggccgtggcgcagtccccgctcatgaatttcctgggcgacagcaaccccttcaacctgctgcgcatgacgggccccatcctgcgggaccacccgggcttcggcgagggccgcctgccgggcacgccgcctctcttcagtcccccgccgcgccaccacctggacccgcaccgcctcagtgccgaggagatggggctcgtcgcccagcaccccagtgccttcgaccgagtcatgcgcctgaaccccatggccatcgactcgcccgccatggacttctcgcggcggctccgcgagctggcgggcaacagctccacgccgccgcccgtgtccccgggccgcggcaaccctatgcaccggctcctgaaccccttccagcccagccccaagtccccgttcctgagcacgccgccgctgccgcccatgccccctggcggcacgccgcccccgcagccgccagccaagagcaagtcgtgcgagttctgcggcaagaccttcaagttccagagcaatctcatcgtgcaccggcgcagtcacacgggcgagaagccctacaagtgccagctgtgcgaccacgcgtgctcgcaggccagcaagctcaagcgccacatgaagacgcacatgcacaaggccggctcgctggccggccgctccgacgacgggctctcggccgccagctcccccgagcccggcaccagcgagctggcgggcgagggcctcaaggcggccgacggtgacttccgccaccacgagagcgacccgtcgctgggccacgagccggaggaggaggacgaggaggaggaggaggaggaggaggagctgctactggagaacgagagccggcccgagtcgagcttcagcatggactcggagctgagccgcaaccgcgagaacggcggtggtggggtgcccggggtcccgggcgcggggggcggcgcggccaaggcgctggctgacgagaaggcgctggtgctgggcaaggtcatggagaacgtgggcctaggcgcactgccgcagtacggcgagctcctggccgacaagcagaagcgcggcgccttcctgaagcgtgcggcgggcggcggggacgcgggcgacgacgacgacgcgggcggctgcggggacgcgggcgcgggcggcgcggtcaacgggcgcgggggcggcttcgcgccaggcaccgagcccttccccgggctcttcccgcgcaagcccgcgccgctgcccagccccgggctcaacagcgccgccaagcgcatcaaggtggagaaggacctggagctgccgcccgccgcgctcatcccgtccgagaacgtgtactcgcagtggctggtgggctacgcggcgtcgcggcacttcatgaaggaccccttcctgggcttcacggacgcacgacagtcgcccttcgccacgtcgtccgagcactcgtccgagaacggcagcctgcgcttctccacgccgcccggggacctgctggacggcggcctctcgggccgcagcggcacggccagcggaggcagcaccccgcacctgggcggcccgggccccgggcggcccagctccaaggagggccgccgcagcgacacgtgcgagtactgcggcaaggtgttcaagaactgcagcaacttgacggtgcaccggcggagccacaccggcgagcggccttacaagtgcgagctgtgcaactacgcgtgcgcgcagagcagcaagctcacgcgccacatgaagacgcacgggcagatcggcaaggaggtgtaccgctgcgacatctgccagatgcccttcagcgtctacagcaccctggagaaacacatgaaaaagtggcacggcgagcacttgctgactaacgacgtcaaaatcgagcaggccgagaggagctaagcgcgcgggccccggcgccccgcacctgtacagtggaaccgttgccaaccgagagaatgctgacctgacttgcctccgtgtcaccgccaccccgcaccccgcgtgtccccggggcccaggggaggcggcactccaacctaacctgtgtctgcgaagtcctatggaaacccgagggttgattaaggcagtacaaattgtggagccttttaactgtgcaataatttctgtatttattgggttttgtaatttttttggcatgtgcaggtactttttattattattttttctgtttgaattcctttaagagattttgttgggtatccatcccttctttgttttttttttaacccggtagtagcctgagcaatgactcgcaagcaatgttagaggggaagcatatcttttaaattataatttggggggaggggtggtgctgcttttttgaaatttaagctaagcatgtgtaatttcttgtgaagaagccaacactcaaatgacttttaaagttgtttactttttcattccttccttttttttgtcctgaaataaaaagtggcatgcagttttttttttaattattttttaattttttttttggtttttgtttttggggtggggggtgtggatgtacagcggataacaatctttcaagtcgtagcactttgtttcagaactggaatggagatgtagcactcatgtcgtcccgagtcaagcggccttttctgtgttgatttcggctttcatattacataagggaaaccttgagtggtggtgctgggggaggcaccccacagactcagcgccgccagagatagggtttttggagggctcctctgggaaatggcccgacagcattctgaggttgtgcatgaccagcagatactatcctgttggtgtgccctggggtgccatggctgctattcgctgtagattaggctacataaaatgggctgagggtacctttttggggagatggggtggcctgcagtgacacagaaaggaagaaactagcggtgttcttttaggcgttttctggcttgacggcttctctctttttttaaatcacccccaccacataaatctcaaatcctatgttgctacaaggggtcatccatcatttcccaagcagacgaatgccctaattaattgaagttagtgttctctcatttaatgcacactgatgatattgtagggatgggtggggtggggatcttgcaaatttctattctcttttactgaaaaagcaggggatgagttccatcagaaggtgcccagcgctacttcccaggtttttattttttttttcctatctcattaggttggaaggtactaaatattgaactgttaagattagacatttgaattctgttgacccgcactttaaagcttttgtttgcatttaaattaaatggcttctaaacaagaaattgcagcatattcttctctttggcccagaggtgggttaaactgtaagggacagctgagattgagtgtcagtattgctaagcgtggcattcacaatactggcactataaagaacaaaataaaataataatttataggacagtttttctactgccattcaatttgatgtgagtgccttgaaaactgatcttcctatttgagtctcttgagacaaatgcaaaactttttttttgaaatgaaaagactttttaaaaaagtaaaacaagaaaagtacattctttagaaactaacaaagccacatttactttaagtaaaaaaaaaaaaaattctggttgaagatagaggatatgaaatgccataagacccaatcaaatgaagaaataaacccagcacaaccttggacatccattagctgaattatcctcagccccttttgtttttgggacaacgctgcttagatatggagtggaggtgatttactgctgaattaaaactcaagtgacacaagttacaagttgatatcgttgaatgaaaagcaaaacaaaaacaattcaggaacaacggctaattttttctaaagttaaatttagtgcactctgtcttaaaaatacgtttacagtattgggtacatacaagggtaaaaaaaaaattgtgtgtatgtgtgttggagcgatctttttttttcaaagtttgcttaataggttatacaaaaatgccacagtggccgcgtgtatattgttttcttttggtgacggggttttagtatatattatatatattaaaatttcttgattactgtaaaagtggaccagtatttgtaataatcgagaatgcctgggcattttacaaaacaagaaaaaaaatacccttttcttttccttgaaaatgttgcagtaaaatttaaatggtgggtctataaatttgttcttgttacagtaactgtaaagtcggagttttagtaaatttttttctgccttgggtgttgaatttttatttcaaaaaaaatgtatagaaacttgtatttggggattcaaaggggattgctacaccatgtagaaaaagtatgtagaaaaaaagtgcttaatattgttattgctttgcagaaaaaaaaaaaatcacatttctgacctgtacttatttttctcttcccgcctccctctggaatggatatattggttggttcatatgatgtaggcacttgctgtatttttactggagctcgtaattttttaactgtaagcttgtccttttaaagggatttaatgtacctttttgttagtgaatttggaaataaaaagaaaaaaaaaacaaaaacaaacaggctgccataatatatttttttaatttggcaggataaaatattgcaaaaaaaacacatttgtatgttaagtcctattgtacaggagaaaaagggttgtttgacaacctttgagaaaaagaaacaaaaggaagtagttaaatgctttggttcacaaatcatttagttgtatatattttttgtcggaattggcctacacagagaaccgttcgtgttgggcttctctctgaacgccccgaaccttgcatcaaggctccttggtgtggccacagcagaccagatgggaaattatttgtgttgagtggaaaaaaatcagtttttgtaaagatgtcagtaacattccacatcgtcctccctttctctaagaggccatctctaagatgtcagatgtagaggagagagagcgagagaacatcttccttctctaccatcactcctgtggcggtcaccaccaccacctctcccgcccttaccagcagaaagcaatgcaaactgagctgctttagtccttgagaaattgtgaaacaaacacaaatatcataaaaggagctggtgattcagctgggtccaggtgaagtgacctgctgttgagaccggtacaaattggatttcaggaaggagactccatcacagccaggacctttcgtgccatggagagtgttggcctcttgtctttcttccctgctttgctgctttgctctctgaaacctacattccgtcagtttccgaatgcgagggcctgggatgaatttggtgcctttccatatctcgttctctctccttcccctgcgtttcctctccatccttcatcctccattggtcctttttttttctttcattttttatttaatttcttttcttcctgtctgttcctcccctaatcctctattttatttttattttttgtaaagccaagtagctttaagataaagtggtggtcttttggatgagggaataatgcatttttaaataaaataccaatatcaggaagccattttttatttcaggaaatgtaagaaaccattatttcaggttatgaaagtataaccaagcatccttttgggcaattccttaccaaatgcagaagcttttctgttcgatgcactctttcctccttgccacttacctttgcaaagttaaaaaaaaggggggagggaatgggagagaaagctgagatttcagtttcctactgcagtttcctacctgcagatccaggggctgctgttgcctttggatgccccactgaggtcctagagtgcctccagggtggtcttcctgtagtcataacagctagccagtgctcaccagcttaccagattgccaggactaagccatcccaaagcacaagcattgtgtgtctctgtgactgcagagaagagagaattttgcttctgttttgtgtttaaaaaaccaacacggaagcagatgatcccgagagagaggcctctagcatgggtgacccagccgacctcaggccggtttccgcactgccacaactttgttcaaagttgcccccaattggaacctgccacttggcattagagggtctttcatggggagagaaggagactgaattactctaagcaaaatgtgaaaagtaaggaaatcagcctttcatcccggtcctaagtaaccgtcagccgaaggtctcgtggaacacaggcaaacccgtgattttggtgctccttgtaactcagccctgcaaagcaaagtcccattgatttaagttgtttgcatttgtactggcaaggcaaaatatttttattaccttttctattacttattgtatgagcttttgttgtttacttggaggttttgtcttttactacaagtttggaactatttattattgcttggtatttgtgctctgtttaagaaacaggcacttttttttattatggataaaatgttgagatgacaggaggtcatttcaatatggcttagtaaaatatttattgttcctttattctctgtacaagattttgggcctctttttttccttaatgtcacaatgttgagttcagcatgtgtctgccatttcatttgtacgcttgttcaaaaccaagtttgttctggtttcaagttataaaaataaattggacatttaacttgatctccaaa

SEQ ID NO: 236775 - DNA, 2685 bp, Artificial Sequence
  derived and/or modified sequence
atgagcagaagaaagcagggcaacccccagcacctgagccagagagagctgatcacccccgaggccgaccacgtggaggccgccatcctggaggaggacgagggcctggagatcgaggagcccagcggcctgggcctgatggtgggcggccccgaccccgacctgctgacctgcggccagtgccagatgaacttccccctgggcgacatcctggtgttcatcgagcacaagagaaagcagtgcggcggcagcctgggcgcctgctacgacaaggccctggacaaggacagccccccccccagcagcagaagcgagctgagaaaggtgagcgagcccgtggagatcggcatccaggtgacccccgacgaggacgaccacctgctgagccccaccaagggcatctgccccaagcaggagaacatcgccggcccctgcagacccgcccagctgcccgccgtggcccccatcgccgccagcagccacccccacagcagcgtgatcaccagccccctgagagccctgggcgccctgcccccctgcctgcccctgccctgctgcagcgccagacccgtgagcggcgacggcacccagggcgagggccagaccgaggcccccttcggctgccagtgccagctgagcggcaaggacgagcccagcagctacatctgcaccacctgcaagcagcccttcaacagcgcctggttcctgctgcagcacgcccagaacacccacggcttcagaatctacctggagcccggccccgccagcagcagcctgacccccagactgaccatccccccccccctgggccccgaggccgtggcccagagccccctgatgaacttcctgggcgacagcaaccccttcaacctgctgagaatgaccggccccatcctgagagaccaccccggcttcggcgagggcagactgcccggcaccccccccctgttcagccccccccccagacaccacctggacccccacagactgagcgccgaggagatgggcctggtggcccagcaccccagcgccttcgacagagtgatgagactgaaccccatggccatcgacagccccgccatggacttcagcagaagactgagagagctggccggcaacagcagcacccccccccccgtgagccccggcagaggcaaccccatgcacagactgctgaaccccttccagcccagccccaagagccccttcctgagcaccccccccctgccccccatgccccccggcggcaccccccccccccagccccccgccaagagcaagagctgcgagttctgcggcaagaccttcaagttccagagcaacctgatcgtgcacagaagaagccacaccggcgagaagccctacaagtgccagctgtgcgaccacgcctgcagccaggccagcaagctgaagagacacatgaagacccacatgcacaaggccggcagcctggccggcagaagcgacgacggcctgagcgccgccagcagccccgagcccggcaccagcgagctggccggcgagggcctgaaggccgccgacggcgacttcagacaccacgagagcgaccccagcctgggccacgagcccgaggaggaggacgaggaggaggaggaggaggaggaggagctgctgctggagaacgagagcagacccgagagcagcttcagcatggacagcgagctgagcagaaacagagagaacggcggcggcggcgtgcccggcgtgcccggcgccggcggcggcgccgccaaggccctggccgacgagaaggccctggtgctgggcaaggtgatggagaacgtgggcctgggcgccctgccccagtacggcgagctgctggccgacaagcagaagagaggcgccttcctgaagagagccgccggcggcggcgacgccggcgacgacgacgacgccggcggctgcggcgacgccggcgccggcggcgccgtgaacggcagaggcggcggcttcgcccccggcaccgagcccttccccggcctgttccccagaaagcccgcccccctgcccagccccggcctgaacagcgccgccaagagaatcaaggtggagaaggacctggagctgccccccgccgccctgatccccagcgagaacgtgtacagccagtggctggtgggctacgccgccagcagacacttcatgaaggaccccttcctgggcttcaccgacgccagacagagccccttcgccaccagcagcgagcacagcagcgagaacggcagcctgagattcagcaccccccccggcgacctgctggacggcggcctgagcggcagaagcggcaccgccagcggcggcagcaccccccacctgggcggccccggccccggcagacccagcagcaaggagggcagaagaagcgacacctgcgagtactgcggcaaggtgttcaagaactgcagcaacctgaccgtgcacagaagaagccacaccggcgagagaccctacaagtgcgagctgtgcaactacgcctgcgcccagagcagcaagctgaccagacacatgaagacccacggccagatcggcaaggaggtgtacagatgcgacatctgccagatgcccttcagcgtgtacagcaccctggagaagcacatgaagaagtggcacggcgagcacctgctgaccaacgacgtgaagatcgagcaggccgagagaagctag

SEQ ID NO: 236776 - protein, 369 aa, Artificial Sequence
  derived and/or modified sequence
MSSRGGKKKSTKTSRSAKAGVIFPVGRMLRYIKKGHPKYRIGVGAPVYMAAVLEYLTAEILELAGNAARDNKKGRVTPRHILLAVANDEELNQLLKGVTIASGGVLPNIHPELLAKKRGSKGKLEAIITPPPAKKAKSPSQKKPVSKKAGGKKGARKSKKKQGEVSKAASADSTTEGTPADGFTVLSTKSLFLGQKLQVVQADIASIDSDAVVHPTNTDFYIGGEVGNTLEKKGGKEFVEAVLELRKKNGPLEVAGAAVSAGHGLPAKFVIHCNSPVWGADKCEELLEKTVKNCLALADDKKLKSIAFPSIGSGRNGFPKQTAAQLILKAISSYFVSTMSSSIKTVYFVLFDSESIGIYVQEMAKLDAN

SEQ ID NO: 236777 - DNA, 1110 bp, Artificial Sequence
  derived and/or modified sequence
atgagctctaggggagggaagaagaaatcaacaaaaacaagcagaagtgcaaaagctggcgtgatatttccagtcggaaggatgctgcgttacataaaaaaaggacatccaaaataccgcattggggtaggcgcccccgtgtatatggctgccgtactagagtacttaaccgctgagatcctagaacttgccggtaacgcagctcgcgataataaaaaggggcgggtcacaccacgccatatcctgctcgccgtagccaacgatgaggagctgaatcaactccttaagggcgtaactattgcctctggtggggtgctccccaacattcacccagagctcttggcaaaaaaacgagggtccaaaggcaaacttgaagcaatcatcacaccccctccagccaagaaagctaagtcaccctcccagaaaaaacctgtctccaaaaaggccggcggaaaaaagggtgcgcgaaaatcgaagaaaaagcaaggcgaagtgtccaaggccgcatccgcagactccacgaccgaggggacacccgctgacggattcacagttctgagtaccaaaagcctttttttggggcagaagctgcaggtggtccaggccgacatagcttccatcgatagcgatgccgtcgtccacccaacgaacacagatttctatatcggcggggaggtgggaaacacgctagagaagaagggcggcaaagaatttgttgaggccgtgctcgagctcagaaaaaagaatggccctctcgaggttgctggggctgcagtttccgcaggccatggactccctgctaaatttgtgattcattgcaactcccctgtttggggagctgacaagtgtgaagaactactggaaaagacagtgaaaaattgtctcgccttagccgatgataagaagcttaaatcaattgcatttccaagcattggaagcgggcgaaatggatttccaaaacagacggctgcccagcttatccttaaagccatatcctcgtactttgtgtctacaatgtcaagctctattaagacagtatactttgtcctattcgacagcgaatctatagggatctacgtccaggagatggcaaaactcgacgctaactag

SEQ ID NO: 236778 - DNA, 1110 bp, Artificial Sequence
  derived and/or modified sequence
atgagcagcagaggaggcaagaagaagagcaccaagaccagccgcagcgccaaggccggggtcatcttccctgtgggccgcatgctgcgctacatcaagaagggccaccccaagtacagaattggagtgggcgcccctgtgtacatggctgctgtgctggagtacctgacagctgagatcctggagctggccggaaatgctgcccgggacaacaagaagggccgggtgacccccaggcacatcctgctggccgtggccaatgatgaggagctgaaccagctgctgaagggcgtgaccatcgccagcggcggcgtgctgcccaacatccaccctgagctgctggccaagaagaggggcagcaagggcaagctggaggccatcatcaccccacctccagccaagaaggccaagagccccagccagaagaagcctgtgtccaagaaggccggcggcaagaagggggccaggaagagcaagaagaagcagggcgaggtgtccaaggccgccagcgctgacagcaccacagagggcaccccagcagatggcttcaccgtgctgagcaccaagagcctcttcctgggccagaagctgcaggtggtgcaggccgacatcgccagcattgacagtgatgctgtggtgcaccccaccaacacagacttctacatcggcggggaggtgggcaacaccctggagaagaagggcggcaaggagtttgtggaggccgtgctggagctgaggaagaagaatggccccctggaggtggccggggctgctgtgtctgctggccacggcctgcctgccaagtttgtgatccactgcaacagccctgtgtggggcgctgacaagtgtgaggagctgctggagaagacagtgaagaactgcctggccctggctgatgacaagaagctgaagagcatcgccttccccagcatcggcagcggcagaaatggcttccccaagcagacagctgcccagctgatcctgaaggccatcagcagctactttgtgtccaccatgagcagcagcatcaagacagtgtactttgtgctgtttgattctgagagcatcggcatctacgtgcaggagatggccaagctggatgccaactag

SEQ ID NO: 236779 - DNA, 1110 bp, Artificial Sequence
  derived and/or modified sequence
atgagcagccggggcggcaagaagaagagcaccaagaccagccggtcagccaaggcgggcgtaatctttcctgtgggccgaatgctgcgctatattaaaaagggccaccctaaatatcgcattggggttggggcccccgtctacatggctgcagtgctggaatatctaacagctgagatactcgaattagcaggcaacgctgctcgcgacaacaaaaaaggacgcgtgactccccgtcacattctgttggcagtcgcaaacgatgaagagttaaaccagttgttaaaaggtgtgacaatcgcatccggcggggttctacctaatattcaccccgagctgctggctaagaagaggggctccaaggggaagttggaagccattataactccacccccggcaaaaaaggcgaaaagccccagccagaagaagcccgtttctaagaaagctggagggaaaaagggagctaggaagtcaaagaagaagcagggagaggtcagtaaggcggcatcggctgatagtacaaccgagggaacaccagctgatggttttaccgttctgagtaccaagagtctctttctgggacagaagttgcaagttgttcaggcagatatcgccagcattgattcagatgcagtcgtgcatcccacaaacaccgatttttacattgggggcgaggtgggcaatactttagaaaagaagggcgggaaggagtttgtcgaggcagtactcgagctacgcaaaaaaaacggcccgctcgaagtagcaggggctgctgtgtctgctggccacggacttcctgcaaaatttgtgatccactgcaactctcctgtctggggcgccgataaatgtgaggagctgctcgagaaaacggttaagaattgtctggccctcgctgacgataagaagctaaagtctattgcttttcccagcatcggaagcggccgtaacggcttccctaaacagaccgcagctcagctcatcctcaaagccatcagttcctacttcgtgtcaaccatgagctcgagcattaaaacggtgtacttcgttctctttgatagcgagtccatcggtatttacgtgcaggaaatggccaaactcgatgcgaattag

SEQ ID NO: 236780 - DNA, 1110 bp, Artificial Sequence
  derived and/or modified sequence
atgtcctctcgcggaggtaaaaagaagtccaccaaaacctctcgatcagctaaagccggagtcatttttcccgtgggcaggatgctgaggtacataaaaaagggccatcctaaataccggattggcgtgggggcacctgtttacatggctgctgtcctagaatatcttactgccgagatcctggaactggccggaaacgctgcacgggataataaaaagggtcgggttacacctcgtcacattcttctggccgtggctaatgatgaggagctgaaccaacttttgaagggcgtgaccatcgcttcaggaggtgtcttgcccaacattcaccccgagctattggcaaagaaacgagggagtaaaggaaaacttgaggccatcattacccccccacccgcaaagaaagcaaagagcccttcccagaagaagcccgtgtccaagaaggcgggagggaagaaaggtgcacgcaagagcaaaaagaaacagggcgaagtgtcaaaagcggcatccgctgacagtacgacagagggcactcctgctgacggattcacagtattgagcaccaagagcctctttctgggccaaaagttacaagtcgtgcaggcagacattgcgtccatcgactccgatgctgtggtccatccaaccaacacagatttctacattggcggtgaggttgggaacacattagagaagaaaggtgggaaggagtttgtagaggccgttctggagctgcggaagaaaaacgggcctctggaagttgctggcgctgcagtctccgctggacatggactgcccgcaaagttcgtgatccactgcaattcccccgtttggggggctgacaaatgtgaagaattactggaaaagacggtgaaaaactgtttagcacttgccgacgacaagaagcttaaaagcattgccttcccctcgatcggttcagggagaaacgggttcccaaagcagaccgccgcacaattgattctgaaggcgatcagcagctactttgtttctaccatgtccagctcaattaaaacggtctactttgtcttgttcgatagcgagtcaatcgggatttatgtgcaggaaatggctaaactggacgcgaattag

SEQ ID NO: 236781 - DNA, 1110 bp, Artificial Sequence
  derived and/or modified sequence
atgagcagcagaggcggcaagaagaagagcaccaagaccagcagaagcgccaaggccggcgtgatcttccccgtgggcagaatgctgagatacatcaagaagggccaccccaagtacagaatcggcgtgggcgcccccgtgtacatggccgccgtgctggagtacctgaccgccgagatcctggagctggccggcaacgccgccagagacaacaagaagggcagagtgacccccagacacatcctgctggccgtggccaacgacgaggagctgaaccagctgctgaagggcgtgaccatcgccagcggcggcgtgctgcccaacatccaccccgagctgctggccaagaagagaggcagcaagggcaagctggaggccatcatcacccccccccccgccaagaaggccaagagccccagccagaagaagcccgtgagcaagaaggccggcggcaagaagggcgccagaaagagcaagaagaagcagggcgaggtgagcaaggccgccagcgccgacagcaccaccgagggcacccccgccgacggcttcaccgtgctgagcaccaagagcctgttcctgggccagaagctgcaggtggtgcaggccgacatcgccagcatcgacagcgacgccgtggtgcaccccaccaacaccgacttctacatcggcggcgaggtgggcaacaccctggagaagaagggcggcaaggagttcgtggaggccgtgctggagctgagaaagaagaacggccccctggaggtggccggcgccgccgtgagcgccggccacggcctgcccgccaagttcgtgatccactgcaacagccccgtgtggggcgccgacaagtgcgaggagctgctggagaagaccgtgaagaactgcctggccctggccgacgacaagaagctgaagagcatcgccttccccagcatcggcagcggcagaaacggcttccccaagcagaccgccgcccagctgatcctgaaggccatcagcagctacttcgtgagcaccatgagcagcagcatcaagaccgtgtacttcgtgctgttcgacagcgagagcatcggcatctacgtgcaggagatggccaagctggacgccaactag

SEQ ID NO: 236782 - DNA, 1859 bp, Artificial Sequence
  derived and/or modified sequence
gccgggcggagggggagagcgcgggccgcgcgggcgggaagcgaagaggcgggcgggccagcgaggagcgcggagagaaaaggcgcgagcggccaggagggctcaggccgagacaccttgcagctgccgccgccgccaccgagccgccgctgtgctcactgatccgcctccagggccaccgccatgtcgagccgcggtgggaagaagaagtccaccaagacgtccaggtctgccaaagcaggagtcatctttcccgtggggcggatgctgcggtacatcaagaaaggccaccccaagtacaggattggagtgggggcacccgtgtacatggccgccgtcctggaatacctgacagcggagattctggagctggctggcaatgcagcgagagacaacaagaagggacgggtcacaccccggcacatcctgctggctgtggccaatgatgaagagctgaatcagctgctaaaaggagtcaccatagccagtgggggtgtgttacccaacatccaccccgagttgctagcgaagaagcggggatccaaaggaaagttggaagccatcatcacaccacccccagccaaaaaggccaagtctccatcccagaagaagcctgtatctaaaaaagcaggaggcaagaaaggggcccggaaatccaagaagaagcagggtgaagtcagtaaggcagccagcgccgacagcacaaccgagggcacacctgccgacggcttcacagtcctctccaccaagagcctcttccttggccagaagttgcaagttgtacaggctgacattgcctcgatcgacagtgatgctgtcgttcacccgacaaacactgacttctacatcggtggtgaagtaggaaacacgctggagaagaaaggtggcaaggagtttgtggaagctgtcctggaactccggaaaaagaacgggcccttggaagtagctggagctgctgtcagcgcaggccatggcctgcctgccaagtttgtgatccactgtaatagtccagtttggggtgcagacaagtgtgaagaacttctggaaaagacagtgaaaaactgcttggccctggctgatgataagaagctgaaatccattgcatttccatccatcggcagcggcaggaacggttttccaaagcagacagcagctcagctgattctgaaggccatctccagttacttcgtgtctacaatgtcctcttccatcaaaacggtgtacttcgtgctttttgacagcgagagtataggcatctatgtgcaggaaatggccaagctggacgccaactaggctgagcaatgacagaaccagctgcaccatgtaccccaccttcagtttaaaagaaaaaaaaaatccccttcactcctactgggaggtgggacccctttcattttcagttttgctcatctagggaaaataaggctttggtttccagtttaattgtttttgaccttctaaaatgtttttatgttagcactgatagttggcattactgttgttaagcactgtgttccagaccgtgtctgacttagtgtaacctaggagattttatagttttattttaatgaaaccctgattgacgcacagcagtggggagaacagcgtcttttacctgtcaccgaagccaggaagccccgtttgtaagcgtgtgttgtggtgctttattgtacatcctccagtggcgttctttttactctaatgttcttttggtttcccccctcagaagaatcatgaatttgcaacagacctaatttttggttactttttgtcttattgatggatttgaaaatgaaagatttaataaggcaaagcagaatctgttgtccttaattatatttgcaatttggaatttgtgt

SEQ ID NO: 236783 - protein, 372 aa, Artificial Sequence
  derived and/or modified sequence
MSSRGGKKKSTKTSRSAKAGVIFPVGRMLRYIKKGHPKYRIGVGAPVYMAAVLEYLTAEILELAGNAARDNKKGRVTPRHILLAVANDEELNQLLKGVTIASGGVLPNIHPELLAKKRGSKGKLEAIITPPPAKKAKSPSQKKPVSKKAGGKKGARKSKKKQGEVSKAASADSTTEGTPADGFTVLSTKSLFLGQKLNLIHSEISNLAGFEVEAIINPTNADIDLKDDLGNTLEKKGGKEFVEAVLELRKKNGPLEVAGAAVSAGHGLPAKFVIHCNSPVWGADKCEELLEKTVKNCLALADDKKLKSIAFPSIGSGRNGFPKQTAAQLILKAISSYFVSTMSSSIKTVYFVLFDSESIGIYVQEMAKLDAN

SEQ ID NO: 236784 - DNA, 1119 bp, Artificial Sequence
  derived and/or modified sequence
atgtccagcagagggggcaagaaaaagtccaccaagacatcgaggagtgctaaggccggggtgatttttcccgttggacgcatgttaagatatatcaaaaaaggtcaccctaagtaccgcataggcgtgggcgcaccggtgtatatggccgccgtcctcgaatatctcacagcggagattctcgaacttgctggcaacgcggcaagagataacaaaaaagggcgcgttactcctcgccatatcctgttagccgttgcgaacgatgaagagctcaatcagctcctgaaaggcgttaccattgccagtggaggcgttttaccgaacatccaccctgagctgcttgctaaaaaacgagggtcgaagggcaaattagaggccatcatcacaccccctccggcaaagaaggcaaaaagccccagtcaaaagaagcccgtgtcaaaaaaggccggtggaaagaaaggagctagaaaatcgaaaaagaagcagggcgaagtctcaaaggccgcctccgcggacagtactacggagggcacacccgccgacggctttacagtgctatccacaaagagtctctttctcgggcaaaagctcaacctcattcactctgaaattagcaatttagcgggcttcgaggtagaagccatcataaatcctaccaacgccgatatagatctgaaagacgacttggggaacacactggagaagaagggagggaaagagttcgtggaagccgtccttgaactgaggaagaagaatggacctctggaggtagcgggtgccgccgtgagtgcaggtcatggactgcctgccaagtttgtgattcactgcaactcacctgtctggggagcggacaagtgcgaagagcttctggaaaagactgttaagaactgtctggctttggccgatgacaagaagctgaagtccatcgcgttccctagtatcgggagcggcagaaatggcttccccaaacagacagccgcacagctgatactgaaagctattagcagctacttcgtgtcgaccatgtctagcagcattaagaccgtttactttgtactgttcgatagtgagtcgatcggcatttatgttcaggagatggcgaagctcgacgcaaattag

SEQ ID NO: 236785 - DNA, 1119 bp, Artificial Sequence
  derived and/or modified sequence
atgtcatctcgtgggggcaagaagaagtccacgaagacctctcgctccgcgaaagcaggggtaatctttcctgtcgggaggatgctgcggtacattaaaaagggccaccctaaataccgcataggagtgggagcccctgtttatatggccgctgtcctggagtatcttacggccgaaatcctcgagctcgcgggaaatgccgctcgtgacaacaagaagggaagggtgacaccgagacatattcttttggcagtggccaatgacgaagagctgaatcaactgctgaaaggcgtgactatagcctctggaggcgttctaccaaatattcaccctgagttgctggccaaaaagcggggcagcaagggtaaactcgaggccatcattactcctcctcctgctaaaaaggccaagtctcccagccagaaaaagccagtcagcaaaaaagccggcggcaagaaaggcgcgaggaaaagtaaaaaaaagcagggtgaagtcagtaaggctgcatccgctgactccactacggagggtaccccggctgacggctttaccgtcctctccacaaagtctttgttcctagggcagaagttgaatctgatccactctgagatctccaatctagccggattcgaggtcgaggcaattattaatcccaccaacgcagatatcgacctgaaggacgatttagggaacacactcgagaagaagggcggaaaggaattcgtagaggcggtgctagagctcagaaagaagaatggaccgcttgaggtggccggcgccgctgtaagtgctggacacggattgcccgccaagttcgtgatccactgcaactctcctgtgtggggagctgataaatgtgaggagttgcttgaaaaaactgtgaagaactgcctagccttggccgacgacaagaagctcaagagcatcgcctttccaagcattgggagcggacgcaacgggtttcctaaacaaacagcagctcagttaatcttaaaggcaatttcatcttacttcgtttcgaccatgtcttctagtattaagactgtatatttcgtgctctttgactctgaatctatcgggatttacgtccaggagatggctaaactagacgcaaactag

SEQ ID NO: 236786 - DNA, 1119 bp, Artificial Sequence
  derived and/or modified sequence
atgagcagcagaggaggcaagaagaagagcaccaagaccagccgcagcgccaaggccggggtcatcttccctgtgggccgcatgctgcgctacatcaagaagggccaccccaagtacagaattggagtgggcgcccctgtgtacatggctgctgtgctggagtacctgacagctgagatcctggagctggccggaaatgctgcccgggacaacaagaagggccgggtgacccccaggcacatcctgctggccgtggccaatgatgaggagctgaaccagctgctgaagggcgtgaccatcgccagcggcggcgtgctgcccaacatccaccctgagctgctggccaagaagaggggcagcaagggcaagctggaggccatcatcaccccacctccagccaagaaggccaagagccccagccagaagaagcctgtgtccaagaaggccggcggcaagaagggggccaggaagagcaagaagaagcagggcgaggtgtccaaggccgccagcgctgacagcaccacagagggcaccccagcagatggcttcaccgtgctgagcaccaagagcctcttcctgggccagaagctgaacctgatccacagcgagatcagcaacctggccggctttgaggtggaggccatcatcaaccccaccaatgctgacatcgacctgaaggatgacctgggcaacaccctggagaagaagggcggcaaggagtttgtggaggccgtgctggagctgaggaagaagaatggccccctggaggtggccggggctgctgtgtctgctggccacggcctgcctgccaagtttgtgatccactgcaacagccctgtgtggggcgctgacaagtgtgaggagctgctggagaagacagtgaagaactgcctggccctggctgatgacaagaagctgaagagcatcgccttccccagcatcggcagcggcagaaatggcttccccaagcagacagctgcccagctgatcctgaaggccatcagcagctactttgtgtccaccatgagcagcagcatcaagacagtgtactttgtgctgtttgacagcgagagcatcggcatctacgtgcaggagatggccaagctggatgccaactag

SEQ ID NO: 236787 - DNA, 1119 bp, Artificial Sequence
  derived and/or modified sequence
atgagcagccggggcggcaagaagaagagcaccaagaccagccggtcagctaaggcaggtgtaatcttcccagtcgggcgcatgctgcgctacattaaaaagggccaccctaaataccgaatcggcgtgggcgccccagtatatatggctgcagtgctggaatatctgaccgccgaaatcttagagttggctggtaatgccgccagagataataagaagggtcgcgtgactcccaggcatatactgctggccgtggccaatgatgaggagctcaaccagctcttgaaaggggttaccatcgcctcaggcggtgtactccccaatatccaccccgagttgctggcgaagaagaggggaagcaagggtaagctcgaagccattattactcccccccctgcaaagaaggccaaaagccctagccaaaagaaaccagttagtaagaaggccgggggaaagaagggggctcgaaagagcaagaaaaaacagggagaagtttctaaggctgcatccgccgacagcacaactgaaggaaccccagcagacggatttactgtgctcagcactaagtcattgtttctcggtcagaaacttaatctcatccattcagagatttccaacctcgccggcttcgaggttgaggccatcattaaccctacgaacgctgatattgacctcaaggacgacttgggcaatactttagagaagaaaggtggaaaggagtttgtggaggccgtgctcgaactcagaaaaaagaatggaccactagaggtggcaggagccgccgtgagcgctggccacgggcttcctgctaagttcgtgattcattgcaactcaccagtctggggtgccgacaaatgcgaggaactcctggagaagactgtgaagaattgtttggcgctggcagacgataagaagctgaagtccatcgccttcccttccatagggtccggacgcaatggctttccaaaacagacagcagctcagctaattctgaaggccatcagtagctatttcgtatccaccatgtcaagcagtatcaaaacagtgtactttgttttgttcgactcggagagcattggcatctatgttcaggagatggccaaactggatgccaattag

SEQ ID NO: 236788 - DNA, 1119 bp, Artificial Sequence
  derived and/or modified sequence
atgagcagccggggcggcaagaagaagagcaccaagaccagccggagcgccaaagcaggggtgattttcccagtaggtaggatgctgcggtatattaaaaaaggacatcccaaatacaggatcggagtcggagctccggtatatatggctgccgtgttagaatacttaacagctgagatcctggaactggccggtaacgccgcacgagacaacaagaagggacgggttactccacgacacattttacttgcagtggcaaatgatgaggaactgaatcagctcctgaagggggttactattgcttcaggaggggtcctgccaaatatccatccagagctgttggctaagaagagagggagcaagggaaaactggaggctattattacaccacctcccgcaaagaaggccaagtcccctagtcagaagaagcccgtgtccaaaaaagctggcggaaagaaaggtgctcggaagtcaaaaaagaaacagggtgaggtttcaaaggctgccagtgccgattccacaacagaagggacaccggcagacggttttacagtcttgagcacaaagtcgctgttcctgggtcaaaaactaaatctgatccactcagagattagcaacttggcaggattcgaggtggaggctattatcaatcctactaacgccgacatcgacctcaaggacgaccttgggaacactctagagaagaaaggcggtaaagaatttgtggaggctgttctggagctgagaaaaaaaaacggcccactggaggtcgctggcgctgcggtatccgcagggcacggtttgcctgctaaatttgtgatccactgcaattcgcctgtgtggggcgccgataagtgcgaagaactgctggagaaaaccgtcaagaactgtctcgctctggctgacgataaaaagctgaagtcaattgcattccctagcatcggatcagggagaaatggattccctaaacagacggccgctcagctgatcctgaaggccataagtagctactttgtgagcacgatgtcttcttccattaaaaccgtctactttgtgctgttcgactccgagtccatcgggatttatgtacaggaaatggcaaagctggacgccaattag

SEQ ID NO: 236789 - DNA, 1119 bp, Artificial Sequence
  derived and/or modified sequence
atgtcctctagagggggaaaaaagaagtcaacaaagacatcccggtccgcaaaggcaggagtcatatttcctgtgggcaggatgctgcgctacattaagaagggccacccaaagtatagaatcggagtcggcgctcctgtgtacatggcggcagtgctagaatacctgacagctgaaattctggagctcgctggtaacgccgctagggataataagaagggcagagtcacacctcgccacatcttgctggcagtggccaatgacgaggaattaaaccaactcctgaagggcgtgacgatcgcctctgggggtgtgttgcctaatatccatccggaactgttggcgaagaagcggggtagcaagggaaagctggaagccattataacccccccacccgcaaaaaaggccaagtctccttctcagaagaaacccgtatcaaagaaagcaggcggtaagaagggggctcgtaagtcaaaaaagaagcagggagaggttagtaaagcagcctcagccgactctaccaccgaaggaacaccagctgacggcttcactgtcctgagcactaagtccctgtttctggggcaaaaacttaacttgatccacagtgagatatctaacctcgccggattcgaagtcgaggcgatcatcaaccctacaaatgcagacattgatttaaaggatgacttggggaacacattagaaaaaaagggcggaaaagagtttgtagaggctgttcttgagctccgtaagaaaaacggcccactggaggtggctggggctgccgtgagtgctggccatggcctcccagctaagttcgtgattcactgcaattctccagtttggggggctgacaagtgcgaagagttattggagaagacagtcaagaactgtctggcccttgccgacgataaaaaattgaagtccatcgctttcccaagcatcggtagtggaaggaatggcttccccaaacagactgctgcccaattgatcttaaaagcaattagttcttactttgtttctacaatgtcctcttcaatcaagaccgtctatttcgtactctttgattcagagtcgatcggtatctacgtccaggagatggccaagctcgacgccaactag

SEQ ID NO: 236790 - DNA, 1119 bp, Artificial Sequence
  derived and/or modified sequence
atgagctcaagaggcggaaagaagaagagcacaaaaacaagccgttctgctaaagcaggagtcatttttcctgtgggaaggatgctgagatatatcaaaaagggccatcctaagtaccgcataggagtgggcgcacctgtctatatggctgcagttttagagtacttgaccgctgagatcttggaactcgccggtaacgcagcacgagataataagaagggccgagttactcccaggcacatccttctggccgttgcaaatgacgaagagctcaatcagctgctcaagggcgttacaatcgccagtggtggagttctgcccaacatccaccctgagctactcgccaaaaagcgaggaagcaagggaaaacttgaagcaattataacccctcccccagctaaaaaggcaaaatcgccaagccaaaaaaagcctgtgtcaaaaaaggccggtgggaagaagggcgctcgcaaatcaaaaaagaagcagggggaagtctcaaaagccgcttctgcagattccactactgagggaacacccgctgatggatttacagttctgtctaccaaaagcctgtttctcgggcagaagctgaacctcattcactccgaaatttccaatcttgcaggattcgaggtagaggctatcattaaccctacaaatgccgacattgacctgaaggatgatctggggaacaccctggaaaagaaaggtggaaaagagtttgtggaagctgtcttggagctgcggaagaagaacggccctctggaggtggccggagcggctgtgtctgccggtcatggcctgcctgcaaagtttgtgattcattgtaattcacctgtttggggggctgataaatgtgaagagttgctggagaagacagtaaaaaattgtttagctctcgccgacgacaaaaaactgaaatccatcgctttccccagcatcgggtccgggcgaaacggcttccccaagcagacagctgctcagctgatcctcaaagccatttcttcatacttcgtctctacaatgagctcttcaattaaaacagtgtacttcgtcctgtttgactccgagtccatcggcatttatgttcaggagatggccaagttagatgccaactag

SEQ ID NO: 236791 - DNA, 1119 bp, Artificial Sequence
  derived and/or modified sequence
atgagcagcagaggcggcaagaagaagagcaccaagaccagcagaagcgccaaggccggcgtgatcttccccgtgggcagaatgctgagatacatcaagaagggccaccccaagtacagaatcggcgtgggcgcccccgtgtacatggccgccgtgctggagtacctgaccgccgagatcctggagctggccggcaacgccgccagagacaacaagaagggcagagtgacccccagacacatcctgctggccgtggccaacgacgaggagctgaaccagctgctgaagggcgtgaccatcgccagcggcggcgtgctgcccaacatccaccccgagctgctggccaagaagagaggcagcaagggcaagctggaggccatcatcacccccccccccgccaagaaggccaagagccccagccagaagaagcccgtgagcaagaaggccggcggcaagaagggcgccagaaagagcaagaagaagcagggcgaggtgagcaaggccgccagcgccgacagcaccaccgagggcacccccgccgacggcttcaccgtgctgagcaccaagagcctgttcctgggccagaagctgaacctgatccacagcgagatcagcaacctggccggcttcgaggtggaggccatcatcaaccccaccaacgccgacatcgacctgaaggacgacctgggcaacaccctggagaagaagggcggcaaggagttcgtggaggccgtgctggagctgagaaagaagaacggccccctggaggtggccggcgccgccgtgagcgccggccacggcctgcccgccaagttcgtgatccactgcaacagccccgtgtggggcgccgacaagtgcgaggagctgctggagaagaccgtgaagaactgcctggccctggccgacgacaagaagctgaagagcatcgccttccccagcatcggcagcggcagaaacggcttccccaagcagaccgccgcccagctgatcctgaaggccatcagcagctacttcgtgagcaccatgagcagcagcatcaagaccgtgtacttcgtgctgttcgacagcgagagcatcggcatctacgtgcaggagatggccaagctggacgccaactag

SEQ ID NO: 236792 - DNA, 1314 bp, Artificial Sequence
  derived and/or modified sequence
gtctacattagtaattcccaacttgggtccgaaagtgaacttttgctgaagcgaagtagctaaccgcttccatgtgcaaggcaggttccagacttcgggtgtgctcactgatccgcctccagggccaccgccatgtcgagccgcggtgggaagaagaagtccaccaagacgtccaggtctgccaaagcaggagtcatctttcccgtggggcggatgctgcggtacatcaagaaaggccaccccaagtacaggattggagtgggggcacccgtgtacatggccgccgtcctggaatacctgacagcggagattctggagctggctggcaatgcagcgagagacaacaagaagggacgggtcacaccccggcacatcctgctggctgtggccaatgatgaagagctgaatcagctgctaaaaggagtcaccatagccagtgggggtgtgttacccaacatccaccccgagttgctagcgaagaagcggggatccaaaggaaagttggaagccatcatcacaccacccccagccaaaaaggccaagtctccatcccagaagaagcctgtatctaaaaaagcaggaggcaagaaaggggcccggaaatccaagaagaagcagggtgaagtcagtaaggcagccagcgccgacagcacaaccgagggcacacctgccgacggcttcacagtcctctccaccaagagcctcttccttggccagaagctgaaccttattcacagtgaaatcagtaatttagccggctttgaggtggaggccataatcaatcctaccaatgctgacattgaccttaaagatgacctaggaaacacgctggagaagaaaggtggcaaggagtttgtggaagctgtcctggaactccggaaaaagaacgggcccttggaagtagctggagctgctgtcagcgcaggccatggcctgcctgccaagtttgtgatccactgtaatagtccagtttggggtgcagacaagtgtgaagaacttctggaaaagacagtgaaaaactgcttggccctggctgatgataagaagctgaaatccattgcatttccatccatcggcagcggcaggaacggttttccaaagcagacagcagctcagctgattctgaaggccatctccagttacttcgtgtctacaatgtcctcttccatcaaaacggtgtacttcgtgctttttgacagcgagagtataggcatctatgtgcaggaaatggccaagctggacgccaactaggctgagcaatgacagaaccagctgcaccatgtaccccaccttcagtttaaaagaaaaaaaaaa

SEQ ID NO: 236793 - DNA, 2789 bp, Artificial Sequence
  derived and/or modified sequence
aacagccattgtgccttcccactgggttagtgggaaggttcctaaagatgccgtggcagcgacagtcccgtgctcagagccaggcacacagtaggcgttcactcgagacgcagagtctgggacgcgccctgaagaagctcctctccaggggcctggcccttcccaaggactgggctctgggcgtccccggggtcatgggtcagacctcgcgtccggggtgcgggctggtgcctgggcgcagagcggccggcgtcaacgggtagggcgcgggcccggggtcaaggccggggcgccgggcggcacgggcgcggaggccggacgctcggggccgcgaagggatgtgacgagcggcgcgctgtgcattgtgggaagccggccgcgaggactggttccagttcactcggcagcggcgccgggcggagggggagagcgcgggccgcgcgggcgggaagcgaagaggcgggcgggccagcgaggagcgcggagagaaaaggcgcgagcggccaggagggctcaggccgagacaccttgcagctgccgccgccgccaccgagccgccgctgtgctcactgatccgcctccagggccaccgccatgtcgagccgcggtgggaagaagaagtccaccaagacgtccaggtctgccaaagcaggagtcatctttcccgtggggcggatgctgcggtacatcaagaaaggccaccccaagtacaggattggagtgggggcacccgtgtacatggccgccgtcctggaatacctgacagcggagattctggagctggctggcaatgcagcgagagacaacaagaagggacgggtcacaccccggcacatcctgctggctgtggccaatgatgaagagctgaatcagctgctaaaaggagtcaccatagccagtgggggtgtgttacccaacatccaccccgagttgctagcgaagaagcggggatccaaaggaaagttggaagccatcatcacaccacccccagccaaaaaggccaagtctccatcccagaagaagcctgtatctaaaaaagcaggaggcaagaaaggggcccggaaatccaagaagaagcagggtgaagtcagtaaggcagccagcgccgacagcacaaccgagggcacacctgccgacggcttcacagtcctctccaccaagagcctcttccttggccagaagctgaaccttattcacagtgaaatcagtaatttagccggctttgaggtggaggccataatcaatcctaccaatgctgacattgaccttaaagatgacctaggaaacacgctggagaagaaaggtggcaaggagtttgtggaagctgtcctggaactccggaaaaagaacgggcccttggaagtagctggagctgctgtcagcgcaggccatggcctgcctgccaagtttgtgatccactgtaatagtccagtttggggtgcagacaagtgtgaagaacttctggaaaagacagtgaaaaactgcttggccctggctgatgataagaagctgaaatccattgcatttccatccatcggcagcggcaggaacggttttccaaagcagacagcagctcagctgattctgaaggccatctccagttacttcgtgtctacaatgtcctcttccatcaaaacggtgtacttcgtgctttttgacagcgagagtataggcatctatgtgcaggaaatggccaagctggacgccaactaggctgagcaatgacagaaccagctgcaccatgtaccccaccttcagtttaaaagaaaaaaaaaatccccttcactcctactgggaggtgggacccctttcattttcagttttgctcatctagggaaaataaggctttggtttccagtttaattgtttttgaccttctaaaatgtttttatgttagcactgatagttggcattactgttgttaagcactgtgttccagaccgtgtctgacttagtgtaacctaggagattttatagttttattttaatgaaaccctgattgacgcacagcagtggggagaacagcgtcttttacctgtcaccgaagccaggaagccccgtttgtaagcgtgtgttgtggtgctttattgtacatcctccagtggcgttctttttactctaatgttcttttggtttcccccctcagaagaatcatgaatttgcaacagacctaatttttggttactttttgtcttattgatggatttgaaaatgaaagatttaataaggcaaagcagaatctgttgtccttaattatatttgcaatttggaatttgtgtgagttgatttagtaaaatgttaaaccgttgttgtgactggtgtgttccagttattgtgcccgtgagtcacaggtcttaagtcggcttctgcagtcccaggatgtgggggcagggcagtccatccccctcaacccccaccctgctcccacaactccttggatgctccacagtgttcactgcaacctgggtgggtgtgggccatctgctggccccagtggtttgtagagagaatttttataaagtctcaccttttggttctgtgtgacccttgggccagggtgttatccccattccccgttccacagatgaaggagggagtgtatccaaagccgtgcaggtggcatgtggcaggctccagaccctgagcccagctctctcctaccattgtccccttctgacagtctgtgacttagggctgggcctggccacttgctgatgaagctgctggagcctcattccctctgccgaggctgctgggtctgtcatccctgcaggacaggatccctggca

SEQ ID NO: 236794 - protein, 281 aa, Artificial Sequence
  derived and/or modified sequence
MPVQLTTALRVVGTSLFALAVLGGILAAYVTGYQFIHTEKHYLSFGLYGAILGLHLLIQSLFAFLEHRRMRRAGQALKLPSPRRGSVALCIAAYQEDPDYLRKCLRSAQRISFPDLKVVMVVDGNRQEDAYMLDIFHEVLGGTEQAGFFVWRSNFHEAGEGETEASLQEGMDRVRDVVRASTFSCIMQKWGGKREVMYTAFKALGDSVDYIQVCDSDTVLDPACTIEMLRVLEEDPQVGGVGGDVQPPGKGMAVEDDQVQAAQVRATEAWSVHQRHVSREQ

SEQ ID NO: 236795 - DNA, 846 bp, Artificial Sequence
  derived and/or modified sequence
atgcccgtgcagctgaccaccgccctgagagtggtgggcaccagcctgttcgccctggccgtgctgggcggcatcctggccgcctacgtgaccggctaccagttcatccacaccgagaagcactacctgagcttcggcctgtacggcgccatcctgggcctgcacctgctgatccagagcctgttcgccttcctggagcacagaagaatgagaagagccggccaggccctgaagctgcccagccccagaagaggcagcgtggccctgtgcatcgccgcctaccaggaggaccccgactacctgagaaagtgcctgagaagcgcccagagaatcagcttccccgacctgaaggtggtgatggtggtggacggcaacagacaggaggacgcctacatgctggacatcttccacgaggtgctgggcggcaccgagcaggccggcttcttcgtgtggagaagcaacttccacgaggccggcgagggcgagaccgaggccagcctgcaggagggcatggacagagtgagagacgtggtgagagccagcaccttcagctgcatcatgcagaagtggggcggcaagagagaggtgatgtacaccgccttcaaggccctgggcgacagcgtggactacatccaggtgtgcgacagcgacaccgtgctggaccccgcctgcaccatcgagatgctgagagtgctggaggaggacccccaggtgggcggcgtgggcggcgacgtgcagccccccggcaagggcatggccgtggaggacgaccaggtgcaggccgcccaggtgagagccaccgaggcctggagcgtgcaccagagacacgtgagcagagagcagtag

SEQ ID NO: 236796 - DNA, 846 bp, Artificial Sequence
  derived and/or modified sequence
atgcccgtacagttgactaccgccctgagggtggtaggcacatccctgtttgccctcgccgtactcggggggatcctggctgcttatgtcaccgggtatcagttcattcacaccgagaagcactatctgagctttggcctttacggagcaatcctgggactgcatctcttaatccagtcactcttcgcctttctcgagcataggagaatgagaagggctgggcaggccctgaagctgcccagtccccgtagaggcagtgtggcgctgtgtattgccgcatatcaggaggaccccgattatctgagaaagtgcctgcgctcagcccagcggattagcttccccgatttgaaagtcgtaatggtggtggacggaaaccggcaggaagatgcctatatgctagacattttccatgaagtgttgggtggaaccgagcaggcaggtttttttgtgtggagatcaaactttcacgaggccggagaaggcgaaacagaagccagcctgcaagaagggatggatcgggttagggatgttgtgcgggccagtacctttagctgcattatgcagaaatggggaggtaaacgcgaggtgatgtatactgcattcaaggcactgggcgacagcgtggattacatccaggtctgcgatagcgacaccgtgctggatccagcatgtacaattgagatgctgagagtcctagaagaggacccacaagtaggcggcgtcgggggtgatgttcagccccccggaaagggcatggcagtggaggatgaccaggtacaagcagcacaagtgcgcgcaaccgaggcttggtcagtgcatcaaaggcacgtgtcgagagagcaatag

SEQ ID NO: 236797 - DNA, 846 bp, Artificial Sequence
  derived and/or modified sequence
atgcctgtgcagctgaccacagccctgcgggtggtgggcaccagcctgtttgccctggccgtgctgggcggcatcctggccgcctacgtgacaggctaccagttcatccacacagagaagcactacctgagctttggcctgtatggagccatcctgggcctgcacctgctgatccagagcctgtttgccttcctggagcacaggaggatgagaagagctggccaggccctgaagctgcccagcccccggcggggctctgtggccctgtgcatcgccgcctaccaggaggaccctgactacctgaggaagtgcctgcggagcgcccagaggatctccttcccagacctgaaggtggtgatggtggtggatggcaaccggcaggaggatgcctacatgctggacatcttccacgaggtgctgggcggcacagagcaggccggcttctttgtgtggaggagcaacttccacgaggccggggagggggagacagaggccagcctgcaggagggcatggacagagtgagagatgtggtgcgggccagcaccttcagctgcatcatgcagaagtggggcggcaagcgggaggtgatgtacacagccttcaaggccctgggggacagcgtggactacatccaggtgtgtgacagcgacacagtgctggaccctgcctgcaccatcgagatgctgcgggtgctggaggaggacccccaggtgggcggcgtgggcggagatgtgcagcccccaggcaagggcatggctgtggaggatgaccaggtgcaggccgcccaggtgcgggccacagaggcctggagcgtgcaccagagacatgtgtcccgggagcagtag

SEQ ID NO: 236798 - DNA, 846 bp, Artificial Sequence
  derived and/or modified sequence
atgcccgtgcagctgaccaccgccctgcgggtggtgggcaccagcctgttcgcgcttgctgtcttaggaggtatccttgcagcctacgtgactgggtaccagttcatccataccgaaaagcactatctgagcttcgggctttacggcgcaatcctcggcctgcatctgttaatccagagcttatttgcctttcttgagcataggaggatgaggagggccggacaggctctgaaactgccttccccaaggaggggaagtgtggctctgtgtattgccgcctaccaagaggaccccgactatctgcgaaaatgcttaaggtcagcacaacgcattagcttcccagacctgaaggtggtcatggtggtggacggcaatcgccaagaggatgcgtatatgctcgatatattccacgaagtgctcggaggtaccgagcaagctggctttttcgtgtggcgatccaattttcacgaagctggggagggtgagactgaagcctctctgcaagagggtatggatagagttcgcgacgtggtgcgtgcttctaccttttcttgtatcatgcagaaatggggtggcaagcgcgaggtaatgtatactgcattcaaagctctgggtgactctgtggattacatccaggtttgcgactcagataccgtgctggaccccgcctgtacaatagaaatgctgcgtgtattggaggaggaccctcaagtcggtggagtcggaggcgatgtacagccgccgggaaaggggatggccgtggaggacgatcaagttcaggccgcacaggtccgcgcaacagaagcgtggtccgtgcaccagcggcacgtgtccagggagcagtag

SEQ ID NO: 236799 - DNA, 846 bp, Artificial Sequence
  derived and/or modified sequence
atgcctgtgcagctcaccactgcgcttagagtggtcggtacatctctgttcgccctggctgttctgggaggaattcttgcagcctatgtgaccgggtatcagttcatccacaccgagaaacactacctctctttcggtctgtacggcgctattctcggactgcacctgctgatccagagcctgttcgccttcctcgaacatcgtaggatgcgtcgagccggtcaggccctcaagctgccatctcccaggagggggtctgtggcactgtgtatcgcggcttatcaggaagatcctgactatctaaggaaatgtttgagatccgcacagcggattagcttccccgaccttaaggttgtcatggtcgttgacggaaatcgtcaagaggatgcctacatgctcgatatctttcacgaggtattgggaggaactgagcaagctggcttttttgtatggcggtctaatttccatgaagccggagagggggaaaccgaagcctcgctccaggagggcatggatcgtgtgagggacgtagtgcgggcatccaccttttcctgtattatgcaaaaatggggcggaaagcgagaggtgatgtatactgccttcaaagctttgggggatagcgtggactatatacaggtttgcgacagcgataccgtgctcgaccccgcttgtaccatagaaatgttgcgagtgttggaggaagacccccaggttgggggagtcggtggcgatgtccaaccccctggtaagggtatggccgtcgaagatgatcaggttcaagccgctcaggttcgagccaccgaggcctggtcagtgcatcagcgacatgtctcccgtgaacagtag

SEQ ID NO: 236800 - DNA, 1163 bp, Artificial Sequence
  derived and/or modified sequence
ggaggggcatggagccgccgcgggcctgctgagctccggagcgcggcagccggcggcacgatgccggtgcagctgacgacagccctgcgtgtggtgggcaccagcctgtttgccctggcagtgctgggtggcatcctggcagcctatgtgacgggctaccagttcatccacacggaaaagcactacctgtccttcggcctgtacggcgccatcctgggcctgcacctgctcattcagagcctttttgccttcctggagcaccggcgcatgcgacgtgccggccaggccctgaagctgccctccccgcggcggggctcggtggcactgtgcattgccgcataccaggaggaccctgactacttgcgcaagtgcctgcgctcggcccagcgcatctccttccctgacctcaaggtggtcatggtggtggatggcaaccgccaggaggacgcctacatgctggacatcttccacgaggtgctgggcggcaccgagcaggccggcttctttgtgtggcgcagcaacttccatgaggcaggcgagggtgagacggaggccagcctgcaggagggcatggaccgtgtgcgggatgtggtgcgggccagcaccttctcgtgcatcatgcagaagtggggaggcaagcgcgaggtcatgtacacggccttcaaggccctcggcgattcggtggactacatccaggtgtgcgactctgacactgtgctggatccagcctgcaccatcgagatgcttcgagtcctggaggaggatccccaagtagggggagtcgggggagatgtccagcccccagggaaaggtatggcagtagaggatgaccaggtccaagctgcccaggtcagagctacggaagcatggtccgttcaccaacgccacgtttctagagagcagtgagctgattctccaatggtgagcaggggactacatgtgaactgggacctgcaggccaatgtatccctgaggaaaagtccacaagaacaattcaagaaactagtaagaaacaatgggcagaaagctgtgggacgaaagcacagcaggcttctgggaggctggagatcctttctctcaagggcaggattattcccacctgccacagttcacatgccacaaataacatctcaccttcagtcaagaaaaacgcaaaggaaaaa

SEQ ID NO: 236801 - protein, 651 aa, Artificial Sequence
  derived and/or modified sequence
MKNCGRRFHNEVGKFRFLNELIKVVSPKYLGDRVSEKVKTKVIELLYSWTMALPEEAKIKDAYHMLKRQGIVQSDPPIPVDRTLIPSPPPRPKNPVFDDEEKSKLLAKLLKSKNPDDLQEANKLIKSMVKEDEARIQKVTKRLHTLEEVNNNVRLLSEMLLHYSQEDSSDGDRELMKELFDQCENKRRTLFKLASETEDNDNSLGDILQASDNLSRVINSYKTIIEGQVINGEVATLTLPDSEGNSQCSNQGTLIDLAELDTTNSLSSVLAPAPTPPSSGIPILPPPPQASGPPRSRSSSQAEATLGPSSTSNALSWLDEELLCLGLADPAPNVPPKESAGNSQWHLLQREQSDLDFFSPRPGTAACGASDAPLLQPSAPSSSSSQAPLPPPFPAPVVPASVPAPSAGSSLFSTGVAPALAPKVEPAVPGHHGLALGNSALHHLDALDQLLEEAKVTSGLVKPTTSPLIPTTTPARPLLPFSTGPGSPLFQPLSFQSQGSPPKGPELSLASIHVPLESIKPSSALPVTAYDKNGFRILFHFAKECPPGRPDVLVVVVSMLNTAPLPVKSIVLQAAVPKSMKVKLQPPSGTELSPFSPIQPPAAITQVMLLANPLKEKVRLRYKLTFALGEQLSTEVGEVDQFPPVEQWGNL

SEQ ID NO: 236802 - protein, 723 aa, Artificial Sequence
  derived and/or modified sequence
MAEAEGESLESWLNKATNPSNRQEDWEYIIGFCDQINKELEGPQIAVRLLAHKIQSPQEWEALQALTVLEACMKNCGRRFHNEVGKFRFLNELIKVVSPKYLGDRVSEKVKTKVIELLYSWTMALPEEAKIKDAYHMLKRQGIVQSDPPIPVDRTLIPSPPPRPKNPVFDDEEKSKLLAKLLKSKNPDDLQEANKLIKSMVKEDEARIQKVTKRLHTLEEVNNNVRLLSEMLLHYSQEDSSDGDRELMKELFDQCENKRRTLFKLASETEDNDNSLGDILQASDNLSRVINSYKTIIEGQVINGEVATLTLPDSEGNSQCSNQGTLIDLAELDTTNSLSSVLAPAPTPPSSGIPILPPPPQASGPPRSRSSSQAEATLGPSSTSNALSWLDEELLCLGLADPAPNVPPKESAGNSQWHLLQREQSDLDFFSPRPGTAACGASDAPLLQPSAPSSSSSQAPLPPPFPAPVVPASVPAPSAGSSLFSTGVAPALAPKVEPAVPGHHGLALGNSALHHLDALDQLLEEAKVTSGLVKPTTSPLIPTTTPARPLLPFSTGPGSPLFQPLSFQSQGSPPKGPELSLASIHVPLESIKPSSALPVTAYDKNGFRILFHFAKECPPGRPDVLVVVVSMLNTAPLPVKSIVLQAAVPKSMKVKLQPPSGTELSPFSPIQPPAAITQVMLLANPLKEKVRLRYKLTFALGEQLSTEVGEVDQFPPVEQWGNL

SEQ ID NO: 236803 - protein, 601 aa, Artificial Sequence
  derived and/or modified sequence
MALPEEAKIKDAYHMLKRQGIVQSDPPIPVDRTLIPSPPPRPKNPVFDDEEKSKLLAKLLKSKNPDDLQEANKLIKSMVKEDEARIQKVTKRLHTLEEVNNNVRLLSEMLLHYSQEDSSDGDRELMKELFDQCENKRRTLFKLASETEDNDNSLGDILQASDNLSRVINSYKTIIEGQVINGEVATLTLPDSEGNSQCSNQGTLIDLAELDTTNSLSSVLAPAPTPPSSGIPILPPPPQASGPPRSRSSSQAEATLGPSSTSNALSWLDEELLCLGLADPAPNVPPKESAGNSQWHLLQREQSDLDFFSPRPGTAACGASDAPLLQPSAPSSSSSQAPLPPPFPAPVVPASVPAPSAGSSLFSTGVAPALAPKVEPAVPGHHGLALGNSALHHLDALDQLLEEAKVTSGLVKPTTSPLIPTTTPARPLLPFSTGPGSPLFQPLSFQSQGSPPKGPELSLASIHVPLESIKPSSALPVTAYDKNGFRILFHFAKECPPGRPDVLVVVVSMLNTAPLPVKSIVLQAAVPKSMKVKLQPPSGTELSPFSPIQPPAAITQVMLLANPLKEKVRLRYKLTFALGEQLSTEVGEVDQFPPVEQWGNL

SEQ ID NO: 236804 - DNA, 2172 bp, Artificial Sequence
  derived and/or modified sequence
atggcagaggctgaaggtgagagcctggaatcatggctgaacaaggccacgaaccctagtaaccgccaagaggattgggaatatataataggattctgcgatcagattaacaaagaacttgaagggccacaaatcgcagtacgcttgttagctcacaaaatccagtctccacaggagtgggaagcgctgcaggctctcacggtccttgaggcatgcatgaaaaattgtgggcggagattccacaacgaggtgggtaagttcagattcctgaatgagcttattaaggttgtcagccctaaatacctgggcgaccgtgtgagcgaaaaggtcaaaacaaaagtaattgagctcctgtacagctggaccatggccctgcccgaggaagctaagattaaggatgcataccacatgttgaaacgccagggtatcgttcagagcgatccacccatccccgtcgaccgcacactcatacccagccctccgccgcgcccaaagaaccctgtcttcgacgatgaggaaaagagcaagctcctcgcaaaactgctcaagtcaaagaacccagacgatttgcaggaggctaataaactgatcaagtccatggtgaaggaagatgaggcgaggattcagaaagttaccaagcgcttgcatacactggaggaggtgaataacaacgtccgcctcctgtcggagatgctgctgcattactcacaggaggattcatcagatggggacagggaactgatgaaggagctgtttgaccagtgtgagaacaagagacgtacgctgttcaaactcgcgtcagagactgaggacaatgataattccctcggtgatatcttgcaagcgtccgataacttgagtagagttatcaattcatacaaaaccatcatagaaggtcaggtaatcaacggggaagttgccaccctcactctgccggacagtgagggcaattctcaatgctccaaccaagggacactaattgatttggctgaactcgacaccactaatagtttgtctagcgtgctcgccccggcccctacccctccaagtagcggtatccccattttgccaccaccccctcaggcgagcggccctcctaggagtcgctcatcctcacaggcagaagcaaccctgggccccagcagcacctctaatgccctgtcctggctcgatgaggagctgctctgcctgggactagccgatcccgctcccaatgtgccacccaaagaaagcgctggtaactcacagtggcacttactccagcgtgagcagagcgatttggattttttctcgcccaggccgggcactgcagcgtgcggcgcctcggacgctcctttgctccagccttcggccccctcttcgagctcctcccaggcccctctgcctccgccttttcctgctccagtggtgcccgcttctgtgcctgctccgagcgccggatcctcattattcagtacaggcgtcgcccctgccttggcccctaaagttgagcctgccgttcctggccaccatggcttggcccttggaaactcggcccttcatcaccttgacgctttggatcagctgttggaagaagccaaagtaactagtggcctagttaagccaaccacctccccgttaattcccaccaccactcccgcacgccccctcctcccctttagtacggggcctggctcccccttgttccaaccattaagctttcagtctcagggttccccgccaaaaggacccgagctgagtctggcaagcatccacgtgcccctggaatccataaagccttctagcgccctacccgtcactgcatacgataaaaacggctttaggatactatttcactttgccaaggagtgccccccagggaggccagatgttctggttgtcgtggtgtcaatgttaaataccgcgcccctccccgtcaagtctatcgtactccaggccgctgtgcctaagagcatgaaggtgaagctccagcccccttccggcacagagttgtcacccttcagtccaatccagccccccgccgccatcacacaagtcatgttactggccaatcccttgaaagaaaaagtgcgcttgagatataagttgacctttgccctgggcgagcagctcagcacagaagtcggcgaagttgaccagtttcccccagtggaacagtgggggaacctgtag

SEQ ID NO: 236805 - DNA, 462 bp, Artificial Sequence
  derived and/or modified sequence
atggcagaggccgagggagagtctctggagagctggctgaataaggctaccaacccaagcaatagacaggaggattgggaatacattattgggttttgcgatcagataaacaaagaattagaagggccccagattgctgtgcgactgctggcccataaaatccaatccccccaggagtgggaggccctgcaggccttgacggtcctggaggcatgtatgaaaaactgtggtcggagatttcataatgaggtcgggaagttcaggttcctgaacgagctcataaaggttgtgtcccctaaatacttaggcgatagagtgtctgaaaaagtaaaaacgaaggtcatcgaactactgtactcctggaccatggctcttccagaagaggcaaagattaaggacgcgtatcatatgctgaaaaggcaggcattctcccaagccgctgagaaacagaagcccagatag

SEQ ID NO: 236806 - DNA, 2255 bp, Artificial Sequence
  derived and/or modified sequence
acaacaattcaggcccttgtcccaagtaggaggacattccccaagcaggcgggtaaagtctcctcctggtcaagtgctaacgataaagccaccaatccttccaaccgccaggaggactgggaatacataattggcttctgtgatcagatcaacaaggagctggaagggccacagatcgccgtccgactgctggcccacaagatccagtccccacaggaatgggaggcgctccaggccctgacggtgctggaggcatgcatgaagaactgtgggaggagatttcataacgaagtggggaagttccgctttttgaatgagttaatcaaagtcgtctctccaaagtacctgggggacagggtgtctgagaaagtgaagaccaaggttattgagctgctgtacagctggaccatggccctgccagaagaagcaaagatcaaagacgcctaccacatgctgaagagacagggcatagtgcagtctgacccaccaattcctgtggataggacgctgatcccctctccaccacctcgtcccaaaaaccctgtttttgatgatgaggagaagtccaagcttttagccaagctgctgaaaagcaaaaacccagatgacctgcaggaggccaacaagctcatcaagtccatggtgaaggaagacgaggcacggatccagaaggtgaccaagcgtctgcacacgttagaggaagttaacaacaacgtgagactgctcagtgagatgctgcttcattacagccaggaggactcttcggacggggacagagagctgatgaaggagctgtttgatcagtgtgagaacaagaggcggactttatttaaactcgccagtgagactgaggacaatgataacagtttgggggacatcctgcaagccagtgacaacctctcccgggtcatcaactcttacaaaacaattattgaagggcaggtcatcaatggcgaggtggctaccttaaccctgcctgactcggaaggaaacagtcagtgcagtaaccaaggcacgctcatcgaccttgcggagctggacacgaccaacagtttgtcctccgtgttggccccagcacctactccaccctcctcaggcatcccaatcctccctccaccaccccaggcctcaggacctccacggagccgctcctctagccaggccgaggccaccctggggcccagcagcacaagcaacgccctctcctggctggacgaggagctactctgcttgggcctcgccgacccagcccctaatgttcctcccaaagagtcagctgggaacagccagtggcacctgctccagagggaacagtccgacctggacttcttcagccccaggccggggaccgctgcctgtggcgcctccgatgctcctctgctccagccctcagccccctcctcaagcagctcccaagctccactgccgcctcccttcccagctcctgtggtcccagccagtgttcctgcccccagtgcgggctcctccttgttttctactggagtggccccagccttggccccaaaagttgagcccgcagtccctgggcaccatggcttggcgttgggcaacagcgcgctgcaccacctggatgccctcgatcagcttctagaagaggccaaagtgacctcgggcttggtgaaacccactacctcccctctcatccccaccaccaccccagccaggcccctcctgcccttctccacggggcccggcagcccgctcttccagccactgagtttccagtcccagggcagccccccgaaggggcctgagctctccctggccagcatccacgtgcccctggaatcgatcaagcctagcagtgcccttcctgtgacagcctacgataaaaacggcttccgcatcctcttccactttgccaaggagtgtcccccaggacgacctgacgtgctggtggtggtggtgtccatgctgaacacggctcccttacctgtcaagagcatcgtgctgcaggctgcagtgcccaagtcaatgaaagtgaagttgcagccaccttctgggacagaactctctccatttagccccatccagccacctgcagccatcacccaggtcatgttgctggccaatccactgaaggagaaggtgcggcttcggtataagctgaccttcgccctgggggagcagctgagcacagaggtgggcgaggtggaccagttccctcctgtggaacagtgggggaacctatgaccccagaggacgctgtgatctccaccttgaagccaggcagg

SEQ ID NO: 236807 - DNA, 3876 bp, Artificial Sequence
  derived and/or modified sequence
ctcgcgagttttgaagccgcggggccgggcggctgcaatatggcggaggcggaaggggaaagcctggagtcctggctcaataaagccaccaatccttccaaccgccaggaggactgggaatacataattggcttctgtgatcagatcaacaaggagctggaagggccacagatcgccgtccgactgctggcccacaagatccagtccccacaggaatgggaggcgctccaggccctgacggtgctggaggcatgcatgaagaactgtgggaggagatttcataacgaagtggggaagttccgctttttgaatgagttaatcaaagtcgtctctccaaagtacctgggggacagggtgtctgagaaagtgaagaccaaggttattgagctgctgtacagctggaccatggccctgccagaagaagcaaagatcaaagacgcctaccacatgctgaagagacagggcatagtgcagtctgacccaccaattcctgtggataggacgctgatcccctctccaccacctcgtcccaaaaaccctgtttttgatgatgaggagaagtccaagcttttagccaagctgctgaaaagcaaaaacccagatgacctgcaggaggccaacaagctcatcaagtccatggtgaaggaagacgaggcacggatccagaaggtgaccaagcgtctgcacacgttagaggaagttaacaacaacgtgagactgctcagtgagatgctgcttcattacagccaggaggactcttcggacggggacagagagctgatgaaggagctgtttgatcagtgtgagaacaagaggcggactttatttaaactcgccagtgagactgaggacaatgataacagtttgggggacatcctgcaagccagtgacaacctctcccgggtcatcaactcttacaaaacaattattgaagggcaggtcatcaatggcgaggtggctaccttaaccctgcctgactcggaaggaaacagtcagtgcagtaaccaaggcacgctcatcgaccttgcggagctggacacgaccaacagtttgtcctccgtgttggccccagcacctactccaccctcctcaggcatcccaatcctccctccaccaccccaggcctcaggacctccacggagccgctcctctagccaggccgaggccaccctggggcccagcagcacaagcaacgccctctcctggctggacgaggagctactctgcttgggcctcgccgacccagcccctaatgttcctcccaaagagtcagctgggaacagccagtggcacctgctccagagggaacagtccgacctggacttcttcagccccaggccggggaccgctgcctgtggcgcctccgatgctcctctgctccagccctcagccccctcctcaagcagctcccaagctccactgccgcctcccttcccagctcctgtggtcccagccagtgttcctgcccccagtgcgggctcctccttgttttctactggagtggccccagccttggccccaaaagttgagcccgcagtccctgggcaccatggcttggcgttgggcaacagcgcgctgcaccacctggatgccctcgatcagcttctagaagaggccaaagtgacctcgggcttggtgaaacccactacctcccctctcatccccaccaccaccccagccaggcccctcctgcccttctccacggggcccggcagcccgctcttccagccactgagtttccagtcccagggcagccccccgaaggggcctgagctctccctggccagcatccacgtgcccctggaatcgatcaagcctagcagtgcccttcctgtgacagcctacgataaaaacggcttccgcatcctcttccactttgccaaggagtgtcccccaggacgacctgacgtgctggtggtggtggtgtccatgctgaacacggctcccttacctgtcaagagcatcgtgctgcaggctgcagtgcccaagtcaatgaaagtgaagttgcagccaccttctgggacagaactctctccatttagccccatccagccacctgcagccatcacccaggtcatgttgctggccaatccactgaaggagaaggtgcggcttcggtataagctgaccttcgccctgggggagcagctgagcacagaggtgggcgaggtggaccagttccctcctgtggaacagtgggggaacctatgaccccagaggacgctgtgatctccaccttgaagccaggcaggctgccctgagacgaggagggctctggtcccgtcactctccatgccctgacaacagtgcttgtagctttgatgtggaacaggggccctgggcatttctgctgagaaccaaactgctgctgtgataacctctcctttggcccctaaaaggacctgtttttatctacctgtgtgacttgaagtggccatatgctgtcaggggtgcggagtggcccctgacttcactgctgtcccgggaacatggacccccaggcttggcgtaggtgtttgcttccttctactggcattcactgaagccactggggtgggggtctctaaagagagactgtcatgggtcattccccacaagagccacatcctcacacctgacagatgcacggcccaaggggctgcagccctgttgcaattccatgcttcccccgccaaccagctcctgctgccatccccagggaggtggcccaggaaggtgcctggcccagaataaggaactggcatactgcaaagtccccagccctgcctctggtggacagcatcgtcctggaatggccacggagtgatgagttgtgtgcttgtccctggcagtggcaggctgtgtcctatggacatcttggcaggacatggaatttggcctcatgacaggcccaactagggataggaaggaaaatgaagagagccagtatttccccttctccagaagcaggtactcagctttctgggaaaagcgtgcctccagccgtggggacaggccatcctactgactacctcttgcttggcatgaaataaactgctatcctccccttggaatctaccgccactctacatcctactgctttggcctccctctcctctcaccagatggcatgtggtgtggcacctgtggctggacacaggaggcctcaggatcacaaatgttacactagacatatgtcctaatgtgctgcccagaaacctcaactgttccccagctactgaggggcactgtcagcgagatgttgggtctggaggtgatgagatcgggccacacttgagctgagtcaccagaccctattgcttcaacagtgcttggcccccgccagcttgtcccagccactctagctgctggatgtgatcctgggacatgtactccaagcctccgtcacaaaaaaaaaatcaccagctgccatagacacgggggaagcttgcggagcccaggtgaacaagctcagcaatcggacatctctggggaaaggaaggtggcacagaccatgttccctggttcctccctgccccttgccaggcttccttattccttactatgggaagaggtcatatcccttccctgcccctcgctgtctttagcaagcaggtttcactgcttcattagaagaggacaagtcaaaagtgaatcatttttcactacttaaggaataaatccaagagctttccagagactggctgctgcagccctgggaatgtctgtggaattactatgtggaaatggaactttgtgttatgctctagacattacagttatttgagtgttactcgttactgttgaggtcagtgcttcgtggcaaatggctgtactggatatcccagctctgctgcccttgttttgctgcatgttaaataaaaccattttcactgt

SEQ ID NO: 236808 - DNA, 3879 bp, Artificial Sequence
  derived and/or modified sequence
acaacaattcaggcccttgtcccaagtaggaggacattccccaagcaggcgggtaaagtctcctcctggtcaagtgctaacgataaagccaccaatccttccaaccgccaggaggactgggaatacataattggcttctgtgatcagatcaacaaggagctggaagggccacagatcgccgtccgactgctggcccacaagatccagtccccacaggaatgggaggcgctccaggccctgacggtgctggaggcatgcatgaagaactgtgggaggagatttcataacgaagtggggaagttccgctttttgaatgagttaatcaaagtcgtctctccaaagtacctgggggacagggtgtctgagaaagtgaagaccaaggttattgagctgctgtacagctggaccatggccctgccagaagaagcaaagatcaaagacgcctaccacatgctgaagagacagggcatagtgcagtctgacccaccaattcctgtggataggacgctgatcccctctccaccacctcgtcccaaaaaccctgtttttgatgatgaggagaagtccaagcttttagccaagctgctgaaaagcaaaaacccagatgacctgcaggaggccaacaagctcatcaagtccatggtgaaggaagacgaggcacggatccagaaggtgaccaagcgtctgcacacgttagaggaagttaacaacaacgtgagactgctcagtgagatgctgcttcattacagccaggaggactcttcggacggggacagagagctgatgaaggagctgtttgatcagtgtgagaacaagaggcggactttatttaaactcgccagtgagactgaggacaatgataacagtttgggggacatcctgcaagccagtgacaacctctcccgggtcatcaactcttacaaaacaattattgaagggcaggtcatcaatggcgaggtggctaccttaaccctgcctgactcggaaggaaacagtcagtgcagtaaccaaggcacgctcatcgaccttgcggagctggacacgaccaacagtttgtcctccgtgttggccccagcacctactccaccctcctcaggcatcccaatcctccctccaccaccccaggcctcaggacctccacggagccgctcctctagccaggccgaggccaccctggggcccagcagcacaagcaacgccctctcctggctggacgaggagctactctgcttgggcctcgccgacccagcccctaatgttcctcccaaagagtcagctgggaacagccagtggcacctgctccagagggaacagtccgacctggacttcttcagccccaggccggggaccgctgcctgtggcgcctccgatgctcctctgctccagccctcagccccctcctcaagcagctcccaagctccactgccgcctcccttcccagctcctgtggtcccagccagtgttcctgcccccagtgcgggctcctccttgttttctactggagtggccccagccttggccccaaaagttgagcccgcagtccctgggcaccatggcttggcgttgggcaacagcgcgctgcaccacctggatgccctcgatcagcttctagaagaggccaaagtgacctcgggcttggtgaaacccactacctcccctctcatccccaccaccaccccagccaggcccctcctgcccttctccacggggcccggcagcccgctcttccagccactgagtttccagtcccagggcagccccccgaaggggcctgagctctccctggccagcatccacgtgcccctggaatcgatcaagcctagcagtgcccttcctgtgacagcctacgataaaaacggcttccgcatcctcttccactttgccaaggagtgtcccccaggacgacctgacgtgctggtggtggtggtgtccatgctgaacacggctcccttacctgtcaagagcatcgtgctgcaggctgcagtgcccaagtcaatgaaagtgaagttgcagccaccttctgggacagaactctctccatttagccccatccagccacctgcagccatcacccaggtcatgttgctggccaatccactgaaggagaaggtgcggcttcggtataagctgaccttcgccctgggggagcagctgagcacagaggtgggcgaggtggaccagttccctcctgtggaacagtgggggaacctatgaccccagaggacgctgtgatctccaccttgaagccaggcaggctgccctgagacgaggagggctctggtcccgtcactctccatgccctgacaacagtgcttgtagctttgatgtggaacaggggccctgggcatttctgctgagaaccaaactgctgctgtgataacctctcctttggcccctaaaaggacctgtttttatctacctgtgtgacttgaagtggccatatgctgtcaggggtgcggagtggcccctgacttcactgctgtcccgggaacatggacccccaggcttggcgtaggtgtttgcttccttctactggcattcactgaagccactggggtgggggtctctaaagagagactgtcatgggtcattccccacaagagccacatcctcacacctgacagatgcacggcccaaggggctgcagccctgttgcaattccatgcttcccccgccaaccagctcctgctgccatccccagggaggtggcccaggaaggtgcctggcccagaataaggaactggcatactgcaaagtccccagccctgcctctggtggacagcatcgtcctggaatggccacggagtgatgagttgtgtgcttgtccctggcagtggcaggctgtgtcctatggacatcttggcaggacatggaatttggcctcatgacaggcccaactagggataggaaggaaaatgaagagagccagtatttccccttctccagaagcaggtactcagctttctgggaaaagcgtgcctccagccgtggggacaggccatcctactgactacctcttgcttggcatgaaataaactgctatcctccccttggaatctaccgccactctacatcctactgctttggcctccctctcctctcaccagatggcatgtggtgtggcacctgtggctggacacaggaggcctcaggatcacaaatgttacactagacatatgtcctaatgtgctgcccagaaacctcaactgttccccagctactgaggggcactgtcagcgagatgttgggtctggaggtgatgagatcgggccacacttgagctgagtcaccagaccctattgcttcaacagtgcttggcccccgccagcttgtcccagccactctagctgctggatgtgatcctgggacatgtactccaagcctccgtcacaaaaaaaaaatcaccagctgccatagacacgggggaagcttgcggagcccaggtgaacaagctcagcaatcggacatctctggggaaaggaaggtggcacagaccatgttccctggttcctccctgccccttgccaggcttccttattccttactatgggaagaggtcatatcccttccctgcccctcgctgtctttagcaagcaggtttcactgcttcattagaagaggacaagtcaaaagtgaatcatttttcactacttaaggaataaatccaagagctttccagagactggctgctgcagccctgggaatgtctgtggaattactatgtggaaatggaactttgtgttatgctctagacattacagttatttgagtgttactcgttactgttgaggtcagtgcttcgtggcaaatggctgtactggatatcccagctctgctgcccttgttttgctgcatgttaaataaaaccattttcactgt

SEQ ID NO: 236809 - DNA, 2172 bp, Artificial Sequence
  derived and/or modified sequence
atggccgaggccgagggggagagcctggagagctggctgaacaaggccaccaaccccagcaaccggcaggaggactgggagtacatcatcggcttctgtgaccagatcaacaaggagctggagggcccccagattgctgtgcggctgctggcccacaagatccagagcccccaggagtgggaggccctgcaggccctgactgtgctggaggcctgcatgaagaactgtggccgccgcttccacaatgaggtgggcaagttccgcttcctgaatgaactcatcaaggtggtgagccccaagtacctgggggacagagtgtctgagaaggtgaagaccaaggtgattgagctgctgtacagctggaccatggccctgcctgaggaggccaagatcaaggatgcctaccacatgctgaagaggcagggcatcgtgcagagcgacccccccatccctgtggacaggaccctcatccccagccccccaccccggcccaagaaccctgtgtttgatgatgaggagaagagcaagctgctggccaagctgctgaagagcaagaacccagatgacctgcaggaggccaacaagctgatcaagtccatggtgaaggaggatgaggcccgcatccagaaggtgaccaagaggctgcacaccctggaggaggtgaacaacaacgtgcggctgctgtctgagatgctgctgcactacagccaggaggacagcagtgatggagaccgggagctgatgaaggagctgtttgaccagtgtgagaacaagaggaggaccctcttcaagctggccagcgagacagaggacaatgacaacagcctgggggacatcctgcaggccagtgacaacctgagcagggtcatcaacagctacaagaccatcatcgagggccaggtgatcaatggagaggtggccaccctgaccctgcctgacagcgagggcaacagccagtgcagcaaccagggcaccctgattgacctggccgagctggacaccaccaacagcctgagctctgtgctggccccagcccccaccccacccagcagcggcatccccatcctgcccccaccaccccaggccagcggccccccaagaagccgcagcagcagccaggccgaggccaccctgggccccagcagcaccagcaatgccctgtcctggctggatgaggagctgctgtgcctgggcctggccgaccctgccccaaatgtgccccccaaggagagcgctggcaacagccagtggcacctgctgcagcgggagcagagcgacctggacttcttcagcccccggcccggcacagctgcctgtggggccagtgatgcccccctgctgcagcccagcgcccccagcagcagcagcagccaggcccccctgcccccacccttccctgcccctgtggtgcctgcctctgtgcctgcccccagcgctggcagcagcctcttcagcactggagtggccccagccctggcccccaaggtggagcctgctgtgcccggccaccacggcctggccctgggcaacagcgccctgcaccacctggatgccctggaccagctgctggaggaggccaaggtgaccagcggcctggtgaagcccaccaccagccccctcatccccaccaccaccccagcccggcccctgctgcccttcagcactggacctggcagccccctcttccagcccctgtccttccagagccagggcagcccccccaagggccctgagctgagcctggccagcatccacgtgcccctggagagcatcaagcccagcagcgccctgcctgtgacagcctatgacaagaatggcttccgcatcctcttccactttgccaaggagtgccccccaggccgcccagatgtgctggtggtggtggtgtccatgctgaacacagcccccctgcctgtgaagagcatcgtgctgcaggccgctgtgcccaagtccatgaaggtgaagctgcagccccccagcggcacagagctgagccccttcagccccatccagcccccagctgccatcacccaggtgatgctgctggccaaccccctgaaggagaaggtgcggctgcgctacaagctgacctttgccctgggggagcagctgagcacagaggtgggggaggtggaccagtttcctcctgtggagcagtggggcaacctgtag

SEQ ID NO: 236810 - DNA, 462 bp, Artificial Sequence
  derived and/or modified sequence
atggccgaggccgagggggagagcctggagagctggctgaacaaggccaccaaccccagcaaccggcaggaggactgggagtacatcatcggcttctgtgaccagatcaacaaggagctggagggcccccagattgctgtgcggctgctggcccacaagatccagagcccccaggagtgggaggccctgcaggccctgactgtgctggaggcctgcatgaagaactgtggccgccgcttccacaatgaggtgggcaagttccgcttcctgaatgaactcatcaaggtggtgagccccaagtacctgggggacagagtgtctgagaaggtgaagaccaaggtgattgagctgctgtacagctggaccatggccctgcctgaggaggccaagatcaaggatgcctaccacatgctgaagaggcaggccttcagccaggccgctgagaagcagaagcccaggtag

SEQ ID NO: 236811 - DNA, 2172 bp, Artificial Sequence
  derived and/or modified sequence
atggccgaggccgagggcgagagcctggagagctggctgaacaaggccactaacccaagtaatagacaggaggactgggaatatatcattggattctgcgatcagatcaacaaagagctcgaaggcccacaaattgccgtgcgcctactcgcccataaaattcagtccccgcaggagtgggaggccctccaggccctgacggtcctcgaggcctgcatgaagaattgcggcagacgctttcataatgaagtgggcaagttcagatttctcaacgagctgataaaggtcgtgagccccaagtacctgggtgatcgcgtgtctgagaaggtcaagacaaaagttatagagctcctatacagctggacaatggccttaccggaggaggccaagatcaaggatgcttaccacatgctaaagcgacagggcatcgtacaatctgatcctcccattcccgtagaccggactcttattccttctccgccaccacgcccgaaaaaccccgtgtttgatgatgaggagaagagcaaactgctggccaagctcttgaagtctaaaaatcctgacgacctccaagaagcaaataagttgatcaaatccatggtcaaagaggatgaagccagaatccagaaagtgaccaaacgattacatacactggaggaagttaacaacaacgtgcgcctattgagtgagatgcttctccattatagccaggaggattcttcagatggtgaccgagaactgatgaaggagttgtttgatcagtgtgagaataagcgacggactctctttaagctggcaagcgagacagaggataacgataacagtctgggtgatattctccaggccagcgataacctgagtcgggtgattaattcctacaagactatcatcgaaggtcaagtgatcaatggcgaagtggctactctgacactgcccgactctgagggaaattcccagtgctcgaaccaggggacacttattgacttagccgaactagatactaccaactccctgagctccgtgcttgcccctgccccaactccccccagctctgggatccctatcctgccgccaccaccacaagctagcggacccccacgatccagatcaagcagtcaagcagaggctacattgggtccgtcaagcacctccaacgcccttagctggctggacgaagagttactgtgtctcggactggccgatcctgctcctaatgttccccccaaagaatccgcgggcaacagtcaatggcatctattgcagcgcgagcagtctgacttggatttttttagtcctcgccctggaactgccgcttgcggcgccagcgacgcacccctgctgcagccctcggctcctagtagcagctcatcccaagctcctttgccacctcccttcccagcgcctgtagttcctgcgtccgtgccagctccttctgctggctcgtcattattttccaccggggtggcccctgctctggcccctaaagttgagcctgcagtcccgggtcaccatggcctggctcttgggaattcagccctccatcacctggacgctttggatcagctcctcgaggaagccaaagtcacatccggcttggtgaagccaactaccagtcctctgatccccacgacaacccctgctcgaccgcttttgccattcagcaccggccctggctctccgcttttccagcccctgagttttcagtcacaagggtcgccccccaagggccctgagctctccttggcctctatccacgtcccactggaatcgatcaaaccgtccagcgctttacctgtgactgcctatgacaaaaatggctttcgcatactgtttcactttgccaaagagtgtccgcccggacgccctgacgttttagttgtggtcgtgtccatgctcaacaccgctcctctcccggtgaagtctatagtactccaggcagctgtgcccaaatcaatgaaagtcaaactgcagccaccctcaggaacagaactttcacctttttctcctatacagcctccagccgcgattacacaggtcatgttgcttgcaaacccacttaaagaaaaggtgcgcctccggtataagctgaccttcgcactcggtgaacagctgtctacagaggtgggggaagttgatcagtttccgccagttgaacagtggggaaatctctag

SEQ ID NO: 236812 - DNA, 462 bp, Artificial Sequence
  derived and/or modified sequence
atggccgaggccgagggcgagagcctggagagctggctgaacaaggccactaatcctagtaaccgccaggaggattgggaatacatcatcggattttgtgaccagattaacaaagagctggaaggcccacagatcgctgtccgcctgctggcacataagattcagtccccgcaggagtgggaagcccttcaagccctcacagtgctcgaagcctgtatgaagaactgcggaagaaggtttcacaacgaggtcgggaaatttaggttcctcaatgaactgatcaaagttgtgtcccccaagtaccttggggacagagtgagcgaaaaagtgaagactaaagtaatcgagctgttgtattcttggaccatggccctgcccgaggaggcgaaaattaaggatgcctaccatatgttgaagaggcaggctttcagtcaggccgccgaaaaacagaaaccacggtag

SEQ ID NO: 236813 - DNA, 2172 bp, Artificial Sequence
  derived and/or modified sequence
atggccgaggcagaaggcgagagcctggagagctggctgaataaagccactaatccttcaaacaggcaggaagattgggagtacatcatcggcttctgtgaccagatcaataaagaacttgagggtcctcagatcgccgtgcgcctcctcgcgcacaaaatccaatctccccaggagtgggaggctctgcaagctttaactgtgctcgaagcctgtatgaagaattgcggcaggaggttccataatgaagtggggaagtttcggtttctcaacgagcttataaaggtagtgtctcccaagtatctcggagatcgggtctcagagaaggtgaagacaaaggttatcgaacttttgtacagctggacaatggccttacccgaggaggccaagatcaaagatgcctatcacatgcttaaacgacagggcatcgtacagagtgaccctcctatcccagtggatcgcaccctgatcccctcgccacctcctcgacccaaaaaccctgtattcgatgatgaagagaagtccaagttgctggccaagcttctcaaaagtaaaaatccagacgaccttcaggaggcaaataagctcattaagagcatggttaaagaggacgaggcgagaatacagaaggtaacaaaaaggctgcacacgttggaagaagtgaataataacgtccgccttttatctgagatgctgctccactactcccaggaagactctagcgatggggaccgggagttaatgaaagagctgttcgaccaatgtgagaataaacgaaggaccctcttcaaactcgcctccgagaccgaggacaacgataatagcttgggagacatcctgcaagcctccgataacttaagcagagtgattaactcatacaagacaattatcgaagggcaggtgattaacggggaagtggccacactgaccctcccggacagcgagggaaactcacagtgtagtaaccagggtaccttgatagacctggccgaactggacacgaccaactcgctatcgagcgtccttgcgccagctcccaccccccctagttccggcattcctattctccctccacctccacaggcaagcggccctcccaggtctagaagtagctcacaggccgaggccacacttggtccatccagtacctcgaatgcactgtcttggctggatgaagaactgttgtgcctgggcctcgcagacccagcgccaaacgtccccccaaaggagtctgcgggaaattcacagtggcacctcctacagagggagcagtcagacctcgatttcttcagtccccgtccgggtactgctgcatgcggcgctagtgacgcacccctcctgcaaccctcagctccctctagctctagctcccaggctccgctgccccctccgtttcctgcgcctgtggttcctgcctctgtgcccgctcccagtgcgggatcctctttattcagcaccggggtggcaccagccctagcaccaaaggtggaacctgctgtccctggtcaccatggcctggccctcggcaattctgctctacatcacctcgatgccttggaccagctgctcgaagaggctaaggtgactagtggcttagtgaagccaaccacatcccccctcattcccactacaacacccgcacggccactgctgccattttccaccgggccagggtcgccattgttccagccactctcgtttcagtcacaggggtcacctccaaagggaccggaactttctttagcttccatacatgtgcctttggaatctatcaaaccctcttccgctctgcccgtgactgcttacgacaagaacggattccggatcctgtttcactttgctaaggagtgcccccctggaaggcctgacgttctcgtggtcgtggtctctatgctcaataccgctccgcttcccgtcaagtccatcgtgttacaggccgcagtgccaaaatcaatgaaggtgaaactgcagccaccatcagggacagagctcagccctttctctccaatccagcctccggctgcaatcacacaggtgatgttactcgcgaatcccttgaaggaaaaggttaggctgcggtataagctgacatttgcgctaggggagcaactcagtacagaagtgggtgaagtggaccagttccctccggtggaacagtggggaaatctttag

SEQ ID NO: 236814 - DNA, 462 bp, Artificial Sequence
  derived and/or modified sequence
atggctgaggccgaaggggaaagtttggagagttggcttaacaaggcaactaatccatccaatcgccaggaggactgggagtatatcattggcttttgcgatcagatcaacaaagaactagagggacctcaaattgctgttcggttgctggctcacaaaattcaaagtccccaagagtgggaagcccttcaggccttaacagtcctggaagcctgtatgaagaactgcggcagacgctttcacaatgaggtgggcaagtttcggttcttgaatgagctgattaaggtagtaagccctaagtacctgggcgatcgggtgtcagaaaaagtgaagacaaaggtgatcgaactcttatattcctggacaatggcactgcctgaagaagcaaagatcaaggacgcatatcacatgctgaaacggcaggcatttagccaggccgcagaaaagcagaagcccagatag

SEQ ID NO: 236815 - DNA, 2172 bp, Artificial Sequence
  derived and/or modified sequence
atggccgaggccgagggcgagagcctggagagctggctgaacaaggccaccaaccccagcaacagacaggaggactgggagtacatcatcggcttctgcgaccagatcaacaaggagctggagggcccccagatcgccgtgagactgctggcccacaagatccagagcccccaggagtgggaggccctgcaggccctgaccgtgctggaggcctgcatgaagaactgcggcagaagattccacaacgaggtgggcaagttcagattcctgaacgagctgatcaaggtggtgagccccaagtacctgggcgacagagtgagcgagaaggtgaagaccaaggtgatcgagctgctgtacagctggaccatggccctgcccgaggaggccaagatcaaggacgcctaccacatgctgaagagacagggcatcgtgcagagcgacccccccatccccgtggacagaaccctgatccccagccccccccccagacccaagaaccccgtgttcgacgacgaggagaagagcaagctgctggccaagctgctgaagagcaagaaccccgacgacctgcaggaggccaacaagctgatcaagagcatggtgaaggaggacgaggccagaatccagaaggtgaccaagagactgcacaccctggaggaggtgaacaacaacgtgagactgctgagcgagatgctgctgcactacagccaggaggacagcagcgacggcgacagagagctgatgaaggagctgttcgaccagtgcgagaacaagagaagaaccctgttcaagctggccagcgagaccgaggacaacgacaacagcctgggcgacatcctgcaggccagcgacaacctgagcagagtgatcaacagctacaagaccatcatcgagggccaggtgatcaacggcgaggtggccaccctgaccctgcccgacagcgagggcaacagccagtgcagcaaccagggcaccctgatcgacctggccgagctggacaccaccaacagcctgagcagcgtgctggcccccgcccccaccccccccagcagcggcatccccatcctgcccccccccccccaggccagcggcccccccagaagcagaagcagcagccaggccgaggccaccctgggccccagcagcaccagcaacgccctgagctggctggacgaggagctgctgtgcctgggcctggccgaccccgcccccaacgtgccccccaaggagagcgccggcaacagccagtggcacctgctgcagagagagcagagcgacctggacttcttcagccccagacccggcaccgccgcctgcggcgccagcgacgcccccctgctgcagcccagcgcccccagcagcagcagcagccaggcccccctgcccccccccttccccgcccccgtggtgcccgccagcgtgcccgcccccagcgccggcagcagcctgttcagcaccggcgtggcccccgccctggcccccaaggtggagcccgccgtgcccggccaccacggcctggccctgggcaacagcgccctgcaccacctggacgccctggaccagctgctggaggaggccaaggtgaccagcggcctggtgaagcccaccaccagccccctgatccccaccaccacccccgccagacccctgctgcccttcagcaccggccccggcagccccctgttccagcccctgagcttccagagccagggcagcccccccaagggccccgagctgagcctggccagcatccacgtgcccctggagagcatcaagcccagcagcgccctgcccgtgaccgcctacgacaagaacggcttcagaatcctgttccacttcgccaaggagtgcccccccggcagacccgacgtgctggtggtggtggtgagcatgctgaacaccgcccccctgcccgtgaagagcatcgtgctgcaggccgccgtgcccaagagcatgaaggtgaagctgcagccccccagcggcaccgagctgagccccttcagccccatccagccccccgccgccatcacccaggtgatgctgctggccaaccccctgaaggagaaggtgagactgagatacaagctgaccttcgccctgggcgagcagctgagcaccgaggtgggcgaggtggaccagttcccccccgtggagcagtggggcaacctgtag

SEQ ID NO: 236816 - DNA, 462 bp, Artificial Sequence
  derived and/or modified sequence
atggccgaggccgagggcgagagcctggagagctggctgaacaaggccaccaaccccagcaacagacaggaggactgggagtacatcatcggcttctgcgaccagatcaacaaggagctggagggcccccagatcgccgtgagactgctggcccacaagatccagagcccccaggagtgggaggccctgcaggccctgaccgtgctggaggcctgcatgaagaactgcggcagaagattccacaacgaggtgggcaagttcagattcctgaacgagctgatcaaggtggtgagccccaagtacctgggcgacagagtgagcgagaaggtgaagaccaaggtgatcgagctgctgtacagctggaccatggccctgcccgaggaggccaagatcaaggacgcctaccacatgctgaagagacaggccttcagccaggccgccgagaagcagaagcccagatag

SEQ ID NO: 236817 - DNA, 1758 bp, Artificial Sequence
  derived and/or modified sequence
atggcccccgacctcgcctctcagcgacattctgaatccttcccctccgtgaacagtcggcccaatgtgatactgcccggcagggagggtagacgtgaagggctgccccctggtggtggcaccaggggtagcctagtccccactaggccagttcccccatcaccagcccctctgggcacttccccttactcttggagtcgcagcggtcccgggcgaggcggcggggcaggctcctcacgtgtgccccggggggttcctggccccgccgtatgtgcccctggatccctgttgcatcatgcctcacccactcagaccatggctgccgcagacggatcactcttcgacaatccacggaccttcagccggcgtccacccgcacaagccagtaggcaagccaaggccactaaacgcaagtaccaggctagtagcgaggcccccccagcgaagcggcgaaatgagaccagttttctacccgctaaaaagacatccgttaaggaaacccagcgaacttttaaagggaatgcccagaaaatgttttctccgaagaaacactctgtaagcacgtccgatagaaaccaggaggagagacagtgcatcaaaacaagcagcctcttcaagaacaatcctgatattcctgaactgcaccgcccagtggttaaacaagtacaggaaaaggttttcactagtgccgcgttccacgaactaggacttcacccacacttgatatctacgataaataccgtgctcaagatgagcagcatgacttccgtgcaaaaacaatcaattcctgtgctgttggagggcagagacgccctggtacggtcgcagactgggtctggaaaaactctggcctattgcattcccgtcgttcagtctttgcaggccatggagagcaaaatacagaggtctgatggaccttatgctctggtgctggtgccaacccgagaactggcactgcagtcattcgacacagtccagaagcttctcaagccattcacgtggatcgtccccggcgtgctgatgggtggcgagaagcgtaagtccgaaaaagctcggctgagaaaagggataaatatcttgatttcaacccctgggcggttggtggatcatatcaaatccacaaagaacattcattttagcaggctgcgatggcttgtcttcgatgaagccgatcgaattctcgatttggggtttgagaaggacattaccgtcatcctcaatgctgtgaacgctgagtgccaaaaaaggcagaacgtgttactttccgctacgctcaccgaaggtgtcacaagactggccgacatttcgctgcatgatcccgtcagcatctcagtgctggacaagtcccacgaccaactgaatcccaaggataaggctgtgcaagaggtgtgtcccccgccagcaggggataaactggattcctttgcaattcctgagtctctgaaacagcatgttacagttgttccatccaaattacgcctggtctgtttagccgccttcattctgcagaagtgtaaattcgaggaggatcagaagatggtggtcttcttctccagttgcgaactggtggagtttcactactccctgttcctgcagactttgctgtcttccagcggtgcgcccgcctccggccagctccccagcgcttctatgcgtctcaagttcctgcgtctgcatggcggcatggagcaggaggaaagaactgccgtgttccaggaattcagtcattctcgtagaggcgtgctcttatgcacatag

SEQ ID NO: 236818 - DNA, 1758 bp, Artificial Sequence
  derived and/or modified sequence
atggccccagacctggccagccagaggcacagcgagagcttccccagcgtgaacagccggcccaacgtcatcctgcccggccgggagggcagaagagagggcctgcccccaggcggcggcacccggggcagcctggtgcccaccaggcctgtgccccccagccctgcccccctgggcaccagcccctacagctggagccgcagcggccctggccggggcggcggggccggcagcagccgggtgccccggggcgtgcccggccctgctgtgtgtgcccctggcagcctgctgcaccacgccagccccacccagaccatggctgctgctgatggcagcctgtttgacaaccccaggaccttcagccggcggcccccagcccaggccagccggcaggccaaggccaccaagaggaagtaccaggccagcagcgaggcccccccagccaagagaagaaatgagaccagcttcctgcctgccaagaagacctctgtgaaggagacccagaggaccttcaagggaaatgcccagaagatgttcagccccaagaagcacagcgtgtccaccagtgacaggaaccaggaggagcggcagtgcatcaagaccagcagcctcttcaagaacaacccagacatccctgagctgcacaggcctgtggtgaagcaggtgcaggagaaggtgttcaccagcgctgccttccacgagctgggcctgcacccccacctgatcagcaccatcaacacagtgctgaagatgagctccatgacctctgtgcagaagcagagcatccctgtgctgctggagggcagagatgccctggtgcgcagccagacaggcagcggcaagaccctggcctactgcatccctgtggtgcagagcctgcaggccatggagagcaagatccagaggagtgatggcccctatgccctggtgctggtgcccacccgggagctggccctgcagagctttgacacagtgcagaagctgctgaagcccttcacctggatcgtgcctggggtgctgatgggcggggagaagaggaagtctgagaaggcccggctgaggaagggcatcaacatcctgatcagcaccccaggccgcctggtggaccacatcaagagcaccaagaacatccacttcagccggctgcgctggctggtgtttgatgaggccgaccgcatcctggacctgggctttgagaaggacatcaccgtcatcctgaatgctgtgaatgctgagtgccagaagaggcagaatgtgctgctgagcgccaccctgacagagggcgtgacccggctggccgacatcagcctgcatgaccctgtgtccatctctgtgctggacaagagccatgaccagctgaaccccaaggacaaggctgtgcaggaggtgtgccccccacctgctggggacaagctggacagctttgccatccctgagagcctgaagcagcacgtgacagtggtgcccagcaagctgcggctggtgtgcctggccgccttcatcctgcagaagtgcaagtttgaggaggaccagaagatggtggtgttcttcagcagctgtgagctggtggagttccactacagcctcttcctgcagaccctgctgagcagcagcggggccccagccagcggccagctgcccagcgcctccatgaggctgaagttcctgcggctgcatggaggcatggagcaggaggagaggacagctgtgttccaggagttcagccacagccggcggggcgtgctgctgtgcacctag

SEQ ID NO: 236819 - DNA, 1758 bp, Artificial Sequence
  derived and/or modified sequence
atggcccccgacctggccagccagcggcacagcgagagcttccccagcgtaaactctcggcctaatgtgattctcccaggtcgagagggccggagggagggtctgccaccaggcggcggaacccgtgggagcctcgtgccaacccgcccagtgcccccttcccccgccccattgggcacaagcccctattcatggtctaggtccggtcctgggcggggcggaggtgcaggatcgagcagggtgccacgcggcgtgcccggacccgcggtgtgcgccccaggttccctattgcatcacgcctccccgacgcagactatggctgccgccgatggttcgttgttcgataacccgcgtaccttctcacggaggcctcctgcccaggccagccggcaggccaaagcaaccaaaagaaagtaccaagctagttcggaagcaccccccgcgaagaggaggaacgaaaccagctttcttcccgccaagaaaaccagcgtcaaggaaacacagaggacctttaagggtaatgctcagaagatgttttctcctaagaagcacagtgtgtcaacctccgaccgaaaccaggaagaacggcaatgtattaagacctctagcctgtttaagaataatccagatattccagaactgcatcggcctgttgttaaacaggtgcaggaaaaagtgttcactagtgccgcctttcacgagctggggctccaccctcatctaatttccacaattaacaccgttcttaagatgtcctcaatgacttctgttcagaagcaaagtattcctgtccttctggagggtagggacgctctggtcagaagccagactggctccggcaagactttagcgtactgcatccctgttgtccaatccctgcaggctatggagtctaaaatccagcggtctgatgggccttacgcattagtgttggtgcccactcgagagctcgcgcttcagagcttcgacaccgtgcaaaaactccttaaacctttcacgtggatcgtccctggcgtattgatgggaggtgaaaagcgtaaatccgaaaaggctaggctgagaaagggcataaacattctgatatctactccagggcggctggtcgatcatattaaatctaccaagaatattcacttctctaggttgcggtggctggtgttcgatgaggctgatcgaattctggatctgggctttgagaaggacattactgtgatcttgaacgccgttaacgctgaatgccagaaacgccagaacgtcctcctgtcagctaccctgacagaaggggtgactaggttagccgacatttcactccatgaccccgtgagcatttccgtgcttgataagagccatgatcagctcaatcctaaggacaaggccgtccaagaagtttgtccccctccagccggcgacaagcttgactcatttgccatccctgagtcattaaaacagcacgtcacagtggtccccagcaaactccgtctggtttgcctggctgcattcatcctccagaaatgtaagtttgaggaggaccagaaaatggtagttttcttctcttcatgtgaattagtggagtttcactattcgctgtttctacaaactcttctgtcttccagcggggctcctgcttccggccagctcccttcagcatctatgcggttgaaattcttacggcttcacggcggaatggaacaagaggagcggacagccgtttttcaggaattctcacactccaggcggggcgtgctgctatgcacttag

SEQ ID NO: 236820 - DNA, 1758 bp, Artificial Sequence
  derived and/or modified sequence
atggcacccgacctggccagccagcggcattctgagagctttccaagcgtgaactcacgtcctaatgtgatcctgcccggaagagagggtcggagagaaggcctgcccccaggtggagggactagggggtctttggtgccaacccgccctgtgcctccttctccagcaccgttggggaccagcccatacagttggtcccggagcggacccggacgcggagggggagcgggttctagtagagttccgaggggagtacctgggccagccgtgtgcgctcccggatccctgctccaccatgcctcgcctacacaaaccatggcggctgccgacgggtctcttttcgataacccccgtacctttagccggaggcctccagctcaggcttcaaggcaggctaaagcgactaagaggaaataccaggcttccagcgaagcgcctccggctaaaagacgcaatgagaccagctttctcccagctaaaaagacctcggtgaaggaaactcagagaacgttcaaggggaatgcccagaagatgttttctcctaagaaacactctgtgtccacttccgaccgcaaccaggaggagagacagtgcatcaagacatcgtcactatttaagaataaccccgacattcccgagctacacagaccagtggtgaaacaggtgcaggagaaagttttcacctccgccgctttccacgagctgggacttcatccacacctgatatcaactatcaacacagtgctgaagatgagcagtatgacgagtgtgcagaagcagagcatccctgtgctgctggaaggccgagacgctctggttcgcagccaaaccgggagtggcaagactctcgcttattgtatccccgttgtccaatccctccaggccatggagagcaaaattcagaggagtgatgggccatatgccctcgtgctggtccctactcgcgagttagcactccagtccttcgatactgttcagaaattgcttaagccctttacttggattgtaccaggggtgctcatgggcggtgaaaagagaaaaagcgagaaggctcggttgagaaagggaatcaacatactgatttccacaccaggccgtctggtggaccacattaaaagcactaagaatatacacttcagtcgactgcgatggctggtctttgatgaggcggatagaatcctagacttgggcttcgagaaagatataacagttatcttgaatgctgtgaatgctgaatgtcagaagagacagaacgtgttgctgtccgccaccctgacagagggagtgacacgcctcgctgatatcagtctgcacgacccagtgtctatttccgtccttgacaaaagccatgaccagctaaacccgaaggacaaggcagtgcaggaggtatgcccacccccagcgggagataagttggacagctttgcaatcccagaaagtctaaagcagcatgtaactgttgtaccctcaaagttacgcttagtgtgcctggccgcatttattttgcaaaaatgtaaatttgaggaggatcaaaagatggtcgtcttcttctccagctgcgaactggtcgaattccactatagcttattcctgcagacgctcctcagctcttctggcgcacccgcaagcggacagcttcctagtgcatcaatgagattaaagtttcttcgcttgcatggtggaatggagcaggaggagcgcacagctgtcttccaggagttttctcactcacgcagaggggtactcctatgcacctag

SEQ ID NO: 236821 - DNA, 2408 bp, Artificial Sequence
  derived and/or modified sequence
aaaaaggacagcgagcggggagccccgaggacccccttttccctgcccagggattgagctccagagcctgttagggagctacccagacaggctttagttcctaaagtgctgaggaaacgcacggggcggtaaaggggaggctcgtcggtgagatggcgccggatctcgcttctcagaggcattcagagagcttccccagcgtgaactctcggccgaatgtaattttgccaggccgcgagggacgcagagaggggctgccaccaggcgggggcacgcgcggtagtcttgtccctacccgcccggtgccgccgtccccggctcccctcgggacgagtccgtacagctggagccgttccggacccggaaggggcggtggcgcagggtcctcgcgcgtcccacgtggggtcccgggcccagcagtctgcgcaccgggctcgctgctgcaccacgcgtcacccacgcagaccatggcagccgccgacggttcgctcttcgacaaccccaggacgttctccagacgtcccccagcccaggcgagtcggcaagcaaaggctacgaaaagaaaataccaagcgtccagtgaggctcccccagcgaaacggaggaacgaaacttcatttctcccagccaagaaaactagtgttaaagaaactcagaggacttttaaggggaacgcacaaaaaatgttttctccaaagaagcattcggttagcacaagtgatagaaaccaggaggagagacagtgcattaagacttcatcactgtttaaaaacaaccctgacattccagaactccacagacctgtggtaaagcaggtgcaagaaaaagtgtttacttcagctgcttttcatgagctgggcctccacccacatttaatttccacaataaatacggtcttaaaaatgtctagtatgaccagtgttcagaagcaaagtattcctgtgttgctggaaggcagagatgctctcgtgagatcccagacgggctcaggtaaaactcttgcctattgcatccctgtggtccagtcccttcaagcaatggagtcaaaaatacagcgcagtgatggcccctatgccctggtgctcgtgccaacgagagagctagctctacaaagctttgacactgtccagaaactgcttaagcctttcacctggattgtgcctggagtgttaatgggaggagagaagagaaaatcagaaaaggccagactccgcaaaggaataaatatccttatctcaactcctggacgcctggtggatcatataaaatccacaaagaacattcattttagtcggctgcggtggttggtgtttgatgaagcagacagaatcttggatttgggttttgaaaaggacatcacagtgatacttaatgctgtaaatgctgaatgccaaaaacgacagaatgtcttgctatcagcgacactcacagaaggtgtaacgcggctagctgatatcagtttgcatgatccagtcagtatttctgtcctggacaagagccatgaccagttgaacccaaaggacaaagcggtccaggaggtctgtcctccaccagctggcgacaagctggacagctttgcaataccagagagtctcaagcagcatgtgactgtggttcccagcaaactgaggcttgtctgcctagcggccttcatccttcagaaatgcaagtttgaggaagaccagaagatggttgtctttttctcaagttgcgagctggtggagttccactacagcctcttcctacagaccctgctgagcagctcaggggcgccggcatcagggcagttgccatctgcctccatgcgattaaaattcctacggctgcatggcggcatggagcaggaggaaagaacagcagtgtttcaggaattttcacattccagaagaggcgtccttctttgcacgtgaagaactcaccctaagccagaggaaaggaaccttgcttttaataccatcattatgttgacgagttgataagaagtaccaccgaatggccggaaaatggagtttctaagccacctgattttaaggctgacattaggttttctgttggtctccggtggctgtccttgattgtccctggatggagtgcagtcacctttttcccagaaaggaaagatacctgcagcccgccctgggcgccaactgtcccttggcatcctccttggctgtccggcgcgtgcatttctttttcagaagatgcacctaaatcacctgtgctgctttcctccaccttctccgtatttttttccgcttgaagcatactgttctgtctgtgcagttcttaatttcctctcctcctggggaatttccaccgtgccaggaggctaggagacaaaggagatacggctgtgaagagtcacaatgtcagttctgtgtcccaaataaatgtagactttcgtgctt

SEQ ID NO: 236822 - DNA, 1758 bp, Artificial Sequence
  derived and/or modified sequence
atggcccccgacctggccagccagagacacagcgagagcttccccagcgtgaacagcagacccaacgtgatcctgcccggcagagagggcagaagagagggcctgccccccggcggcggcaccagaggcagcctggtgcccaccagacccgtgccccccagccccgcccccctgggcaccagcccctacagctggagcagaagcggccccggcagaggcggcggcgccggcagcagcagagtgcccagaggcgtgcccggccccgccgtgtgcgcccccggcagcctgctgcaccacgccagccccacccagaccatggccgccgccgacggcagcctgttcgacaaccccagaaccttcagcagaagaccccccgcccaggccagcagacaggccaaggccaccaagagaaagtaccaggccagcagcgaggccccccccgccaagagaagaaacgagaccagcttcctgcccgccaagaagaccagcgtgaaggagacccagagaaccttcaagggcaacgcccagaagatgttcagccccaagaagcacagcgtgagcaccagcgacagaaaccaggaggagagacagtgcatcaagaccagcagcctgttcaagaacaaccccgacatccccgagctgcacagacccgtggtgaagcaggtgcaggagaaggtgttcaccagcgccgccttccacgagctgggcctgcacccccacctgatcagcaccatcaacaccgtgctgaagatgagcagcatgaccagcgtgcagaagcagagcatccccgtgctgctggagggcagagacgccctggtgagaagccagaccggcagcggcaagaccctggcctactgcatccccgtggtgcagagcctgcaggccatggagagcaagatccagagaagcgacggcccctacgccctggtgctggtgcccaccagagagctggccctgcagagcttcgacaccgtgcagaagctgctgaagcccttcacctggatcgtgcccggcgtgctgatgggcggcgagaagagaaagagcgagaaggccagactgagaaagggcatcaacatcctgatcagcacccccggcagactggtggaccacatcaagagcaccaagaacatccacttcagcagactgagatggctggtgttcgacgaggccgacagaatcctggacctgggcttcgagaaggacatcaccgtgatcctgaacgccgtgaacgccgagtgccagaagagacagaacgtgctgctgagcgccaccctgaccgagggcgtgaccagactggccgacatcagcctgcacgaccccgtgagcatcagcgtgctggacaagagccacgaccagctgaaccccaaggacaaggccgtgcaggaggtgtgccccccccccgccggcgacaagctggacagcttcgccatccccgagagcctgaagcagcacgtgaccgtggtgcccagcaagctgagactggtgtgcctggccgccttcatcctgcagaagtgcaagttcgaggaggaccagaagatggtggtgttcttcagcagctgcgagctggtggagttccactacagcctgttcctgcagaccctgctgagcagcagcggcgcccccgccagcggccagctgcccagcgccagcatgagactgaagttcctgagactgcacggcggcatggagcaggaggagagaaccgccgtgttccaggagttcagccacagcagaagaggcgtgctgctgtgcacctag

SEQ ID NO: 236823 - DNA, 492 bp, Artificial Sequence
  derived and/or modified sequence
atgtgcaccgttggcggaaacgtgtccgaggacgcatgctacggcgaacccctggaattccccgaaaacaccaaaaacagagctaccctgggaagctcttctcccacggcagggcacacaccccagaggaaagagattagaatctcaaaaatgtatctccacatccctattcactgctccactacatataatgggcgtgacctcgaatcgacaagtgttccaatcaaccgcaggactgacaagaagaacgtcgtacggagacactccggatactgttcagccagggaggaacggaatccggtcatttcagccgcctggatgtctcttgaggaactcggaaaatctgctcgttgtcggaagaccaatacaccaggctcccatacctctgtcggggctaagaaggccgagttgaaggcagttgtgatggactgctggttacccgagtccggggagggtgtgcgggttcgagcccgccgcgaaaacaaattgtag

SEQ ID NO: 236824 - DNA, 597 bp, Artificial Sequence
  derived and/or modified sequence
atggccaaacagcctagtgatgtgagcagtgaatgcgatcgagagggcaggcaactgcaaccggctgagcgccctcctcagcttagaccaggggcacccacgtctctgcagactgaaccgcaggggaatcccgaaggtaatcacgggggggaaggggattcctgtcctcacggcagccctcaggggccgctggcccccccggcgagtccaggaccttttgccactcgcagtcccttatttatctttatgcggagatcatcactgctttctaggtccagctccggatatttttcattcgatacagacagatccccagcacctatgagttgtgacaagtcaacacaaactccatcgccgccgtgtcaggcattcaatcactacctcagcgccatggcttccatgcgccaggcagaacctgccgacatgaggcctgagatttggatcgcccaggaattacggagaattggagatgaatttaacgcttactacgctcgtcgcgtgtttctgaataactaccaagccgccgaagaccatccccggatggtgatcctgagattgttgcgctacatagtcagactagtttggcggatgcactag

SEQ ID NO: 236825 - DNA, 597 bp, Artificial Sequence
  derived and/or modified sequence
atggccaagcagcccagtgatgtgtccagtgaatgtgaccgggagggccggcagctgcagcctgctgagaggcctccccagctgcggcctggggcccccaccagcctgcagacagagccccagggcaaccctgagggcaaccacggcggggagggggacagctgcccccacggcagcccccagggccccctggcccccccagccagccctggcccctttgccaccaggagccccctcttcatcttcatgaggaggagcagcctgctgagccgcagcagcagcggctacttctcctttgacacagacaggagccctgcccccatgagctgtgacaagagcacccagacccccagccccccctgccaggccttcaaccactacctgagcgccatggcctccatgaggcaggccgagcctgctgacatgaggcctgagatctggatcgcccaggagctgcggagaattggagatgagttcaatgcctactatgcccggcgggtcttcctgaacaactaccaggccgctgaggaccaccccaggatggtgatcctgcggctgctgcgctacatcgtgcggctggtgtggaggatgcactag

SEQ ID NO: 236826 - DNA, 597 bp, Artificial Sequence
  derived and/or modified sequence
atggccaagcagcccagcgacgtgagcagcgagtgcgaccgggagggaaggcagctgcagccggccgagcgtcctccccagctacggcccggcgccccaacttcacttcagactgagccgcagggcaatcccgaaggtaaccatggaggggaaggcgatagttgcccacatgggagtccacaaggacctttggcaccacccgccagtcccgggccctttgctactcgctctccattattcatcttcatgaggaggtcttccctcttaagccggtcgtcaagcggctatttttctttcgacacagatagaagcccggcacctatgagctgcgacaaatccactcagaccccgtcacctccctgtcaggcctttaaccactatctctctgcaatggcttctatgagacaggccgagccagcagatatgaggcctgagatctggattgcccaggaactgcggagaatcggcgatgagtttaacgcctactatgcccggagggtgtttctgaataactaccaggccgccgaggaccacccaagaatggtgattctgcggctgttgcgctacatcgtgagactggtgtggcgtatgcactag

SEQ ID NO: 236827 - DNA, 597 bp, Artificial Sequence
  derived and/or modified sequence
atggccaaacagccctctgatgtgagctcggagtgtgatagggagggcagacagctgcagccggcagaaagacccccacagctacgtccaggggctcctacatccctccagaccgaaccacagggtaacccagaagggaatcacggcggtgagggggacagttgtccgcatgggagccctcaaggaccattggctccacctgcatccccagggccatttgccacccgatcccctctgttcatcttcatgcgtcgctccagcctgctgagcaggagttcaagtggatacttttcattcgacacggacaggtctccagctccgatgtcttgtgacaagtccacacagaccccatcccccccatgtcaggccttcaatcattacttgtccgctatggcctccatgagacaagctgaacctgccgacatgaggccagagatctggattgcacaggaactgcgcaggatcggggacgagtttaatgcctattacgccaggagggtcttcctaaataattaccaagcagccgaagaccacccaaggatggtgattctcagactgctgcgatacatagtgcggctggtgtggcgcatgcactag

SEQ ID NO: 236828 - DNA, 597 bp, Artificial Sequence
  derived and/or modified sequence
atggccaagcagcccagcgacgtgagcagcgagtgcgacagagagggcagacagctgcagcccgccgagagacccccccagctgagacccggcgcccccaccagcctgcagaccgagccccagggcaaccccgagggcaaccacggcggcgagggcgacagctgcccccacggcagcccccagggccccctggccccccccgccagccccggccccttcgccaccagaagccccctgttcatcttcatgagaagaagcagcctgctgagcagaagcagcagcggctacttcagcttcgacaccgacagaagccccgcccccatgagctgcgacaagagcacccagacccccagccccccctgccaggccttcaaccactacctgagcgccatggccagcatgagacaggccgagcccgccgacatgagacccgagatctggatcgcccaggagctgagaagaatcggcgacgagttcaacgcctactacgccagaagagtgttcctgaacaactaccaggccgccgaggaccaccccagaatggtgatcctgagactgctgagatacatcgtgagactggtgtggagaatgcactag

SEQ ID NO: 236829 - protein, 135 aa, Artificial Sequence
  derived and/or modified sequence
MAKQPSDVSSECDREGRQLQPAERPPQLRPGAPTSLQTEPQGNPEGNHGGEGDSCPHGSPQGPLAPPASPGPFATRSPLFIFMRRSSLLSRSSSGYFSFDTDRSPAPMSCDKSTQTPSPPCQAFNHYLSAMANWD

SEQ ID NO: 236830 - DNA, 408 bp, Artificial Sequence
  derived and/or modified sequence
atggcaaaacagccttccgacgtgtcttcagaatgtgaccgggagggaagacaactgcagcccgccgagcgacccccacagcttcggccaggagcacctacctcgctgcagacggaaccccagggaaatcctgagggcaatcacggaggagagggggactcatgtccccatggctctccacagggacccctcgcgccccctgcctctccaggacctttcgccacccggagcccacttttcattttcatgcggagatcctctctgctttctcgttcaagctcaggttacttcagctttgacaccgacaggtcccctgccccgatgtcttgcgacaaaagcacccagaccccttcaccgccctgtcaagcatttaatcattacctgtcggcaatggccaactgggactag

SEQ ID NO: 236831 - DNA, 408 bp, Artificial Sequence
  derived and/or modified sequence
atggccaagcagcccagtgatgtgtccagtgaatgtgaccgggagggccggcagctgcagcctgctgagaggcctccccagctgcggcctggggcccccaccagcctgcagacagagccccagggcaaccctgagggcaaccacggcggggagggggacagctgcccccacggcagcccccagggccccctggcccccccagccagccctggcccctttgccaccaggagccccctcttcatcttcatgaggaggagcagcctgctgagccgcagcagcagcggctacttctcctttgacacagacaggagccctgcccccatgagctgtgacaagagcacccagacccccagccccccctgccaggccttcaaccactacctgagcgccatggccaactgggactag

SEQ ID NO: 236832 - DNA, 408 bp, Artificial Sequence
  derived and/or modified sequence
atggccaagcagcccagcgacgtgagcagcgagtgcgaccgggagggcaggcaactgcagcccgccgaaagaccaccgcagctgcgaccaggagcacctacttcccttcaaaccgagcctcagggaaaccctgaaggaaaccatgggggggagggagattcttgcccacacgggtccccacagggacctttagcaccacctgcgtcccccggtccttttgcaactaggagccctttatttatctttatgaggaggagcagtctgctgtcccggagcagcagcgggtatttttcatttgatactgataggagccccgcccccatgtcttgtgacaaatccacccaaacaccatcgccaccttgccaggccttcaaccactatttgagtgcaatggccaattgggactag

SEQ ID NO: 236833 - DNA, 408 bp, Artificial Sequence
  derived and/or modified sequence
atggcgaagcaaccatccgatgtcagctcagaatgtgaccgggaaggtcggcagttgcagccggcagagaggcccccacagctgcgccctggagctccaacctcactgcaaaccgaaccacagggcaatcctgaaggcaatcacggcggagaaggggatagttgccctcacggttcaccccagggtccactcgcacctccagcctctcccggacccttcgctacaagatctcctctgttcatattcatgcgaaggagctctctgttatctcgatcctcatctggctatttttctttcgacacagacaggagcccagccccaatgagctgtgataagtcaactcaaactccgagccctccctgccaggcgtttaatcattaccttagcgctatggcaaattgggattag

SEQ ID NO: 236834 - DNA, 408 bp, Artificial Sequence
  derived and/or modified sequence
atggccaagcagcccagcgacgtgagcagcgagtgcgacagagagggcagacagctgcagcccgccgagagacccccccagctgagacccggcgcccccaccagcctgcagaccgagccccagggcaaccccgagggcaaccacggcggcgagggcgacagctgcccccacggcagcccccagggccccctggccccccccgccagccccggccccttcgccaccagaagccccctgttcatcttcatgagaagaagcagcctgctgagcagaagcagcagcggctacttcagcttcgacaccgacagaagccccgcccccatgagctgcgacaagagcacccagacccccagccccccctgccaggccttcaaccactacctgagcgccatggccaactgggactag

SEQ ID NO: 236835 - protein, 57 aa, Artificial Sequence
  derived and/or modified sequence
MASLSRPSLPSCLCSFLLLLLLQVSSSYAGLVAVARSWLIAASTSQAQVILLTQPLE

SEQ ID NO: 236836 - DNA, 739 bp, Artificial Sequence
  derived and/or modified sequence
gatctcgcggtttgttccgtttcattggagcttcccggaccgtgtgctcgacggtgccctaggtgccgtggggccacacgcgagtctgataagcaccctcccccggaatcatgcggtgctgtgaggcctagcgaagatgaagatagaatgcaaggtagaaagtgctggatacctttagaaagctgcaggactggtgcgatgggagttgagacgtaagaacctgcccgtccgtagggctctggatgctgctgaggcccgaggcccctatggcagatttgaaaattcacccttgtagagtcattcctgcctttgagcggactcccttttaagatctcaagagagcgttcggtggaggccctgggtctgcacagctcacctccctgggaactgctcgcccgagcgtcggagccggcgctggccccctgcagccggaaggttgcagccgcaggagccccggaggcccaggacacaggacagagtctcgttctgtcgcccaggctggagtgcagtggtgtgatctcggctcacttcaacctccgcctacagggttcaagggattctcctgcctcagcctcctgagtatctgggctcttgctcttgcagaatccacaggtctttcttgaggaaatctgtagacagaactttgtgctgcgtttttatctagggaaggaacagaagagtgtcgtctcctagaaatctagcactggagaaacgaggaaaattcttccagcgatggtct

SEQ ID NO: 236837 - DNA, 219 bp, Artificial Sequence
  derived and/or modified sequence
atggctaagcagccctccgacgtctccagtgaatgcgacagggaaggccgacagctgcagcccgcagagcgtccgcctcaacttagacctggcgccccaacttcactgcaaacagaacctcaagggaaccccgaggggaatcacgggggggaaggggattcgtgcccccatgggtcaccgcagggacccctggcacccccggcgagcccaggaccttag

SEQ ID NO: 236838 - DNA, 369 bp, Artificial Sequence
  derived and/or modified sequence
atggctaagcagccctcagacgtgtcaagtgaatgcgatagggagggccggcaactgcagcccgccgaacgccctcctcagctgcggcccggggcccctacatctttacagacggagcctcagggcaacccagagggcaaccacgggggggagggcgattcatgtccgcacggcagccctcagggcccattggcccctccagcttcccctggtccgttcgcaactagatcacccctgttcatctttatgagaaggtcgtccttactaagtagatctagctccggatacttcagcttcgatacggaccggtcaccagcccctatgagttgcgacaaatccacacagactcccagtccaccctgccagtag

SEQ ID NO: 236839 - DNA, 219 bp, Artificial Sequence
  derived and/or modified sequence
atggccaagcagcccagtgatgtgtccagtgaatgtgaccgggagggccggcagctgcagcctgctgagaggcctccccagctgcggcctggggcccccaccagcctgcagacagagccccagggcaaccctgagggcaaccacggcggggagggggacagctgcccccacggcagcccccagggccccctggcccccccagccagccctggcccctag

SEQ ID NO: 236840 - DNA, 369 bp, Artificial Sequence
  derived and/or modified sequence
atggccaagcagcccagtgatgtgtccagtgaatgtgaccgggagggccggcagctgcagcctgctgagaggcctccccagctgcggcctggggcccccaccagcctgcagacagagccccagggcaaccctgagggcaaccacggcggggagggggacagctgcccccacggcagcccccagggccccctggcccccccagccagccctggcccctttgccaccaggagccccctcttcatcttcatgaggaggagcagcctgctgagccgcagcagcagcggctacttctcctttgacacagacaggagccctgcccccatgagctgtgacaagagcacccagacccccagccccccctgccagtag

SEQ ID NO: 236841 - DNA, 219 bp, Artificial Sequence
  derived and/or modified sequence
atggccaagcagcccagcgacgtgagcagcgagtgcgaccgggagggccgccaattgcaacctgctgagcgccctccacaactacgcccaggggccccgaccagtttgcagactgagccccagggcaaccctgaaggtaaccatggcggagagggagattcttgcccacatggtagcccccagggacctctggcgccacctgcctcgcccggcccatag

SEQ ID NO: 236842 - DNA, 369 bp, Artificial Sequence
  derived and/or modified sequence
atggccaagcagcccagcgacgtgagcagcgagtgcgaccgggaggggaggcagctgcagccggctgaaaggcctccacagctgcgtcccggcgctcctacttctcttcagacagaaccacaaggcaaccccgagggcaaccatgggggcgagggcgacagctgtccacatgggtccccacagggtccactagcgcctcctgccagtcctggcccctttgcaactagatctcccctgttcatcttcatgcgcaggagcagcctgttgtctcggtccagttccggatattttagttttgacacagataggtcacctgcacctatgtcttgtgataaatctactcagaccccatcaccgccttgtcagtag

SEQ ID NO: 236843 - DNA, 219 bp, Artificial Sequence
  derived and/or modified sequence
atggccaagcagccatccgatgtcagctcagagtgcgatcgcgagggcagacagctgcaacccgcagagcggccaccccagctccgccctggcgctcctacttctctgcagactgagcctcaggggaatcccgagggaaaccacggaggggaaggggatagctgccctcacggatcaccccaagggccactggctcccccagcaagcccaggaccctag

SEQ ID NO: 236844 - DNA, 369 bp, Artificial Sequence
  derived and/or modified sequence
atggccaaacagccatccgatgtaagcagcgagtgcgaccgagaggggaggcagctccagcctgccgagcggccaccgcagcttcgcccaggcgcaccaacatcattacagaccgaaccacagggcaatcccgagggtaaccacggtggagagggtgacagctgccctcatgggtcaccccaaggccctctcgcaccgcctgcaagtcctggtccttttgcaactcgttctcctctgttcattttcatgcggagaagcagcctactgtcccgctctagtagcggatactttagtttcgatacggataggtcacctgctcccatgtcatgcgacaaaagcacccagacaccgagccctccttgccaatag

SEQ ID NO: 236845 - DNA, 219 bp, Artificial Sequence
  derived and/or modified sequence
atggccaagcagcccagcgacgtgagcagcgagtgcgacagagagggcagacagctgcagcccgccgagagacccccccagctgagacccggcgcccccaccagcctgcagaccgagccccagggcaaccccgagggcaaccacggcggcgagggcgacagctgcccccacggcagcccccagggccccctggccccccccgccagccccggcccctag

SEQ ID NO: 236846 - DNA, 369 bp, Artificial Sequence
  derived and/or modified sequence
atggccaagcagcccagcgacgtgagcagcgagtgcgacagagagggcagacagctgcagcccgccgagagacccccccagctgagacccggcgcccccaccagcctgcagaccgagccccagggcaaccccgagggcaaccacggcggcgagggcgacagctgcccccacggcagcccccagggccccctggccccccccgccagccccggccccttcgccaccagaagccccctgttcatcttcatgagaagaagcagcctgctgagcagaagcagcagcggctacttcagcttcgacaccgacagaagccccgcccccatgagctgcgacaagagcacccagacccccagccccccctgccagtag

SEQ ID NO: 236847 - protein, 431 aa, Artificial Sequence
  derived and/or modified sequence
MGGWKGPGQRRGKEGPEARRRAAERGGGGGGGGVPAPRSPAREPRPRSCLLLPPPWGAAMTPDLLNFKKGWMSILDEPGEPPSPSLTTTSTSQWKKHWFVLTDSSLKYYRDSTAEEADELDGEIDLRSCTDVTEYAVQRNYGFQIHTKDAVYTLSAMTSGIRRNWIEALRKTVRPTSAPDVTKLSDSNKENALHSYSTQKGPLKAGEQRAGSEVISRGGPRKADGQRQALDYVELSPLTQASPQRARTPARTPDRLAKQEELERDLAQRSEERRKWFEATDSRTPEVPAGEGPRRGLGAPLTEDQQNRLSEEIEKKWQELEKLPLRENKRVPLTALLNQSRGERRGPPSDGHEALEKEVQALRAQLEAWRLQGEAPQSALRSQEDGHIPPGYISQLVGVITVPVLQTRPLSSERLCDLPKVTPPAGLKGGI

SEQ ID NO: 236848 - DNA, 189 bp, Artificial Sequence
  derived and/or modified sequence
atgttgcaggtcgtacaggaaggaaatccagcaccattcatcattaataccgtgaagcggggtcggagagatagggagcgccagagaacaccatgggcccctcaccctctgggatttcaggggcgaagatatatttacgaatccccaaatcacagagggaaggatagctctttcctggctcagaagtag

SEQ ID NO: 236849 - DNA, 1296 bp, Artificial Sequence
  derived and/or modified sequence
atgggcggctggaagggccccggccagagaagaggcaaggagggccccgaggccagaagaagagccgccgagagaggcggcggcggcggcggcggcggcgtgcccgcccccagaagccccgccagagagcccagacccagaagctgcctgctgctgccccccccctggggcgccgccatgacccccgacctgctgaacttcaagaagggctggatgagcatcctggacgagcccggcgagccccccagccccagcctgaccaccaccagcaccagccagtggaagaagcactggttcgtgctgaccgacagcagcctgaagtactacagagacagcaccgccgaggaggccgacgagctggacggcgagatcgacctgagaagctgcaccgacgtgaccgagtacgccgtgcagagaaactacggcttccagatccacaccaaggacgccgtgtacaccctgagcgccatgaccagcggcatcagaagaaactggatcgaggccctgagaaagaccgtgagacccaccagcgcccccgacgtgaccaagctgagcgacagcaacaaggagaacgccctgcacagctacagcacccagaagggccccctgaaggccggcgagcagagagccggcagcgaggtgatcagcagaggcggccccagaaaggccgacggccagagacaggccctggactacgtggagctgagccccctgacccaggccagcccccagagagccagaacccccgccagaacccccgacagactggccaagcaggaggagctggagagagacctggcccagagaagcgaggagagaagaaagtggttcgaggccaccgacagcagaacccccgaggtgcccgccggcgagggccccagaagaggcctgggcgcccccctgaccgaggaccagcagaacagactgagcgaggagatcgagaagaagtggcaggagctggagaagctgcccctgagagagaacaagagagtgcccctgaccgccctgctgaaccagagcagaggcgagagaagaggcccccccagcgacggccacgaggccctggagaaggaggtgcaggccctgagagcccagctggaggcctggagactgcagggcgaggccccccagagcgccctgagaagccaggaggacggccacatcccccccggctacatcagccagctggtgggcgtgatcaccgtgcccgtgctgcagaccagacccctgagcagcgagagactgtgcgacctgcccaaggtgaccccccccgccggcctgaagggcggcatctag

SEQ ID NO: 236850 - DNA, 771 bp, Artificial Sequence
  derived and/or modified sequence
atgagcatcctggacgagcccggcgagccccccagccccagcctgaccaccaccagcaccagccagtggaagaagcactggttcgtgctgaccgacagcagcctgaagtactacagagacagcaccgccgaggaggccgacgagctggacggcgagatcgacctgagaagctgcaccgacgtgaccgagtacgccgtgcagagaaactacggcttccagatccacaccaaggacgccgtgtacaccctgagcgccatgaccagcggcatcagaagaaactggatcgaggccctgagaaagaccgtgagacccaccagcgcccccgacgtgaccaagctgagcgacagcaacaaggagaacgccctgcacagctacagcacccagaagggccccctgaaggccggcgagcagagagccggcagcgaggtgatcagcagaggcggccccagaaaggccgacggccagagacaggccctggactacgtggagctgagccccctgacccaggccagcccccagagagccagaacccccgccagaacccccgacagactggccaagcaggaggagctggagagagacctggcccagagaagcgaggagagaagaaagtggttcgaggccaccgacagcagaacccccgaggtgcccgccggcgagggccccagaagaggcctgggcgcccccctgaccgaggaccagcagaacagactgagcgaggagatcgagaagaagtggcaggagctggagaagctgcccctgagagagtag

SEQ ID NO: 236851 - DNA, 252 bp, Artificial Sequence
  derived and/or modified sequence
atgagcatcctggacgagcccggcgagccccccagccccagcctgaccaccaccagcaccagccagtggaagaagcactggttcgtgctgaccgacagcagcctgaagtactacagagacagcaccgccgaggaggccgacgagctggacggcgagatcgacctgagaagctgcaccgacgtgaccgagtacgccgtgcagagaaactacggcttccagatccacaccaaggacgccgtgtacaccctgtag

SEQ ID NO: 236852 - DNA, 1296 bp, Artificial Sequence
  derived and/or modified sequence
atgggaggctggaagggtcccggacaacgacgcggcaaagagggaccagaggcgcgtagacgggcagctgaacgcggcggcggtgggggtggggggggcgtccccgcgccacgttctcccgcccgcgaaccccgccctcgctcatgtttgcttttgcccccgccttggggagccgctatgacccctgacctactgaacttcaagaaggggtggatgtccatcctggacgagccaggcgaacctcctagcccttccctgacaaccactagcacctcccagtggaaaaaacattggttcgtgctgactgactcaagcttgaagtattatcgcgatagcaccgccgaagaagctgacgaactcgatggcgaaattgaccttcgatcttgtactgacgttaccgagtacgcagtgcagcggaactatggctttcagatacacactaaggatgccgtctacactctgtctgctatgacatctggcatcaggagaaattggatcgaagctcttcgcaaaacagtgaggccaaccagtgctccagatgtaacgaagttatccgattcaaataaggagaatgcactccatagctacagcacccagaagggaccgctcaaggccggcgaacagagggcaggcagcgaggtgatcagtcggggaggacccagaaaagccgacggccagagacaggcacttgactatgtcgagctgagcccccttacacaggcatccccgcagcgcgctcggacgcctgctagaacacctgataggctggccaaacaggaggagctggaacgcgatctcgcccagcggtctgaggaaaggcgcaagtggtttgaggcaacagacagtcggacccccgaagtgccagccggtgaaggcccccggcgcgggctgggcgcgcccctcacggaggaccaacagaacaggctcagcgaggagattgagaaaaaatggcaggaactggagaagcttcctctgcgcgagaacaaacgcgtgcctttgaccgcactgctcaatcagtctcgcggagagcgtaggggaccgccctccgacggccacgaagccctggagaaggaggttcaggctctcagggcccagctggaagcttggaggctccagggcgaagctccgcaaagtgcactgcggagccaggaagatggtcacattcccccaggatatatttctcagctcgtcggcgtgatcacagtgcccgtgttgcaaactcgccctttgtcaagcgagcgcttgtgtgacctgccaaaggttacacccccagctgggttgaagggcggaatctag

SEQ ID NO: 236853 - DNA, 771 bp, Artificial Sequence
  derived and/or modified sequence
atgtctatcctggacgagccgggtgagcctccaagcccttccctcacaaccacgtcgacctcccaatggaaaaagcattggttcgtattaactgacagctctttaaagtattaccgggactcgaccgccgaggaagccgatgaactggatggcgagattgacctgcggagttgtactgacgtaaccgagtacgccgttcagagaaattacgggttccagattcacactaaggacgccgtttatactctgtcggccatgacctccggcattcgtcgtaactggatcgaagcactaaggaagacggtgcgtccaacttctgccccggatgttactaaactcagtgatagcaacaaggaaaacgctctccatagttacagcacccaaaaggggcccctgaaagccggagaacagagagcgggctccgaggtgatttctcgtgggggacccaggaaggctgacgggcagcgccaggccttagattatgtggagctgagcccccttactcaagcgtctccccagagagcaaggacacctgctcgcacgcctgatcgccttgctaaacaggaggagctggagcgggacctggcacaacggagtgaagagagaagaaaatggttcgaggccaccgacagccggactcccgaggtgccagcgggagagggaccaaggcgcggattgggagcccccctcaccgaagatcagcagaaccggttgtccgaagagatcgaaaaaaagtggcaggaactggagaaactccctctgcgagagtag

SEQ ID NO: 236854 - DNA, 252 bp, Artificial Sequence
  derived and/or modified sequence
atgagtatcctggatgagccaggcgagccacccagtcccagtttgacaactacttcaactagtcagtggaaaaaacactggttcgtgctgactgattcatccttgaagtactatagggatagcacagccgaagaagcagatgaactggacggcgagattgacctccggagttgcaccgatgtgactgagtacgctgtgcagcgcaattacggattccagattcacaccaaggacgctgtctacacactgtag

SEQ ID NO: 236855 - DNA, 1296 bp, Artificial Sequence
  derived and/or modified sequence
atgggcggctggaagggccctggccagaggcggggcaaggagggccctgaggcccggcggcgggctgctgagcggggcggcggcggcggcggcggcggcgtgcctgcccccaggagccctgcccgggagccccggcccaggagctgcctgctgctgcccccaccctggggcgccgccatgaccccagacctgctgaacttcaagaagggctggatgagcatcctggatgagcccggggagccccccagccccagcctgaccaccaccagcaccagccagtggaagaagcactggtttgtgctgacagacagcagcctgaagtactacagagacagcacagctgaggaggctgatgagctggatggagaaattgacctgcggagctgcacagatgtgacagaatatgctgtgcagagaaattatggcttccagatccacaccaaggatgctgtgtacaccctgagcgccatgaccagcggcatcagaagaaactggattgaggccctgaggaagacagtgcggcccaccagcgccccagatgtgaccaagctgagtgacagcaacaaggaaaatgccctgcacagctacagcacccagaagggccccctgaaggccggggagcagagagctggcagcgaggtgatcagccggggcggccccaggaaggcagatggccagaggcaggccctggactatgtggagctgagccccctgacccaggccagcccccagagggcccggaccccagcccggaccccagaccggctggccaagcaggaggagctggagcgggacctggcccagaggtctgaggagaggaggaagtggtttgaggccacagacagcaggaccccagaggtgcctgctggggagggcccccggcggggcctgggcgcccccctgacagaggaccagcagaaccggctgtctgaggagattgagaagaagtggcaggagctggagaagctgcccctgcgggagaacaagagggtgcccctgacagccctgctgaaccagagcagaggagagcggcggggccccccatctgatggccacgaggccctggagaaggaggtgcaggccctgcgggcccagctggaggcctggaggctgcagggcgaggccccccagagcgccctgcggagccaggaggatggccacatccccccaggctacatcagccagctggtgggcgtcatcaccgtgcctgtgctgcagacccggcccctgagcagcgagcggctgtgtgacctgcccaaggtgaccccacctgctggcctgaagggcggcatctag

SEQ ID NO: 236856 - DNA, 771 bp, Artificial Sequence
  derived and/or modified sequence
atgagcatcctggatgagcctggagagccccccagccccagcctgaccaccaccagcaccagccagtggaagaagcactggtttgtgctgacagacagcagcctgaagtactacagagacagcacagctgaggaggctgatgagctggatggagaaattgacctgcggagctgcacagatgtgacagaatatgctgtgcagaggaactacggcttccagatccacaccaaggatgctgtgtacaccctgagcgccatgaccagcggcatcagaagaaactggattgaggccctgaggaagacagtgcggcccaccagcgccccagatgtgaccaagctgagtgacagcaacaaggaaaatgccctgcacagctacagcacccagaagggccccctgaaggccggggagcagagagctggcagcgaggtgatcagcagaggaggccccaggaaggcagatggccagaggcaggccctggactatgtggagctgagccccctgacccaggccagcccccagagggcccggaccccagcccggaccccagaccggctggccaagcaggaggagctggagcgggacctggcccagaggtctgaggagaggaggaagtggtttgaggccacagacagcaggaccccagaggtgcctgctggggagggcccccggcggggcctgggcgcccccctgacagaggaccagcagaaccggctgtctgaggagattgagaagaagtggcaggagctggagaagctgcccctgcgggagtag

SEQ ID NO: 236857 - DNA, 252 bp, Artificial Sequence
  derived and/or modified sequence
atgagcatcctggatgagcctggagagccccccagccccagcctgaccaccaccagcaccagccagtggaagaagcactggtttgtgctgacagacagcagcctgaagtactacagagacagcacagctgaggaggctgatgagctggatggagaaattgacctgcggagctgcacagatgtgacagaatatgctgtgcagaggaactacggcttccagatccacaccaaggatgctgtgtacaccctgtag

SEQ ID NO: 236858 - DNA, 1296 bp, Artificial Sequence
  derived and/or modified sequence
atgggcggctggaagggccccggccagcggcggggcaaggagggccccgaagcccgacggcgagccgccgagcgggggggcggcggtggaggcggtggtgtgcccgctcctcggagtcctgcacgggagccaagaccacggagctgcttgcttctgcctcccccatggggagccgcaatgacgccagacttgctgaacttcaagaagggctggatgtccattttggatgagcccggggagcctcccagtcctagtttaaccacaacttctacatcccagtggaaaaaacactggttcgtgctgacggatagttctctgaaatattacagagattcgaccgccgaagaagccgatgagctcgacggggaaatcgacttacggagttgtacagacgtcaccgagtacgccgtccagcgcaactatggattccagattcatacaaaagatgccgtttataccttatcagcaatgacctccgggattaggcgcaactggattgaagcactccggaagacggtgcgcccaacttctgcacccgacgtaacaaagctgtcagacagcaacaaggagaatgctctgcattcctattcgactcagaaaggaccccttaaagccggggagcaaagggccgggagtgaagtgattagtaggggcggccctcgcaaggccgatggccagcgccaggcactggactacgtggagctgagccctctgacccaggcatcccctcagagggccagaacaccagcgcggacccccgataggctcgcgaagcaggaagagctcgagagagacctggctcagcgcagcgaggagcgacgcaagtggtttgaggcaacagattcccggactccagaggtcccggctggggagggccctcgaagagggctgggcgcgccgctcaccgaggaccaacagaatcggctgtctgaagaaatcgaaaagaaatggcaagaactggaaaaactgccactccgcgagaataaacgggtaccactgactgcccttctgaatcagtccagaggagagagacggggccccccatctgatgggcacgaagcacttgagaaggaggtacaggctctgagagctcagcttgaggcttggagattgcagggtgaggcaccgcagtcagccctcaggagccaggaggacggacacatcccacctggctacattagccagctggtgggtgtgataactgtgcccgttctgcagacgaggccgcttagctctgagaggctgtgcgacctccccaaggtcacccctccagctgggctgaagggtggcatatag

SEQ ID NO: 236859 - DNA, 771 bp, Artificial Sequence
  derived and/or modified sequence
atgagcatcctggacgagcccggcgagccccccagccccagcctgacgaccacttcaacatctcagtggaaaaagcattggtttgtgttgaccgatagcagcctgaaatactaccgggactctacagcagaagaggcagatgaactggatggcgagatagacctgcgtagctgtaccgatgtgactgaatacgctgtgcagagaaattacgggtttcagatccatactaaggatgcagtttacaccctctcggccatgacaagcggaatcaggcggaattggattgaggcgttgcgcaaaaccgtgagaccaacttccgcgcccgacgtgacaaagttatcagattcaaacaaagagaacgcccttcactcctattcgacacagaaagggcccctgaaagcaggcgagcaaagggctgggtccgaagtgatctcgaggggtggcccaagaaaagccgatggacagcggcaggcattggattacgtggaactctctccccttacacaggcctcacctcaacgggcaaggactcctgcacgcaccccagataggcttgctaaacaagaggagcttgagcgagacctagcgcagaggtccgaggaacgtcggaagtggtttgaggccactgactcacggacccccgaggtccccgccggggaaggtcctcggcgtggcctgggcgcccccctgaccgaagaccagcagaataggttatcagaagagattgagaaaaagtggcaagaactggaaaagctgcccctacgggaatag

SEQ ID NO: 236860 - DNA, 252 bp, Artificial Sequence
  derived and/or modified sequence
atgagcatcctggacgagcccggcgagccccccagccccagcctgacaacaacttctacatcgcagtggaaaaaacactggttcgttctgacggacagtagcctgaaatattacagggacagcacggcagaggaggctgatgagctagatggcgaaatcgacctgcgttcctgtacagatgtcaccgagtacgcagttcagcgcaactatggattccagattcacaccaaagatgcagtgtatacgttgtag

SEQ ID NO: 236861 - DNA, 1296 bp, Artificial Sequence
  derived and/or modified sequence
atgggtggctggaaagggcctggacaacggcgaggtaaagaaggacccgaggctcgccgacgggcagcggagcgcggtggcggtggcggaggtggtggagtgccagccccaagatctcccgcaagggagcctaggccgcgaagctgtcttctgctcccgcctccttggggtgcagctatgacacccgacctgctgaactttaaaaaaggatggatgtcgattctggacgaaccaggggagcctccctctccgagtctgacaacgacctccacatcccagtggaagaaacactggtttgtgctcaccgattcctcactgaagtactatagggactccacagctgaggaggcagacgagctagatggggagatcgatctgaggtcatgcacagacgtgactgaatatgctgttcagcgcaattacgggttccagattcacacaaaggatgcggtctacactctgtccgcgatgacttcggggattagacgcaactggattgaagctcttcggaaaacagtccggcctacctcggcaccggatgtcacgaagctctcagacagcaacaaggagaatgccttgcactcatactccacacaaaaaggaccactcaaagcaggggagcagagagccggatcagaggtgatatccaggggaggaccaaggaaggctgatggacaaagacaagccctggactatgtcgaactctccccgcttacacaggcctccccccagagggccaggacacccgcacggactcctgatcggcttgcgaagcaggaggagctggagcgggacctagctcaaagaagcgaggaacgtcgcaaatggtttgaggccacagactcccgaacccctgaagtgcccgctggcgaaggacccagaagagggctcggcgctccgctgacggaagaccaacagaataggctgagtgaagagatcgaaaaaaagtggcaagaactcgaaaagttgccccttagagaaaacaaaagagtaccactgacagccctgttgaaccagtcacggggagagagaagggggccacctagcgatggacacgaggcactggagaaagaggttcaagctctgcgggcacaactggaagcatggcgattacagggcgaggcccctcagagcgctctaagaagccaagaggacgggcatattccacccggatatattagccagctggtgggcgtgatcacagttccagtcctccagacgagacctttatcatccgagcgattatgtgacttgcctaaggttaccccccctgccggactgaaggggggaatctag

SEQ ID NO: 236862 - DNA, 771 bp, Artificial Sequence
  derived and/or modified sequence
atgtccatactcgatgagcccggagagcctccgagccccagcctcacaactacatcaactagtcagtggaagaagcattggtttgtactcactgacagttctcttaagtactaccgcgactctaccgctgaggaggcagacgagctggacggcgagatcgatctaaggtcctgcacagatgttaccgagtatgcagtccagaggaattacggcttccagatccacacgaaagacgccgtatacaccctgagtgctatgacttctgggatccgtcgaaattggattgaggccctacgaaagaccgtccgtccgacctcagccccagatgtcactaagctgagtgatagcaacaaggagaatgctctccattcatattcgacccagaagggcccactaaaggccggagagcagcgcgcaggttccgaagtgatttcccgtggcggtccacgaaaagcagatggccaacgacaagcactcgattatgtagagctgagtcccctgacacaggctagtccccagagggcacgtacgcctgctaggacacccgatcggttagctaaacaggaggagctcgaacgcgatctggcacagaggtccgaggagagaaggaaatggtttgaggccaccgacagtcgaacacctgaagttccagcgggagaggggccacggagagggctgggcgcaccacttactgaggaccaacagaatcgtctatctgaagagatagaaaaaaaatggcaagaactggagaagctcccactgagagagtag

SEQ ID NO: 236863 - DNA, 252 bp, Artificial Sequence
  derived and/or modified sequence
atgtcaatcctggacgagccgggagagcccccttctccttctctgactacaacgtctacctcccagtggaagaaacactggttcgtcctaaccgacagtagtctcaagtactatcgcgatagtactgccgaggaggcggacgaattagacggtgagatcgaccttaggtcctgtacagacgtaacggaatatgccgtgcaaaggaactacggcttccagatccacaccaaagacgcagtatataccttgtag

SEQ ID NO: 236864 - DNA, 2125 bp, Artificial Sequence
  derived and/or modified sequence
aaaaagttttatgggcggatggaaggggccggggcagcgtcggggaaaggaagggccggaggcgcggcggcgggcggccgagaggggcggcggcggcggcggcggcggggttcccgcgccgcggagcccggcccgagagccgcgtccacgttcctgcctcctgctcccgccgccctggggcgccgccatgacgcccgatctgctcaacttcaagaagggatggatgtcgatcttggacgagcctggagagcctccctccccctcgctcaccaccacctctacttcgcagtggaagaaacattggtttgtgctgacagattcaagtctcaaatattacagagactccactgctgaggaggcagatgagctggatggtgagatcgacctgcgttcctgcacggatgtcactgagtacgcggtgcagcgcaactatggcttccagatccacaccaaggatgctgtctataccttgtcggccatgacctcaggcatccggcggaactggatcgaggctctgagaaagaccgtacgtccaacttcagccccagatgtcaccaagctctcggactctaacaaggagaacgcgctgcacagctacagcacccagaagggccccctgaaggcaggggagcagcgggcgggctctgaggtcatcagccggggtggccctcggaaggcggacgggcagcgtcaggccttggactacgtggagctctcgccgctgacccaggcttccccgcagcgggcccgcaccccagcccgcactcctgaccgcctggccaagcaggaggagctggagcgggacctggcccagcgctccgaggagcggcgcaagtggtttgaggccacagacagcaggaccccagaggtgcctgctggtgaggggccgcgccggggcctgggtgcccccctgactgaggaccagcaaaaccggcttagtgaggagatcgagaagaagtggcaggagctggagaagctgcccctgcgggagaataagcgggtgcccctcactgccctgctcaaccaaagccgcggagagcgccgagggcccccaagtgacggccacgaggcactggagaaggaggttcaggctcttcgggcccagctggaggcgtggcgtctccaaggggaggctcctcagagtgcactgagatcccaggaggatggccacatccccccgggctacatctcacagctggtgggcgtgatcactgtgcccgttttacagacaaggccactgagctctgagaggttatgtgacttgcccaaggtcaccccgcctgcaggtctcaaaggtgggatttgagcgagggtccggctgactgcagagcctgtgtgtgagtccccgtgtgacactctgcacttggacccttgccccggggaagtggggggctagtggccccgagagtcactccctgaacacagggaaatcctgccgaggcccactgggccaaggccccacacaaggaggtctgcaggacaggggagcctccagtagccctcagagaatgcaccgtccgcctaggacagcggttctcaacggggtccattttgtcccccttggggacatttggctgtgtctgggaatacttctggttgtcacaactaggacaaactaactctctagaaaaaacgtgtgtgtgtacacatatataagtttattataaattttaccaataaaaacaatgcttagtacacaatttacaaataaaaatatataattttattgtgaattccgtacagcaaatggatttttctcagaatgctttcagtgattttttccatactcttgtatccacaactgattaacaaagggggttgttctaacgtgtgctggttgacatttttgtttatggtaatgagtaagatgagaagacatttgtcgaaactttactggtccatgttgtcagctacttctttgctagatcggatagtagttttctattgagaatatttgagaatattctattaagaatatttttgcaattttttgttctatttacaatgtaatggttatagatgtgagatacttctaagtttaatctgcattattagcattttcttatcacttgcttaagtctagacaatcaacaaaacaataaatcaagccctgatgtgtaatgtt

SEQ ID NO: 236865 - DNA, 919 bp, Artificial Sequence
  derived and/or modified sequence
gctggtctggactgccctctgagctctcagggggtctctatgcaggcagagtcctcccagcccctctctcccattcttgggcgaggggtcggctggagagaggcccctgggacatctggcccgatctgctcaacttcaagaagggatggatgtcgatcttggacgagcctggagagcctccctccccctcgctcaccaccacctctacttcgcagtggaagaaacattggtttgtgctgacagattcaagtctcaaatattacagagactccactgctgaggaggcagatgagctggatggtgagatcgacctgcgttcctgcacggatgtcactgagtacgcggtgcagcgcaactatggcttccagatccacaccaaggatgctgtctataccttgtcggccatgacctcaggcatccggcggaactggatcgaggctctgagaaagaccgtacgtccaacttcagccccagatgtcaccaagctctcggactctaacaaggagaacgcgctgcacagctacagcacccagaagggccccctgaaggcaggggagcagcgggcgggctctgaggtcatcagccggggtggccctcggaaggcggacgggcagcgtcaggccttggactacgtggagctctcgccgctgacccaggcttccccgcagcgggcccgcaccccagcccgcactcctgaccgcctggccaagcaggaggagctggagcgggacctggcccagcgctccgaggagcggcgcaagtggtttgaggccacagacagcaggaccccagaggtgcctgctggtgaggggccgcgccggggcctgggtgcccccctgactgaggaccagcaaaaccggcttagtgaggagatcgagaagaagtggcaggagctggagaagctgcccctgcgggagaa

SEQ ID NO: 236866 - DNA, 586 bp, Artificial Sequence
  derived and/or modified sequence
ttcgcgcagtgctgctggtctggactgccctctgagctctcagggggtctctatgcaggcagagtcctcccagcccctctctcccattcttgggcgaggggtcggctggagagaggcccctgggacatctgggtgtgtgtgccagccacccagcccaacttcttggctctctgagtgccactatcaggaaaggggccagggctgcctcagtggctgggaggcctgcttggacttgggggttacctagggccttagccctcttggctggcttcccaggagctcggtcccacaggacttggggacaggcccgatctgctcaacttcaagaagggatggatgtcgatcttggacgagcctggagagcctccctccccctcgctcaccaccacctctacttcgcagtggaagaaacattggtttgtgctgacagattcaagtctcaaatattacagagactccactgctgaggaggcagatgagctggatggtgagatcgacctgcgttcctgcacggatgtcactgagtacgcggtgcagcgcaactatggcttccagatccacaccaaggatgctgtctataccttgt

SEQ ID NO: 236867 - protein, 104 aa, Artificial Sequence
  derived and/or modified sequence
MGQLCCFPFSRDEGKISELESSSSAVLQRYSKDIPSWSSGEKNGGEPDDAELVRLSKRLVENAVLKAVQQYLEETQNKNKPGEGSSVKTEAADQNGNDNENNRK

SEQ ID NO: 236868 - DNA, 315 bp, Artificial Sequence
  derived and/or modified sequence
atgggccagctgtgctgcttccccttcagcagagacgagggcaagatcagcgagctggagagcagcagcagcgccgtgctgcagagatacagcaaggacatccccagctggagcagcggcgagaagaacggcggcgagcccgacgacgccgagctggtgagactgagcaagagactggtggagaacgccgtgctgaaggccgtgcagcagtacctggaggagacccagaacaagaacaagcccggcgagggcagcagcgtgaagaccgaggccgccgaccagaacggcaacgacaacgagaacaacagaaagtag

SEQ ID NO: 236869 - DNA, 670 bp, Artificial Sequence
  derived and/or modified sequence
attggctcttcaagctgcctgtgctgctccgtggagtgaaaaaggcagggtgtgctcgcagactgtgctataaactgcaatttctatttggggtcctcacggagaagaacaccaggaaagacagacaggaccagtgccatgggccagctttgctgctttcctttctcaagagatgaaggaaaaatcagtgagttggaaagctcgtcctctgcagtcctacagagatacagcaaggatatacccagttggtcaagtggtgaaaagaacggaggggagcccgatgacgctgaactagtaaggctcagtaagaggctggtggagaacgcggtgctcaaggctgtccagcagtatctggaggaaacacagaataaaaacaagccgggggaggggagctctgtgaaaaccgaagcagctgatcagaatggcaatgacaatgagaacaacaggaaatgagcccggaacgcaggcccccatgtctctgtgcaaagcctccctgcttccctctgctgagtctagggactgacttgcagcgtgctgtttaagttaagtttctctggtgcaatctgtgaagattgcctaatacttttcatgatcgatgtgttcgcattgctgaaacacaacagaagaaaaatggagtgctgggactggcagaggaaattaattgatgaaa

SEQ ID NO: 236870 - DNA, 315 bp, Artificial Sequence
  derived and/or modified sequence
atgggtcagctgtgttgtttccccttctctcgcgacgaggggaagatttccgagttagaatccagttctagtgcagtcctccaaaggtatagcaaggacatcccatcatggtcttcaggcgagaagaacggaggcgagccagacgacgcagaattggtccgcctctccaagaggttagtggaaaacgcagtgctgaaagcagtgcagcaatacctcgaggaaacccaaaacaaaaacaaacctggagaagggtcttcagtgaagaccgaggccgcagaccagaacggcaatgataacgagaacaatcggaagtag

SEQ ID NO: 236871 - DNA, 315 bp, Artificial Sequence
  derived and/or modified sequence
atgggccagctgtgctgcttccccttcagcagagatgagggcaagatcagcgagctggagagcagcagcagcgctgtgctgcagcgctacagcaaggacatccccagctggagcagtggagagaagaatggaggagagccagatgatgctgagctggtgcggctgagcaagaggctggtggagaatgctgtgctgaaggctgtgcagcagtacctggaggagacccagaacaagaacaagccaggagagggcagctctgtgaagacagaagctgctgaccagaatggaaatgacaatgaaaacaacaggaagtag

SEQ ID NO: 236872 - DNA, 315 bp, Artificial Sequence
  derived and/or modified sequence
atgggccagctgtgctgcttccccttcagccgggacgagggcaagattagcgaacttgagagctcatcgtcagcagttctccagaggtactctaaggacattccctcctggtccagcggagagaaaaacggcggcgaaccggatgacgctgagctggtgagattgtctaagagactggtggagaacgcggtgttgaaagcagtgcagcagtatttggaggagacccagaacaagaataaacctggtgagggaagttcagtaaaaactgaagctgctgaccaaaatggcaacgacaatgagaacaaccgcaaatag

SEQ ID NO: 236873 - DNA, 315 bp, Artificial Sequence
  derived and/or modified sequence
atggggcaactgtgttgcttccccttctcacgggacgaaggcaaaataagtgaactcgagtcttcttcctctgcagtcttgcaacggtactcgaaggacattccttcgtggtcatcaggagagaaaaatggcggagagcctgatgatgctgaacttgtgcgtcttagcaagagattggtcgagaacgctgtcctaaaggcagttcaacaatatctggaggaaacacagaataagaataagccaggcgaggggagctccgtcaaaacggaagcagccgaccaaaatggcaatgacaacgagaacaacagaaagtag

SEQ ID NO: 236874 - protein, 77 aa, Artificial Sequence
  derived and/or modified sequence
MNVLLGSVVIFATFVTLCNASCYFIPNEGVPGDSTRMFLHLWVMTKTTAKESSRRRTASISWWRRRTQKRPVLSVNG

SEQ ID NO: 236875 - DNA, 234 bp, Artificial Sequence
  derived and/or modified sequence
atgaacgtgctgctgggcagcgtggtgatcttcgccaccttcgtgaccctgtgcaacgccagctgctacttcatccccaacgagggcgtgcccggcgacagcaccagaatgttcctgcacctgtgggtgatgaccaagaccaccgccaaggagagcagcagaagaagaaccgccagcatcagctggtggagaagaagaacccagaagagacccgtgctgagcgtgaacggctag

SEQ ID NO: 236876 - DNA, 234 bp, Artificial Sequence
  derived and/or modified sequence
atgaacgtattgctgggcagtgtggtgatctttgcaactttcgttacactttgtaacgcttcctgctatttcattcccaacgagggtgttccaggggatagcacacggatgtttctgcacctgtgggtgatgaccaaaaccacagcaaaggaatcgtcccgcaggaggaccgcctcaatctcatggtggcgccggcgcacgcagaagagaccggtgctctcggtgaatgggtag

SEQ ID NO: 236877 - DNA, 234 bp, Artificial Sequence
  derived and/or modified sequence
atgaatgtgctgctgggctctgtggtgatctttgccacctttgtgaccctgtgcaatgccagctgctacttcatccccaatgaaggagtgcctggggacagcaccaggatgttcctgcacctgtgggtgatgaccaagaccacagccaaggagagcagcagaagaagaacagccagcatctcctggtggaggaggaggacccagaagaggcctgtgctgtctgtgaatggatag

SEQ ID NO: 236878 - DNA, 382 bp, Artificial Sequence
  derived and/or modified sequence
gtacctgtctataaggagtcctgcttatcacaatgaatgttctcctgggcagcgttgtgatctttgccaccttcgtgactttatgcaatgcatcatgctatttcatacctaatgagggagttccaggagattcaaccaggatgtttctacacctgtgggttatgacaaagacaactgccaaagaatcttcaagaaggaggactgcaagtatatcgtggtggagaagaaggacccaaaaaagacctgttctgtcagtgaatggataatctaatgtgcttctagtaggcacagggctcccaggccaggcctcattctcctctggcctctaatagtcaatgattgtgtagccatgcctatcagtaaaaagatttttgagcaaaca

SEQ ID NO: 236879 - DNA, 234 bp, Artificial Sequence
  derived and/or modified sequence
atgaacgtgctgctgggcagcgtggtgatcttcgccaccttcgtgacgctttgcaatgcatcctgttattttatcccgaatgaaggagtaccgggtgattcgactagaatgtttctgcacctgtgggtaatgacgaagactaccgccaaagagtccagtcgcaggaggaccgctagcattagttggtggcgaaggagaacacagaaaaggcctgtgctaagtgtgaacggttag

SEQ ID NO: 236880 - DNA, 234 bp, Artificial Sequence
  derived and/or modified sequence
atgaacgtactgcttggtagtgtcgtgattttcgccactttcgtgacactgtgcaatgcctcatgttactttattcccaacgaaggggtccctggcgattccactagaatgtttttgcacctgtgggtcatgaccaagactaccgccaaggagtcctcccgcagacgcacggccagcatttcctggtggagaaggaggacacaaaagagacctgtgctgtccgtcaacggatag

SEQ ID NO: 236881 - protein, 1041 aa, Artificial Sequence
  derived and/or modified sequence
MENMFLQSSMLTCIFLLISGSCELCAEENFSRSYPCDEKKQNDSVIAECSNRRLQEVPQTVGKYVTELDLSDNFITHITNESFQGLQNLTKINLNHNPNVQHQNGNPGIQSNGLNITDGAFLNLKNLRELLLEDNQLPQIPSGLPESLTELSLIQNNIYNITKEGISRLINLKNLYLAWNCYFNKVCEKTNIEDGVFETLTNLELLSLSFNSLSHVPPKLPSSLRKLFLSNTQIKYISEEDFKGLINLTLLDLSGNCPRCFNAPFPCVPCDGGASINIDRFAFQNLTQLRYLNLSSTSLRKINAAWFKNMPHLKVLDLEFNYLVGEIASGAFLTMLPRLEILDLSFNYIKGSYPQHINISRNFSKLLSLRALHLRGYVFQELREDDFQPLMQLPNLSTINLGINFIKQIDFKLFQNFSNLEIIYLSENRISPLVKDTRQSYANSSSFQRHIRKRRSTDFEFDPHSNFYHFTRPLIKPQCAAYGKALDLSLNSIFFIGPNQFENLPDIACLNLSANSNAQVLSGTEFSAIPHVKYLDLTNNRLDFDNASALTELSDLEVLDLSYNSHYFRIAGVTHHLEFIQNFTNLKVLNLSHNNIYTLTDKYNLESKSLVELVFSGNRLDILWNDDDNRYISIFKGLKNLTRLDLSLNRLKHIPNEAFLNLPASLTELHINDNMLKFFNWTLLQQFPRLELLDLRGNKLLFLTDSLSDFTSSLRTLLLSHNRISHLPSGFLSEVSSLKHLDLSSNLLKTINKSALETKTTTKLSMLELHGNPFECTCDIGDFRRWMDEHLNVKIPRLVDVICASPGDQRGKSIVSLELTTCVSDVTAVILFFFTFFITTMVMLAALAHHLFYWDVWFIYNVCLAKVKGYRSLSTSQTFYDAYISYDTKDASVTDWVINELRYHLEESRDKNVLLCLEERDWDPGLAIIDNLMQSINQSKKTVFVLTKKYAKSWNFKTAFYLALQRLMDENMDVIIFILLEPVLQHSQYLRLRQRICKSSILQWPDNPKAEGLFWQTLRNVVLTENDSRYNNMYVDSIKQY

SEQ ID NO: 236882 - DNA, 3126 bp, Artificial Sequence
  derived and/or modified sequence
atggagaacatgttccttcaaagttcgatgctgacctgcattttcctcctgattagcgggtcttgcgaattgtgcgccgaagagaacttctcaaggtcatatccttgcgacgagaagaaacagaatgacagtgttatcgctgaatgctcaaatagaaggctccaggaggttccacagactgtcgggaagtacgtgactgaactggatctctctgataattttattacccatatcacaaatgagtcattccagggattgcaaaacttgaccaagattaacctgaaccataatcctaacgtacagcatcagaatgggaatccaggcatccagagtaatggcctgaacatcacagacggcgcattcctgaacttaaagaacttgcgggaactgctacttgaggataatcagcttccccagattccatccggcctacctgaatctctgaccgaactttctctgattcagaataatatttacaacatcactaaggaggggatttctcgacttattaatcttaagaatttatatcttgcctggaactgctattttaacaaagtgtgtgaaaaaaccaatatcgaagacggagtcttcgaaaccctgactaacttggaacttctctctctgtctttcaactccctgagtcatgtgcccccgaaactcccatcctccctgagaaagctcttcctatctaatacccagatcaagtacattagtgaagaggactttaaagggctcattaacctaactctgctcgatcttagtggcaattgtccacggtgctttaatgcaccatttccttgtgtcccgtgtgacggaggagcctcaataaacattgaccgctttgcatttcaaaatctcactcagctacggtaccttaacttgagttctacaagcctgcgaaagatcaatgccgcctggttcaagaacatgccacacctgaaagtcttggatctcgagttcaattatctcgtgggcgagatcgcaagtggggccttcttgaccatgctgcctagactcgaaatcttggacctgtccttcaactacatcaaggggagctacccccagcatatcaacatctcccgtaacttctcgaaactgctctccctgcgcgctctgcacttgagaggctatgtgttccaggagctgcgggaggacgattttcaacctctcatgcagctgccgaacctgtctactattaacctgggcataaactttattaaacaaatcgatttcaagctcttccagaatttctctaacttggagattatctatctcagcgagaacaggatttctcccctggttaaggacacgagacagtcctatgccaattcatccagcttccagcgccatattcgtaagcgcagatctaccgactttgaattcgatcctcacagcaatttttatcattttaccagacctctcattaagcctcaatgcgccgcttacggaaaggcactggatctctccttgaatagtatcttttttattgggcctaaccagttcgaaaatctcccggatattgcgtgcctcaatctgtctgcaaattccaatgcacaagtactttctggtaccgagttctctgcgatcccacatgtgaagtacctggacctgaccaacaataggctggacttcgataatgcaagtgccttaactgagctgagcgacctggaagtcctcgatctctcctacaattcccactacttccggatcgctggcgttactcaccacctcgagtttatacagaattttacgaatctcaaagtactgaatttgtctcataataatatctacactctgactgacaaatataacctcgagagtaagagcctggtggagctggtattcagcggtaacaggctggacatactgtggaatgatgacgacaatagatatatatcgatattcaagggattaaaaaatctgacccgtttggacctcagtttaaatagactcaaacacatccctaacgaagcattcctgaacctgcctgcttccctgaccgaactgcacattaatgacaatatgcttaaattctttaattggaccttgcttcagcagtttccacgccttgaacttctcgatctgcgcgggaataaactcctgtttcttacggactcgttgagcgactttacctcctcgctccggacactgctgttatctcacaataggatctcacacttacctagcgggttcctgtcagaggtgtcctccctcaaacacttagatttatccagcaacttactgaagacgatcaataagagcgcgctggagactaagactaccaccaagctgagtatgctggaactccatgggaacccatttgaatgcacatgtgatatcggagactttcggcggtggatggacgagcatctaaacgttaagattcctaggctagtggatgtaatctgtgcttcaccaggcgatcaaagaggaaagtctatcgtgtctctagaattgactacctgcgtatctgatgttaccgctgtaatcctgtttttcttcacattctttattaccacaatggtaatgctggctgcccttgcacaccacctattctattgggacgtgtggttcatctacaacgtctgcctggcaaaagtgaagggctatcggtctctttcgacgtcgcagaccttctatgatgcttatatctcatacgacacaaaagatgcgagcgtgactgactgggttatcaatgaactccgataccacctggaggaaagcagagataagaacgtgcttctttgcctcgaggaaagggactgggaccccgggctcgccatcattgacaaccttatgcagtcaatcaaccagtccaagaaaactgtatttgttctgacgaagaagtacgctaagagctggaattttaagactgccttctatctcgcactgcagcggttgatggacgagaacatggacgttataatatttatactactggaacccgtccttcaacattcacagtatttgagactacgacagaggatatgtaaaagctcaatcctgcagtggccggacaaccccaaggccgaaggcctcttctggcagactctcaggaacgtcgttttgaccgaaaacgatagtcgctataacaatatgtatgtcgatagcattaaacagtactag

SEQ ID NO: 236883 - DNA, 3126 bp, Artificial Sequence
  derived and/or modified sequence
atggagaacatgttcctgcagagctccatgctgacctgcatcttcctgctgatcagcggcagctgtgagctgtgtgccgaggagaacttcagccgcagctacccctgtgatgagaagaagcagaatgacagcgtgattgctgagtgcagcaacagaaggctgcaggaggtgccccagacagtgggcaagtatgtgacagagctggacctgagtgacaacttcatcacccacatcaccaatgaaagcttccagggcctgcagaacctgaccaagatcaacctgaaccacaaccccaacgtgcagcaccagaatggaaatcctggcatccagagcaatggcctgaacatcacagatggagccttcctgaacctgaagaacctgcgggagctgctgctggaggacaaccagctgccccagatccccagcggcctgcctgagagcctgacagagctgagcctcatccagaacaacatctacaacatcaccaaggagggcatcagccgcctcatcaacctgaagaacctgtacctggcctggaactgctacttcaacaaggtgtgtgagaagaccaacattgaagatggagtgtttgagaccctgaccaacctggagctgctgagcctgtccttcaacagcctgagccacgtgccccccaagctgcccagcagcctgaggaagctgttcctgagcaacacccagatcaagtacatcagcgaggaggacttcaagggcctcatcaacctgaccctgctggacctgagcggcaactgcccccgctgcttcaatgcccccttcccctgtgtgccctgtgatggaggagccagcatcaacatcgacagatttgccttccagaacctgacccagctgcgctacctgaacctgagcagcaccagcctgaggaagatcaatgctgcctggttcaagaacatgccccacctgaaggtgctggacctggagttcaactacctggtgggggagatcgccagcggggccttcctgaccatgctgccccggctggagatcctggacctgtccttcaactacatcaagggcagctacccccagcacatcaacatcagcaggaacttcagcaagctgctgagcctgcgggccctgcacctgcggggctacgtgttccaggagctgcgggaggatgacttccagcccctgatgcagctgcccaacctgagcaccatcaacctgggcatcaacttcatcaagcagattgacttcaagctgttccagaacttcagcaacctggagatcatctacctgtctgaaaatcgcatcagccccctggtgaaggacacccggcagagctatgccaacagcagcagcttccagaggcacatcaggaagaggaggagcacagactttgaatttgacccccacagcaacttctaccacttcacccggcccctcatcaagccccagtgtgccgcctacggcaaggccctggacctgagcctgaacagcatcttcttcatcggccccaaccagtttgagaacctgcctgacatcgcctgcctgaacctgagcgccaacagcaatgcccaggtgctgagcggcacagagttcagcgccatcccccacgtgaagtacctggacctgaccaacaaccggctggactttgacaatgccagcgccctgacagagctgagtgacctggaggtgctggacctgagctacaacagccactacttcagaattgctggggtgacccaccacctggagttcatccagaacttcaccaacctgaaggtgctgaacctgagccacaacaacatctacaccctgacagacaagtacaacctggagagcaagagcctggtggagctggtgttcagcggcaaccggctggacatcctgtggaatgatgatgacaaccgctacatcagcatcttcaagggcctgaagaacctgacccggctggacctgagcctgaaccggctgaagcacatccccaatgaggccttcctgaacctgcctgccagcctgacagagctgcacatcaatgacaacatgctgaagttcttcaactggaccctgctgcagcagttcccccggctggagctgctggacctgcggggcaacaagctgctcttcctgacagacagcctgagtgacttcaccagcagcctgcggaccctgctgctgagccacaaccgcatcagccacctgcccagcggcttcctgtctgaggtgagcagcctgaagcacctggacctgagcagcaacctgctgaagaccatcaacaagagcgccctggagaccaagaccaccaccaagctgtccatgctggagctgcacggcaacccctttgaatgtacctgtgacatcggggacttccgccgctggatggatgagcacctgaatgtgaagatcccccggctggtggatgtgatctgtgccagccctggggaccagaggggcaagagcatcgtgtccctggagctgaccacctgtgtgtctgatgtgacagctgtgatcctcttcttcttcaccttcttcatcaccaccatggtgatgctggccgccctggcccaccacctgttctactgggatgtgtggttcatctacaacgtgtgcctggccaaggtgaagggctaccgcagcctgagcaccagccagaccttctatgatgcctacatctcctatgacaccaaggatgcctctgtgacagactgggtgatcaatgagctgcgctaccacctggaggagagccgggacaagaatgtgctgctgtgcctggaggagcgggactgggaccccggcctggccatcatcgacaacctgatgcagagcatcaaccagagcaagaagacagtgtttgtgctgaccaagaagtatgccaagtcctggaacttcaagacagccttctacctggccctgcagaggctgatggatgagaacatggatgtgatcatcttcatcctgctggagcctgtgctgcagcacagccagtacctgcggctgcggcagaggatctgcaagagcagcatcctgcagtggccagacaaccccaaggccgagggcctcttctggcagaccctgagaaatgtggtgctgacagaaaatgacagccgctacaacaacatgtatgtggacagcatcaagcagtactag

SEQ ID NO: 236884 - DNA, 3126 bp, Artificial Sequence
  derived and/or modified sequence
atggagaacatgttcctgcagagcagcatgctgacctgcatcttcctgctcatcagcggcagttgcgaattatgcgcagaagagaatttttcaaggtcatatccctgcgatgaaaaaaaacagaacgatagtgtcatcgctgagtgttccaacaggcggcttcaagaagtcccccaaacggtcggtaagtatgtgacagagctggacttatctgacaacttcatcacccacatcactaatgaatctttccaaggtctccagaatctcacaaaaattaacctgaaccataaccctaacgttcagcaccagaacgggaatcccgggatccagtccaatgggctgaacatcaccgacggcgcctttctcaacctgaagaacttaagagaactgctcctcgaagacaaccagctgccccaaatcccgtccgggctgcccgaatccttaaccgaactgtctctgattcagaataacatctataatatcaccaaggaagggatcagcaggcttattaaccttaagaacctctatctggcttggaactgttacttcaataaagtctgcgagaaaaccaacattgaggatggcgtgtttgagacccttaccaatcttgagctgctgtccctcagttttaactctctcagccacgtcccccctaaacttccctcttctctgcgtaaattattcctttccaacacacagattaaatatatctctgaggaggacttcaaaggcctcataaatctgacgctgctcgaccttagcggaaactgtccccgctgctttaacgctccatttccctgcgttccttgtgatggaggcgcatcgatcaacatcgacagattcgcctttcaaaatctcacacagctgagatacctcaatctgtccagtacgagtctgaggaagatcaacgcagcttggttcaagaatatgccacatctcaaagttctcgatctggagtttaactatctcgtcggcgagatcgcttccggcgctttcctgacaatgctgcctaggctagaaatcttagacctttcattcaactatatcaagggtagttaccctcagcacataaatatctccaggaatttctccaagctgctgtctctccgggccctgcacctccgcggctacgtgttccaggaacttagagaggacgactttcagcccctcatgcagctgccgaacttgtccacaataaatctgggtataaacttcattaagcagatagactttaagctgttccagaattttagtaatttagaaatcatttatctgagtgagaataggatctcaccgctagtcaaagacacaagacagagctatgccaattcctctagttttcagagacacatacgaaagcgacgctcaactgactttgaatttgacccgcacagcaatttttatcactttactagacccctgatcaagccccaatgtgccgcctacggcaaagctcttgacctgtctttgaacagtatcttctttattggtcctaaccagttcgagaatctccctgatattgcctgcctcaatctgtcagctaatagcaatgcccaggtgctgtccggaaccgaatttagcgccatcccacacgtgaaatacctagatctgacgaacaatagactggatttcgacaatgcctcggccctgacggaactgtctgatcttgaagtgctggatttatcctacaactctcattacttccggatcgctggggtcacacaccatctggagtttatacagaatttcactaacctcaaggtgctcaatctgagccacaataatatctacacactgacagacaagtataacctcgaatcaaaatcactggtcgagctcgtattcagtggcaatcgattggatatcctatggaacgatgacgacaaccgctatattagcatattcaaaggcttgaaaaacctgacaaggcttgatctgtccttaaaccggctgaaacatatcccgaatgaagcgttcctgaacctgcctgcctctctgaccgagctgcatattaacgacaacatgctaaagttttttaactggaccttattgcagcagttccccagattggaactgcttgatctgcgcgggaataaactgctgttcttaactgatagtctgagtgacttcacgtcttccttgcgcacactgttattgtcccacaaccgcataagccatctcccctcaggtttcttgagtgaagtctcttccttgaagcatttggacctttcctctaacctgctcaagacgatcaataagtcagccctcgaaacgaaaactacaactaaactatccatgctggagctgcacggcaatcccttcgagtgcacctgcgacattggcgattttcgacgttggatggacgaacacctcaatgtgaagatcccccgactggtggacgtgatctgcgctagccccggggaccagagaggcaaatctatagtttcccttgaactgaccacgtgcgtgtctgacgtgacggctgtcattttgttcttctttaccttcttcatcaccaccatggtgatgctagccgccctcgctcaccaccttttctattgggacgtttggtttatatacaatgtctgccttgccaaggtcaaagggtatcgctcattatcaacctctcaaaccttttatgatgcctatatcagctacgataccaaggacgcgagcgtgactgattgggtgatcaacgaactacggtaccacctagaagagtcccgggataagaacgtgctgttgtgtctcgaagaaagggattgggaccccggactggccattatcgacaatcttatgcagagcatcaaccagtccaagaagacagtgtttgtgctgaccaaaaagtacgctaagtcttggaactttaagaccgccttttatctcgcacttcagcgtcttatggacgagaacatggatgtcataatctttatcctgctggagccggttctgcagcacagtcagtacctccggctgaggcagcggatctgcaagtcttcgatccttcagtggcctgacaaccccaaagccgaggggctgttctggcagaccctgaggaacgtcgtgttgacggaaaacgatagtcgctataataacatgtatgtggatagcatcaaacagtattag

SEQ ID NO: 236885 - DNA, 3126 bp, Artificial Sequence
  derived and/or modified sequence
atggaaaacatgtttttgcagagctcaatgttaacgtgcattttcctgttgatttctgggtcatgtgaactctgtgctgaagagaacttctctaggagttacccatgtgatgagaaaaaacagaatgattcagtgatcgcagaatgttcaaataggcgactccaggaggtcccacagaccgtcggaaagtatgtaaccgagctggatctgtcagataattttatcacccacattacgaacgagtcatttcagggcctgcagaatctcacgaagatcaatctcaatcacaatccaaacgtacaacaccagaatgggaatccgggaatccagagtaacgggctcaatattacggacggggctttcctgaacctcaagaatttgcgtgagctgctgctggaggataaccaattgccccagatcccatccggactgccagaatcgcttacggaactcagtctgatccaaaacaacatttacaatataaccaaagaggggatctctcgtctgattaatctgaagaacctgtatctcgcatggaattgttattttaacaaggtttgcgagaagaccaacattgaagatggcgtcttcgaaaccctgacgaatctggagctgctctccttgagttttaatagtctctcgcacgttccacccaaactaccctcctccctgcgcaaactatttctttctaacacccagatcaagtacatctcagaagaggatttcaaaggtttgattaatctgactctgctggatctgtcaggcaactgtcctcggtgctttaatgcgccatttccttgtgtgccgtgtgacggaggggcatcgatcaatatagaccggtttgcatttcagaaccttactcaacttaggtatcttaatctctcatccacttctcttagaaagataaatgcggcatggtttaaaaacatgccacatctcaaagtgttagatctggagttcaattatttagtgggagaaattgcctcaggtgcatttttaacaatgcttccacggttagaaatcctcgacttgagctttaactacattaaaggtagctacccgcagcacattaacataagcagaaatttttctaagttgctgagtctgcgcgcacttcatctgcggggttacgtcttccaggagttaagagaagatgactttcagccactgatgcagctgcctaacctgtctaccatcaatctgggaattaacttcataaagcaaattgactttaaactatttcagaactttagcaacctcgaaataatttacttatctgagaataggatcagccctctggtgaaggacacaaggcaaagctacgcgaatagtagcagtttccagagacacatcagaaagcgcaggtctactgactttgagttcgatccacacagcaatttttatcattttacccgaccgctgataaagccacaatgtgctgcttatggtaaagccctcgacctgagtctgaattctatcttcttcattggccctaaccagtttgaaaatctgccggacatcgcctgtttaaacttgagcgccaactccaacgcacaggtgctatctggaaccgagttcagtgcgattccacatgtgaagtatctggatcttactaacaataggctggactttgataatgcctctgccctgacagaactgagcgacctggaggtgctggatttgagttataatagccattatttccgtattgctggagtgactcatcacctagaattcatacaaaacttcactaatctgaaggtacttaacctgagccataacaatatatacacccttactgataaatacaacctggaatcgaaaagcctggtcgaactggtgttttcaggaaatcgcctagacattctttggaacgacgacgataaccgctacatcagcattttcaaaggtctgaaaaatctaactaggctggacttgagcctgaatcggttgaaacatatcccaaatgaggccttcttaaacctccctgcttcgcttacggaactccatattaacgataacatgcttaagttttttaattggactctgctccaacagtttcctagactggagttactggacctgcgtgggaacaagctgctcttcctcacagacagcttgagtgatttcacatccagtcttcggactttactcctctctcacaacaggatcagccacctaccatcaggctttcttagtgaggtgagctcactgaaacacctggatctgtccagcaacttgctgaaaacaatcaataaaagcgccctggaaactaaaaccaccacgaaactgtccatgctggagctacacgggaatccgtttgagtgcacctgcgacataggcgactttcggcgatggatggacgagcacttaaacgtgaagatcccgcgactggtagatgtcatctgtgcgagtccgggtgaccaacgaggtaaatccatcgtttccctggagcttacaacatgtgttagtgacgtaaccgcggtcatcttgttttttttcaccttctttatcacgacaatggtcatgcttgcagccctggcgcaccacttgttttactgggatgtgtggttcatctacaacgtgtgtctggcaaaggtgaaaggttaccggtctctgagcacttcccagaccttttatgacgcctacataagttatgacacaaaggatgcctccgtgacagattgggtcatcaacgaactgcgctatcaccttgaagaaagccgagacaagaatgtccttctgtgcttggaggagagggattgggaccccggactggccatcattgacaacttgatgcagtctatcaatcagtccaaaaagacagttttcgtgctgaccaagaaatacgccaagagctggaattttaagaccgctttctatttggctttgcagcgcttgatggacgaaaacatggatgtgattatctttattctcctcgagccagtactacagcacagtcagtacctgcgcctgcgccagcgtatctgcaagtctagtatcttacaatggccagacaacccaaaagccgaaggtctgttttggcagacactaaggaacgttgtattaactgaaaatgactctaggtacaacaacatgtacgtcgacagtatcaaacagtactag

SEQ ID NO: 236886 - DNA, 3126 bp, Artificial Sequence
  derived and/or modified sequence
atggagaacatgttcctgcagagcagcatgctgacctgcatcttcctgctgatcagcggcagctgcgagctgtgcgccgaggagaacttcagcagaagctacccctgcgacgagaagaagcagaacgacagcgtgatcgccgagtgcagcaacagaagactgcaggaggtgccccagaccgtgggcaagtacgtgaccgagctggacctgagcgacaacttcatcacccacatcaccaacgagagcttccagggcctgcagaacctgaccaagatcaacctgaaccacaaccccaacgtgcagcaccagaacggcaaccccggcatccagagcaacggcctgaacatcaccgacggcgccttcctgaacctgaagaacctgagagagctgctgctggaggacaaccagctgccccagatccccagcggcctgcccgagagcctgaccgagctgagcctgatccagaacaacatctacaacatcaccaaggagggcatcagcagactgatcaacctgaagaacctgtacctggcctggaactgctacttcaacaaggtgtgcgagaagaccaacatcgaggacggcgtgttcgagaccctgaccaacctggagctgctgagcctgagcttcaacagcctgagccacgtgccccccaagctgcccagcagcctgagaaagctgttcctgagcaacacccagatcaagtacatcagcgaggaggacttcaagggcctgatcaacctgaccctgctggacctgagcggcaactgccccagatgcttcaacgcccccttcccctgcgtgccctgcgacggcggcgccagcatcaacatcgacagattcgccttccagaacctgacccagctgagatacctgaacctgagcagcaccagcctgagaaagatcaacgccgcctggttcaagaacatgccccacctgaaggtgctggacctggagttcaactacctggtgggcgagatcgccagcggcgccttcctgaccatgctgcccagactggagatcctggacctgagcttcaactacatcaagggcagctacccccagcacatcaacatcagcagaaacttcagcaagctgctgagcctgagagccctgcacctgagaggctacgtgttccaggagctgagagaggacgacttccagcccctgatgcagctgcccaacctgagcaccatcaacctgggcatcaacttcatcaagcagatcgacttcaagctgttccagaacttcagcaacctggagatcatctacctgagcgagaacagaatcagccccctggtgaaggacaccagacagagctacgccaacagcagcagcttccagagacacatcagaaagagaagaagcaccgacttcgagttcgacccccacagcaacttctaccacttcaccagacccctgatcaagccccagtgcgccgcctacggcaaggccctggacctgagcctgaacagcatcttcttcatcggccccaaccagttcgagaacctgcccgacatcgcctgcctgaacctgagcgccaacagcaacgcccaggtgctgagcggcaccgagttcagcgccatcccccacgtgaagtacctggacctgaccaacaacagactggacttcgacaacgccagcgccctgaccgagctgagcgacctggaggtgctggacctgagctacaacagccactacttcagaatcgccggcgtgacccaccacctggagttcatccagaacttcaccaacctgaaggtgctgaacctgagccacaacaacatctacaccctgaccgacaagtacaacctggagagcaagagcctggtggagctggtgttcagcggcaacagactggacatcctgtggaacgacgacgacaacagatacatcagcatcttcaagggcctgaagaacctgaccagactggacctgagcctgaacagactgaagcacatccccaacgaggccttcctgaacctgcccgccagcctgaccgagctgcacatcaacgacaacatgctgaagttcttcaactggaccctgctgcagcagttccccagactggagctgctggacctgagaggcaacaagctgctgttcctgaccgacagcctgagcgacttcaccagcagcctgagaaccctgctgctgagccacaacagaatcagccacctgcccagcggcttcctgagcgaggtgagcagcctgaagcacctggacctgagcagcaacctgctgaagaccatcaacaagagcgccctggagaccaagaccaccaccaagctgagcatgctggagctgcacggcaaccccttcgagtgcacctgcgacatcggcgacttcagaagatggatggacgagcacctgaacgtgaagatccccagactggtggacgtgatctgcgccagccccggcgaccagagaggcaagagcatcgtgagcctggagctgaccacctgcgtgagcgacgtgaccgccgtgatcctgttcttcttcaccttcttcatcaccaccatggtgatgctggccgccctggcccaccacctgttctactgggacgtgtggttcatctacaacgtgtgcctggccaaggtgaagggctacagaagcctgagcaccagccagaccttctacgacgcctacatcagctacgacaccaaggacgccagcgtgaccgactgggtgatcaacgagctgagataccacctggaggagagcagagacaagaacgtgctgctgtgcctggaggagagagactgggaccccggcctggccatcatcgacaacctgatgcagagcatcaaccagagcaagaagaccgtgttcgtgctgaccaagaagtacgccaagagctggaacttcaagaccgccttctacctggccctgcagagactgatggacgagaacatggacgtgatcatcttcatcctgctggagcccgtgctgcagcacagccagtacctgagactgagacagagaatctgcaagagcagcatcctgcagtggcccgacaaccccaaggccgagggcctgttctggcagaccctgagaaacgtggtgctgaccgagaacgacagcagatacaacaacatgtacgtggacagcatcaagcagtactag

SEQ ID NO: 236887 - protein, 334 aa, Artificial Sequence
  derived and/or modified sequence
MGRPAGLFPPLCPFLGFRPEACWERHMQIERAPSVPPFLRWAGYRPGPVRRRGKVELIKFVRVQWRRPQVEWRRRRWGPGPGASMAGSEELGLREDTLRVLAAFLRRGEAAGSPVPTPPRSPAQEEPTDFLSRLRRCLPCSLGRGAAPSESPRPCSLPIRPCYGLEPGPATPDFYALVAQRLEQLVQEQLKSPPSPELQGPPSTEKEAILRRLVALLEEEAEVINQKLASDPALRSKLVRLSSDSFARLVELFCSRDDSSRPSRACPGPPPPSPEPLARLALAMELSRRVAGLGGTLAGLSVEHVHSFTPWIQAHGGWEGILAVSPVDLNLPLD

SEQ ID NO: 236888 - DNA, 1005 bp, Artificial Sequence
  derived and/or modified sequence
atgggccgtccggctggcctcttcccccctttgtgtccctttctgggattccggccggaggcctgttgggaaagacatatgcagatcgaacgagctcctagtgtgccaccatttctccgttgggccgggtatcgtcccggtcccgtgagacggcggggcaaggtggagttgatcaagttcgtacgcgtacaatggagaaggccccaggtggaatggcgaagaaggcggtgggggccaggacccggtgcatccatggcaggtagcgaggaactagggctgcgtgaggatacattgagggtgctcgcagccttccttcggaggggcgaagcggcagggtcacctgtcccaacacctcctagatctcccgctcaagaggagccaaccgattttctgtctcgcctgcgcaggtgtctcccttgctcactgggccgcggcgccgctccatccgaaagcccgcgcccttgctcgttaccgatcagaccatgttacggcctggaacccggtcccgccacgccagacttttacgccctcgtcgctcagaggctggagcaactagtccaagaacagcttaagagccccccgtcacctgaacttcagggacctccctccaccgagaaggaggcgatcctgcgaagactggttgcactgctcgaggaagaagcagaggtgataaaccagaagctcgcgagtgatcccgcactacgcagcaagctggtgagactatcatcggatagcttcgctcggttggtcgagctcttttgtagccgagacgattcaagtcgaccaagccgggcctgtcccggacctcctccccctagtcccgagcccctagctagactcgccctggcaatggagctatcgcgacgggtggctgggctgggcggcacgctggcgggcctaagcgtcgagcacgtccactcttttacaccctggatacaagctcacggtggctgggagggtatccttgcagtgtctcccgtggatctcaacttaccccttgactag

SEQ ID NO: 236889 - DNA, 1005 bp, Artificial Sequence
  derived and/or modified sequence
atgggccggcctgctggcctcttcccccccctgtgccccttcctgggcttccggcctgaggcctgctgggagcggcacatgcagatcgagcgggcccccagcgtgccccccttcctgcgctgggccggctaccggcccggccctgtgagaagaagaggcaaggtggagctgatcaagtttgtgcgggtgcagtggaggcggccccaggtggagtggaggagaagacgctggggccctggccctggggcctccatggccggcagcgaggagctgggcctgcgggaggacaccctgcgggtgctggccgccttcctgcggcggggggaggccgccggcagccctgtgcccaccccacccaggagccctgcccaggaggagcccacagacttcctgagccggctgcggcgctgcctgccctgcagcctgggccgcggggccgcccccagcgagagcccccggccctgcagcctgcccatccggccctgctacggcctggagcccggccctgccaccccagacttctacgccctggtggcccagaggctggagcagctggtgcaggagcagctgaagagcccccccagccctgagctgcagggcccccccagcacagagaaggaggccatcctgcggcggctggtggccctgctggaggaggaggccgaggtgatcaaccagaagctggccagtgaccctgccctgcggagcaagctggtgcggctgagcagtgacagctttgcccggctggtggagctgttctgcagcagagatgacagcagccggcccagccgggcctgccccggccccccaccacccagccctgagcccctggcccggctggccctggccatggagctgagccggcgggtggccggcctgggcggcaccctggccggcctgtctgtggagcacgtgcacagcttcaccccctggatccaggcccatggaggctgggagggcatcctggccgtgtcccctgtggacctgaacctgcccctggactag

SEQ ID NO: 236890 - DNA, 1005 bp, Artificial Sequence
  derived and/or modified sequence
atgggccggcccgccggcctgttcccccccctgtgccccttcctgggctttcgccccgaagcatgctgggagcggcatatgcagattgagagggcccccagtgtgccacctttcctccggtgggcaggctacagacccgggccagtcaggagacgtggcaaggtggagttgattaaattcgttagggttcaatggagacggcctcaggtagagtggcgccgcagaagatggggccccggacctggtgcatctatggccggcagtgaggaactcggtctgcgagaggatacgttgcgggtccttgcagcgttcttgcgaaggggggaggctgcaggatctccggtgcccacaccacctagaagtcctgcccaagaggaacctacagattttttaagccgcttgcggagatgtttaccttgttctctcgggcgtggtgccgcaccaagcgagtctcctcgcccttgtagcctacctatccggccttgctatgggctggaacccggtcctgcaacccccgacttttatgcacttgtggctcagcgccttgaacagttagtgcaggaacagttaaaatctccgccaagccccgagctgcaagggcctcccagtaccgaaaaagaggcaatattgcgccgcttagtcgcactgcttgaggaggaagctgaggtcattaaccagaaactggcttctgacccggcattgagaagcaaactggtgcggctttccagtgactcattcgctcggctggtggaactgttctgttccagggatgactcatctcgccccagtcgcgcttgcccaggccctcctccaccttcccctgaacctctagctcggctggccctcgccatggaactttcgcgaagagtggctggtttaggggggaccctagcagggctgagcgtcgagcacgtccactctttcacaccttggatccaggcccatggagggtgggaaggcatactggccgtttctcctgtcgatctgaacctgcctttggactag

SEQ ID NO: 236891 - DNA, 1005 bp, Artificial Sequence
  derived and/or modified sequence
atgggcagaccagcaggactctttccaccactgtgtccgttcttgggcttcagacctgaggcatgctgggaacgccacatgcagatcgagcgcgctcctagtgtgcctccatttttgcgttgggccggatacaggccgggacccgtgagaagacggggaaaggtagagcttataaaatttgtgagggtccagtggcggagacctcaggtggaatggcgcaggagacggtggggcccaggtcccggagcatcaatggcaggaagtgaagaactgggactgagagaggacactctgcgagtgcttgctgccttcctccgcaggggggaggccgctggctcgcccgtgcctacaccaccgaggtctccggctcaggaggagccgactgacttcctgagccgtctgagacggtgtctcccatgttcactggggaggggcgcagcccctagcgagtcccccagaccctgtagcctgcctatcaggccgtgctatggacttgagccaggaccggctacgcccgacttctatgctctcgtagctcagagactcgaacagctggtgcaagaacagctgaaaagtcctcccagtcctgaactgcaaggaccccctagcacagaaaaagaggctatcctgcggcgactggtggccttactcgaagaggaagccgaggttataaaccagaaactggcaagtgaccccgctcttcgatctaagcttgtgcggctgtcctccgactccttcgcgcgtcttgtggagttgttttgcagtagagatgattcttccagaccaagtagggcctgtcccggacccccaccaccatctcccgagcccctcgccaggctggcactcgctatggagctctctcggcgagtggctggcctgggtgggaccctcgcaggcctgagcgtggagcatgtccattccttcaccccttggatccaagcacatggcggatgggagggcattctcgccgtgtccccggttgatttgaatctgcctcttgactag

SEQ ID NO: 236892 - DNA, 1854 bp, Artificial Sequence
  derived and/or modified sequence
aagtaagtatccccactttcagggtagcatcctctttccctagttatttcagtgcagaatcgattcacgtgtaagcctctacctcctgcacttaccccaatgtagacccccttccacagtccccctacagaagatctcccaaaacatttccaacacagaacttccattcaattcccctccgactgcccgcctccctcctccaggacagagcacgccccaggtttcgagactgaactacccccatctacggagtccacccctccctctctagaaccccctcagtgtagacgcctcctcttttcctctttcctccctactttttctagtttttctgcagccgacctccagcgtcggccactgtagctccttccttgctccactttccccagagtacacagcctgcctttccactctccgtgcagacccatcctctttcccgctcctcgctctcggacgccaccaacgctctcccgggctcttccgcgttacctacgatggaaggtcggggcgtgcgggcagctggaacccacccctgtcttggagctccgggtagctctcaaactcgaggctgcgcaccccctttcccgtcagctgagctctagagcgctggggctttctttttgatcgacttcttgaaataaaaccaactttatcattctttgggtaacagacccaaaagccgatgggacggcccgctgggctgttcccgcccctatgcccttttttgggtttccggccagaggcatgctgggagcgtcacatgcaaattgagcgtgcacccagcgttccgccctttctacgctgggccggttatcgacccggcccagtgcgcaggcgcgggaaagttgaactaataaagtttgtacgagttcagtggaggagaccgcaagttgagtggaggaggcggcggtggggccccggaccaggtgcctccatggcaggctctgaagagctggggctccgggaagacacgctgagggtcctagctgccttccttaggcgtggtgaggctgccgggtctcctgttccaactccacctagaagccctgcccaagaagagccaacagacttcctgagccgccttcgaagatgtcttccctgctccctggggcgaggagcagccccctctgagtcccctcggccttgctctctgcccatccgcccctgctatggtttagagcctggcccagctactccagacttctatgctttggtggcccagcggctggaacagctggtccaagagcagctgaaatctccgcccagcccagaattacagggtcccccatcgacagagaaggaagccatactgcggaggctggtggccctgctggaggaggaggcagaagtcattaaccagaagctggcctcggaccccgccctgcgcagcaagctggtccgcctgtcctccgactctttcgcccgcctggtggagctgttctgtagccgggatgacagctctcgcccaagccgagcatgccccgggcccccgcctccttccccggagcccctggcccgcctggccctagccatggagctgagccggcgcgtggccgggctggggggcaccctggccggactcagcgtggagcacgtgcacagcttcacgccctggatccaggcccacgggggctgggagggcatcctggctgtttcacccgtggacttgaacttgccattggactgagctctttctcagaagctgctacaagatgacacctcatgtccctgccctcttcgtgtgcttttccaagtcttcctattccactcagggctgtggggtggtggttgccctacctgtttttgccaaaaataaattgtttaaaacttttcttattaaaaacgttacaaagt

SEQ ID NO: 236893 - DNA, 1005 bp, Artificial Sequence
  derived and/or modified sequence
atgggcagacccgccggcctgttcccccccctgtgccccttcctgggcttcagacccgaggcctgctgggagagacacatgcagatcgagagagcccccagcgtgccccccttcctgagatgggccggctacagacccggccccgtgagaagaagaggcaaggtggagctgatcaagttcgtgagagtgcagtggagaagaccccaggtggagtggagaagaagaagatggggccccggccccggcgccagcatggccggcagcgaggagctgggcctgagagaggacaccctgagagtgctggccgccttcctgagaagaggcgaggccgccggcagccccgtgcccaccccccccagaagccccgcccaggaggagcccaccgacttcctgagcagactgagaagatgcctgccctgcagcctgggcagaggcgccgcccccagcgagagccccagaccctgcagcctgcccatcagaccctgctacggcctggagcccggccccgccacccccgacttctacgccctggtggcccagagactggagcagctggtgcaggagcagctgaagagcccccccagccccgagctgcagggcccccccagcaccgagaaggaggccatcctgagaagactggtggccctgctggaggaggaggccgaggtgatcaaccagaagctggccagcgaccccgccctgagaagcaagctggtgagactgagcagcgacagcttcgccagactggtggagctgttctgcagcagagacgacagcagcagacccagcagagcctgccccggcccccccccccccagccccgagcccctggccagactggccctggccatggagctgagcagaagagtggccggcctgggcggcaccctggccggcctgagcgtggagcacgtgcacagcttcaccccctggatccaggcccacggcggctgggagggcatcctggccgtgagccccgtggacctgaacctgcccctggactag

SEQ ID NO: 236894 - DNA, 846 bp, Artificial Sequence
  derived and/or modified sequence
atggaaaagagtacagacacggatgaggacaacgtgaccagaactgagtattctgataaaactacgcagtttccctccgtctacgctgtgccagggacagagcaaaccgaagctgtgggaggactcagtagcaaacccgccacgccaaaaactaccaccccgccttccagcccacctcctaccgctgtcagtccagaatttgcgtatgtgccagcggacccagcccaactcgccgctcagatgctggccatggcaacttccgagaggggacaaccacctccatgctccaacatgtggacactctactgcctcaccgacaaaaaccagcaggggcacccctcccccccgcccgcaccaggaccattccctcaggccacactgtatctaccaaatcccaaggaccctcagttccagcagcaccctcctaaggtcacatttcctacttacgtgatgggcgatacaaagaaaacaagcgccccccccttcatccttgttggcagcaatgtgcaagaggcccaaggctggaagccccttcctgggcacgccgtggtgtcccagagcgacgtgctccgatacgtggctatgcaagtgcctatagctgtgcctgccgacgagaagtatcagaagcacactctgtctcctcagaatgccaaccctccttcaggacaggatgtgccccggccaaagagccccgtgttcctctcagtcgcctttcctgttgaggacgtggctaaaaaatcctcgggttctggagacaagtgcgcgccgttcgggtcgtatgggatcgccggggaagtcacagtgactacagcgcacaagaggcgaaaagcggaaaccgaaaattag

SEQ ID NO: 236895 - DNA, 846 bp, Artificial Sequence
  derived and/or modified sequence
atggagaagagcacagacacagatgaagataatgtgaccaggacagagtacagcgacaagaccacccagttccccagcgtgtatgctgtgcctggaacagagcagacagaggccgtgggcggcctgagcagcaagccagccacccccaagaccaccaccccacccagcagccccccacccacagctgtgtccccagagtttgcctacgtgcctgctgaccctgcccagctggccgcccagatgctggccatggccaccagcgagcggggccagcccccaccctgcagcaacatgtggaccctgtactgcctgacagacaagaaccagcagggccaccccagccccccaccagcccctggccccttcccccaggccaccctgtacctgcccaaccccaaggacccccagttccagcagcacccccccaaggtgaccttccccacctacgtgatgggagacaccaagaagaccagcgccccacccttcatcctggtgggcagcaatgtgcaggaggcccagggctggaagcccctgcccggccatgctgtggtgtcccagagtgatgtgctgcgctacgtggccatgcaggtgcccatcgctgtgcctgcagatgagaagtaccagaagcacaccctgagcccccagaatgccaaccccccatctggccaggatgtgccccggcccaagagccctgtgttcctgtctgtggccttccctgtggaggatgtggccaagaagagcagcggcagcggggacaagtgtgcccccttcggcagctatggaattgctggggaggtgacagtgaccacagcccacaagaggaggaaggccgagacagagaactag

SEQ ID NO: 236896 - DNA, 846 bp, Artificial Sequence
  derived and/or modified sequence
atggagaagagcaccgacaccgacgaggacaacgtgacccggaccgagtacagcgataaaactacacagtttcctagtgtgtatgcggttcccggcacagagcagactgaggctgtcggaggactgtcatctaagccagctaccccgaagacaaccaccccaccttctagtcccccacccacggcagtgagtccagaatttgcatacgtacccgcagatcccgcccaactggccgcccagatgcttgccatggcaacttctgagaggggccaacctcccccatgctctaatatgtggaccttgtactgtttgaccgataaaaatcaacagggccacccttctccacctccggcccccggcccctttccacaagccaccctgtacctgcctaaccccaaagatcctcagtttcaacaacaccccccgaaggttacttttcccacgtatgtgatgggcgataccaagaagacttcagctcctccattcattctagtgggctctaatgtacaggaggcacaaggctggaaacctctgcctgggcatgccgtggtgtcgcagagcgacgtccttagatacgtggccatgcaagtgcctattgcagtaccagccgatgaaaagtaccagaagcatactctgagcccacagaatgccaacccgccaagtggccaggatgtgccacggcccaagtcgcccgtcttcctgagtgtagcttttcccgtggaggatgtcgcaaagaagagttcggggtcaggggacaaatgtgccccctttgggagctatggtatcgctggggaggtgactgtgactactgcacataagcgccggaaggctgaaacagagaactag

SEQ ID NO: 236897 - DNA, 846 bp, Artificial Sequence
  derived and/or modified sequence
atggaaaagagcaccgacactgacgaagataacgtgactcggacggaatacagtgacaagacaacacagtttccctctgtgtacgcagtccctgggacagagcagacggaggctgtgggcggattgagttcaaaaccggcaacccccaagactacaactcccccttcatcccctcctcccacagctgtgagtccagagtttgcatatgtgccagcagaccctgcacaactggcagcgcagatgctggccatggcgacatccgagcggggtcagcctccaccatgttcaaacatgtggaccctgtactgtctgactgacaagaaccagcagggacatccgtcacctccccctgcccctggtccatttccacaagcaacattatatttgcccaaccccaaggatcctcaatttcagcagcatcccccaaaagtgacatttccgacctacgttatgggtgacacgaaaaagacttcagcccctccatttattctggtcggttcaaatgtccaggaagctcagggctggaagccgctgcctggacacgcggtcgttagccagagtgacgtgctgcgatacgtggcaatgcaggtccctatcgccgttcctgcggatgagaaataccagaagcacacattatcccctcaaaacgctaaccctccaagtggtcaggacgtgcccagacccaaaagcccagtcttcctttctgtggccttcccagtggaggatgtcgcaaaaaagagtagcgggtccggtgacaagtgtgcaccgttcggatcatacgggatcgcgggagaagtcacagttaccactgctcacaagagaaggaaggccgagaccgagaactag

SEQ ID NO: 236898 - DNA, 846 bp, Artificial Sequence
  derived and/or modified sequence
atggagaagagcaccgacaccgacgaggacaacgtgaccagaaccgagtacagcgacaagaccacccagttccccagcgtgtacgccgtgcccggcaccgagcagaccgaggccgtgggcggcctgagcagcaagcccgccacccccaagaccaccaccccccccagcagccccccccccaccgccgtgagccccgagttcgcctacgtgcccgccgaccccgcccagctggccgcccagatgctggccatggccaccagcgagagaggccagccccccccctgcagcaacatgtggaccctgtactgcctgaccgacaagaaccagcagggccaccccagccccccccccgcccccggccccttcccccaggccaccctgtacctgcccaaccccaaggacccccagttccagcagcacccccccaaggtgaccttccccacctacgtgatgggcgacaccaagaagaccagcgccccccccttcatcctggtgggcagcaacgtgcaggaggcccagggctggaagcccctgcccggccacgccgtggtgagccagagcgacgtgctgagatacgtggccatgcaggtgcccatcgccgtgcccgccgacgagaagtaccagaagcacaccctgagcccccagaacgccaacccccccagcggccaggacgtgcccagacccaagagccccgtgttcctgagcgtggccttccccgtggaggacgtggccaagaagagcagcggcagcggcgacaagtgcgcccccttcggcagctacggcatcgccggcgaggtgaccgtgaccaccgcccacaagagaagaaaggccgagaccgagaactag

SEQ ID NO: 236899 - protein, 147 aa, Artificial Sequence
  derived and/or modified sequence
MADSGTAGGAALAAPAPGPGSGGPGPRVYFQSPPGAAGEGPGGADDEGPVRRQGKVTVKYDRKELRKRLNLEEWILEQLTRLYDCQEEEIPELEIDVDELLDMESDDARAARVKELLVDCYKPTEAFISGLLDKIRGMQKLSTPQKK

SEQ ID NO: 236900 - DNA, 444 bp, Artificial Sequence
  derived and/or modified sequence
atggctgactcaggtactgcaggaggagctgctttggctgcccccgccccgggccctgggtccggagggcccggcccgagagtgtactttcaaagcccaccgggcgcggcgggggaggggcctgggggtgccgatgatgagggtccggtacgtagacaggggaaggtcacagtgaagtatgatcgtaaggaactgcggaagagattgaatttggaagaatggatacttgagcagcttacacgcttgtatgactgccaagaggaggaaataccagaactggagatagacgtcgatgagctgctggatatggaaagtgacgacgcacgggctgctagagtaaaagagctgctggtggactgctacaagcccacagaggccttcatctccggtttactcgataagatacgaggaatgcagaagttgtctactccccagaaaaagtag

SEQ ID NO: 236901 - DNA, 444 bp, Artificial Sequence
  derived and/or modified sequence
atggctgacagcggcacagctggaggagctgccctggccgccccagcccctggccctggcagcggcggccctggcccccgggtgtacttccagagccccccaggagctgctggggagggccctggaggagcagatgatgagggccctgtgcggcggcagggcaaggtgacagtgaagtatgacaggaaggagctgaggaagaggctgaacctggaggagtggatcctggagcagctgacccggctgtatgactgccaggaggaggagatccctgagctggagattgatgtggatgagctgctggacatggagagtgatgatgcccgggccgcccgggtgaaggagctgctggtggactgctacaagcccacagaggccttcatcagcggcctgctggacaagatccggggcatgcagaagctgagcaccccccagaagaagtag

SEQ ID NO: 236902 - DNA, 444 bp, Artificial Sequence
  derived and/or modified sequence
atggccgacagcggcaccgccggcggcgccgccctggccgcccccgcaccgggacccggcagcggcggacctggcccccgggtctatttccagagcccgccaggtgccgccggggaaggtccaggcggcgccgatgatgaaggaccagttcgacggcaaggcaaggttactgtgaagtacgatcggaaagagttaaggaagcgattgaatctggaggagtggattctggaacagctcacccgactttacgactgccaggaagaagagattccagagttggagatagatgtggatgagctgctcgacatggaatccgatgacgcacgcgccgctcgtgtgaaagagttactagtcgactgctacaaacctacagaagcctttatttcgggcttgctcgacaagattagaggcatgcagaagctgtctacaccgcaaaagaagtag

SEQ ID NO: 236903 - DNA, 444 bp, Artificial Sequence
  derived and/or modified sequence
atggccgactctggcaccgcaggcggagccgctctggccgctcccgctcctggacccggaagcggagggccaggtccacgggtgtacttccagtccccaccaggtgccgcaggcgaaggcccaggcggagccgatgacgaaggccctgtccgcagacagggtaaggtgacagtgaagtatgaccgcaaggagttgaggaagaggctgaatctggaagagtggatccttgaacaactgacccggctgtatgattgccaagaggaggagattcccgagcttgaaatcgacgtcgacgagctgctggatatggaatctgatgacgctagagccgcaagggtgaaggaattgcttgttgactgctataaacctaccgaggcatttataagcgggttgttagataagatcagggggatgcaaaaattgagtacaccccagaagaagtag

SEQ ID NO: 236904 - DNA, 982 bp, Artificial Sequence
  derived and/or modified sequence
gacagagaaagcgcttcggcggctgcagctcgggcggcggccgcgggggacaaagggcgggcggatcggcggggagggggcggggcgcggccaggccaagcccgggggctccgcatgctgcagctgcccccgggcgcccccgccgccgccctcgccgcggagccgcgcggagcggagccggcgagctaacccgagccagccggcgggcgtcccggaggcggtggcgcagggaggggcccgacgctcgcacgtggccccggcggccgccatggcggacagcggcaccgcggggggcgcggcgttggcggccccggcccccgggccgggcagtggcggcccaggaccacgcgtctactttcagagcccccccggggccgcaggagagggcccgggcggggcggacgatgagggcccagtgaggcgccaagggaaggtcaccgtcaagtatgaccgcaaggagctacggaagcgcctcaacctagaggagtggatcctggagcagctcacgcgcctctacgactgccaggaagaggagatcccagaactggagattgacgtggatgagctcctggacatggagagtgacgatgcccgggctgccagggtcaaggagctgctggttgactgttacaaacccacagaggccttcatttctggcctgctggacaagatccggggcatgcagaagctgagcacaccccagaagaagtgacggtccccgacccaggagaacggtggctcccacaggacaatcgctgccccccaacctcgtagcaacagcaataccgggggaccctgcggccaggcctggtgccatgagcagggctcctcgtgcccctggcccaggggtctcttcccctgccccctcagttttccacttttggggttttttattgttattaaactgatgggactttttgtgtttttatattgactctgcggcgcgggccctttaataaagctaggatacgcctttggtgca

SEQ ID NO: 236905 - DNA, 444 bp, Artificial Sequence
  derived and/or modified sequence
atggccgacagcggcaccgccggcggcgccgccctggccgcccccgcccccggccccggcagcggcggccccggccccagagtgtacttccagagcccccccggcgccgccggcgagggccccggcggcgccgacgacgagggccccgtgagaagacagggcaaggtgaccgtgaagtacgacagaaaggagctgagaaagagactgaacctggaggagtggatcctggagcagctgaccagactgtacgactgccaggaggaggagatccccgagctggagatcgacgtggacgagctgctggacatggagagcgacgacgccagagccgccagagtgaaggagctgctggtggactgctacaagcccaccgaggccttcatcagcggcctgctggacaagatcagaggcatgcagaagctgagcaccccccagaagaagtag

SEQ ID NO: 236906 - protein, 1043 aa, Artificial Sequence
  derived and/or modified sequence
MEFVRALWLGLALALGPGSAGGHPQPCGVLARLGGSVRLGALLPRAPLARARARAALARAALAPRLPHNLSLELVVAAPPARDPASLTRGLCQALVPPGVAALLAFPEARPELLQLHFLAAATETPVLSLLRREARAPLGAPNPFHLQLHWASPLETLLDVLVAVLQAHAWEDVGLALCRTQDPGGLVALWTSRAGRPPQLVLDLSRRDTGDAGLRARLAPMAAPVGGEAPVPAAVLLGCDIARARRVLEAVPPGPHWLLGTPLPPKALPTAGLPPGLLALGEVARPPLEAAIHDIVQLVARALGSAAQVQPKRALLPAPVNCGDLQPAGPESPGRFLARFLANTSFQGRTGPVWVTGSSQVHMSRHFKVWSLRRDPRGAPAWATVGSWRDGQLDLEPGGASARPPPPQGAQVWPKLRVVTLLEHPFVFARDPDEDGQCPAGQLCLDPGTNDSATLDALFAALANGSAPRALRKCCYGYCIDLLERLAEDTPFDFELYLVGDGKYGALRDGRWTGLVGDLLAGRAHMAVTSFSINSARSQVVDFTSPFFSTSLGIMVRARDTASPIGAFMWPLHWSTWLGVFAALHLTALFLTVYEWRSPYGLTPRGRNRSTVFSYSSALNLCYAILFRRTVSSKTPKCPTGRLLMNLWAIFCLLVLSSYTANLAAVMVGDKTFEELSGIHDPKLHHPAQGFRFGTVWESSAEAYIKKSFPDMHAHMRRHSAPTTPRGVAMLTSDPPKLNAFIMDKSLLDYEVSIDADCKLLTVGKPFAIEGYGIGLPQNSPLTSNLSEFISRYKSSGFIDLLHDKWYKMVPCGKRVFAVTETLQMSIYHFAGLFVLLCLGLGSALLSSLGEHAFFRLALPRIRKGSRLQYWLHTSQKIHRALNTEPPEGSKEETAEAEPSGPEVEQQQQQQDQPTAPEGWKRARRAVDKERRVRFLLEPAVVVAPEADAEAEAAPREGPVWLCSYGRPPAARPTGAPQPGELQELERRIEVARERLRQALVRRGQLLAQLGDSARHRPRRLLQARAAPAEAPPHSGRPGSQE

SEQ ID NO: 236907 - DNA, 3281 bp, Artificial Sequence
  derived and/or modified sequence
cgacgccgacaactttgcgatggagtttgtgcgggcgctgtggctgggcctggcgctggcgctggggccggggtccgcggggggccaccctcagccgtgcggcgtcctggcgcgcctcgggggctccgtgcgcctgggcgccctcctgccccgcgcgcctctcgcccgcgcccgcgcccgcgccgccctggcccgggccgccctggcgccgcggctgccgcacaacctgagcttggagctggtggtcgccgcgccccccgcccgcgaccccgcctcgctgacccgcggcctgtgccaggcgctggtgcctccgggcgtggcggccctgctcgcctttcccgaggctcggcccgagctgctgcagctgcacttcctggcggcggccaccgagacccccgtgctcagcctgctgcggcgggaggcgcgcgcgcccctcggagccccgaacccattccacctgcagctgcactgggccagccccctggagacgctgctggatgtgctggtggcggtgctgcaggcgcacgcctgggaagacgtcggcctggccctgtgccgcactcaggaccccggcggcctggtggccctctggacaagccgggctggccggcccccacagctggtcctggacctaagccggcgggacacgggagatgcaggactgcgggcacgcctggccccgatggcggcgccagtggggggtgaagcaccggtacccgcggcggtcctcctcggctgtgacatcgcccgtgcccgtcgggtgctggaggccgtacctcccggcccccactggctgttggggacaccactgccgcccaaggccctgcccaccgcggggctgccaccagggctgctggcgctgggcgaggtggcacgacccccgctggaggccgccatccatgacattgtgcaactggtggcccgggcgctgggcagtgcggcccaggtgcagccgaagcgagccctcctccccgccccggtcaactgcggggacctgcagccggccgggcccgagtccccggggcgcttcttggcacggttcctggccaacacgtccttccagggccgcacgggccccgtgtgggtgacaggcagctcccaggtacacatgtctcggcactttaaggtgtggagccttcgccgggacccacggggcgccccggcctgggccacggtgggcagctggcgggacggccagctggacttggaaccgggaggtgcctctgcacggcccccgcccccacagggtgcccaggtctggcccaagctgcgtgtggtaacgctgttggaacacccatttgtgtttgcccgtgatccagacgaagacgggcagtgcccagcggggcagctgtgcctggaccctggcaccaacgactcggccaccctggacgcactgttcgccgcgctggccaacggctcagcgccccgtgccctgcgcaagtgctgctacggctactgcattgacctgctggagcggctggcggaggacacgcccttcgacttcgagctgtacctcgtgggtgacggcaagtacggcgccctgcgggacggccgctggaccggcctggtcggggacctgctggccggccgggcccacatggcggtcaccagcttcagtatcaactccgcccgctcacaggtggtggacttcaccagccccttcttctccaccagcctgggcatcatggtgcgggcacgggacacggcctcacccatcggtgcctttatgtggcccctgcactggtccacgtggctgggcgtctttgcggccctgcacctcaccgcgctcttcctcaccgtgtacgagtggcgtagcccctacggcctcacgccacgtggccgcaaccgcagcaccgtcttctcctactcctcagccctcaacctgtgctacgccatcctcttcagacgcaccgtgtccagcaagacgcccaagtgccccacgggccgcctgctcatgaacctctgggccatcttctgcctgctggtgctgtccagctacacggccaacctggctgccgtcatggtcggggacaagaccttcgaggagctgtcggggatccacgaccccaagctgcaccacccggcgcagggcttccgcttcggcaccgtgtgggagagcagcgccgaggcgtacatcaagaagagcttccccgacatgcacgcacacatgcggcgccacagcgcgcccaccacgccccgcggcgtcgccatgctcacgagcgacccccccaagctcaacgccttcatcatggacaagtcgctcctggactacgaggtctccatcgacgccgactgcaaactgctgaccgtgggaaagcccttcgccattgagggctatgggatcggactgccccagaactcgccgctcacctccaacctgtccgagttcatcagccgctacaagtcctccggcttcatcgacctgctccacgacaagtggtacaagatggtgccttgcggcaagcgggtctttgcggttacagagaccctgcagatgagcatctaccacttcgcgggcctcttcgtgttgctgtgcctgggcctgggcagcgctctgctcagctcgctgggcgagcacgccttcttccgcctggcgctgccgcgcatccgcaaggggagcaggctgcagtactggctgcacaccagccagaaaatccaccgcgccctcaacacggagccaccagaggggtcgaaggaggagacggcagaggcggagcccagcggccccgaggtggagcagcagcagcagcagcaggaccagccaacggctccggagggctggaaacgggcgcgccgggccgtggacaaggagcgccgcgtgcgcttcctgctggagcccgccgtggttgtggcacccgaagcggacgcggaggcggaggctgcgccgcgagagggccccgtctggctgtgctcctacggccgcccgcccgccgcaaggcccacgggggccccccagcccggggagctgcaggagctggagcgccgcatcgaagtcgcgcgtgagcggctccgccaggccctggtgcggcgcggccagctcctggcacagctcggggacagcgcacgtcaccggcctcggcgcttgcttcaggccagagcggcccccgcggaggccccaccacactctggccgaccggggagccaggaatgaggcggcagccgggccgtttgggctcaagacacacacacagcgcagtgagccgctgtcaacagacagtttattctatatacaaacacaattttgtacactgcaattaaatagaatggaatgagcgctcctc

SEQ ID NO: 236908 - DNA, 3132 bp, Artificial Sequence
  derived and/or modified sequence
atggagttcgtgagagccctgtggctgggcctggccctggccctgggccccggcagcgccggcggccacccccagccctgcggcgtgctggccagactgggcggcagcgtgagactgggcgccctgctgcccagagcccccctggccagagccagagccagagccgccctggccagagccgccctggcccccagactgccccacaacctgagcctggagctggtggtggccgccccccccgccagagaccccgccagcctgaccagaggcctgtgccaggccctggtgccccccggcgtggccgccctgctggccttccccgaggccagacccgagctgctgcagctgcacttcctggccgccgccaccgagacccccgtgctgagcctgctgagaagagaggccagagcccccctgggcgcccccaaccccttccacctgcagctgcactgggccagccccctggagaccctgctggacgtgctggtggccgtgctgcaggcccacgcctgggaggacgtgggcctggccctgtgcagaacccaggaccccggcggcctggtggccctgtggaccagcagagccggcagacccccccagctggtgctggacctgagcagaagagacaccggcgacgccggcctgagagccagactggcccccatggccgcccccgtgggcggcgaggcccccgtgcccgccgccgtgctgctgggctgcgacatcgccagagccagaagagtgctggaggccgtgccccccggcccccactggctgctgggcacccccctgccccccaaggccctgcccaccgccggcctgccccccggcctgctggccctgggcgaggtggccagaccccccctggaggccgccatccacgacatcgtgcagctggtggccagagccctgggcagcgccgcccaggtgcagcccaagagagccctgctgcccgcccccgtgaactgcggcgacctgcagcccgccggccccgagagccccggcagattcctggccagattcctggccaacaccagcttccagggcagaaccggccccgtgtgggtgaccggcagcagccaggtgcacatgagcagacacttcaaggtgtggagcctgagaagagaccccagaggcgcccccgcctgggccaccgtgggcagctggagagacggccagctggacctggagcccggcggcgccagcgccagacccccccccccccagggcgcccaggtgtggcccaagctgagagtggtgaccctgctggagcaccccttcgtgttcgccagagaccccgacgaggacggccagtgccccgccggccagctgtgcctggaccccggcaccaacgacagcgccaccctggacgccctgttcgccgccctggccaacggcagcgcccccagagccctgagaaagtgctgctacggctactgcatcgacctgctggagagactggccgaggacacccccttcgacttcgagctgtacctggtgggcgacggcaagtacggcgccctgagagacggcagatggaccggcctggtgggcgacctgctggccggcagagcccacatggccgtgaccagcttcagcatcaacagcgccagaagccaggtggtggacttcaccagccccttcttcagcaccagcctgggcatcatggtgagagccagagacaccgccagccccatcggcgccttcatgtggcccctgcactggagcacctggctgggcgtgttcgccgccctgcacctgaccgccctgttcctgaccgtgtacgagtggagaagcccctacggcctgacccccagaggcagaaacagaagcaccgtgttcagctacagcagcgccctgaacctgtgctacgccatcctgttcagaagaaccgtgagcagcaagacccccaagtgccccaccggcagactgctgatgaacctgtgggccatcttctgcctgctggtgctgagcagctacaccgccaacctggccgccgtgatggtgggcgacaagaccttcgaggagctgagcggcatccacgaccccaagctgcaccaccccgcccagggcttcagattcggcaccgtgtgggagagcagcgccgaggcctacatcaagaagagcttccccgacatgcacgcccacatgagaagacacagcgcccccaccacccccagaggcgtggccatgctgaccagcgacccccccaagctgaacgccttcatcatggacaagagcctgctggactacgaggtgagcatcgacgccgactgcaagctgctgaccgtgggcaagcccttcgccatcgagggctacggcatcggcctgccccagaacagccccctgaccagcaacctgagcgagttcatcagcagatacaagagcagcggcttcatcgacctgctgcacgacaagtggtacaagatggtgccctgcggcaagagagtgttcgccgtgaccgagaccctgcagatgagcatctaccacttcgccggcctgttcgtgctgctgtgcctgggcctgggcagcgccctgctgagcagcctgggcgagcacgccttcttcagactggccctgcccagaatcagaaagggcagcagactgcagtactggctgcacaccagccagaagatccacagagccctgaacaccgagccccccgagggcagcaaggaggagaccgccgaggccgagcccagcggccccgaggtggagcagcagcagcagcagcaggaccagcccaccgcccccgagggctggaagagagccagaagagccgtggacaaggagagaagagtgagattcctgctggagcccgccgtggtggtggcccccgaggccgacgccgaggccgaggccgcccccagagagggccccgtgtggctgtgcagctacggcagaccccccgccgccagacccaccggcgccccccagcccggcgagctgcaggagctggagagaagaatcgaggtggccagagagagactgagacaggccctggtgagaagaggccagctgctggcccagctgggcgacagcgccagacacagacccagaagactgctgcaggccagagccgcccccgccgaggcccccccccacagcggcagacccggcagccaggagtag

SEQ ID NO: 236909 - DNA, 3132 bp, Artificial Sequence
  derived and/or modified sequence
atggaatttgtccgggccctttggctaggtttagcgctggccttgggccctggttctgcgggtgggcacccccagccatgcggcgtactggcacggttgggtgggtctgtgcgcttaggagctctgttaccaagagcgcccctcgcgagggctagagcccgcgcagcgctggcaagagcagctctcgcacctcgcctgcctcacaatctctcattggagctggtcgtggccgctcctccagcacgcgatcctgcctcacttacgagggggctgtgtcaggcactggtcccgcctggagtggccgccctgttagcgttcccagaggccagacccgaactgctgcagctccactttctcgctgcagccaccgaaactccggttctgagcctcttacgccgggaggcccgggcgcccctgggggcgcccaatccttttcacctgcagctgcattgggcatcacccctggaaacactgctcgatgtgctcgttgccgtgctgcaggcccatgcctgggaggatgtaggcctggctctttgtaggactcaggaccctggggggctagtcgctctgtggacgtctagggcggggaggcctccacagctagtgctggacctttctcgaagggataccggcgatgccgggctgagggcacgcctggcacccatggctgctcccgtcgggggggaggcacccgttcccgctgcagtgctgctgggctgcgacatagcacgcgcgagaagggttctggaagcagtaccacctggacctcattggctgctggggactccgctcccaccgaaagccctgcctacagcaggcctcccgcccggtctccttgcacttggtgaagttgcacgtccccccctggaggctgctatccacgacatagtgcagttggttgcaagggccctcggatctgcagcccaagtgcaacctaagcgggccttgcttcctgcccccgttaattgcggagatctccaaccagcagggccagagtctcccggtcgcttcctggcaaggttcttagcaaacacgtcctttcagggccgcacggggccagtttgggtgaccggcagtagtcaagttcatatgagtagacacttcaaagtgtggtcgctgcggcgcgaccctagaggggcccctgcctgggcaacggtcgggtcatggagagacggtcaattggatttagagcccgggggcgcctccgccagacccccccccccccaaggcgctcaggtctggcctaagttgagggtcgtcaccttactagaacacccattcgtgtttgcaagagatcctgacgaggacggacaatgtcccgcaggccagctctgtttggaccctgggactaatgatagtgcaaccctagatgccctctttgccgccctggccaatggatccgctccgcgggcgttgaggaagtgctgctacggatattgcatagacctactggagagattggccgaggacactccatttgactttgagctttacctggttggtgacggaaagtacggggccctcagggatggccggtggaccggattagttggagacttattggctggacgagctcacatggcggtgacaagttttagcattaactccgccaggtcacaggtggttgatttcactagcccctttttttccacgtccctaggaattatggtgcgcgcccgggacacagcaagccccatcggtgcatttatgtggccccttcattggtccacctggctcggagtctttgccgccctacatttaactgccctcttcttgactgtatacgagtggcgcagcccctatggactgactcccagagggagaaatagatcgacggtgttctcctattctagtgcactcaacctgtgttatgccatcctgttccgccgcaccgtgtcttccaagacgcccaaatgcccaacaggacgcctcctgatgaatctttgggctatcttctgtctgctggttctttctagttacacggctaatctggccgctgtcatggtcggagataagacgttcgaagaattgtctggcatccacgaccccaagctgcaccacccggcccagggtttccggtttggaacagtctgggagtcatccgctgaagcttacataaagaaaagctttccagacatgcatgctcacatgaggaggcactcagcaccaacaacaccccgcggcgtggcaatgctgactagcgatccaccaaagctcaatgctttcatcatggataaatctctcctggactacgaggtctcgatcgacgccgactgtaaactgctgacggtcggaaaacccttcgcaatagaaggctatggcattggtttaccgcagaattctccactcacatccaacctgagtgagttcatctctcggtataagagtagtggctttatcgacctacttcacgataaatggtataagatggtcccctgcgggaagcgagtgtttgcggttaccgagactctgcagatgtcaatctaccactttgccggcttatttgtgctgctgtgtctgggactgggttcagcccttctttcttcactgggcgagcacgcctttttccgcctggccttgcccagaattcgcaaaggatcaagactgcagtactggctgcatacaagtcagaaaatccaccgtgccttgaacactgaacccccagaaggatcaaaggaagagaccgccgaggccgagccatctggtcctgaggtcgaacagcagcagcaacagcaggatcaacctactgccccagaaggctggaagcgtgctcgtagagctgtcgacaaagaacggagagtgcgctttctgttggaacctgcagtggtcgtggctcccgaggctgatgccgaagctgaggcagctcccagagaggggcctgtgtggttatgttcttatggaagaccacccgcggcccggcctaccggggctccccagcccggggagctacaagagctggagcgtcgcattgaggtggctcgagaacggctgaggcaggccttggtccgcaggggccagttgctcgcccagcttggggatagtgcccgccatcgtcctagaagactgctacaagcccgcgctgctcccgctgaggcgcctccacacagtggacggccgggaagtcaagagtag

SEQ ID NO: 236910 - DNA, 3132 bp, Artificial Sequence
  derived and/or modified sequence
atggagtttgtgcgggccctgtggctgggcctggccctggccctgggccctggcagcgctgggggccacccccagccctgtggggtgctggcccggctgggcggctctgtgcggctgggcgccctgctgccccgggcccccctggcccgggcccgggcccgggccgccctggcccgggccgccctggccccccggctgccccacaacctgagcctggagctggtggtggccgcccccccagcccgggaccctgccagcctgacccggggcctgtgccaggccctggtgcccccaggagtggccgccctgctggccttccctgaggcccggcctgagctgctgcagctgcacttcctggccgccgccacagagacccctgtgctgagcctgctgcggcgggaggcccgggcccccctgggcgcccccaaccccttccacctgcagctgcactgggccagccccctggagaccctgctggatgtgctggtggccgtgctgcaggcccacgcctgggaggatgtgggcctggccctgtgcaggacccaggaccccggcggcctggtggccctgtggaccagcagagctggccggcccccccagctggtgctggacctgagcagaagagacacaggagatgctggcctgcgggcccggctggcccccatggccgcccctgtgggcggggaggcccctgtgcctgctgctgtgctgctgggctgtgacatcgcccgggcccggcgggtgctggaggccgtgcccccaggcccccactggctgctgggcacccccctgccccccaaggccctgcccacagctggcctgcccccaggcctgctggccctgggggaggtggcccggccccccctggaggccgccatccatgacatcgtgcagctggtggcccgggccctgggcagcgctgcccaggtgcagcccaagagggccctgctgcctgcccctgtgaactgtggggacctgcagcctgctggccctgagagccctggccgcttcctggcccgcttcctggccaacaccagcttccagggccgcactggacctgtgtgggtgacaggcagcagccaggtgcacatgagccgccacttcaaggtgtggagcctgcggcgggaccccaggggggccccagcctgggccaccgtgggctcctggagagatggccagctggacctggagcccggcggggccagcgcccggcccccaccaccccagggcgcccaggtgtggcccaagctgcgggtggtgaccctgctggagcacccctttgtgtttgcccgggaccctgatgaagatggccagtgcccagctggccagctgtgcctggaccccggcaccaatgattctgccaccctggatgccctgtttgctgccctggccaatggaagtgccccccgggccctgaggaagtgctgctacggctactgcatcgacctgctggagcggctggccgaggacaccccatttgattttgagctgtacctggtgggagatggcaagtatggagccctgagagatggccgctggacaggcctggtgggggacctgctggccggccgggcccacatggctgtgaccagcttcagcatcaacagcgcccggagccaggtggtggacttcaccagccccttcttcagcaccagcctgggcatcatggtgcgggcccgggacacagccagccccatcggggccttcatgtggcccctgcactggagcacctggctgggcgtgtttgctgccctgcacctgacagccctcttcctgactgtgtatgagtggaggagcccctacggcctgaccccccggggcaggaacagaagcaccgtcttctcctacagcagcgccctgaacctgtgctacgccatcctcttcagaagaacagtgagcagcaagacccccaagtgccccaccggccgcctgctgatgaacctgtgggccatcttctgcctgctggtgctgagcagctacacagccaacctggccgctgtgatggtgggggacaagacctttgaggagctgagcggcatccatgaccccaagctgcaccacccagcccagggcttccgcttcggcaccgtgtgggagagcagcgctgaggcctacatcaagaagagcttcccagacatgcacgcccacatgaggaggcacagcgcccccaccaccccccggggcgtggccatgctgaccagtgacccccccaagctgaatgccttcatcatggacaagagcctgctggactatgaggtgtccattgatgctgactgcaagctgctgactgtgggcaagccctttgccatcgagggctatggaattggcctgccccagaacagccccctgaccagcaacctgtctgagttcatcagccgctacaagagcagcggcttcatcgacctgctgcatgacaagtggtacaagatggtgccctgtgggaagagggtgtttgctgtgacagagaccctgcagatgagcatctaccactttgctggcctgtttgtgctgctgtgcctgggcctgggcagcgccctgctgagcagcctgggggagcacgccttcttccggctggccctgccccgcatcaggaagggcagccggctgcagtactggctgcacaccagccagaagatccaccgggccctgaacacagagcccccagagggcagcaaggaggagacagctgaggccgagcccagcggccctgaggtggagcagcagcagcagcagcaggaccagcccacagcccctgagggctggaagagggccaggagagctgtggacaaggagcggcgggtgcgcttcctgctggagcctgctgtggtggtggcccctgaggctgatgctgaggccgaggccgccccccgggagggccctgtgtggctgtgcagctatggccggcccccagctgcccggcccactggagccccccagcccggggagctgcaggagctggagcggcgcatcgaggtggcccgggagcggctgcggcaggccctggtgagaagaggccagctgctggcccagctgggggacagcgcccggcaccggccccggcggctgctgcaggcccgggccgccccagctgaggccccaccccacagcggccggcccggcagccaggagtag

SEQ ID NO: 236911 - DNA, 3132 bp, Artificial Sequence
  derived and/or modified sequence
atggagttcgtgcgggccctgtggctgggcctggccctggccctgggtccggggtcagcagggggacacccacagccttgcggggtactcgcccgcttgggagggtctgtacgtctgggcgccctcctaccccgagcacccctggccagggccagagcccgcgccgccctggctcgggccgcacttgcccctcggctaccccacaatttgtcgctggaactcgtcgttgcggcacctcctgcacgtgatccggcgagtctgacaaggggtttgtgccaggccttggtgcctccaggcgtagccgctttgttggcatttcccgaagctaggcccgagctactccaactgcattttctggcagccgccaccgaaactcccgtgttgagcctgctgcgcagggaagctcgggctccactgggcgccccaaaccctttccacctgcagttgcattgggcttcccctctcgagacactcctggatgttctggttgcggtcctgcaggcgcacgcctgggaggatgtcggcctagctctttgcaggactcaggatcccggcggcctggtggccctgtggacttctagagctggtcgtcccccacagcttgtcctcgacctgtcccggagggacaccggggacgcaggtctccgcgcgaggctcgcgcccatggcagctccggttgggggcgaggccccggtgcccgctgccgtgttactcggatgtgatattgccagagccaggagagtgcttgaggccgttccccctggaccccactggttactggggacgcccttacccccgaaggccttgcccaccgcagggctgcctccgggtctgctggccttgggagaggtcgctagacctcccctcgaagcggccatacatgatatagttcagttagtggccagagccttaggttcagcagctcaagtgcagcctaagcgagcgctcctgccagctcctgtgaattgtggagacttgcaacctgccggtccggaatcacccgggaggtttctcgcccgctttctggccaacacgagtttccagggtagaaccgggccagtttgggtgactggaagcagccaggtccacatgtcccgacacttcaaggtgtggtccttgcgccgagaccctcggggtgctccagcctgggccacagtgggaagctggcgagacggccagttagatctggagccgggcggggccagcgctcgacctcctccaccccaaggagcacaggtttggcctaaactgagggtggtcaccttgctggaacatccattcgtcttcgcgcgggatcctgatgaggacggccaatgcccagctggtcagctgtgcctggacccgggcactaacgactctgcaacgctggatgccctgttcgctgctcttgccaacggttcagctccccgcgctctacggaagtgttgttatggctattgcatcgatctgttggagaggctggcggaggatactcctttcgacttcgaattgtaccttgtaggcgacggaaagtacggcgcgctccgagatggacggtggacgggtttggtcggtgacctactggccggacgtgctcatatggctgtcacctcattctcaattaattctgctcgcagtcaggtcgtggacttcacttcgcccttcttctctaccagcctgggcatcatggtaagagcacgagatacagcctccccgatcggcgctttcatgtggccacttcactggtccacatggctcggcgtcttcgcagctctccacctgaccgctctattccttactgtctatgagtggaggtctccctacggcttgacccccagggggagaaacaggagcacagtcttcagctattcatcagccctcaacttatgctacgccatactgtttagaaggaccgtctcctcaaaaaccccaaaatgcccaactggccgcttgcttatgaatctgtgggccattttttgtctcttggtcctgagcagttatacagcaaatcttgccgctgttatggtaggcgacaaaaccttcgaggagctttcaggaattcacgatcccaagctgcaccaccccgcacaaggattccgattcggcaccgtgtgggaatctagcgcggaagcttatattaagaaatcatttcccgacatgcacgctcacatgcgacgccactctgctcccacgaccccacggggcgtggctatgcttacctctgaccctccgaagttgaacgcttttattatggacaagagtctactcgactatgaggtgagtatcgacgctgattgcaagctcctcaccgtcggcaaacctttcgccatcgagggttacggaattggcctgccccaaaatagccccctgacgtctaatctgtccgagttcattagtagatacaaaagttcaggttttatcgacctgctgcacgacaaatggtataaaatggtgccatgtgggaagcgggtgtttgccgtgacagaaactctgcagatgtccatctaccattttgcaggcctgttcgtcttgctttgtctgggccttggaagcgcactgctgagctcattgggggaacacgcctttttcaggcttgctctgccgcggatacgaaagggcagtagactgcagtactggctccacacctcccagaagatccaccgagctctgaacactgaaccacctgaaggctccaaagaagaaacagctgaggcagagccgtccggaccggaggtagagcagcagcaacagcaacaagatcaacccactgctccagaggggtggaagcgggcgcggagagcagtggacaaggagaggagagtccgttttctgctggagcccgcagtggttgtcgcacctgaagcagatgcagaggcagaggcagctcctagggaaggacccgtatggctgtgttcttatggtagacccccagccgcccgtcccacaggagcccctcagcctggtgagcttcaggagctcgagaggcggattgaagtcgcaagggaaagactgcgccaggcacttgtgaggaggggccagctgctggcacaactcggggacagcgcccgacacaggccgcggagattgctgcaggcgcgcgcagccccagccgaggctccccctcactctggaagacctggcagccaggagtag

SEQ ID NO: 236912 - DNA, 3132 bp, Artificial Sequence
  derived and/or modified sequence
atggagtttgtgagggcgctgtggttgggccttgcactggctctggggcctggctcagccggtggccacccacaaccctgcggcgtcctggcaagactggggggatctgttaggctcggcgctttgcttccgcgagcgccactcgctagggcacgcgcacgcgcagcactcgcccgagcagctcttgccccaagacttccgcacaatctaagcctcgagcttgtggtggccgcaccaccagcccgagatcctgcctccttgacacgagggctgtgccaggctctggtaccccctggtgtcgctgcccttttggcatttccagaggctagacctgagctgctgcagttacacttcctcgcagccgcaacagagacacctgtgctgtctttactgcgaagggaagcccgtgcgccattaggagctccaaatccgtttcacctccaactgcactgggcttcgcctctcgagaccctgctggacgtactcgttgccgtccttcaggcccacgcctgggaggatgtgggcctggctctgtgtagaacacaggatcccggaggcctggtcgcactctggacttcgcgggcaggtaggcctccccagctcgtgctcgatctctctagaagagacacaggggatgcgggattgcgggctcggctggctcccatggccgctccagtgggaggcgaagctcccgtccctgccgcagtgctgctgggatgcgatattgcaagagctaggcgcgttctggaggcagtgccgccaggacctcactggctcctggggaccccattaccacccaaagctctgccaaccgcaggcctccctcccggattgctggcacttggcgaagtggctaggcccccactcgaagccgctatacatgatattgtgcagttggtcgctcgagcccttggcagcgctgcacaggtccagccaaaaagggccctgctgccagcacccgtcaactgcggtgaccttcaacccgctgggccagagagcccagggaggttcttggccagattcctggcgaatacttcctttcagggccgaacggggccagtgtgggtgaccggctcttcacaggtccatatgagccgccattttaaggtgtggagcctacgaagagaccccaggggcgcaccggcttgggccaccgttggcagctggagagacggacaattagacctggaaccaggaggtgcgtcagctaggcctccacctcctcagggcgcacaggtttggcccaaactgcgggtagtgacactcctagaacacccattcgtttttgcccgagatcccgatgaggatgggcaatgccctgcaggtcaactctgtctggatcccggaacgaacgactcagctaccctggacgccctgtttgcggctctggccaacggtagcgcacctagggccctccgcaaatgttgttatggctattgcattgatctgctggagcgcttagccgaggatacgccttttgattttgaactctatctggtcggcgatggcaaatacggagccctccgcgatggcagatggactggcctggtgggggacctcttggctgggagagcacacatggccgtgacctcgttttctatcaactctgcacggtcccaggttgtagatttcacatctccgttcttttccacatcattgggaatcatggtgagggcacgggacaccgcaagtcctatcggtgcattcatgtggcccctgcattggtcaacttggctcggagtcttcgccgctctgcacctgactgccctgtttttaacggtgtatgaatggcgaagcccctatggcctgactcctcgcggtcggaacagatccactgttttctcttacagcagtgccttgaatctgtgctacgcaattcttttcagacgaactgtgtcttctaaaacaccgaagtgtccgaccgggcgacttctgatgaacttatgggcaattttctgcctcctggtcctctcttcttataccgccaatctggcagccgtgatggtgggcgacaaaacctttgaagaactctccggcatccatgatccaaagctccatcaccctgcgcaaggatttcggtttggcaccgtctgggagagctccgccgaagcatacatcaagaagtcattccccgatatgcacgctcacatgcggaggcactccgcccctaccacgcctagaggtgttgccatgctgaccagcgaccctccaaagctcaatgccttcattatggataagtcgctgttggactatgaggtgtcaatcgatgccgattgtaaactcctgacagttgggaagccgttcgccatagagggctatggcattggactcccccagaatagtcccttgaccagcaatttgagcgaattcatctcccgatataagagctccggctttatcgacctgcttcatgacaaatggtacaagatggtaccctgcggaaaacgggtatttgccgtgaccgaaactctgcagatgtcaatataccattttgctggcctgtttgtgttgctttgcctgggattaggttcagcattacttagcagtctgggtgagcacgcgttcttccgtcttgccctgccgcgtatccgcaagggcagcagactgcagtactggctgcatacttcacagaagattcatcgggcattgaatactgaaccaccagaagggagcaaagaggagacagcggaagcggagcctagcggtcctgaggttgagcaacagcagcagcagcaagaccagcccacagctccagaaggatggaagagggcaagaagagctgtcgacaaggagcgacgcgtgcgctttttgctcgaacccgcagtggtagtggcacctgaagccgacgccgaagccgaggcagcaccgagggagggaccagtttggctgtgttcgtacggccgacctccagctgctcgccctactggagctccccagcccggtgagctccaggaacttgagagacgtattgaggtggctcgtgaacgtctgcgacaggcactggttcgcagggggcagcttttggcacagcttggggactccgcaaggcatcggccaaggcgactgctgcaggccagagcggcacccgctgaggcgcctccacactctggcaggcctggatcccaggaatag

SEQ ID NO: 236913 - protein, 760 aa, Artificial Sequence
  derived and/or modified sequence
MSPKKVQIKVEEKEDETEESSSEEEEEVEDKLPRRESLRPKRKRTRDVINEDDPEPEPEDEETRKAREKERRRRLKRGAEEEEIDEEELERLKAELDEKRQIIATVKCKPWKMEKKIEVLKEAKKFVSENEGALGKGKGKRWFAFKMMMAKKWAKFLRDFENFKAACVPWENKIKAIESQFGSSVASYFLFLRWMYGVNMVLFILTFSLIMLPEYLWGLPYGSLPRKTVPRAEEASAANFGVLYDFNGLAQYSVLFYGYYDNKRTIGWMNFRLPLSYFLVGIMCIGYSFLVVLKAMTKNIGDDGGGDDNTFNFSWKVFTSWDYLIGNPETADNKFNSITMNFKEAITEEKAAQVEENVHLIRFLRFLANFFVFLTLGGSGYLIFWAVKRSQEFAQQDPDTLGWWEKNEMNMVMSLLGMFCPTLFDLFAELEDYHPLIALKWLLGRIFALLLGNLYVFILALMDEINNKIEEEKLVKANITLWEANMIKAYNASFSENSTGPPFFVHPADVPRGPCWETMVGQEFVRLTVSDVLTTYVTILIGDFLRACFVRFCNYCWCWDLEYGYPSYTEFDISGNVLALIFNQGMIWMGSFFAPSLPGINILRLHTSMYFQCWAVMCCNVPEARVFKASRSNNFYLGMLLLILFLSTMPVLYMIVSLPPSFDCGPFSGKNRMFEVIGETLEHDFPSWMAKILRQLSNPGLVIAVILVMVLAIYYLNATAKGQKAANLDLKKKMKMQALENKMRNKKMAAARAAAAAGRQ

SEQ ID NO: 236914 - DNA, 2283 bp, Artificial Sequence
  derived and/or modified sequence
atgagccccaagaaggtgcagatcaaggtggaggagaaggaggacgagaccgaggagagcagcagcgaggaggaggaggaggtggaggacaagctgcccagaagagagagcctgagacccaagagaaagagaaccagagacgtgatcaacgaggacgaccccgagcccgagcccgaggacgaggagaccagaaaggccagagagaaggagagaagaagaagactgaagagaggcgccgaggaggaggagatcgacgaggaggagctggagagactgaaggccgagctggacgagaagagacagatcatcgccaccgtgaagtgcaagccctggaagatggagaagaagatcgaggtgctgaaggaggccaagaagttcgtgagcgagaacgagggcgccctgggcaagggcaagggcaagagatggttcgccttcaagatgatgatggccaagaagtgggccaagttcctgagagacttcgagaacttcaaggccgcctgcgtgccctgggagaacaagatcaaggccatcgagagccagttcggcagcagcgtggccagctacttcctgttcctgagatggatgtacggcgtgaacatggtgctgttcatcctgaccttcagcctgatcatgctgcccgagtacctgtggggcctgccctacggcagcctgcccagaaagaccgtgcccagagccgaggaggccagcgccgccaacttcggcgtgctgtacgacttcaacggcctggcccagtacagcgtgctgttctacggctactacgacaacaagagaaccatcggctggatgaacttcagactgcccctgagctacttcctggtgggcatcatgtgcatcggctacagcttcctggtggtgctgaaggccatgaccaagaacatcggcgacgacggcggcggcgacgacaacaccttcaacttcagctggaaggtgttcaccagctgggactacctgatcggcaaccccgagaccgccgacaacaagttcaacagcatcaccatgaacttcaaggaggccatcaccgaggagaaggccgcccaggtggaggagaacgtgcacctgatcagattcctgagattcctggccaacttcttcgtgttcctgaccctgggcggcagcggctacctgatcttctgggccgtgaagagaagccaggagttcgcccagcaggaccccgacaccctgggctggtgggagaagaacgagatgaacatggtgatgagcctgctgggcatgttctgccccaccctgttcgacctgttcgccgagctggaggactaccaccccctgatcgccctgaagtggctgctgggcagaatcttcgccctgctgctgggcaacctgtacgtgttcatcctggccctgatggacgagatcaacaacaagatcgaggaggagaagctggtgaaggccaacatcaccctgtgggaggccaacatgatcaaggcctacaacgccagcttcagcgagaacagcaccggcccccccttcttcgtgcaccccgccgacgtgcccagaggcccctgctgggagaccatggtgggccaggagttcgtgagactgaccgtgagcgacgtgctgaccacctacgtgaccatcctgatcggcgacttcctgagagcctgcttcgtgagattctgcaactactgctggtgctgggacctggagtacggctaccccagctacaccgagttcgacatcagcggcaacgtgctggccctgatcttcaaccagggcatgatctggatgggcagcttcttcgcccccagcctgcccggcatcaacatcctgagactgcacaccagcatgtacttccagtgctgggccgtgatgtgctgcaacgtgcccgaggccagagtgttcaaggccagcagaagcaacaacttctacctgggcatgctgctgctgatcctgttcctgagcaccatgcccgtgctgtacatgatcgtgagcctgccccccagcttcgactgcggccccttcagcggcaagaacagaatgttcgaggtgatcggcgagaccctggagcacgacttccccagctggatggccaagatcctgagacagctgagcaaccccggcctggtgatcgccgtgatcctggtgatggtgctggccatctactacctgaacgccaccgccaagggccagaaggccgccaacctggacctgaagaagaagatgaagatgcaggccctggagaacaagatgagaaacaagaagatggccgccgccagagccgccgccgccgccggcagacagtag

SEQ ID NO: 236915 - DNA, 2223 bp, Artificial Sequence
  derived and/or modified sequence
gtggagtggagcggcgagtgcctgagaagctgcagaagagaggtgcagatcaaggtggaggagaaggaggacgagaccgaggagagcagcagcgaggaggaggaggaggtggaggacaagctgcccagaagagagagcctgagacccaagagaaagagaaccagagacgtgatcaacgaggacgaccccgagcccgagcccgaggacgaggagaccagaaaggccagagagaaggagagaagaagaagactgaagagaggcgccgaggccaagaagttcgtgagcgagaacgagggcgccctgggcaagggcaagggcaagagatggttcgccttcaagatgatgatggccaagaagtgggccaagttcctgagagacttcgagaacttcaaggccgcctgcgtgccctgggagaacaagatcaaggccatcgagagccagttcggcagcagcgtggccagctacttcctgttcctgagatggatgtacggcgtgaacatggtgctgttcatcctgaccttcagcctgatcatgctgcccgagtacctgtggggcctgccctacggcagcctgcccagaaagaccgtgcccagagccgaggaggccagcgccgccaacttcggcgtgctgtacgacttcaacggcctggcccagtacagcgtgctgttctacggctactacgacaacaagagaaccatcggctggatgaacttcagactgcccctgagctacttcctggtgggcatcatgtgcatcggctacagcttcctggtggtgctgaaggccatgaccaagaacatcggcgacgacggcggcggcgacgacaacaccttcaacttcagctggaaggtgttcaccagctgggactacctgatcggcaaccccgagaccgccgacaacaagttcaacagcatcaccatgaacttcaaggaggccatcaccgaggagaaggccgcccaggtggaggagaacgtgcacctgatcagattcctgagattcctggccaacttcttcgtgttcctgaccctgggcggcagcggctacctgatcttctgggccgtgaagagaagccaggagttcgcccagcaggaccccgacaccctgggctggtgggagaagaacgagatgaacatggtgatgagcctgctgggcatgttctgccccaccctgttcgacctgttcgccgagctggaggactaccaccccctgatcgccctgaagtggctgctgggcagaatcttcgccctgctgctgggcaacctgtacgtgttcatcctggccctgatggacgagatcaacaacaagatcgaggaggagaagctggtgaaggccaacatcaccctgtgggaggccaacatgatcaaggcctacaacgccagcttcagcgagaacagcaccggcccccccttcttcgtgcaccccgccgacgtgcccagaggcccctgctgggagaccatggtgggccaggagttcgtgagactgaccgtgagcgacgtgctgaccacctacgtgaccatcctgatcggcgacttcctgagagcctgcttcgtgagattctgcaactactgctggtgctgggacctggagtacggctaccccagctacaccgagttcgacatcagcggcaacgtgctggccctgatcttcaaccagggcatgatctggatgggcagcttcttcgcccccagcctgcccggcatcaacatcctgagactgcacaccagcatgtacttccagtgctgggccgtgatgtgctgcaacgtgcccgaggccagagtgttcaaggccagcagaagcaacaacttctacctgggcatgctgctgctgatcctgttcctgagcaccatgcccgtgctgtacatgatcgtgagcctgccccccagcttcgactgcggccccttcagcggcaagaacagaatgttcgaggtgatcggcgagaccctggagcacgacttccccagctggatggccaagatcctgagacagctgagcaaccccggcctggtgatcgccgtgatcctggtgatggtgctggccatctactacctgaacgccaccgccaagggccagaaggccgccaacctggacctgaagaagaagatgaagatgctgcagctgctggtggccagcaacaagtaccccgagagccccgagaaggtgcacttcgccctgctgttcaagagcaacgccatctgcgagagacccgagaacaagcactgctag

SEQ ID NO: 236916 - DNA, 2184 bp, Artificial Sequence
  derived and/or modified sequence
gtggagtggagcggcgagtgcctgagaagctgcagaagagaggtgcagatcaaggtggaggagaaggaggacgagaccgaggagagcagcagcgaggaggaggaggaggtggaggacaagctgcccagaagagagagcctgagacccaagagaaagagaaccagagacgtgatcaacgaggacgaccccgagcccgagcccgaggacgaggagaccagaaaggccagagagaaggagagaagaagaagactgaagagaggcgccgaggccaagaagttcgtgagcgagaacgagggcgccctgggcaagggcaagggcaagagatggttcgccttcaagatgatgatggccaagaagtgggccaagttcctgagagacttcgagaacttcaaggccgcctgcgtgccctgggagaacaagatcaaggccatcgagagccagttcggcagcagcgtggccagctacttcctgttcctgagatggatgtacggcgtgaacatggtgctgttcatcctgaccttcagcctgatcatgctgcccgagtacctgtggggcctgccctacggcagcctgcccagaaagaccgtgcccagagccgaggaggccagcgccgccaacttcggcgtgctgtacgacttcaacggcctggcccagtacagcgtgctgttctacggctactacgacaacaagagaaccatcggctggatgaacttcagactgcccctgagctacttcctggtgggcatcatgtgcatcggctacagcttcctggtggtgctgaaggccatgaccaagaacatcggcgacgacggcggcggcgacgacaacaccttcaacttcagctggaaggtgttcaccagctgggactacctgatcggcaaccccgagaccgccgacaacaagttcaacagcatcaccatgaacttcaaggaggccatcaccgaggagaaggccgcccaggtggaggagaacgtgcacctgatcagattcctgagattcctggccaacttcttcgtgttcctgaccctgggcggcagcggctacctgatcttctgggccgtgaagagaagccaggagttcgcccagcaggaccccgacaccctgggctggtgggagaagaacgagatgaacatggtgatgagcctgctgggcatgttctgccccaccctgttcgacctgttcgccgagctggaggactaccaccccctgatcgccctgaagtggctgctgggcagaatcttcgccctgctgctgggcaacctgtacgtgttcatcctggccctgatggacgagatcaacaacaagatcgaggaggagaagctggtgaaggccaacatcaccctgtgggaggccaacatgatcaaggcctacaacgccagcttcagcgagaacagcaccggcccccccttcttcgtgcaccccgccgacgtgcccagaggcccctgctgggagaccatggtgggccaggagttcgtgagactgaccgtgagcgacgtgctgaccacctacgtgaccatcctgatcggcgacttcctgagagcctgcttcgtgagattctgcaactactgctggtgctgggacctggagtacggctaccccagctacaccgagttcgacatcagcggcaacgtgctggccctgatcttcaaccagggcatgatctggatgggcagcttcttcgcccccagcctgcccggcatcaacatcctgagactgcacaccagcatgtacttccagtgctgggccgtgatgtgctgcaacgtgcccgaggccagagtgttcaaggccagcagaagcaacaacttctacctgggcatgctgctgctgatcctgttcctgagcaccatgcccgtgctgtacatgatcgtgagcctgccccccagcttcgactgcggccccttcagcggcaagaacagaatgttcgaggtgatcggcgagaccctggagcacgacttccccagctggatggccaagatcctgagacagctgagcaaccccggcctggtgatcgccgtgatcctggtgatggtgctggccatctactacctgaacgccaccgccaagggccagaaggccgccaacctggacctgaagaagaagatgaagatgcaggccctggagaacaagatgagaaacaagaagatggccgccgccagagccgccgccgccgccggcagacagtag

SEQ ID NO: 236917 - DNA, 1665 bp, Artificial Sequence
  derived and/or modified sequence
gtggagtggagcggcgagtgcctgagaagctgcagaagagaggtgcagatcaaggtggaggagaaggaggacgagaccgaggagagcagcagcgaggaggaggaggaggtggaggacaagctgcccagaagagagagcctgagacccaagagaaagagaaccagagacgtgatcaacgaggacgaccccgagcccgagcccgaggacgaggagaccagaaaggccagagagaaggagagaagaagaagactgaagagaggcgccgaggccaagaagttcgtgagcgagaacgagggcgccctgggcaagggcaagggcaagagatggttcgccttcaagatgatgatggccaagaagtgggccaagttcctgagagacttcgagaacttcaaggccgcctgcgtgccctgggagaacaagatcaaggccatcgagagccagttcggcagcagcgtggccagctacttcctgttcctgagatggatgtacggcgtgaacatggtgctgttcatcctgaccttcagcctgatcatgctgcccgagtacctgtggggcctgccctacggcagcctgcccagaaagaccgtgcccagagccgaggaggccagcgccgccaacttcggcgtgctgtacgacttcaacggcctggcccagtacagcgtgctgttctacggctactacgacaacaagagaaccatcggctggatgaacttcagactgcccctgagctacttcctggtgggcatcatgtgcatcggctacagcttcctggtggtgctgaaggccatgaccaagaacatcggcgacgacggcggcggcgacgacaacaccttcaacttcagctggaaggtgttcaccagctgggactacctgatcggcaaccccgagaccgccgacaacaagttcaacagcatcaccatgaacttcaaggaggccatcaccgaggagaaggccgcccaggtggaggagaacgtgcacctgatcagattcctgagattcctggccaacttcttcgtgttcctgaccctgggcggcagcggctacctgatcttctgggccgtgaagagaagccaggagttcgcccagcaggaccccgacaccctgggctggtgggagaagaacgagatgaacatggtgatgagcctgctgggcatgttctgccccaccctgttcgacctgttcgccgagctggaggactaccaccccctgatcgccctgaagtggctgctgggcagaatcttcgccctgctgctgggcaacctgtacgtgttcatcctggccctgatggacgagatcaacaacaagatcgaggaggagaagctggtgaaggccaacatcaccctgtgggaggccaacatgatcaaggcctacaacgccagcttcagcgagaacagcaccggcccccccttcttcgtgcaccccgccgacgtgcccagaggcccctgctgggagaccatggtgggccaggagttcgtgagactgaccgtgagcgacgtgctgaccacctacgtgaccatcctgatcggcgacttcctgagagcctgcttcgtgagattctgcaactactgctggtgctgggacctggagtacggctaccccagctacaccgagttcgacatcagcggcaacgtgctggccctgatcttcaaccagggcatgatctag

SEQ ID NO: 236918 - DNA, 2265 bp, Artificial Sequence
  derived and/or modified sequence
cagatcaaggtggaggagaaggaggacgagaccgaggagagcagcagcgaggaggaggaggaggtggaggacaagctgcccagaagagagagcctgagacccaagagaaagagaaccagagacgtgatcaacgaggacgaccccgagcccgagcccgaggacgaggagaccagaaaggccagagagaaggagagaagaagaagactgaagagaggcgccgaggaggaggagatcgacgaggaggagctggagagactgaaggccgagctggacgagaagagacagatcatcgccaccgtgaagtgcaagccctggaagatggagaagaagatcgaggtgctgaaggaggccaagaagttcgtgagcgagaacgagggcgccctgggcaagggcaagggcaagagatggttcgccttcaagatgatgatggccaagaagtgggccaagttcctgagagacttcgagaacttcaaggccgcctgcgtgccctgggagaacaagatcaaggccatcgagagccagttcggcagcagcgtggccagctacttcctgttcctgagatggatgtacggcgtgaacatggtgctgttcatcctgaccttcagcctgatcatgctgcccgagtacctgtggggcctgccctacggcagcctgcccagaaagaccgtgcccagagccgaggaggccagcgccgccaacttcggcgtgctgtacgacttcaacggcctggcccagtacagcgtgctgttctacggctactacgacaacaagagaaccatcggctggatgaacttcagactgcccctgagctacttcctggtgggcatcatgtgcatcggctacagcttcctggtggtgctgaaggccatgaccaagaacatcggcgacgacggcggcggcgacgacaacaccttcaacttcagctggaaggtgttcaccagctgggactacctgatcggcaaccccgagaccgccgacaacaagttcaacagcatcaccatgaacttcaaggaggccatcaccgaggagaaggccgcccaggtggaggagaacgtgcacctgatcagattcctgagattcctggccaacttcttcgtgttcctgaccctgggcggcagcggctacctgatcttctgggccgtgaagagaagccaggagttcgcccagcaggaccccgacaccctgggctggtgggagaagaacgagatgaacatggtgatgagcctgctgggcatgttctgccccaccctgttcgacctgttcgccgagctggaggactaccaccccctgatcgccctgaagtggctgctgggcagaatcttcgccctgctgctgggcaacctgtacgtgttcatcctggccctgatggacgagatcaacaacaagatcgaggaggagaagctggtgaaggccaacatcaccctgtgggaggccaacatgatcaaggcctacaacgccagcttcagcgagaacagcaccggcccccccttcttcgtgcaccccgccgacgtgcccagaggcccctgctgggagaccatggtgggccaggagttcgtgagactgaccgtgagcgacgtgctgaccacctacgtgaccatcctgatcggcgacttcctgagagcctgcttcgtgagattctgcaactactgctggtgctgggacctggagtacggctaccccagctacaccgagttcgacatcagcggcaacgtgctggccctgatcttcaaccagggcatgatctggatgggcagcttcttcgcccccagcctgcccggcatcaacatcctgagactgcacaccagcatgtacttccagtgctgggccgtgatgtgctgcaacgtgcccgaggccagagtgttcaaggccagcagaagcaacaacttctacctgggcatgctgctgctgatcctgttcctgagcaccatgcccgtgctgtacatgatcgtgagcctgccccccagcttcgactgcggccccttcagcggcaagaacagaatgttcgaggtgatcggcgagaccctggagcacgacttccccagctggatggccaagatcctgagacagctgagcaaccccggcctggtgatcgccgtgatcctggtgatggtgctggccatctactacctgaacgccaccgccaagggccagaaggccgccaacctggacctgaagaagaagatgaagatgcaggccctggagaacaagatgagaaacaagaagatggccgccgccagagccgacggcgccgccggcagagcctag

SEQ ID NO: 236919 - DNA, 2283 bp, Artificial Sequence
  derived and/or modified sequence
atgtccccaaaaaaggtgcagatcaaggtggaggaaaaagaggatgagactgaagaatcaagcagcgaggaggaggaggaggtcgaagacaagctcccacggcgggaaagcctgcgtccgaaaagaaagcgaacaagagacgtgattaacgaagacgatcccgaacctgaacctgaggatgaggagacacgcaaggccagagagaaggagcgtaggcggcgacttaagagaggggctgaggaagaagaaatcgatgaagaggagctggagagacttaaagcggaactagatgagaaaagacagattatcgcgaccgttaaatgcaagccgtggaagatggagaagaaaatagaagttctcaaagaggcaaagaaattcgttagcgagaacgagggggccttaggcaaaggaaagggaaaacggtggttcgccttcaagatgatgatggccaagaaatgggctaaatttctcagggatttcgaaaattttaaagccgcttgtgttccctgggaaaacaaaataaaggctattgaaagccagttcggaagcagtgtggcctcttattttttattcctgcgatggatgtatggcgtcaacatggtgctgtttatactgactttttccctcatcatgctgccagagtatctttgggggctaccttatggttctctcccccgcaagaccgtgccgcgcgctgaggaagcaagtgccgcgaatttcggagtgctgtacgactttaatggtctggcgcagtactctgttttattttatggctactacgacaataaacgtacaattggatggatgaatttccggctgcccttgtcttactttttggtgggtatcatgtgtatcggctactcatttttggttgtgctgaaggcaatgaccaagaacatcggagatgatggtggaggcgatgacaacacctttaatttttcttggaaagtgtttactagctgggactacctgatcggaaatcccgagaccgcggacaacaaattcaatagcatcaccatgaatttcaaagaagcaataaccgaagaaaaagccgcacaggttgaagaaaatgtgcacttgatacgctttctcagatttttggccaacttctttgtcttcctgacacttggaggatccggctacttgattttctgggccgtgaaacggtcacaagagtttgctcaacaggaccctgacacattaggatggtgggaaaagaatgaaatgaacatggtgatgagcctgctcggaatgttctgccccaccctctttgatctgtttgccgaacttgaagactatcatccgctcattgctttgaaatggttactagggcgcatttttgccttgctgctcggcaacctttacgtgttcatcctggcactgatggacgaaatcaataataaaatagaggaggaaaagctggtcaaagctaatatcactttatgggaggctaacatgatcaaggcatacaacgctagtttctcggagaactcaaccggcccaccttttttcgtgcatcccgccgatgtgccccgagggccttgctgggagacaatggttgggcaggaattcgtgcgccttactgtttcagacgttctcactacatatgttacgatactgatcggtgatttccttagagcttgctttgtgcggttttgcaactactgctggtgttgggatttggagtacggatatccaagttacacagaattcgatatcagtgggaacgtgctcgccttgatcttcaaccagggaatgatctggatgggaagcttcttcgcccccagcctgcccgggataaacattttgagacttcatacaagcatgtatttccagtgctgggctgtaatgtgttgcaacgtgcctgaggctagggtcttcaaagcctcacggtctaacaatttctatcttggaatgcttctacttatcctgttcctgtccacgatgcccgtgctatatatgattgtctcactgccccctagctttgactgcggccctttcagtggaaagaatcggatgtttgaggttatcggcgaaaccttagagcacgacttccccagctggatggccaaaattctgcggcagttgtccaaccccggactggtgattgccgttattctggtgatggtcctcgctatctactatttgaatgcgaccgcgaaagggcagaaggcagcgaacctggatttaaagaaaaaaatgaaaatgcaggcactcgagaacaagatgagaaataaaaagatggcagcagccagagctgccgccgcagccggcaggcagtag

SEQ ID NO: 236920 - DNA, 2283 bp, Artificial Sequence
  derived and/or modified sequence
atgtctcccaaaaaggtgcaaattaaagtcgaggagaaggaggacgagacggaggaatcctctagtgaagaggaagaagaagtcgaagataaactgcctaggagggaatccctgaggcctaagaggaagcgaacgcgagacgtgatcaacgaggatgatcctgaacccgaacccgaggacgaggagactcgcaaggccagggaaaaagaacgaagaaggaggcttaaaaggggggcagaagaggaggaaatcgatgaggaggaactggagaggctcaaggcagagctcgatgaaaagagacagataatcgccactgtcaagtgtaagccttggaaaatggaaaagaaaatagaagtgctgaaagaagcgaagaagttcgtgtccgagaatgaaggggccctcggaaaagggaagggcaaaagatggttcgccttcaaaatgatgatggcaaagaagtgggccaagtttctccgagattttgaaaacttcaaagctgcgtgtgttccatgggaaaataagatcaaagccatcgagtcacaatttggctcaagcgtcgcttcttatttcctcttcctgaggtggatgtacggtgttaacatggtgctctttatcctgaccttcagcctgattatgctgcccgagtacctgtggggattgccgtacggatccctgccccggaaaaccgttcctagggctgaggaggcctctgcggctaattttggagttctctacgacttcaatggtctagcacaatactctgttttgttctacggatactatgataataagaggacaattggctggatgaatttcaggttgcccttgagttacttcttggtggggatcatgtgcatcggctactccttcctcgttgtgctgaaggcgatgactaaaaatatcggagacgacgggggaggggacgacaacacatttaatttcagttggaaagtctttacttcctgggactatctgattggcaacccggaaactgccgataataaatttaactccatcaccatgaattttaaggaggccataaccgaagagaaagccgctcaggtcgaagagaatgtacacctgatccggtttcttcgctttctggccaatttctttgtgtttctgacactgggggggtctggatacctcatcttttgggcagttaaacgtagtcaggagttcgcacagcaagaccccgatactctaggctggtgggagaagaacgagatgaatatggtgatgtcactgcttggtatgttctgtcctacgttatttgatcttttcgccgagctcgaggattatcacccgttaattgcactcaagtggctgctgggcagaatcttcgcgttgctgctcggcaatctgtacgtattcatactggcgctgatggacgaaattaataataaaattgaggaggagaaactggttaaagccaacattaccctctgggaggccaacatgatcaaggcgtataatgcatcattcagcgagaactctaccggcccccccttctttgtgcaccctgcagacgtccccaggggcccctgttgggagaccatggtcggtcaggaatttgtaaggctgactgttagcgatgtgctcaccacctatgtgactattctgattggcgattttcttcgagcatgttttgtccgattctgcaactattgttggtgttgggatctggaatatggttacccctcctacacagaatttgatataagtggaaacgtcttggccctgatcttcaaccagggcatgatctggatgggaagcttttttgctcctagcctgcccggtattaacatcttgaggcttcatacgtctatgtatttccagtgttgggcggttatgtgctgcaacgtgccggaggcccgcgtgttcaaggccagccgttccaacaatttctatctcggtatgcttctgctgatcctatttctctccaccatgccagtcctgtatatgatcgttagtctgccacccagctttgattgtggtcccttctcagggaagaatagaatgtttgaagtcataggagagactttagagcatgacttcccaagttggatggccaagattctacggcagcttagtaatccaggcctggttatcgctgtgatactcgttatggtgctcgccatttattacctcaatgccactgcaaagggacaaaaggctgcgaatttggatctgaagaagaagatgaagatgcaggccctggaaaataagatgcggaataaaaaaatggcagcggccagagcagctgctgcagcagggcgacaatag

SEQ ID NO: 236921 - DNA, 2223 bp, Artificial Sequence
  derived and/or modified sequence
gtagagtggtctggcgagtgtttaagaagctgtcgacgcgaggttcagatcaaagtcgaggaaaaggaagatgaaaccgaggagagctcttccgaggaggaagaggaggttgaggataagttaccacgacgagagagcctaagaccgaaaaggaagagaacgagagacgttattaacgaggacgatccggagcccgagcccgaagacgaggaaacgagaaaggcccgggagaaagagcggcggaggcgcctcaagcgaggcgcagaagccaagaaattcgtttccgagaatgagggggctctcggcaaagggaaaggtaagagatggttcgctttcaagatgatgatggcaaaaaagtgggcaaaattcctgagggactttgagaacttcaaagccgcatgtgtcccctgggaaaacaaaattaaagctatcgagagccagttcggtagttccgtagcctcttacttcctcttccttaggtggatgtatggtgtaaacatggttctcttcatcctcaccttctcactgatcatgctgccggagtacttgtggggcctgccctacgggagtctgccaaggaaaacagtcccgcgagcagaggaagcatcggcagccaacttcggagtcctgtacgattttaacggcttggcccagtactctgtgctgttctacggctattacgataataaacggacaatcggatggatgaactttagacttcctctgtcgtatttcctggtcgggatcatgtgcatcggatattcctttctggtggttttgaaggccatgactaaaaacatcggagatgatggaggcggcgacgataatacctttaatttcagctggaaagttttcacatcatgggattacctgatcggtaatcccgagacggccgataataaatttaatagcattactatgaacttcaaagaggcaatcaccgaagagaaggccgctcaggttgaggagaatgtccatctcatccggtttctacggttcctggctaacttcttcgtgtttctgaccctcggtggttctgggtatctgatcttttgggccgttaagaggtcccaagaatttgctcaacaagacccagacacactaggatggtgggaaaaaaatgaaatgaatatggtgatgtctcttctaggcatgttttgtcccaccttgtttgacctcttcgcagagctggaagactatcatcccctgatagcgctaaagtggctgctggggcggattttcgccctgctgttggggaacctgtatgtcttcatactggccctaatggatgagatcaataacaagattgaggaggagaagctcgtgaaggccaacattaccttatgggaggcgaatatgataaaagcatacaatgcctcgtttagcgaaaatagcacagggccgccttttttcgttcaccccgctgacgttcccagggggccatgctgggagacaatggtaggtcaagagttcgtccggctgacagtgagcgatgtgctgacgacgtacgtgaccatcctcattggggatttcctgagagcctgtttcgtccgtttctgcaattactgttggtgttgggatctcgaatacggttacccatcttacaccgaattcgatatctctggtaatgtgctggcactgatctttaaccaggggatgatctggatggggtcatttttcgctccttcactgcccggaattaacattctgcggctgcacacttccatgtacttccagtgttgggccgttatgtgttgcaacgttcctgaagcccgggtatttaaggctagcagatctaataatttctacttagggatgctgttacttatcttatttttatccaccatgcctgtcctttacatgattgtttcactcccgccttcgtttgattgcggacctttcagcggaaagaaccgaatgtttgaggtaataggcgaaacccttgagcacgactttccctcctggatggccaaaattctgaggcagctgagtaacccggggctcgttatagctgtgatcttagttatggtcctcgcaatatactatctcaacgcaacagccaaagggcaaaaggccgcgaaccttgatcttaagaagaaaatgaagatgctgcagctgctggtcgctagcaataaataccctgagagtccggaaaaggttcacttcgcactgctgtttaagtcaaacgcaatctgtgagcggcccgagaacaaacactgctag

SEQ ID NO: 236922 - DNA, 2283 bp, Artificial Sequence
  derived and/or modified sequence
atgagccccaaaaaggtacagatcaaggtcgaggagaaagaggatgaaacagaagaaagctcaagtgaagaggaggaggaagttgaggataagctgcccagaagagagtcattgagaccaaaacgaaagaggacacgggacgtaatcaacgaggacgaccccgaacctgaacccgaggacgaagagacaagaaaagcaagagagaaggaacggcggagaagattaaaaaggggagccgaagaagaggagattgacgaggaagagcttgagaggctcaaagcagagctcgacgagaagcggcagatcatcgctactgtcaagtgtaagccatggaagatggagaagaaaatcgaagtgctgaaggaagctaagaagtttgttagtgagaatgaaggggcactggggaagggaaaaggcaagcggtggtttgcttttaagatgatgatggcaaagaaatgggcaaagttccttcgcgatttcgaaaatttcaaggccgcgtgcgtcccatgggaaaataaaatcaaggccatcgagtcacagttcggctcctccgtagcctcctattttctattcctccggtggatgtacggggtcaacatggttcttttcatattaacgtttagtctcatcatgcttcccgaatacctgtggggcttgccctatggaagtcttcctcggaaaaccgttcctcgcgccgaagaggcttctgcagcgaacttcggcgttctgtacgactttaacggattggcacagtactctgtcttattttacggctattacgataataagaggaccattggttggatgaactttaggctgcccttgagctattttttagtcgggatcatgtgtattggttactcttttctggttgtacttaaggccatgacgaagaatataggagacgatggcggcggagacgacaacacctttaatttctcctggaaagtgttcaccagttgggattacctaatcggaaaccccgaaaccgccgacaacaagttcaattcaattacaatgaatttcaaagaggcaattactgaggaaaaagcggcgcaggtggaagagaatgtgcatctgataaggttccttaggttcttggcaaactttttcgtgtttctaaccttaggcggctccggttatctaatattctgggctgtgaaacgaagtcaggagttcgcacagcaggatcctgacaccctgggctggtgggagaagaacgagatgaatatggtcatgtcccttctcggaatgttctgtcctacactgttcgatttgtttgctgagttggaggattaccacccccttattgcactcaagtggttgctaggacgaatcttcgccttactgctgggcaatctatatgtcttcatcctggcgctgatggacgaaattaataataagatcgaagaagagaagctagtgaaagctaatattactctctgggaagctaatatgatcaaagcctacaacgcttcgtttagcgagaacagcacgggtccacccttttttgtgcatccagcagatgtcccacggggaccatgctgggaaacaatggtcggccaagagttcgtcaggctgaccgtttccgacgtactaactacatatgtcaccattctcataggcgatttcctgagggcgtgctttgtgcgcttctgtaactactgctggtgctgggacttggagtacgggtatccgagctacacggagtttgacatctccggaaacgttctagctctaatattcaaccagggaatgatctggatgggaagtttctttgcccccagtttgccaggaattaatatcctaaggcttcacacttccatgtacttccaatgctgggccgtgatgtgctgtaatgtgccagaggctagagtattcaaggctagcagatccaacaacttttacttgggaatgctgttattaatcctcttcctatccaccatgcctgtactctacatgattgtgtcccttcctccttccttcgactgtggccccttctcggggaaaaacagaatgttcgaagttattggtgagacgttggagcatgactttccaagctggatggccaagatactcagacagctcagcaacccaggactggtaattgctgtcatcttggtcatggtgttggctatctactacctgaacgctacggccaagggtcaaaaagcagccaacctggaccttaagaaaaagatgaagatgcaagccctagagaataagatgagaaacaagaaaatggctgcagcacgagccgcagcagccgccggacgacaatag

SEQ ID NO: 236923 - DNA, 2184 bp, Artificial Sequence
  derived and/or modified sequence
gtggaatggtctggggagtgcctgcgatcgtgcagaagagaagtgcagatcaaagtggaagaaaaggaggatgaaactgaggaatcctcaagcgaagaggaggaggaagttgaggataaactgcctaggagggaatcgctgagaccaaaacgcaagcgcacgcgggatgtcatcaatgaagatgatcccgaacccgagccagaagacgaagagacaaggaaagccagagagaaggagagaagacgacgtttaaaaaggggggccgaagctaaaaaatttgtatctgaaaatgagggggccctcgggaaaggcaaaggaaaaaggtggtttgccttcaagatgatgatggccaaaaagtgggcaaaattccttagagactttgagaatttcaaagccgcctgcgtgccatgggaaaataagattaaagcaatcgaatcacagttcggaagctctgtggcctcttatttcctgttcctgcggtggatgtacggagttaacatggtactctttattctgactttctcgttgatcatgctgccggagtacctgtgggggctaccatacgggtctctgccccgcaagacggttccgagggctgaggaggcgagcgcggccaacttcggagtgctgtatgacttcaatggtctcgcgcagtactcagtactgttttatggatattacgataataaaaggacaattgggtggatgaacttcaggcttcctttgtcgtacttcttggttggtatcatgtgtatcggatatagcttcctagtagtactgaaggccatgactaaaaacattggagacgatggaggtggggatgacaataccttcaatttttcttggaaggtcttcacttcctgggattaccttattgggaaccctgaaacagctgataacaagttcaacagcatcaccatgaattttaaagaggccattaccgaagagaaggccgcccaggttgaggagaacgtgcatttgattcgcttccttagatttctggcaaatttctttgtgttcttaaccctggggggatccgggtacctgatcttctgggccgtgaaaaggagtcaggagtttgcccagcaggacccggatacacttggttggtgggaaaaaaacgagatgaacatggtcatgtcactcttgggcatgttctgtcccactctgtttgacctgttcgccgagctggaggactaccacccgcttatcgccttgaagtggcttctcggcaggattttcgccctgctgctcggcaacctctatgtgttcatcctagcactgatggatgagattaataataagatagaagaggaaaagttagtgaaagctaacatcacgctttgggaggcgaacatgattaaagcatacaatgccagtttctccgagaacagcaccggcccaccgttttttgtacatcccgccgatgtgccacgaggcccgtgttgggagacaatggtgggacaggaatttgtccggctgacagtttccgacgttctgaccacgtacgtgaccatcctgattggggatttcctacgcgcctgctttgtcaggttctgtaactactgctggtgctgggacttggaatacggatacccgtcttatacagagtttgacatcagtggtaacgtgctcgcactcatttttaatcagggtatgatctggatgggttctttcttcgcacccagtttgcctggcattaatatcctgagactccatacatctatgtacttccaatgctgggcggtcatgtgctgtaatgtcccagaagcccgagtgttcaaggcgtctcgctcaaacaacttctatctcggcatgctgcttctcatcctcttcctttctacaatgcctgtcctttatatgatagtgagcctgcctccctccttcgattgcggtcctttttcagggaagaacagaatgtttgaagtaatcggcgagacacttgagcacgactttccttcttggatggccaagatccttcggcaactgtccaaccccgggttagtgatagctgtcattctggttatggtgctggccatttattaccttaacgcgacagcgaaaggccaaaaagccgctaacctggatttaaagaagaagatgaaaatgcaggccctggagaacaagatgagaaacaagaaaatggccgcggctagggccgccgcagctgcaggccggcagtag

SEQ ID NO: 236924 - DNA, 1665 bp, Artificial Sequence
  derived and/or modified sequence
gttgaatggagcggagagtgcctacgcagctgtcgacgcgaggttcagattaaagtggaagagaaggaggacgagactgaggaatcctcatccgaggaagaagaagaagtcgaggacaaactgcccaggcgggaaagcctcagaccgaaaagaaagcggactagagacgtgatcaatgaagacgaccccgaaccggagccagaggacgaggaaacacgcaaggctcgtgaaaaagagagaaggcggaggcttaagaggggcgctgaggctaaaaagttcgtgtctgagaacgagggcgccctgggcaaggggaagggcaaaaggtggttcgcttttaagatgatgatggctaaaaagtgggctaagtttctcagggacttcgagaactttaaggcagcgtgcgtgccgtgggaaaacaagattaaggctatcgagagtcaattcggttcctccgtagcctcttacttcctcttcctacggtggatgtatggtgtaaacatggtgctgttcatattgactttttctctgataatgctgccagagtacttatggggtctcccttatggctccctgccaagaaagacagtgcctcgggcagaggaggcttccgccgcgaactttggggtgctgtacgatttcaatggattagctcagtactctgtgctcttctacgggtactacgacaataagcgtacgatagggtggatgaactttcgactgccactcagttactttctggtgggtataatgtgtattggctatagtttcttggtagtgctcaaagccatgacaaaaaatatcggcgatgatggtggcggtgatgacaacacctttaacttcagctggaaggtgttcaccagctgggattacctgataggaaacccagaaacagccgacaacaagtttaactcgatcaccatgaattttaaagaggccataaccgaagagaaagctgctcaggtggaagagaacgtccacctgatccgctttttgcgcttcctagctaatttttttgtctttctaactctgggcggttcaggctatttgatcttttgggccgtgaaacgctctcaggagtttgctcagcaagaccctgacaccttgggctggtgggagaaaaacgagatgaacatggttatgagcctccttgggatgttttgtcccacactgttcgatctatttgccgaattggaagactaccacccccttatagccttgaaatggcttttggggagaatctttgcactcctgcttggaaatttatacgtatttatcctggcattgatggatgagataaataataagattgaggaagagaagctagtgaaagctaacatcacgctgtgggaggccaacatgatcaaggcctacaacgcctccttctcagaaaattctacaggaccccccttcttcgtgcacccagccgacgtccccagggggccctgttgggaaaccatggtggggcaggaattcgtgcgattaacagtgtcggacgtacttactacctatgtgaccatcctcatcggggattttcttcgcgcttgttttgtgcgtttttgcaactattgctggtgttgggacttagagtacggatacccctcttacacagaatttgatatttcagggaacgtactggccctaatcttcaaccagggaatgatctag

SEQ ID NO: 236925 - DNA, 2265 bp, Artificial Sequence
  derived and/or modified sequence
caaattaaggtggaggagaaggaagacgagactgaagaatcatcgtccgaagaggaggaggaagttgaggataaactgcccaggcgggagtctctcaggccgaaaaggaagcgcacccgcgacgtgatcaatgaagatgatcctgaacccgaacccgaggatgaggaaacaaggaaagcaagggagaaagagagacgaagacgcttgaaacgaggagcagaggaggaagagatcgacgaggaggagctcgagaggttaaaggcagaactggatgaaaagcgtcagattattgccaccgtgaaatgtaagccatggaaaatggaaaagaaaatagaggttctgaaagaagccaagaagttcgtgtctgagaatgagggggccctcggtaagggcaagggcaagcggtggtttgcgttcaaaatgatgatggccaagaagtgggccaagtttctccgagacttcgagaacttcaaagcagcctgtgtgccatgggagaacaaaattaaagccatcgagtcacaattcggctcgagcgttgcatcctacttcctgtttctgaggtggatgtacggtgttaatatggtgctatttatactcaccttttctttaataatgctgccagagtatctttggggtttaccctatggctcactgccaagaaagacggttccgcgagcagaagaggccagcgctgctaatttcggtgtcctgtacgatttcaacggccttgcgcagtactccgtcctgttctatggctattatgacaacaaacggacaatcggttggatgaacttccggctgccattgagttacttcctcgtgggcataatgtgcatcgggtactcttttctagtagtgcttaaggcaatgaccaagaatattggagacgacggtggaggtgacgataacacttttaactttagctggaaggtttttacatcatgggattacttaattgggaatcccgaaactgctgacaataagttcaatagtatcaccatgaacttcaaggaggccattacggaagaaaaggctgcgcaggtggaagagaatgtccatcttatcaggtttctccgcttcctggcaaatttttttgttttcctgaccctgggggggtcaggttaccttatcttttgggctgtcaagagatcacaggagttcgcacagcaggaccctgacactctcgggtggtgggaaaaaaatgaaatgaacatggtcatgagcctgcttggaatgttttgcccgactttattcgacttgttcgccgaacttgaagattaccaccccctgatcgccttaaagtggcttttgggccgcatcttcgcacttctgcttggtaatctctatgtgttcatcctggctcttatggatgagataaataataagattgaggaagaaaagctggtgaaggcaaacattactctttgggaagccaatatgatcaaggcttacaatgcaagtttttctgaaaacagcacgggacctcctttcttcgtgcaccctgcggacgtcccccgggggccttgctgggaaacaatggtcggacaagagtttgtgaggctgacagtgtctgacgtcttgacgacatacgtgaccatcctgatcggtgatttcctcagggcctgcttcgtgaggttttgtaattattgttggtgctgggatctcgagtatggctaccccagctacaccgaattcgacatcagcggaaacgtccttgctctgattttcaatcagggcatgatctggatgggtagctttttcgccccttccctccctggcatcaacattcttaggctgcacacttctatgtactttcagtgctgggccgtgatgtgctgcaatgtgccagaggccagagtgtttaaggcatcgaggagcaacaatttttatcttggtatgctgctgttgatcctatttttgagcactatgccagtcctgtacatgatcgtgagtctgccccctagcttcgattgcggtcccttcagcggaaagaaccgcatgttcgaggtaataggcgaaaccttagagcacgacttcccctcctggatggctaagatattgaggcagttgagtaaccctggattagtaatcgctgtcattttggttatggtgctcgccatctactaccttaatgctacagctaaggggcagaaagcagctaatctggatttgaagaaaaagatgaaaatgcaggcactcgagaacaagatgcgcaacaagaaaatggcagctgccagagctgacggggctgccggccgagcttag

SEQ ID NO: 236926 - DNA, 2283 bp, Artificial Sequence
  derived and/or modified sequence
atgagccccaagaaggtgcagatcaaggtggaggagaaggaggatgaaacagaggagagcagcagcgaggaggaggaggaggtggaggacaagctgccccggcgggagagcctgcggcccaagaggaagaggaccagagatgtgatcaatgaagatgatcctgagcctgagccagaagatgaggagaccaggaaggcccgggagaaggagaggagaagaaggctgaagagaggagctgaggaggaggagattgatgaggaggagctggagcggctgaaggccgagctggatgagaagaggcagatcatcgccaccgtgaagtgcaagccctggaagatggagaagaagattgaggtgctgaaggaggccaagaagtttgtgtctgaaaatgaaggagccctgggcaagggcaagggcaagcgctggtttgccttcaagatgatgatggccaagaagtgggccaagttcctgcgggactttgagaacttcaaggccgcctgtgtgccctgggagaacaagatcaaggccatcgagagccagtttggcagctctgtggccagctacttcctgttcctgcgctggatgtatggagtgaacatggtgctcttcatcctgaccttcagcctcatcatgctgcctgagtacctgtggggcctgccctacggcagcctgcccaggaagacagtgcccagggctgaggaggccagcgctgccaactttggagtgctgtatgacttcaacggcctggcccagtacagcgtgctcttctacggctactatgacaacaagaggaccatcggctggatgaacttccggctgcccctgagctacttcctggtgggcatcatgtgcatcggctacagcttcctggtggtgctgaaggccatgaccaagaacattggagatgatggcggcggagatgacaacaccttcaacttctcctggaaggtgttcacctcctgggactacctgattggcaaccctgagacagctgacaacaagttcaacagcatcaccatgaacttcaaggaggccatcacagaggagaaggccgcccaggtggaggagaatgtgcacctgatccgcttcctgcgcttcctggccaacttctttgtgttcctgaccctgggcggcagcggctacctgatcttctgggccgtgaagaggagccaggagtttgcccagcaggaccctgacaccctgggctggtgggagaagaatgagatgaacatggtgatgagcctgctgggcatgttctgccccaccctgtttgacctgtttgctgagctggaggactaccaccccctgattgccctgaagtggctgctgggccgcatctttgccctgctgctgggcaacctgtatgtgttcatcctggccctgatggatgagatcaacaacaagattgaggaggagaagctggtgaaggccaacatcaccctgtgggaggccaacatgatcaaggcctacaatgccagcttcagcgagaacagcactggaccacccttctttgtgcacccagcagatgtgccccggggcccctgctgggagaccatggtgggccaggagtttgtgcggctgactgtgtctgatgtgctgaccacctacgtgaccatcctgattggagacttcctgcgggcctgctttgtgcgcttctgcaactactgctggtgctgggacctggagtatggctaccccagctacacagaatttgacatctctggaaatgtgctggccctgatcttcaaccagggcatgatctggatgggcagcttctttgcccccagcctgcccggcatcaacatcctgcggctgcacacctccatgtacttccagtgctgggccgtgatgtgctgcaatgtgcctgaggcccgggtcttcaaggccagccgcagcaacaacttctacctgggcatgctgctgctgatcctcttcctgagcaccatgcctgtgctgtacatgattgtgtccctgcccccatcctttgactgtggccccttcagcggcaagaacaggatgtttgaggtgattggagagaccctggagcatgacttccccagctggatggccaagatcctgcggcagctgagcaaccctggcctggtgattgctgtgatcctggtgatggtgctggccatctactacctgaatgccacagccaagggccagaaggccgccaacctggacctgaagaagaagatgaagatgcaggccctggagaacaagatgaggaacaagaagatggccgccgcccgggctgctgctgctgctggccggcagtag

SEQ ID NO: 236927 - DNA, 2223 bp, Artificial Sequence
  derived and/or modified sequence
gtggagtggagcggggagtgcctgcggagctgccggcgggaggtgcagatcaaggtggaggagaaggaggatgaaacagaggagagcagcagcgaggaggaggaggaggtggaggacaagctgccccggcgggagagcctgcggcccaagaggaagaggaccagagatgtgatcaatgaagatgatcctgagcctgagccagaagatgaggagaccaggaaggcccgggagaaggagaggagaagaaggctgaagagaggagctgaggccaagaagtttgtgtctgaaaatgaaggagccctgggcaagggcaagggcaagcgctggtttgccttcaagatgatgatggccaagaagtgggccaagttcctgcgggactttgagaacttcaaggccgcctgtgtgccctgggagaacaagatcaaggccatcgagagccagtttggcagctctgtggccagctacttcctgttcctgcgctggatgtatggagtgaacatggtgctcttcatcctgaccttcagcctcatcatgctgcctgagtacctgtggggcctgccctacggcagcctgcccaggaagacagtgcccagggctgaggaggccagcgctgccaactttggagtgctgtatgacttcaacggcctggcccagtacagcgtgctcttctacggctactatgacaacaagaggaccatcggctggatgaacttccggctgcccctgagctacttcctggtgggcatcatgtgcatcggctacagcttcctggtggtgctgaaggccatgaccaagaacattggagatgatggcggcggagatgacaacaccttcaacttctcctggaaggtgttcacctcctgggactacctgattggcaaccctgagacagctgacaacaagttcaacagcatcaccatgaacttcaaggaggccatcacagaggagaaggccgcccaggtggaggagaatgtgcacctgatccgcttcctgcgcttcctggccaacttctttgtgttcctgaccctgggcggcagcggctacctgatcttctgggccgtgaagaggagccaggagtttgcccagcaggaccctgacaccctgggctggtgggagaagaatgagatgaacatggtgatgagcctgctgggcatgttctgccccaccctgtttgacctgtttgctgagctggaggactaccaccccctcatcgccctgaagtggctgctgggccgcatctttgccctgctgctgggcaacctgtatgtgttcatcctggccctgatggatgagatcaacaacaagattgaggaggagaagctggtgaaggccaacatcaccctgtgggaggccaacatgatcaaggcctacaatgccagcttcagcgagaacagcacaggcccccccttctttgtgcacccagcagatgtgccccggggcccctgctgggagaccatggtgggccaggagtttgtgcggctgactgtgtctgatgtgctgaccacctacgtgaccatcctgattggagacttcctgcgggcctgctttgtgcgcttctgcaactactgctggtgctgggacctggagtatggctaccccagctacacagaatttgacatctctggaaatgtgctggccctgatcttcaaccagggcatgatctggatgggcagcttctttgcccccagcctgcccggcatcaacatcctgcggctgcacacctccatgtacttccagtgctgggccgtgatgtgctgcaatgtgcctgaggcccgggtcttcaaggccagccgcagcaacaacttctacctgggcatgctgctgctgatcctcttcctgagcaccatgcctgtgctgtacatgattgtgtccctgccccccagctttgactgtggccccttcagcggcaagaacaggatgtttgaagtcatcggggagaccctggagcatgacttccccagctggatggccaagatcctgcggcagctgagcaaccctggcctggtgattgctgtgatcctggtgatggtgctggccatctactacctgaatgccacagccaagggccagaaggccgccaacctggacctgaagaagaagatgaagatgctgcagctgctggtggccagcaacaagtacccagagagccctgagaaggtgcactttgccctgctcttcaagagcaatgccatctgtgagaggcctgagaacaagcactgctag

SEQ ID NO: 236928 - DNA, 2184 bp, Artificial Sequence
  derived and/or modified sequence
gtggagtggagcggggagtgcctgcggagctgccggcgggaggtgcagatcaaggtggaggagaaggaggatgaaacagaggagagcagcagcgaggaggaggaggaggtggaggacaagctgccccggcgggagagcctgcggcccaagaggaagaggaccagagatgtgatcaatgaagatgatcctgagcctgagccagaagatgaggagaccaggaaggcccgggagaaggagaggagaagaaggctgaagagaggagctgaggccaagaagtttgtgtctgaaaatgaaggagccctgggcaagggcaagggcaagcgctggtttgccttcaagatgatgatggccaagaagtgggccaagttcctgcgggactttgagaacttcaaggccgcctgtgtgccctgggagaacaagatcaaggccatcgagagccagtttggcagctctgtggccagctacttcctgttcctgcgctggatgtatggagtgaacatggtgctcttcatcctgaccttcagcctcatcatgctgcctgagtacctgtggggcctgccctacggcagcctgcccaggaagacagtgcccagggctgaggaggccagcgctgccaactttggagtgctgtatgacttcaacggcctggcccagtacagcgtgctcttctacggctactatgacaacaagaggaccatcggctggatgaacttccggctgcccctgagctacttcctggtgggcatcatgtgcatcggctacagcttcctggtggtgctgaaggccatgaccaagaacattggagatgatggcggcggagatgacaacaccttcaacttctcctggaaggtgttcacctcctgggactacctgattggcaaccctgagacagctgacaacaagttcaacagcatcaccatgaacttcaaggaggccatcacagaggagaaggccgcccaggtggaggagaatgtgcacctgatccgcttcctgcgcttcctggccaacttctttgtgttcctgaccctgggcggcagcggctacctgatcttctgggccgtgaagaggagccaggagtttgcccagcaggaccctgacaccctgggctggtgggagaagaatgagatgaacatggtgatgagcctgctgggcatgttctgccccaccctgtttgacctgtttgctgagctggaggactaccaccccctcatcgccctgaagtggctgctgggccgcatctttgccctgctgctgggcaacctgtatgtgttcatcctggccctgatggatgagatcaacaacaagattgaggaggagaagctggtgaaggccaacatcaccctgtgggaggccaacatgatcaaggcctacaatgccagcttcagcgagaacagcacaggcccccccttctttgtgcacccagcagatgtgccccggggcccctgctgggagaccatggtgggccaggagtttgtgcggctgactgtgtctgatgtgctgaccacctacgtgaccatcctgattggagacttcctgcgggcctgctttgtgcgcttctgcaactactgctggtgctgggacctggagtatggctaccccagctacacagaatttgacatctctggaaatgtgctggccctgatcttcaaccagggcatgatctggatgggcagcttctttgcccccagcctgcccggcatcaacatcctgcggctgcacacctccatgtacttccagtgctgggccgtgatgtgctgcaatgtgcctgaggcccgggtcttcaaggccagccgcagcaacaacttctacctgggcatgctgctgctgatcctcttcctgagcaccatgcctgtgctgtacatgattgtgtccctgccccccagctttgactgtggccccttcagcggcaagaacaggatgtttgaagtcatcggggagaccctggagcatgacttccccagctggatggccaagatcctgcggcagctgagcaaccctggcctggtgattgctgtgatcctggtgatggtgctggccatctactacctgaatgccacagccaagggccagaaggccgccaacctggacctgaagaagaagatgaagatgcaggccctggagaacaagatgaggaacaagaagatggctgctgcccgggctgctgctgctgctggccggcagtag

SEQ ID NO: 236929 - DNA, 1665 bp, Artificial Sequence
  derived and/or modified sequence
gtggagtggagcggggagtgcctgcggagctgccggcgggaggtgcagatcaaggtggaggagaaggaggatgaaacagaggagagcagcagcgaggaggaggaggaggtggaggacaagctgccccggcgggagagcctgcggcccaagaggaagaggaccagagatgtgatcaatgaagatgatcctgagcctgagccagaagatgaggagaccaggaaggcccgggagaaggagaggagaagaaggctgaagagaggagctgaggccaagaagtttgtgtctgaaaatgaaggagccctgggcaagggcaagggcaagcgctggtttgccttcaagatgatgatggccaagaagtgggccaagttcctgcgggactttgagaacttcaaggccgcctgtgtgccctgggagaacaagatcaaggccatcgagagccagtttggcagctctgtggccagctacttcctgttcctgcgctggatgtatggagtgaacatggtgctcttcatcctgaccttcagcctcatcatgctgcctgagtacctgtggggcctgccctacggcagcctgcccaggaagacagtgcccagggctgaggaggccagcgctgccaactttggagtgctgtatgacttcaacggcctggcccagtacagcgtgctcttctacggctactatgacaacaagaggaccatcggctggatgaacttccggctgcccctgagctacttcctggtgggcatcatgtgcatcggctacagcttcctggtggtgctgaaggccatgaccaagaacattggagatgatggcggcggagatgacaacaccttcaacttctcctggaaggtgttcacctcctgggactacctgattggcaaccctgagacagctgacaacaagttcaacagcatcaccatgaacttcaaggaggccatcacagaggagaaggccgcccaggtggaggagaatgtgcacctgatccgcttcctgcgcttcctggccaacttctttgtgttcctgaccctgggcggcagcggctacctgatcttctgggccgtgaagaggagccaggagtttgcccagcaggaccctgacaccctgggctggtgggagaagaatgagatgaacatggtgatgagcctgctgggcatgttctgccccaccctgtttgacctgtttgctgagctggaggactaccaccccctcatcgccctgaagtggctgctgggccgcatctttgccctgctgctgggcaacctgtatgtgttcatcctggccctgatggatgagatcaacaacaagattgaggaggagaagctggtgaaggccaacatcaccctgtgggaggccaacatgatcaaggcctacaatgccagcttcagcgagaacagcacaggcccccccttctttgtgcacccagcagatgtgccccggggcccctgctgggagaccatggtgggccaggagtttgtgcggctgactgtgtctgatgtgctgaccacctacgtgaccatcctgattggagacttcctgcgggcctgctttgtgcgcttctgcaactactgctggtgctgggacctggagtatggctaccccagctacacagaatttgacatctctggaaatgtgctggccctgatcttcaaccagggcatgatctag

SEQ ID NO: 236930 - DNA, 2265 bp, Artificial Sequence
  derived and/or modified sequence
cagatcaaggtggaggagaaggaggatgaaacagaggagagcagcagcgaggaggaggaggaggtggaggacaagctgccccggcgggagagcctgcggcccaagaggaagaggaccagagatgtgatcaatgaagatgatcctgagcctgagccagaagatgaggagaccaggaaggcccgggagaaggagaggagaagaaggctgaagagaggagctgaggaggaggagattgatgaggaggagctggagcggctgaaggccgagctggatgagaagaggcagatcatcgccaccgtgaagtgcaagccctggaagatggagaagaagattgaggtgctgaaggaggccaagaagtttgtgtctgaaaatgaaggagccctgggcaagggcaagggcaagcgctggtttgccttcaagatgatgatggccaagaagtgggccaagttcctgcgggactttgagaacttcaaggccgcctgtgtgccctgggagaacaagatcaaggccatcgagagccagtttggcagctctgtggccagctacttcctgttcctgcgctggatgtatggagtgaacatggtgctcttcatcctgaccttcagcctcatcatgctgcctgagtacctgtggggcctgccctacggcagcctgcccaggaagacagtgcccagggctgaggaggccagcgctgccaactttggagtgctgtatgacttcaacggcctggcccagtacagcgtgctcttctacggctactatgacaacaagaggaccatcggctggatgaacttccggctgcccctgagctacttcctggtgggcatcatgtgcatcggctacagcttcctggtggtgctgaaggccatgaccaagaacattggagatgatggcggcggagatgacaacaccttcaacttctcctggaaggtgttcacctcctgggactacctgattggcaaccctgagacagctgacaacaagttcaacagcatcaccatgaacttcaaggaggccatcacagaggagaaggccgcccaggtggaggagaatgtgcacctgatccgcttcctgcgcttcctggccaacttctttgtgttcctgaccctgggcggcagcggctacctgatcttctgggccgtgaagaggagccaggagtttgcccagcaggaccctgacaccctgggctggtgggagaagaatgagatgaacatggtgatgagcctgctgggcatgttctgccccaccctgtttgacctgtttgctgagctggaggactaccaccccctgattgccctgaagtggctgctgggccgcatctttgccctgctgctgggcaacctgtatgtgttcatcctggccctgatggatgagatcaacaacaagattgaggaggagaagctggtgaaggccaacatcaccctgtgggaggccaacatgatcaaggcctacaatgccagcttcagcgagaacagcactggaccacccttctttgtgcacccagcagatgtgccccggggcccctgctgggagaccatggtgggccaggagtttgtgcggctgactgtgtctgatgtgctgaccacctacgtgaccatcctgattggagacttcctgcgggcctgctttgtgcgcttctgcaactactgctggtgctgggacctggagtatggctaccccagctacacagaatttgacatctctggaaatgtgctggccctgatcttcaaccagggcatgatctggatgggcagcttctttgcccccagcctgcccggcatcaacatcctgcggctgcacacctccatgtacttccagtgctgggccgtgatgtgctgcaatgtgcctgaggcccgggtcttcaaggccagccgcagcaacaacttctacctgggcatgctgctgctgatcctcttcctgagcaccatgcctgtgctgtacatgattgtgtccctgcccccatcctttgactgtggccccttcagcggcaagaacaggatgtttgaggtgattggagagaccctggagcatgacttccccagctggatggccaagatcctgcggcagctgagcaaccctggcctggtgattgctgtgatcctggtgatggtgctggccatctactacctgaatgccacagccaagggccagaaggccgccaacctggacctgaagaagaagatgaagatgcaggccctggagaacaagatgaggaacaagaagatggccgccgcccgggcagatggagctgctggccgggcctag

SEQ ID NO: 236931 - DNA, 2283 bp, Artificial Sequence
  derived and/or modified sequence
atgagccccaagaaggtgcagatcaaggtggaggagaaggaggacgaaactgaggagtctagctctgaggaggaggaggaagttgaagacaaactacccaggcgcgaatcattgaggcctaaacgcaaacgcactagagatgtgatcaacgaggacgatcccgagccagagcccgaagacgaagaaaccagaaaggctcgagagaaggagcggcggcggcggttgaagcgaggtgccgaagaggaggaaatcgatgaggaagagctggagaggctgaaggcggagctggacgagaaacgccagatcatcgccacagttaaatgtaagccatggaagatggagaaaaagattgaggtactaaaggaagccaaaaagttcgtgagcgaaaacgaaggagcactgggcaagggaaaaggtaaaaggtggttcgcctttaaaatgatgatggcaaagaaatgggccaaattcctgagagatttcgagaattttaaggcagcctgtgttccttgggaaaataagataaaggctatcgaatcccagttcggaagttccgtcgcctcatacttcctttttctacgctggatgtatggggtcaacatggtgttgttcattttgaccttctctttaatcatgttgccagagtatctgtgggggctcccttacggttccctgcctcgcaaaaccgttcctcgggctgaggaggcgagtgctgccaatttcggcgtgctttacgactttaatggactggctcaatactccgtcctcttttacggatactacgataacaagagaactatcgggtggatgaacttcagactgcctctgagctattttctggtgggaatcatgtgcatagggtattcctttctggtcgtcctgaaggccatgacaaagaacataggggatgatggcgggggggatgacaacacgtttaatttctcttggaaagtatttaccagctgggactacctgatcgggaacccggaaacggccgacaacaagttcaattctatcactatgaacttcaaggaagccatcaccgaggagaaggcggctcaggtggaagaaaacgtccacttgatacgttttctgaggttcctggctaatttctttgtcttcctcactctcggcggaagtggctatctgatcttctgggcagtcaaaagatctcaggagtttgcccagcaggaccctgataccttagggtggtgggaaaagaatgagatgaatatggtcatgagcctgttgggaatgttctgccccaccctttttgatttatttgccgagttggaggactaccaccctttgattgcgctcaaatggctgctgggaagaatttttgcacttctcttgggcaacctgtatgtctttattctcgcactgatggacgagataaacaacaagattgaagaggaaaagctggttaaggctaacataacgctgtgggaggctaacatgatcaaagcatacaatgcttccttctcagagaactcaacaggtccaccatttttcgtccacccagccgatgttccccgcggcccctgctgggagacaatggttggacaggaattcgttaggctgacagtcagcgatgtgctgactacctacgtcacaatcctgattggcgatttcctgcgggcctgcttcgttagattctgcaactactgctggtgctgggatctggagtatggctacccctcatatactgaattcgacatttccgggaatgtgctggcactcattttcaaccaggggatgatctggatgggttcattctttgcaccgagtcttcctggaattaacatcctgcgcctccatacttccatgtattttcagtgctgggctgtaatgtgttgcaacgtgccggaggcccgcgtgttcaaagcttcacgcagcaacaatttttaccttggtatgctgctcttaatattatttctatcaacgatgcccgtattgtacatgatcgtctccctgccacccagcttcgattgtgggcctttttccggcaagaatagaatgttcgaagtcattggcgagaccctggaacatgactttccaagctggatggccaagattttacggcagctgtcgaaccccgggctcgtcattgctgtcatcctggtgatggtgctggcaatatactatctcaacgccaccgctaagggacagaaggcggccaacctagatctcaaaaagaaaatgaaaatgcaggcccttgagaacaagatgcgaaataaaaagatggccgcggcacgagctgccgctgccgctggcagacagtag

SEQ ID NO: 236932 - DNA, 2283 bp, Artificial Sequence
  derived and/or modified sequence
atgagccccaagaaggtgcagatcaaggtggaggagaaggaggacgaaacggaagaaagctcaagcgaggaggaggaggaggtggaggacaagcttccccgcagagagtcacttcgcccgaagaggaagaggactcgcgatgtaatcaacgaagatgaccctgaacccgaacctgaggacgaggaaacgcgcaaggcgcgagagaaggagcggaggcggagactaaagagaggcgcagaggaagaagaaatcgatgaagaggagcttgaacgacttaaagccgagctcgatgagaaaagacagataattgcaacagtgaaatgcaagccctggaaaatggagaagaagatcgaagttttgaaggaggccaaaaagtttgtatctgagaatgagggagcactgggcaagggaaagggtaagagatggtttgcgttcaagatgatgatggccaagaagtgggctaagttcctgagggatttcgagaatttcaaagccgcctgcgttccttgggagaacaagattaaagcaattgagagccagttcggttccagcgtcgcctcttatttcctgtttttgcggtggatgtacggagtgaacatggttctttttatactcaccttttccctgatcatgctgccagagtacttgtggggactcccctatgggtcactgcctcgaaaaacagtacctcgcgccgaagaggcgagtgccgccaatttcggagttttgtacgactttaatggactcgcccagtacagcgtccttttctacgggtattatgacaataaacggaccatcggatggatgaatttccggttgccgctgtcgtatttcttagtgggcatcatgtgcataggttatagttttctcgtggtgttgaaggcaatgaccaaaaacattggagacgatgggggcggcgatgataataccttcaatttttcctggaaggtctttaccagttgggattatctcattggcaatccggaaacagccgacaacaagtttaattccatcaccatgaatttcaaggaggccattactgaagaaaaagccgcacaagtggaagagaatgtgcaccttatacgctttttgcgctttctagctaatttcttcgtcttcctgactctaggaggttctggatacctcatcttttgggctgtcaagcgctcccaggaattcgcacagcaagaccccgataccctgggatggtgggagaagaatgagatgaatatggtgatgtcactcttgggtatgttttgccctactctgttcgacctcttcgccgaattagaggattaccatccactcattgcccttaagtggctgctcggaaggatcttcgcactgctgctgggcaatttgtacgtctttatcctcgccctcatggatgagatcaataacaagatcgaggaagagaagctcgtgaaggcaaatatcaccctctgggaggccaatatgattaaggcttataatgcctccttttccgagaattcaaccggtccccccttttttgtccatcccgccgatgtaccccgagggccttgttgggaaacaatggtgggtcaggaatttgtgaggctgaccgtaagcgatgtactgactacgtatgtcaccatattaattggcgacttcttgcgcgcatgttttgtgcgtttttgcaactactgttggtgttgggatcttgagtacggctacccttcatatactgagtttgacatcagcggcaacgtactggccctaatcttcaaccaggggatgatatggatgggaagtttctttgcgccttccctgccgggaatcaacatccttaggctgcatacatccatgtacttccaatgttgggccgtcatgtgttgtaatgtccccgaggctagagtcttcaaagccagcagatctaacaacttttacttaggtatgcttcttctgatcctgttcctgtccactatgccagtgctttatatgatcgtgagtttaccaccaagcttcgattgcggccctttttctgggaagaatcggatgttcgaagtgattggcgagaccctcgagcacgactttccctcttggatggcgaagatcctaagacagctatcaaatcccggattagtcatagcagtcatactggtcatggtgctggccatctactatctgaatgccactgccaaaggccagaaagcagcaaacctcgatctcaagaagaagatgaaaatgcaggccctagaaaataagatgcgtaacaaaaaaatggccgccgcccgtgcggctgctgcggccggaaggcagtag

SEQ ID NO: 236933 - DNA, 2223 bp, Artificial Sequence
  derived and/or modified sequence
gtggagtggagcggcgagtgcctgcggagctgccggcgggaggtgcagattaaggtagaggagaaagaggacgaaaccgaagaatcttctagcgaagaggaggaggaggttgaggataaattacctcggcgggaaagtctccgccctaagcggaagaggacgagggacgtcattaacgaagatgatccagagcccgagccagaagatgaggagacgaggaaggctcgggagaaggagaggaggcgccgcttgaagcgcggagcagaagcgaaaaagttcgtgagcgagaatgagggagcgctgggcaaaggcaaaggaaaacgatggttcgcgtttaagatgatgatggcaaaaaaatgggccaaattcctaagagacttcgaaaactttaaggcagcttgtgtaccgtgggaaaacaagattaaggccatcgagagtcaatttggaagttccgtcgcttcatatttcctgtttctcaggtggatgtacggcgtaaacatggtcctatttatactgacttttagtctgataatgctgcccgagtacttatgggggttaccatacggcagcctcccccgaaaaacggtgccgagagctgaggaagccagcgccgcaaacttcggcgtcctatatgattttaatggactggcccaatactcggttctgttctacgggtactatgataataagcgaacgattggttggatgaacttccggctgcctctgagctacttcttggttgggatcatgtgtattggttactcatttcttgtcgtgttgaaggctatgaccaagaacatcggggatgacggaggcggcgatgacaacacctttaacttctcttggaaggtgttcacaagttgggactatctgatcggtaatcccgagactgccgataataagtttaattcgataactatgaactttaaagaggcgatcaccgaggagaaggccgcacaggtagaagaaaacgtgcacttaattcgttttctcaggttcctggcgaatttctttgtctttcttactttaggaggcagcggctatcttatcttctgggcagtgaagaggagccaggaattcgctcagcaggatcctgatactctgggatggtgggagaagaacgagatgaatatggttatgtcactcctagggatgttctgtcccactcttttcgatctcttcgcggaactcgaggactaccatcccctgattgccctgaagtggctgctaggacggattttcgctctcctgctcggaaacctctatgttttcattctggccctcatggatgagattaacaataagattgaggaagagaaactggtgaaggctaacatcaccctctgggaggcaaacatgattaaggcgtacaatgcttccttctcggagaactcaacagggcccccgttttttgttcatccagccgatgtccctagaggaccttgctgggagacaatggtcgggcaagaatttgtccgccttactgtgtcagacgtgcttacaacctacgtgacaatcttgataggtgacttcctgcgcgcctgttttgtacgcttctgcaactactgctggtgctgggatctggaatacggctacccgtcttacacagagttcgacattagcggcaatgtgttggccctgatcttcaaccaaggcatgatctggatgggctcgttcttcgctccaagcttgcccggcataaatattttgcggttgcacacttctatgtattttcagtgctgggctgtgatgtgctgcaacgttcccgaggccagagtattcaaagcttccagaagcaacaacttttacctcggcatgctgctcttgatcttgtttctgtctacaatgcccgtgctgtacatgatcgtgtctctgcctcctagttttgactgtgggcctttttccgggaagaaccgcatgttcgaggtcatcggggaaacactcgaacatgactttccttcttggatggccaagattttgagacagctcagcaaccctgggttggtgattgctgttatcctggtgatggtgctcgcaatttattatctcaacgctaccgccaaaggccagaaagcggcgaatctggacctcaaaaaaaaaatgaaaatgttgcagctgctggtggcgagtaataagtatcccgagtcgcccgaaaaggtccacttcgccctactgtttaaatcaaatgccatatgcgagaggcctgagaataagcactgttag

SEQ ID NO: 236934 - DNA, 2283 bp, Artificial Sequence
  derived and/or modified sequence
atgagccccaagaaggtgcagatcaaggtggaggagaaggaggacgagaccgaggagtcttctagtgaagaggaggaggaagtggaggataaactgcccagacgagagtctctgagacccaagcgcaagcgaactagagacgtcattaacgaggacgatccagagcctgaacccgaagatgaggagactcgcaaagctagagaaaaggaacgcaggcgtagattgaagagaggagcagaagaagaggagatcgatgaggaggaactcgagaggctgaaggctgaattggatgagaagcgtcagatcatcgctactgtcaaatgtaaaccctggaaaatggagaaaaagattgaagttctgaaagaagctaaaaagttcgttagtgaaaatgagggggccttgggcaaaggcaagggaaagcgctggttcgcctttaagatgatgatggctaagaagtgggccaaatttctgcgggacttcgagaatttcaaggccgcctgtgttccctgggaaaacaagattaaagcaattgagagccaatttggttcatccgtggcgtcatattttctcttcctacgatggatgtacggcgttaatatggtgctgttcattctgacattcagcttgattatgctccccgaatacctatggggattaccatacggtagtctccccaggaagactgttcctcgggcagaagaagccagcgccgcaaattttggcgtgctctatgactttaacggcttagcacaatactccgtcttgttttatgggtactacgataataagcggaccataggttggatgaacttcagactgcccttaagttatttcctggtaggtattatgtgtataggttactcctttctggttgttctcaaagctatgacaaagaatattggtgatgacggcggcggagacgacaataccttcaatttttcttggaaggtgttcacatcatgggactatctcatcggaaaccctgagacagccgacaacaaattcaacagcattaccatgaattttaaagaagctatcacagaagagaaagcagcacaggtcgaggagaatgtccacctgatccggtttctgaggttcttagccaattttttcgttttcctgaccctgggaggctctggctatttaattttctgggccgtaaagagaagtcaggaattcgcacagcaggaccctgacactttaggctggtgggagaagaacgagatgaatatggtcatgagcttgctgggtatgttctgccctacgctcttcgaccttttcgcggaactggaggactatcacccattgatcgcactgaagtggctgctggggagaatcttcgcactcttactcggcaacctctatgtgttcattctggccctaatggatgagatcaacaacaagattgaggaggagaagttggtaaaggccaatatcaccctctgggaagctaatatgatcaaagcttacaacgcctctttcagcgagaactcaaccggccctcctttctttgtgcatccagccgacgtccccagaggcccttgttgggagacaatggtaggccaggaatttgttcgtctgacagtgagcgatgtgcttaccacctatgtcactattctgataggggacttcttgcgggcctgcttcgtgcgcttctgcaattactgctggtgctgggaccttgagtacggatacccatcctatacagagtttgatatctccggaaacgtgctggccctgatcttcaaccaaggcatgatctggatgggctccttcttcgccccaagtctacctggaattaatatcctgcggctccatacaagcatgtatttccagtgttgggctgtcatgtgctgcaatgtgccagaagcccgcgtcttcaaagcaagtagatcaaataacttttacttgggcatgcttctgttgattctctttttgtccactatgcccgtcctttacatgatcgtcagcctcccccccagctttgactgtggcccattctctggaaagaatcgcatgtttgaagtgattggcgagacactcgagcacgattttccatcctggatggcaaagattctgagacagctgtccaaccccggcctcgtgattgcagttatcttggtaatggtgctggccatttactatctgaacgccaccgcgaagggtcagaaggctgccaatttagatctcaagaaaaaaatgaagatgcaggccctcgagaacaaaatgaggaacaaaaagatggctgccgcccgcgcggctgctgcggccggccggcagtag

SEQ ID NO: 236935 - DNA, 2184 bp, Artificial Sequence
  derived and/or modified sequence
gtggagtggagcggcgagtgcctgcggagctgccggcgggaggtgcagatcaaagtggaggagaaggaggatgagacagaagaatctagctctgaagaggaagaagaggtcgaggataagctgcctcgacgggagtcactccgtccaaagcgaaagaggacccgcgacgtgattaatgaggatgatcccgaacctgagcctgaagatgaggagacgaggaaggcccgagagaaagaacggagacggaggcttaaaagaggcgcagaggcaaaaaaatttgtgtccgaaaacgagggcgcactcggtaagggcaaaggcaaaaggtggttcgccttcaaaatgatgatggccaaaaagtgggccaaatttctcagagactttgagaattttaaggccgcatgtgtgccatgggagaacaagatcaaggccatcgaaagccaatttggctcaagtgtcgcctcctactttctttttctacgttggatgtatggcgttaatatggttttgtttatcctcactttctccctgatcatgcttcctgagtacctgtggggattgccctacgggagtctgcccaggaagactgtgccccgcgcagaagaggctagcgccgctaactttggggtgctgtatgactttaatggccttgcccaatatagtgtactcttctatggctattacgataacaagcggaccattggctggatgaattttcgcttacccctcagttacttcctggtgggaattatgtgcattgggtatagtttcctggtggtgctgaaagccatgacaaagaatattggagacgatggaggcggcgacgacaatacatttaacttcagctggaaagtgttcacatcctgggactatctgataggaaatccggaaacagcagataataaattcaattctattacaatgaatttcaaggaggctatcactgaggagaaagctgctcaggtcgaagaaaacgtacatctcatacgattcttacggtttctggccaatttttttgtgttcctgaccctcggtggcagtggatacctgatattttgggcagtcaagcgctcccaggagttcgcacagcaggaccctgatactttggggtggtgggaaaagaacgagatgaacatggtcatgtccctcttgggcatgttttgtccgacactttttgatttattcgccgagctcgaggattaccatccattaatcgcgctcaagtggctactgggaaggatttttgctcttctccttggcaacctgtatgtatttattctcgccctgatggacgagatcaacaataagattgaagaggagaagttggttaaggctaatataacactctgggaggccaacatgataaaggcttacaatgcctcttttagtgagaactcgactggccccccattctttgtgcatccagccgatgttccaagaggcccttgctgggaaacgatggtcggacaggagttcgtccgtttaaccgttagcgacgttctcaccacctacgtgaccatcttgattggagactttctgcgagcctgcttcgtccggttttgcaattactgctggtgttgggacctggagtatggctatccttcttacaccgaatttgatatctccgggaatgtgcttgctctgatctttaaccaaggcatgatctggatgggttcattcttcgctccatcactgccaggcatcaatatattaagactgcacactagcatgtacttccagtgttgggccgtgatgtgttgcaacgtccccgaagctagagttttcaaggcttcaagatccaataacttctatcttggtatgctcctcctcatccttttcctgtccaccatgcctgtactgtatatgatagtctctctccccccttcatttgactgtgggccctttagcggcaagaatagaatgttcgaggtgatcggagagaccttagagcacgacttcccgtcgtggatggccaaaattctaaggcagctgtccaaccctggactggtgattgccgtaattctcgtgatggtgttggcgatatattacctcaatgctacggcaaagggccaaaaggctgccaatcttgatctgaagaagaaaatgaagatgcaggcattagagaataaaatgcgtaataaaaaaatggccgctgctcgggccgcagccgcagccggccgacagtag

SEQ ID NO: 236936 - DNA, 1665 bp, Artificial Sequence
  derived and/or modified sequence
gtggagtggagcggcgagtgcctgcggagctgccggcgggaggtgcagatcaaagtggaagaaaaggaggacgagacagaagagagctcatccgaggaggaagaggaagttgaagacaaactcccgagaagggaatctctaagaccaaagcggaaaagaacaagggatgttattaacgaggatgaccccgaacccgagccggaagatgaggagactaggaaagccagagagaaagagaggcgcaggagactgaaaaggggggccgaggcaaagaaattcgtgtctgagaacgaaggggccttgggaaaggggaagggtaagcgctggttcgccttcaaaatgatgatggctaagaagtgggcaaagtttctccgggacttcgaaaatttcaaggccgcctgtgtcccctgggaaaataaaatcaaagcaatcgaatcacagttcggtagttcagttgcatcttacttcctctttctcagatggatgtacggtgtgaacatggttctgttcatcttgaccttctcgttgattatgctgccagagtatctgtggggactcccgtacgggtccctgcccagaaagaccgtcccccgtgcagaagaagcttcagccgccaactttggagtcctgtacgactttaatggcctggctcaatacagcgtgctcttctacgggtactacgacaataagcgcacaattggctggatgaacttcaggcttccgctatcttactttctcgtgggtatcatgtgtattgggtatagcttcctggtcgtgctcaaggccatgaccaaaaacataggcgacgatgggggcggcgacgacaataccttcaacttctcatggaaggtttttactagctgggattatctgatcggcaatccggagactgcggacaataagttcaactctattacaatgaacttcaaagaagccattaccgaggaaaaggctgcccaggtggaagagaacgttcatctaattcgcttccttcggtttttggcgaacttttttgttttcctaacattgggaggcagtggctacctgattttttgggccgtaaagcgaagccaggaattcgcacagcaggacccagacactctgggatggtgggaaaaaaatgaaatgaatatggtgatgagcctcctcggcatgttttgccccactttgttcgacctgtttgctgaattggaagattatcatcccctgattgccctgaaatggctcctaggcaggattttcgcattgctgctcggcaacctctacgtgtttattctcgccctgatggacgaaattaataacaaaattgaggaggaaaaactggtgaaggcaaacataactttgtgggaagctaatatgatcaaagcctataacgccagctttagtgagaacagcacggggcccccgttctttgtgcacccagccgacgtccctcgaggtccgtgttgggagacaatggtagggcaggagttcgttcggctaactgtatctgacgtgctgaccacctacgtgactatcctaatcggggactttttaagggcttgcttcgtgcgtttttgtaattactgttggtgttgggaccttgagtacggctacccctcctatacggagttcgacatcagtggcaatgtgctcgctctgattttcaaccagggaatgatttag

SEQ ID NO: 236937 - DNA, 2265 bp, Artificial Sequence
  derived and/or modified sequence
cagatcaaggtggaggagaaggaggacgagaccgaggagagcagctctgaggaggaggaggaggtcgaggacaagttgccacgcagggagtcgctcaggcccaagagaaagaggactcgggacgtaatcaacgaagatgaccccgagcccgagcccgaggacgaggaaaccaggaaagcacgcgaaaaggagcggaggcgacggctgaagcgaggtgcggaggaggaggagattgatgaggaagagctggaaaggctcaaagcggaactggacgaaaagagacagatcattgcaaccgtgaaatgcaaaccttggaagatggaaaaaaaaatcgaggtcttaaaggaggccaagaagtttgtgtcagaaaacgagggtgctctgggtaagggcaaggggaagagatggtttgccttcaagatgatgatggctaagaagtgggccaagttcctgagggatttcgagaactttaaggccgcttgtgtgccatgggagaataagataaaggccatcgaaagccagtttggcagctccgtcgcaagctacttcttgttcctaaggtggatgtacggtgttaatatggttctctttatcttaacctttagcctgatcatgctccctgaatacctctgggggctgccatatgggtccttgccacggaagacagtgccgcgggccgaggaggcttctgctgcgaatttcggcgtactttatgacttcaacggactcgcccagtactctgtgctcttttatggatattatgacaacaagcgcaccatcgggtggatgaactttagactccctctgtcatatttcctggtcggaatcatgtgcataggatactccttcttggtagtactcaaggccatgacaaaaaatattggcgatgatgggggcggagatgacaacacattcaacttttcctggaaggtattcaccagttgggattatctgataggcaatccagagaccgcagacaataagtttaattccatcacaatgaactttaaggaggctatcaccgaagagaaagccgcacaagtcgaagaaaacgtacatctgatcagattcctgcgatttctggcaaacttttttgtgttcctaacactggggggtagcgggtacctgatcttctgggcagtcaagagatcccaagagttcgcgcagcaagaccccgacacccttggttggtgggagaagaatgaaatgaacatggtgatgtccctgctgggtatgttctgtcctacacttttcgacctgtttgcagaactcgaggactatcaccctctcattgcattgaagtggctgctgggacggatcttcgcactgctgttgggtaatctgtacgtgtttatcctggccctgatggacgagataaacaacaaaatagaggaagagaagctcgtaaaagccaatattacgctctgggaggcaaacatgattaaagcttacaatgctagcttctctgagaactctacaggacccccattcttcgtccacccagctgatgttccacgggggccatgttgggaaaccatggtggggcaggaattcgtgcggctgaccgtgagcgatgtcctgacgacctacgtgacaattcttattggcgacttcctcagggcatgctttgtgcgcttttgcaactattgctggtgctgggaccttgagtatgggtacccttcttacactgaattcgacattagtggaaatgttctggccctcatcttcaaccagggtatgatctggatgggctcgtttttcgccccctcgcttcctgggatcaatattctgagacttcatacttccatgtatttccaatgttgggccgtcatgtgctgcaatgtccctgaagctcgagtttttaaggcctcgcgcagcaacaatttctatctcggtatgcttctgctgatcctgttcctgtcgactatgccagtcctgtatatgatcgtctccctgccacctagcttcgactgcggaccttttagcggcaaaaatagaatgttcgaagtcataggcgaaactctggagcatgatttcccctcatggatggcaaagatcctgcgacagttgagtaatcctggcctcgttatcgccgtgatcctggtaatggtgctcgcgatttactatctgaatgcgactgccaagggacagaaagcagccaacttagatctgaagaagaaaatgaaaatgcaagccttagaaaacaagatgaggaacaaaaagatggctgctgcccgggcagacggcgcagccggccgcgcttag

SEQ ID NO: 236938 - DNA, 2283 bp, Artificial Sequence
  derived and/or modified sequence
atgtcacccaagaaggtgcagatcaaggtcgaagaaaaagaggatgagaccgaggaatctagctcagaggaggaagaggaggtggaggataagcttcccaggcgagagtcattgaggcctaagcgaaagaggacccgagacgtgatcaacgaagacgaccctgagcccgagcccgaagatgaggagacgagaaaggctagggaaaaagaacggagaaggagactcaagcggggagcagaggaagaggagatcgacgaggaggagctcgagagactgaaagccgaattggacgaaaaacggcagatcattgctacagtaaaatgcaagccatggaagatggaaaaaaaaatagaggttctgaaagaggccaagaaatttgtgtctgagaacgagggagcccttggaaaaggaaagggcaaaagatggtttgcctttaagatgatgatggcaaagaagtgggccaagttcctgagggatttcgaaaatttcaaagcggcatgtgtaccctgggagaataagatcaaagcaattgagagtcaatttggcagtagtgtggctagttatttcctcttcctgcgttggatgtacggtgtcaacatggtgttgttcattcttaccttcagcctcatcatgctacccgaatatctgtggggcctgccatacggttccctgcccaggaagacggtcccgcgagccgaggaagcttccgccgctaacttcggcgtactgtatgattttaatgggttagctcagtacagcgtgctgttttacggttattacgacaataagaggaccattgggtggatgaatttccggttgccacttagctattttctggtgggcatcatgtgcatcggctacagctttttggtggtgctcaaggctatgacgaaaaacataggcgacgacggcggaggggatgacaacacctttaatttctcatggaaggtctttactagctgggactacctcattggtaaccccgaaactgccgataacaaattcaattccattacaatgaattttaaggaggcaattaccgaggagaaggctgcccaggtcgaagaaaacgtgcaccttatcagattcctgcggttcctggcaaattttttcgttttcctgacccttggaggatccggctacctgatcttctgggctgttaagcggagccaagagttcgcacagcaggaccctgataccctgggatggtgggagaagaacgagatgaacatggtgatgtctctcttggggatgttttgcccgaccctgtttgacttgtttgcagaacttgaagactaccatcctctgatcgctctgaaatggctgctgggtaggatatttgcccttttgttggggaatctgtatgttttcatccttgccttaatggatgagataaacaataaaattgaagaggagaaacttgtgaaagcgaatattaccctatgggaagccaatatgatcaaagcatacaacgcttcctttagcgagaactcaactggccctccctttttcgtccaccctgccgacgtgccccgaggcccatgctgggaaactatggtgggtcaggagtttgtgaggctgaccgtgagtgacgttctaactacctatgtaacaattttaattggtgatttccttagggcttgctttgtgcgattttgcaactactgttggtgctgggacctggagtatggctacccctcttacaccgaatttgatatttcaggaaatgtactggctctgatttttaatcagggcatgatatggatggggagtttttttgccccaagtctcccagggataaatattctgcggttgcataccagtatgtatttccaatgctgggccgtgatgtgttgcaatgtgcctgaagcacgagtcttcaaggctagcagaagcaataatttctacctgggtatgctcctgctcatcctcttcctgagtaccatgccggttttgtatatgatagtaagcctgccaccatcatttgattgtggcccattctctgggaaaaacagaatgtttgaggtgattggggagacactggagcatgacttcccctcatggatggctaaaattctgagacaactctccaaccctggactggttatcgccgtcattctggttatggtgctggcaatttattacttgaacgccactgccaagggccagaaggcagcgaacctcgacctgaaaaagaaaatgaagatgcaggccctggaaaacaaaatgagaaataaaaagatggccgcagcacgggctgccgctgctgccggacgtcagtag

SEQ ID NO: 236939 - DNA, 2283 bp, Artificial Sequence
  derived and/or modified sequence
atgtccccgaagaaggttcagattaaggttgaggagaaagaggatgaaactgaagaatcctcatccgaggaggaggaagaggtggaggacaaacttcccagacgggagtccctcagacccaagcggaagcggaccagggacgtcattaatgaggatgacccggagcctgaaccggaagatgaagagacccgcaaggcgagagagaaggagcgtagacgcagactaaaaaggggagccgaggaggaagaaatcgatgaggaggaactggagcggctgaaggccgaactcgatgaaaaaaggcagattattgccaccgtaaagtgtaagccctggaagatggaaaaaaagattgaagttctgaaggaggccaaaaagttcgtgtccgagaacgaaggagctctcgggaaagggaagggcaagcgatggtttgcgttcaagatgatgatggccaaaaaatgggctaaattccttcgggacttcgaaaacttcaaggccgcttgtgtgccatgggaaaacaaaattaaagccattgagagccagttcggttctagtgtggctagttatttccttttcctcaggtggatgtatggggtgaatatggtgctctttattctgacattttctctgatcatgctgccggagtacctgtggggactgccttatgggagccttccccgaaagaccgttccaagggctgaggaggctagtgccgctaactttggcgtgctgtatgatttcaacgggttggctcagtactccgttctcttttacggttattacgacaataaaaggacaatcggctggatgaacttccgtctgcctctgagttattttctggtcggaataatgtgcattgggtactcgttcctcgtggtgctcaaagcgatgactaaaaacatcggagatgacggaggaggtgatgacaataccttcaatttttcatggaaagtgttcacttcatgggactatctcataggaaaccccgagaccgctgataataagtttaatagcatcactatgaattttaaagaagccattactgaggaaaaagccgcacaagtcgaggagaatgtgcaccttattaggtttctgagattcctcgcaaacttctttgtgttcctgactctgggtggcagcggatacctcatattttgggccgtgaaacgctctcaagagtttgcacagcaggatcctgacacccttggttggtgggagaagaatgagatgaatatggtgatgtcactgctggggatgttttgccctacactgtttgatctgtttgccgagctcgaagactaccacccccttattgccctgaagtggttactagggaggatttttgccctgctcctgggaaatctgtatgtgttcatcctggcgcttatggatgagataaataataaaattgaagaagaaaaactcgtcaaggcaaacatcacattatgggaagcaaatatgatcaaagcctacaacgccagcttttctgagaattctaccggcccaccgttttttgtccaccccgctgacgtgcccagaggaccttgctgggagacaatggtcggacaggagtttgttcggctaacagtctcggatgtcctgaccacatatgtgacgattttaataggcgacttcctgagagcctgtttcgttagattctgcaactattgctggtgttgggaccttgaatacgggtatccttcctacaccgagttcgatataagtggtaatgtgttggccctgattttcaatcaaggtatgatctggatgggatctttctttgctcccagtttacctggtatcaatatcctgagactgcatacgagcatgtacttccagtgctgggccgtcatgtgttgtaacgtgcccgaggccagagtgttcaaggcctctcggtccaacaacttttatctggggatgctactactgatcctgtttttgtctacgatgcccgtcttgtacatgatcgttagcctcccacccagtttcgactgtggcccattctctggcaaaaaccgaatgttcgaagtgattggcgaaacattggagcacgacttcccgtcctggatggcaaagatcctcaggcagctgtcaaaccctgggctcgtgatagccgtgattctcgttatggttctggcaatttattacctcaatgccactgccaagggtcagaaggcagccaatctggacctgaagaaaaagatgaagatgcaagcgctagaaaacaagatgcgaaacaagaaaatggctgctgcccgtgcggctgccgctgctggacgtcaatag

SEQ ID NO: 236940 - DNA, 2223 bp, Artificial Sequence
  derived and/or modified sequence
gtagaatggagcggcgagtgcctgagatcttgtaggcgcgaagtgcagatcaaggtggaggagaaagaagacgaaacagaggaaagtagttcagaggaggaggaggaggtggaagacaagctgcctagacgggaatcgttaaggccaaaacggaaaaggactcgggacgtgattaacgaagacgatcccgagccagaacctgaagacgaggagacaagaaaggccagggagaaggaaagacgacgtcgattgaaacgcggagcagaagcgaagaagttcgtgagcgagaacgagggagctctcgggaagggcaaaggcaaacgttggtttgcttttaaaatgatgatggctaaaaaatgggccaaatttttaagggactttgagaattttaaagccgcatgcgtgccttgggagaataagattaaagcgattgagagccagttcggctcctctgtggcgagctactttttattcctgcggtggatgtacggcgttaacatggtgctgtttatcctcacttttagcctgatcatgctgccggagtatctctggggtctgccctacggttcccttcctagaaaaaccgttccgcgagcagaggaagcatccgcagccaactttggggtgctgtacgactttaacgggctggcacagtatagtgtgctattctatggctattatgacaataaacggacgatcggttggatgaacttccgtcttcccctgtcttatttcttagtcggaatcatgtgtatcggatactccttcctggtggttctgaaagcaatgactaaaaatataggcgacgacggcggtggggacgacaacacatttaatttctcatggaaggtatttacctcctgggattatctgatcggaaatccggaaaccgcagataataaatttaacagtatcactatgaattttaaggaggccatcactgaggagaaggctgcccaagtagaagagaacgtgcacttaattcgatttttgaggtttctggctaatttcttcgtgttccttacactgggcggaagcggctacctcatcttctgggccgtaaagagaagtcaggaatttgcgcagcaggatcctgataccctagggtggtgggagaaaaatgaaatgaatatggtgatgtccctgctcggaatgttttgcccaaccctgttcgacctgttcgctgagctagaagactaccaccctcttatcgcacttaagtggctcctgggaaggatcttcgcgctcttactgggtaacttatatgtgttcatcttagcgcttatggatgaaataaacaataaaatagaggaggagaagttagtcaaagctaatattacattgtgggaggctaatatgattaaggcttacaacgcctccttctccgagaacagcaccgggccacctttcttcgtgcacccagcagatgtgcccaggggcccatgctgggaaactatggtaggacaggagtttgtccgcttaaccgtgagcgatgtgcttaccacctacgtgactatcttaatcggcgactttctccgcgcttgttttgtgagattctgtaactattgctggtgttgggatctggagtatgggtacccatcctatacggagttcgacatctcagggaacgtgctcgccctgatttttaaccagggcatgatctggatggggagtttttttgcaccctcattaccaggaatcaacatcctccgactgcatacatctatgtactttcagtgttgggccgttatgtgctgcaatgtgcctgaggctcgggttttcaaggcttcccggagtaataatttttacctcgggatgctcttgctgatcttgttcctatccacaatgcctgtcctgtatatgatcgtgagcctgcctcctagtttcgattgtggcccatttagcggcaaaaacaggatgtttgaagtcattggcgagacattggagcatgatttcccctcatggatggccaaaattcttcgccagctctccaatcctggcctggtcatagcggtaattttggtgatggtcctggctatctactacctcaacgccacagccaaagggcagaaagccgcaaatctagacttaaaaaagaagatgaaaatgctgcaactgctcgttgcctccaataaatatccagagagtccagaaaaggtccattttgccctgctcttcaagagtaatgcaatttgcgagaggcccgagaacaagcactgttag

SEQ ID NO: 236941 - DNA, 2283 bp, Artificial Sequence
  derived and/or modified sequence
atgtctcctaaaaaagtgcagatcaaggtcgaagagaaggaggatgagaccgaggaaagctcttctgaagaagaagaggaggtcgaagacaagctgcccaggcgggagtccctgcgtccaaagaggaagcgcacaagggacgtaatcaacgaagatgatcctgaaccagaaccagaggatgaggagactcgaaaggccagagagaaggaacgtaggcgacggcttaaacgaggtgctgaggaggaagaaatcgacgaggaagaacttgagaggctgaaagccgagctggatgaaaagcgccagatcatcgctactgttaagtgtaagccctggaagatggagaaaaaaattgaggtgctcaaagaagcgaagaaatttgtcagcgagaacgagggcgcactgggcaagggcaaaggtaaaagatggtttgcgttcaagatgatgatggcgaagaagtgggctaagttcctgcgtgatttcgaaaattttaaggccgcatgcgtgccttgggagaacaagatcaaggccatagaatcacagtttggctctagcgttgcctcttattttctttttctgaggtggatgtatggtgtgaacatggtgctcttcatactcacattctcgctgatcatgctacccgaatatctatggggcttaccgtacgggtctctcccacgcaaaactgtgccgagagcagaggaggcatcggcagccaatttcggcgtgctttacgacttcaatggccttgcccagtatagcgtcctcttttatggctactacgacaacaagagaaccatcgggtggatgaatttcaggctgcccctgagttatttcctggtgggcatcatgtgcatagggtacagcttcctggtagtacttaaagcaatgactaaaaacattggggatgatgggggaggtgatgataataccttcaactttagctggaaggtttttacaagctgggactatcttattggtaaccccgaaacggccgacaataaattcaatagcatcacaatgaacttcaaggaggctattacggaggaaaaggctgcccaggttgaagaaaacgtgcatctgatccgtttcttgcgatttttagccaacttttttgtctttctgactttaggcggtagcgggtacctcatcttttgggccgtgaagagaagtcaagagttcgcccagcaggatcccgatactctgggctggtgggagaaaaatgagatgaacatggtcatgtctctcttggggatgttttgcccaaccttgttcgatttgtttgccgagcttgaggactaccaccccttaatcgccctgaagtggctccttggacggatctttgctctactgctcggcaacctgtacgtgtttattctggccttgatggacgaaatcaacaacaaaatcgaagaggagaaattagtgaaggctaatattacactgtgggaggcaaacatgattaaggcctataatgcaagtttctctgaaaactccacaggccctccattctttgtgcaccccgctgacgtccccagaggcccttgctgggaaactatggtcggccaggagtttgtccgcctaaccgtgtccgatgtactaacaacatatgtcacaatcctcataggggacttcctgcgggcatgcttcgttcgtttttgtaattactgttggtgctgggatttggagtatggatatccgagttacacagagtttgacatctcagggaacgtattggccctgatattcaaccaaggcatgatttggatgggctcctttttcgcaccctccctgcccggtatcaacatactgaggcttcacacatcaatgtatttccagtgctgggcagtgatgtgctgcaacgttccagaggcacgagtcttcaaagcctcccgtagtaataacttttaccttggaatgttactcctgattcttttcttgtccacgatgcctgtgctgtatatgatagtgtctctgcctccctctttcgactgcgggccattctctgggaaaaaccgtatgttcgaagtcataggtgagaccctggagcatgactttcccagctggatggcaaagattctgagacagttgtccaatcctggattggtgatcgccgtgattctggttatggtgcttgcgatatattatctgaacgctactgcgaaggggcaaaaggcagctaatcttgatctcaagaagaaaatgaaaatgcaggctctggagaataagatgcggaataagaagatggctgcagctcgagccgctgccgctgccggacgccagtag

SEQ ID NO: 236942 - DNA, 2184 bp, Artificial Sequence
  derived and/or modified sequence
gtggaatggagtggggagtgcttgcgttcctgtaggcgtgaggtgcagattaaagtagaagaaaaagaagatgaaaccgaagagtcctcgtcagaagaggaagaagaggtggaagacaagctacctcgtcgcgaaagcctgaggcctaagcgaaagaggacccgggatgtgatcaacgaggatgatcccgagccagaacctgaagacgaggaaaccaggaaggcccgagaaaaagagaggagacgcaggcttaagcgcggagccgaggcaaaaaagttcgtgtctgaaaacgaaggagctctggggaaggggaaaggtaagcgctggtttgccttcaaaatgatgatggctaaaaagtgggcaaagttcctgagagattttgagaactttaaggctgcctgcgtgccctgggaaaacaagattaaagcaattgagtcccagttcggatcgtccgtcgcctcatattttctttttctccggtggatgtatggggtaaacatggttctgtttatcctcacattctcattaatcatgctgccggaatacctctggggactcccctatggcagcctcccaagaaaaaccgtacctagagcagaggaggcctcagcggcaaactttggggtgctgtatgatttcaacggtctcgctcagtacagcgtcctcttttatggttactacgacaataagaggaccatcggttggatgaacttccgactgcccttgagctattttttggtgggcattatgtgtattggctattcatttctcgttgtcctgaaagccatgacaaaaaacatcggcgacgatggcggaggggatgataacacctttaacttttcatggaaggtctttacctcttgggattacctcattggcaaccccgaaactgccgataataagtttaattccattacaatgaacttcaaggaggcaattaccgaagagaaagccgcacaagtggaagagaacgttcacctgatacggtttctgcgatttcttgccaactttttcgtgttcttgactctgggcggtagtggctatcttatcttttgggctgtgaagaggtcacaggagtttgcacaacaggatccagacacccttggctggtgggaaaaaaatgaaatgaacatggttatgtcattgttggggatgttctgcccaactctcttcgatctttttgcagagttggaagactaccaccctctcatcgctctgaagtggctactggggagaatctttgccttgctactgggcaatctgtatgttttcatacttgctttaatggacgagattaataacaaaattgaagaagagaaactcgtaaaagctaacataaccttgtgggaagccaacatgatcaaagcctataatgcttcattcagcgaaaattcaacgggacctccattctttgtgcatccagccgacgttcccaggggcccttgctgggagaccatggtcggacaagaatttgtaaggctgaccgtaagcgatgtattgactacatatgtgacgatcctaataggagactttctgagagcctgttttgtgagattttgcaattactgctggtgttgggatctagagtacggttacccctcatacactgaattcgacatatccggaaacgtcctcgctttaatctttaatcagggtatgatctggatgggatcctttttcgccccttccctccccggaatcaacatcctcagactgcacacctcaatgtattttcagtgctgggcagtcatgtgttgcaatgttcccgaggctcgcgtgttcaaggcaagtcgtagtaacaacttctatttggggatgctgctgctgatcctgttcctgtctactatgcctgtgctttatatgatcgtgagtctcccccctagttttgattgcggtccattctctgggaagaacaggatgttcgaggtcattggggagaccctggaacatgactttcctagctggatggccaagattctgcgtcagcttagcaaccccggactggtgatcgccgtcatcctggtaatggtgctggccatctactacctgaatgctactgccaagggacagaaggcagctaatcttgacctgaagaagaagatgaagatgcaggcacttgagaataagatgaggaataaaaaaatggcagccgctagagccgcagctgccgcaggcaggcagtag

SEQ ID NO: 236943 - DNA, 1665 bp, Artificial Sequence
  derived and/or modified sequence
gtggagtggagtggcgagtgcctgaggagctgccgtagggaagtacagatcaaggtggaagagaaagaggacgagacagaggagtcaagttctgaagaggaggaggaggtagaagacaaactgccgaggcgggaatccctgaggcctaaacggaaacggacccgcgacgtcattaacgaggatgatccagaacctgaacctgaagatgaagagactaggaaggcaagagagaaagagcgtcgaagaagactcaagcgaggtgctgaggccaaaaagtttgtgtcagagaatgaaggtgccctgggcaaggggaagggtaaacgctggtttgccttcaagatgatgatggcaaagaagtgggccaagttcctccgggacttcgagaacttcaaagcagcctgtgtaccttgggagaacaaaataaaggcaattgaaagtcagtttggaagtagtgtagcttcatactttctatttctgagatggatgtacggcgtcaacatggtactgtttatcctgacctttagtctcattatgctgcccgaatacttatggggcctcccgtatgggagccttccccgtaaaactgttcccagggccgaggaggctagcgctgccaattttggtgttctctatgatttcaacggcctagcacaatatagcgtcttgttttatggatactacgataacaagagaacaatcggttggatgaattttcggctgcctctgagttatttcctggttggtatcatgtgcatcgggtatagcttcctagtagtgctcaaggcgatgaccaaaaacattggcgatgacggcggtggcgatgacaacaccttcaacttctcgtggaaggtcttcacatcctgggactacctcattggcaacccagagactgcggataataaattcaatagcatcactatgaatttcaaggaagccatcacagaagagaaagccgctcaagtcgaagagaatgttcacctgattagattcctgcgtttcctggccaatttctttgtgttcctgaccttgggaggatcaggctaccttatcttctgggctgtcaagaggtcgcaggagtttgcgcagcaggaccccgacactctcggttggtgggaaaagaatgagatgaatatggtgatgtccctcctaggaatgttttgccccaccctgtttgatctgttcgcagaactcgaggattatcaccctttgatagctctgaagtggttgttgggtagaatctttgctctgcttctggggaacctctatgtgttcatactggcgttgatggatgaaatcaataacaaaatagaggaggagaaattagtcaaagccaacattaccctgtgggaagcaaacatgattaaagcctataatgcgagcttctccgaaaatagtactggaccaccatttttcgttcatcctgctgatgttcctcgcggaccatgctgggagaccatggtgggtcaagagttcgtcaggctcactgtgtcagacgttctgacaacctatgttacgattctgattggggactttctccgcgcttgcttcgtgcggttctgcaactattgctggtgttgggacctagagtatggatacccaagttataccgagtttgacattagcgggaatgttctcgcgctgatcttcaaccagggaatgatctag

SEQ ID NO: 236944 - DNA, 2265 bp, Artificial Sequence
  derived and/or modified sequence
cagatcaaggttgaggaaaaagaggacgagaccgaggaatcatcatccgaggaagaagaagaggttgaggataagctcccgagacgggagtcacttagacctaagcggaaacgtacgagagatgttatcaatgaagacgaccctgagccagagcctgaggacgaggaaacccggaaagcccgagaaaaagagagacgtagacgcctgaaacgcggagcggaggaagaagaaatcgatgaggaagagctggagagactgaaggcagagctcgatgaaaaaagacagattattgcgaccgtgaagtgcaagccctggaaaatggagaaaaagattgaggtactgaaagaggccaagaaattcgttagtgagaatgaaggggctctggggaaaggcaaaggaaagcgctggtttgccttcaaaatgatgatggccaagaagtgggctaagtttctgcgagatttcgagaactttaaggctgcctgcgtcccctgggagaacaagattaaagcgatagaatctcaatttggctcctccgtggcttcttatttcctttttctgaggtggatgtacggggtaaacatggtgttatttatactgacattttccctaatcatgctgcctgaatatctgtggggactgccatacggaagccttcccaggaaaacagtccctcgtgccgaggaggctagtgcagcaaacttcggagttctgtacgacttcaacggcctcgctcagtatagcgtcctcttctatggatattacgataataagagaactatcggctggatgaacttccggctaccgctgtcatacttcctagtcggaattatgtgtatcggatacagtttcctggtggttctgaaagctatgacaaaaaacatcggcgatgacgggggtggggatgataatacattcaacttctcctggaaggttttcacgtcctgggactacttgatcggaaacccggaaacagccgacaacaaattcaattcaatcaccatgaattttaaagaagccatcaccgaagaaaaagctgcgcaggtcgaggaaaacgtgcaccttattaggtttctcaggttccttgcaaacttcttcgtgttcttgacgctcggcggatcaggctacctcatattttgggccgtcaaaaggtcccaggaatttgctcaacaggaccccgatactctcggatggtgggaaaagaatgagatgaatatggttatgtcattactaggcatgttttgccctactttattcgacctgttcgctgaactcgaggactaccacccgctgatcgccctgaagtggcttctgggcagaatattcgccctgctgctcggcaacctgtacgtgtttattcttgctctgatggacgagatcaacaacaagatcgaggaagaaaaacttgttaaagccaacatcaccttgtgggaagccaatatgatcaaggcttacaacgcctcattctctgaaaattcaaccggtcccccattttttgtgcaccccgcagacgtgcctcggggaccttgttgggaaacaatggtgggtcaggagttcgtgagactgaccgtcagtgatgtgctcaccacttacgtaactattctgatcggagacttcttgagagcctgtttcgtgcgtttttgcaattactgttggtgctgggacttagagtacggctaccccagctacacagaattcgacatctctggcaatgtactggcgctgatctttaaccagggaatgatatggatggggtctttcttcgcgccttctctgcctggaattaacatcctgcgcctgcacacttctatgtactttcagtgctgggctgtcatgtgctgcaacgtgcccgaagcacgagtattcaaggcatctcggagcaacaatttctatctggggatgctcctcctgattctgttcttatctactatgcctgtgctgtatatgatcgtctccctccctccctcttttgattgtggcccattctctggaaagaaccgaatgttcgaagtgattggagaaacactggaacacgactttcccagctggatggccaagatcttaaggcagctgtctaaccccggtctggtgatcgccgtgatattagtcatggtcctggcaatttattatctgaacgcaacagcgaagggacagaaggccgctaacctggatcttaagaagaagatgaaaatgcaggcacttgaaaacaaaatgcgcaacaaaaaaatggccgctgcaagagccgatggagccgctggccgtgcctag

SEQ ID NO: 236945 - DNA, 3201 bp, Artificial Sequence
  derived and/or modified sequence
cagaaactatgagggcagaacccagcaatctgtgctttctttcacaagccctccaggagttgctgaaatttaggaatcattgccccaaaaagtggccctcataatgatgccagatgggatcttactctgttgcccaggctggagtgcagtggtgcgatctcggctctctgcaacctccgcctcccaggttcaagtgattctcctgcctcggcctcctgagtagctgggatttcaggccatgaaagatcactgttttagtctgcgtggtgcagtggaacagatagacctcggtttgaatctcagctctactgtttactagacatgaaatggggaaatctaaaatgagatgccagaagcctcaaaaatggaaaaccccctgtgcttcacatctgaaaatctctgctgggggcagcaactttgagcctgtggggaaggaactgtccacgtggagtggtctggtgaatgcttaaggagctgcagaagggaagtccctctccaaactagccagccactgagaccttctgacaggacacccccaggatgtcacccaaaaaagtacaaatcaaagtggaggaaaaagaagacgagactgaggaaagctcaagtgaagaggaagaggaggtggaagataagctacctcgaagagagagcttgagaccaaagaggaaacggaccagagatgttatcaatgaggatgacccagaacctgaaccagaggatgaagaaacaaggaaggcaagagaaaaagagaggaggaggaggctaaagagaggagcagaagaagaagaaattgatgaagaggaattggaaagattgaaggcagagttagatgagaaaagacaaataattgctactgtcaaatgcaaaccatggaagatggagaagaaaattgaagttctcaaggaggcaaaaaaatttgtgagtgaaaatgaaggggctcttgggaaaggaaaaggaaaacggtggtttgcatttaagatgatgatggccaagaaatgggcaaaattcctccgtgattttgagaacttcaaagctgcgtgtgtcccatgggaaaataaaatcaaggctattgaaagtcagtttggctcctcagtggcctcatacttcctcttcttgagatggatgtatggagtcaatatggttctctttatcctgacatttagcctcatcatgttgccagagtacctctggggtttgccatatggcagtttacctaggaaaaccgttcccagagccgaagaggcatcggcagcaaactttggtgtgttgtacgacttcaatggtttggcacaatattccgttctcttttatggctattatgacaataaacgaacaattggatggatgaatttcaggttgccgctctcctattttctagtggggattatgtgcattggatacagctttctggttgtcctcaaagcaatgaccaaaaacattggtgatgatggaggtggagatgacaacactttcaatttcagctggaaggtctttaccagctgggactacctgatcggcaatcctgaaacagcagacaacaaatttaattctatcacaatgaactttaaggaagctatcacagaagaaaaagcagcccaagtagaagaaaacgtccacttgatcagattcctgaggtttctggctaacttcttcgtgtttctaacacttggagggagtggatacctcatcttttgggctgtgaagcgatcccaggaatttgcacagcaagatcctgacacccttgggtggtgggaaaaaaatgaaatgaacatggttatgtccctcctagggatgttctgtccaacattgtttgacttatttgctgaattagaagactaccatcctctcatcgctttgaaatggctactgggacgcatttttgctcttcttttaggcaatttatacgtatttattcttgcattaatggatgagattaacaacaagattgaagaggagaagctagtaaaggccaatattaccctttgggaagccaatatgatcaaggcctacaatgcatcattctctgaaaatagcactggaccacccttttttgttcaccctgcagatgtacctcgaggaccttgctgggaaacaatggtgggacaggagtttgtgaggctgacagtctctgatgttctgaccacctacgtcacaatcctcattggggactttctaagggcatgttttgtgaggttttgcaattattgctggtgctgggacttggagtatggatatccttcatacaccgaattcgacatcagtggcaacgtcctcgctctgatcttcaaccaaggcatgatctggatgggctccttctttgctcccagcctcccaggcatcaatatccttcgactccatacatccatgtacttccagtgctgggccgttatgtgctgcaatgttcctgaggccagggtcttcaaagcttccagatcaaataacttctacctgggcatgctactgctcatcctcttcctgtccacaatgcctgtcttgtacatgatcgtgtccctcccaccatcttttgattgtggtccattcagtggcaaaaatagaatgtttgaagtcattggagagaccctggagcacgatttcccaagctggatggcgaagatcttgagacagctttcaaaccctgggctggtcattgctgtcattttggtgatggttttggccatctattatctcaatgctactgccaagggccagaaggcagcgaatctggatctcaaaaagaagatgaaaatgcaagctttggagaacaaaatgcgaaacaagaaaatggcagctgcacgagcagctgcagctgctggtcgccagtaataagtatcctgagagcccagaaaaggtacactttgccttgctgtttaaaagtaatgcaatatgtgaacgcccagagaacaagcactgtggaactgctattttcctgttctacccttgatggattttcaaggtcatgctggccaattaaggcatcatcagtcctacctgagcaacaagaatctaaactttattccaagtcagaaactgtttctgcagagccactctctcccctgctccatttcgtgactttttttttttttttaacaaattgagtttagaagtgagtgtaatccagcaatacagtttactggtttagttggtgggttaattaaaaaaaatttgctcatatgaactttcattttatatgtttcttttgcc

SEQ ID NO: 236946 - DNA, 3090 bp, Artificial Sequence
  derived and/or modified sequence
agacagagtcttgctctgttgcccaggccagaatgcagtggcgtgatctcggttcactgtaaccaccgcctcccaggttcaagtgattcttgtgtctcagcctcctgagtagctgggattacaggccatgaaagatcactgttttagtctgcgtggtgcagtggaacagatagacctcggtttgaatctcagctctactgtttactagacatgaaatggggaaatctaaaatgagatgccagaagcctcaaaaatggaaaaccccctgtgcttcacatctgaaaatctctgctgggggcagcaactttgagcctgtggggaaggaactgtccacgtggagtggtctggtgaatgcttaaggagctgcagaagggaagtccctctccaaactagccagccactgagaccttctgacaggacacccccaggatgtcacccaaaaaagtacaaatcaaagtggaggaaaaagaagacgagactgaggaaagctcaagtgaagaggaagaggaggtggaagataagctacctcgaagagagagcttgagaccaaagaggaaacggaccagagatgttatcaatgaggatgacccagaacctgaaccagaggatgaagaaacaaggaaggcaagagaaaaagagaggaggaggaggctaaagagaggagcagaagaagaagaaattgatgaagaggaattggaaagattgaaggcagagttagatgagaaaagacaaataattgctactgtcaaatgcaaaccatggaagatggagaagaaaattgaagttctcaaggaggcaaaaaaatttgtgagtgaaaatgaaggggctcttgggaaaggaaaaggaaaacggtggtttgcatttaagatgatgatggccaagaaatgggcaaaattcctccgtgattttgagaacttcaaagctgcgtgtgtcccatgggaaaataaaatcaaggctattgaaagtcagtttggctcctcagtggcctcatacttcctcttcttgagatggatgtatggagtcaatatggttctctttatcctgacatttagcctcatcatgttgccagagtacctctggggtttgccatatggcagtttacctaggaaaaccgttcccagagccgaagaggcatcggcagcaaactttggtgtgttgtacgacttcaatggtttggcacaatattccgttctcttttatggctattatgacaataaacgaacaattggatggatgaatttcaggttgccgctctcctattttctagtggggattatgtgcattggatacagctttctggttgtcctcaaagcaatgaccaaaaacattggtgatgatggaggtggagatgacaacactttcaatttcagctggaaggtctttaccagctgggactacctgatcggcaatcctgaaacagcagacaacaaatttaattctatcacaatgaactttaaggaagctatcacagaagaaaaagcagcccaagtagaagaaaacgtccacttgatcagattcctgaggtttctggctaacttcttcgtgtttctaacacttggagggagtggatacctcatcttttgggctgtgaagcgatcccaggaatttgcacagcaagatcctgacacccttgggtggtgggaaaaaaatgaaatgaacatggttatgtccctcctagggatgttctgtccaacattgtttgacttatttgctgaattagaagactaccatcctctcatcgctttgaaatggctactgggacgcatttttgctcttcttttaggcaatttatacgtatttattcttgcattaatggatgagattaacaacaagattgaagaggagaagctagtaaaggccaatattaccctttgggaagccaatatgatcaaggcctacaatgcatcattctctgaaaatagcactggaccacccttttttgttcaccctgcagatgtacctcgaggaccttgctgggaaacaatggtgggacaggagtttgtgaggctgacagtctctgatgttctgaccacctacgtcacaatcctcattggggactttctaagggcatgttttgtgaggttttgcaattattgctggtgctgggacttggagtatggatatccttcatacaccgaattcgacatcagtggcaacgtcctcgctctgatcttcaaccaaggcatgatctggatgggctccttctttgctcccagcctcccaggcatcaatatccttcgactccatacatccatgtacttccagtgctgggccgttatgtgctgcaatgttcctgaggccagggtcttcaaagcttccagatcaaataacttctacctgggcatgctactgctcatcctcttcctgtccacaatgcctgtcttgtacatgatcgtgtccctcccaccatcttttgattgtggtccattcagtggcaaaaatagaatgtttgaagtcattggagagaccctggagcacgatttcccaagctggatggcgaagatcttgagacagctttcaaaccctgggctggtcattgctgtcattttggtgatggttttggccatctattatctcaatgctactgccaagggccagaaggcagcgaatctggatctcaaaaagaagatgaaaatgcaagctttggagaacaaaatgcgaaacaagaaaatggcagctgcacgagcagctgcagctgctggtcgccagtaataagtatcctgagagcccagaaaaggtacactttgccttgctgtttaaaagtaatgcaatatgtgaacgcccagagaacaagcactgtggaactgctattttcctgttctacccttgatggattttcaaggtcatgctggccaattaaggcatcatcagtcctacctgagcaacaagaatctaaactttattccaagtcagaaactgtttctgcagagccactctctcccctgctccatttcgtgactttttttttttttttaacaaattgagtttagaagtgagtgtaatccagcaatacagtttactggtttagttggtgggttaattaaaaaaaatttgctcatatgaactttcattttatatgtttcttttgcc

SEQ ID NO: 236947 - DNA, 2221 bp, Artificial Sequence
  derived and/or modified sequence
cgtggagtggtctggtgaatgcttaaggagctgcagaagggaagtacaaatcaaagtggaggaaaaagaagacgagactgaggaaagctcaagtgaagaggaagaggaggtggaagataagctacctcgaagagagagcttgagaccaaagaggaaacggaccagagatgttatcaatgaggatgacccagaacctgaaccagaggatgaagaaacaaggaaggcaagagaaaaagagaggaggaggaggctaaagagaggagcggaggcaaaaaaatttgtgagtgaaaatgaaggggctcttgggaaaggaaaaggaaaacggtggtttgcatttaagatgatgatggccaagaaatgggcaaaattcctccgtgattttgagaacttcaaagctgcgtgtgtcccatgggaaaataaaatcaaggctattgaaagtcagtttggctcctcagtggcctcatacttcctcttcttgagatggatgtatggagtcaatatggttctctttatcctgacatttagcctcatcatgttgccagagtacctctggggtttgccatatggcagtttacctaggaaaaccgttcccagagccgaagaggcatcggcagcaaactttggtgtgttgtacgacttcaatggtttggcacaatattccgttctcttttatggctattatgacaataaacgaacaattggatggatgaatttcaggttgccgctctcctattttctagtggggattatgtgcattggatacagctttctggttgtcctcaaagcaatgaccaaaaacattggtgatgatggaggtggagatgacaacactttcaatttcagctggaaggtctttaccagctgggactacctgatcggcaatcctgaaacagcagacaacaaatttaattctatcacaatgaactttaaggaagctatcacagaagaaaaagcagcccaagtagaagaaaacgtccacttgatcagattcctgaggtttctggctaacttcttcgtgtttctaacacttggagggagtggatacctcatcttttgggctgtgaagcgatcccaggaatttgcacagcaagatcctgacacccttgggtggtgggaaaaaaatgaaatgaacatggttatgtccctcctagggatgttctgtccaacattgtttgacttatttgctgaattagaagactaccatcctctcatcgctttgaaatggctactgggacgcatttttgctcttcttttaggcaatttatacgtatttattcttgcattaatggatgagattaacaacaagattgaagaggagaagctagtaaaggccaatattaccctttgggaagccaatatgatcaaggcctacaatgcatcattctctgaaaatagcactggaccacccttttttgttcaccctgcagatgtacctcgaggaccttgctgggaaacaatggtgggacaggagtttgtgaggctgacagtctctgatgttctgaccacctacgtcacaatcctcattggggactttctaagggcatgttttgtgaggttttgcaattattgctggtgctgggacttggagtatggatatccttcatacaccgaattcgacatcagtggcaacgtcctcgctctgatcttcaaccaaggcatgatctggatgggctccttctttgctcccagcctcccaggcatcaatatccttcgactccatacatccatgtacttccagtgctgggccgttatgtgctgcaatgttcctgaggccagggtcttcaaagcttccagatcaaataacttctacctgggcatgctactgctcatcctcttcctgtccacaatgcctgtcttgtacatgatcgtgtccctcccaccatcttttgattgtggtccattcagtggcaaaaatagaatgtttgaagtcattggagagaccctggagcacgatttcccaagctggatggcgaagatcttgagacagctttcaaaccctgggctggtcattgctgtcattttggtgatggttttggccatctattatctcaatgctactgccaagggccagaaggcagcgaatctggatctcaaaaagaagatgaaaatgctgcagctgctggtcgccagtaataagtatcctgagagcccagaaaaggtacactttgccttgctgtttaaaagtaatgcaatatgtgaacgcccagagaacaagcactgt

SEQ ID NO: 236948 - DNA, 2371 bp, Artificial Sequence
  derived and/or modified sequence
atgtcacccaaaaaagtacaaatcaaagtggaggaaaaagaagacgagactgaggaaagctcaagtgaagaggaagaggaggtggaagataagctacctcgaagagagagcttgagaccaaagaggaaacggaccagagatgttatcaatgaggatgacccagaacctgaaccagaggatgaagaaacaaggaaggcaagagaaaaagagaggaggaggaggctaaagagaggagcagaagaagaagaaattgatgaagaggaattggaaagattgaaggcagagttagatgagaaaagacaaataattgctactgtcaaatgcaaaccatggaagatggagaagaaaattgaagttctcaaggaggcaaaaaaatttgtgagtgaaaatgaaggggctcttgggaaaggaaaaggaaaacggtggtttgcatttaagatgatgatggccaagaaatgggcaaaattcctccgtgattttgagaacttcaaagctgcgtgtgtcccatgggaaaataaaatcaaggctattgaaagtcagtttggctcctcagtggcctcatacttcctcttcttgagatggatgtatggagtcaatatggttctctttatcctgacatttagcctcatcatgttgccagagtacctctggggtttgccatatggcagtttacctaggaaaaccgttcccagagccgaagaggcatcggcagcaaactttggtgtgttgtacgacttcaatggtttggcacaatattccgttctcttttatggctattatgacaataaacgaacaattggatggatgaatttcaggttgccgctctcctattttctagtggggattatgtgcattggatacagctttctggttgtcctcaaagcaatgaccaaaaacattggtgatgatggaggtggagatgacaacactttcaatttcagctggaaggtctttaccagctgggactacctgatcggcaatcctgaaacagcagacaacaaatttaattctatcacaatgaactttaaggaagctatcacagaagaaaaagcagcccaagtagaagaaaacgtccacttgatcagattcctgaggtttctggctaacttcttcgtgtttctaacacttggagggagtggatacctcatcttttgggctgtgaagcgatcccaggaatttgcacagcaagatcctgacacccttgggtggtgggaaaaaaatgaaatgaacatggttatgtccctcctagggatgttctgtccaacattgtttgacttatttgctgaattagaagactaccatcctctcatcgctttgaaatggctactgggacgcatttttgctcttcttttaggcaatttatacgtatttattcttgcattaatggatgagattaacaacaagattgaagaggagaagctagtaaaggccaatattaccctttgggaagccaatatgatcaaggcctacaatgcatcattctctgaaaatagcactggaccacccttttttgttcaccctgcagatgtacctcgaggaccttgctgggaaacaatggtgggacaggagtttgtgaggctgacagtctctgatgttctgaccacctacgtcacaatcctcattggggactttctaagggcatgttttgtgaggttttgcaattattgctggtgctgggacttggagtatggatatccttcatacaccgaattcgacatcagtggcaacgtcctcgctctgatcttcaaccaaggcatgatctggatgggctccttctttgctcccagcctcccaggcatcaatatccttcgactccatacatccatgtacttccagtgctgggccgttatgtgctgcaatgttcctgaggccagggtcttcaaagcttccagatcaaataacttctacctgggcatgctactgctcatcctcttcctgtccacaatgcctgtcttgtacatgatcgtgtccctcccaccatcttttgattgtggtccattcagtggcaaaaatagaatgtttgaagtcattggagagaccctggagcacgatttcccaagctggatggcgaagatcttgagacagctttcaaaccctgggctggtcattgctgtcattttggtgatggttttggccatctattatctcaatgctactgccaagggccagaaggcagcgaatctggatctcaaaaagaagatgaaaatgcaagctttggagaacaaaatgcgaaacaagaaaatggcagctgcacgagcagctgcagctgctggtcgccagtaataagtatcctgagagcccagaaaaggtacactttgccttgctgtttaaaagtaatgcaatatgtgaacgcccagagaacaagcactgt

SEQ ID NO: 236949 - DNA, 2273 bp, Artificial Sequence
  derived and/or modified sequence
cgtggagtggtctggtgaatgcttaaggagctgcagaagggaagtacaaatcaaagtggaggaaaaagaagacgagactgaggaaagctcaagtgaagaggaagaggaggtggaagataagctacctcgaagagagagcttgagaccaaagaggaaacggaccagagatgttatcaatgaggatgacccagaacctgaaccagaggatgaagaaacaaggaaggcaagagaaaaagagaggaggaggaggctaaagagaggagcggaggcaaaaaaatttgtgagtgaaaatgaaggggctcttgggaaaggaaaaggaaaacggtggtttgcatttaagatgatgatggccaagaaatgggcaaaattcctccgtgattttgagaacttcaaagctgcgtgtgtcccatgggaaaataaaatcaaggctattgaaagtcagtttggctcctcagtggcctcatacttcctcttcttgagatggatgtatggagtcaatatggttctctttatcctgacatttagcctcatcatgttgccagagtacctctggggtttgccatatggcagtttacctaggaaaaccgttcccagagccgaagaggcatcggcagcaaactttggtgtgttgtacgacttcaatggtttggcacaatattccgttctcttttatggctattatgacaataaacgaacaattggatggatgaatttcaggttgccgctctcctattttctagtggggattatgtgcattggatacagctttctggttgtcctcaaagcaatgaccaaaaacattggtgatgatggaggtggagatgacaacactttcaatttcagctggaaggtctttaccagctgggactacctgatcggcaatcctgaaacagcagacaacaaatttaattctatcacaatgaactttaaggaagctatcacagaagaaaaagcagcccaagtagaagaaaacgtccacttgatcagattcctgaggtttctggctaacttcttcgtgtttctaacacttggagggagtggatacctcatcttttgggctgtgaagcgatcccaggaatttgcacagcaagatcctgacacccttgggtggtgggaaaaaaatgaaatgaacatggttatgtccctcctagggatgttctgtccaacattgtttgacttatttgctgaattagaagactaccatcctctcatcgctttgaaatggctactgggacgcatttttgctcttcttttaggcaatttatacgtatttattcttgcattaatggatgagattaacaacaagattgaagaggagaagctagtaaaggccaatattaccctttgggaagccaatatgatcaaggcctacaatgcatcattctctgaaaatagcactggaccacccttttttgttcaccctgcagatgtacctcgaggaccttgctgggaaacaatggtgggacaggagtttgtgaggctgacagtctctgatgttctgaccacctacgtcacaatcctcattggggactttctaagggcatgttttgtgaggttttgcaattattgctggtgctgggacttggagtatggatatccttcatacaccgaattcgacatcagtggcaacgtcctcgctctgatcttcaaccaaggcatgatctggatgggctccttctttgctcccagcctcccaggcatcaatatccttcgactccatacatccatgtacttccagtgctgggccgttatgtgctgcaatgttcctgaggccagggtcttcaaagcttccagatcaaataacttctacctgggcatgctactgctcatcctcttcctgtccacaatgcctgtcttgtacatgatcgtgtccctcccaccatcttttgattgtggtccattcagtggcaaaaatagaatgtttgaagtcattggagagaccctggagcacgatttcccaagctggatggcgaagatcttgagacagctttcaaaccctgggctggtcattgctgtcattttggtgatggttttggccatctattatctcaatgctactgccaagggccagaaggcagcgaatctggatctcaaaaagaagatgaaaatgcaagctttggagaacaaaatgcgaaacaagaaaatggcagctgcacgagcagctgcagctgctggtcgccagtaataagtatcctgagagcccagaaaaggtacactttgccttgctgtttaaaagtaatgcaatatgtgaacgcccagagaacaagcactgt

SEQ ID NO: 236950 - DNA, 2477 bp, Artificial Sequence
  derived and/or modified sequence
cgtggagtggtctggtgaatgcttaaggagctgcagaagggaagtacaaatcaaagtggaggaaaaagaagacgagactgaggaaagctcaagtgaagaggaagaggaggtggaagataagctacctcgaagagagagcttgagaccaaagaggaaacggaccagagatgttatcaatgaggatgacccagaacctgaaccagaggatgaagaaacaaggaaggcaagagaaaaagagaggaggaggaggctaaagagaggagcggaggcaaaaaaatttgtgagtgaaaatgaaggggctcttgggaaaggaaaaggaaaacggtggtttgcatttaagatgatgatggccaagaaatgggcaaaattcctccgtgattttgagaacttcaaagctgcgtgtgtcccatgggaaaataaaatcaaggctattgaaagtcagtttggctcctcagtggcctcatacttcctcttcttgagatggatgtatggagtcaatatggttctctttatcctgacatttagcctcatcatgttgccagagtacctctggggtttgccatatggcagtttacctaggaaaaccgttcccagagccgaagaggcatcggcagcaaactttggtgtgttgtacgacttcaatggtttggcacaatattccgttctcttttatggctattatgacaataaacgaacaattggatggatgaatttcaggttgccgctctcctattttctagtggggattatgtgcattggatacagctttctggttgtcctcaaagcaatgaccaaaaacattggtgatgatggaggtggagatgacaacactttcaatttcagctggaaggtctttaccagctgggactacctgatcggcaatcctgaaacagcagacaacaaatttaattctatcacaatgaactttaaggaagctatcacagaagaaaaagcagcccaagtagaagaaaacgtccacttgatcagattcctgaggtttctggctaacttcttcgtgtttctaacacttggagggagtggatacctcatcttttgggctgtgaagcgatcccaggaatttgcacagcaagatcctgacacccttgggtggtgggaaaaaaatgaaatgaacatggttatgtccctcctagggatgttctgtccaacattgtttgacttatttgctgaattagaagactaccatcctctcatcgctttgaaatggctactgggacgcatttttgctcttcttttaggcaatttatacgtatttattcttgcattaatggatgagattaacaacaagattgaagaggagaagctagtaaaggccaatattaccctttgggaagccaatatgatcaaggcctacaatgcatcattctctgaaaatagcactggaccacccttttttgttcaccctgcagatgtacctcgaggaccttgctgggaaacaatggtgggacaggagtttgtgaggctgacagtctctgatgttctgaccacctacgtcacaatcctcattggggactttctaagggcatgttttgtgaggttttgcaattattgctggtgctgggacttggagtatggatatccttcatacaccgaattcgacatcagtggcaacgtcctcgctctgatcttcaaccaaggcatgatctgatctgtcctgaattattaaacctttgggtgctgacagacaccggacccctctgcaaatgctaaaaccgtcttgcttctgtcacacaaagacaactctccagggctccatcgtcctgccatgggatgactgttaaattcctgtgcctgactaggtgaatcaatatggaaaagatattataaaaatattgtttcctcctttgtcaggatgggctccttctttgctcccagcctcccaggcatcaatatccttcgactccatacatccatgtacttccagtgctgggccgttatgtgctgcaatgttcctgaggccagggtcttcaaagcttccagatcaaataacttctacctgggcatgctactgctcatcctcttcctgtccacaatgcctgtcttgtacatgatcgtgtccctcccaccatcttttgattgtggtccattcagtggcaaaaatagaatgtttgaagtcattggagagaccctggagcacgatttcccaagctggatggcgaagatcttgagacagctttcaaaccctgggctggtcattgctgtcattttggtgatggttttggccatctattatctcaatgctactgccaagggccagaaggcagcgaatctggatctcaaaaagaagatgaaaatgcaagctttggagaacaaaatgcgaaacaagaaaatggcagctgcacgagcagctgcagctgctggtcgccagtaataagtatcctgagagcccagaaaaggtacactttgccttgctgtttaaaagtaatgcaatatgtgaacgcccagagaacaagcactgt

SEQ ID NO: 236951 - protein, 323 aa, Artificial Sequence
  derived and/or modified sequence
MSAAVACLDYFAAECLVSMSAGAVVHRRPPDPEGAGGAAGSEVGAAHPESALPGPGPSGPASVPQLPQVPAPSPGAGGAAPHLLAASVWADLRGSSGEGSWENSGEAPRASSGFSDPIPCSVQTPCSELAPASGAAAVCAPESSSDAPAVPSAPAAPGAPAASGGFSGGALGAGPAPAADQAPRRRSVTPAAKRHQCPFPGCTKAYYKSSHLKSHQRTHTGERPFSCDWLDCDKKFTRSDELARHYRTHTGEKRFSCPLCPKQFSRSDHLTKHARRHPTYHPDMIEYRGRRRTPRIDPPLTSEVESSASGSGPGPAPSFTTCL

SEQ ID NO: 236952 - DNA, 1509 bp, Artificial Sequence
  derived and/or modified sequence
cgctcgccggcggccgggcggtcccagcatgtcggccgccgtggcgtgcctggactacttcgccgccgagtgcctggtgtccatgtccgcgggcgccgtggttcaccgccgcccgccggaccccgagggcgcgggtggagccgcaggctcggaggtgggtgcggcgcatccggagtccgctctgccgggtccggggccatcggggcccgcgtcggtcccccagctcccgcaggtccccgcccccagccccggcgcgggcggcgccgcgccccacctgctggctgcaagcgtctgggcggacttgcgcggcagctctggcgagggctcctgggagaactcgggggaagctccacgcgcctcgtccggcttctccgacccgatcccgtgctccgtccagaccccgtgctccgagctggctcccgcctccggcgccgcggcggtctgcgctcccgagagctcctccgatgcgcccgccgtcccaagcgcgcctgctgccccgggcgcaccagcagcctctggtgggttctctggaggggccctaggggcaggccccgcccccgccgcggatcaggcgccccggaggaggtctgtcacacctgctgccaagcgccaccaatgccccttcccgggctgcaccaaagcctattacaagtcgtcgcacctcaagtcccaccagcgcacccacacgggtgagcgccctttctcctgcgactggctcgactgcgacaagaagtttacgcgttccgacgagctggcccgccactacaggacgcacacgggcgagaagcgcttctcctgccccctctgccccaagcagttctcccggagcgaccacctgaccaagcatgctcgccgccacccaacctatcatccagatatgatcgagtaccggggacgtcgtcgaactccccgcatcgacccgccactcaccagcgaggtggaaagctccgcctccggctccggtcccggcccggcgcccagcttcaccacctgcctgtaggacagtcattgctgtcagtcttaccctcaaggatgatcccccaggccgttgtccctgctttctctctgcccatccttctttcccagagtcattacaccaaggcacagactggttcctctgctctgagggtgggtccaggcagacatgtggactctggggaggtactgggggccggaaaatagcgggaattcttgcaacgtgtatatcatcctaaaagtgggggttgcctcaagacagcccccaggaactgataagaagggatgaactcccgtactctccagagtactgaagattctcccctccctggaaccagggatgtgaaactggaattctcagatgcctgaggagctcccagtctcaaaggactctggtgtctcacccatccaccaggcggaccttggagagggtgtcaggggtggcagtcttggaaatgtccaggactgggatggtgagaggcctttggaaacagaaatgatttctatttctgtaaacaaaaaaaaaaaaaaaaa

SEQ ID NO: 236953 - DNA, 1488 bp, Artificial Sequence
  derived and/or modified sequence
cgctcgccggcggccgggcggtcccagcatgtcggccgccgtggcgtgcctggactacttcgccgccgagtgcctggtgtccatgtccgcgggcgccgtggttcaccgccgcccgccggaccccgagggcgcgggtggagccgcaggctcggaggtgggtgcggcgcatccggagtccgctctgccgggtccggggccatcggggcccgcgtcggtcccccagctcccgcaggtccccgcccccagccccggcgcgggcggcgccgcgccccacctgctggctgcaagcgtctgggcggacttgcgcggcagctctggcgagggctcctgggagaactcgggggaagctccacgcgcctcgtccggcttctccgacccgatcccgtgctccgtccagaccccgtgctccgagctggctcccgcctccggcgccgcggcggtctgcgctcccgagagctcctccgatgcgcccgccgtcccaagcgcgcctgctgccccgggcgcaccagcagcctctggtgggttctctggaggggccctaggggcaggccccgcccccgccgcggatcaggcgccccggaggaggtctgtcacacctgctgccaagcgccaccaatgccccttcccgggctgcaccaaagcctattacaagtcgtcgcacctcaagtcccaccagcgcacccacacgggtgagcgccctttctcctgcgactggctcgactgcgacaagaagtttacgcgttccgacgagctggcccgccactacaggacgcacacgggcgagaagcgcttctcctgccccctctgccccaagcagttctcccggagcgaccacctgaccaagcatgctcgccgccacccaacctatcatccagatatgatcgagtaccggggacgtcgtcgaactccccgcatcgacccgccactcaccagcgaggtggaaagctccgcctccggctccggtcccggcccggcgcccagcttcaccacctgcctgtaggacagtcattgctgtcagtcttaccctcaaggatgatcccccaggccgttgtccctgctttctctctgcccatccttctttcccagagtcattacaccaaggcacagactggttcctctgctctgagggtgggtccaggcagacatgtggactctggggaggtactgggggccggaaaatagcgggaattcttgcaacgtgtatatcatcctaaaagtgggggttgcctcaagacagcccccaggaactgataagaagggatgaactcccgtactctccagagtactgaagattctcccctccctggaaccagggatgtgaaactggaattctcagatgcctgaggagctcccagtctcaaaggactctggtgtctcacccatccaccaggcggaccttggagagggtgtcaggggtggcagtcttggaaatgtccaggactgggatggtgagaggcctttggaaacagaaatgatttctatttctgt

SEQ ID NO: 236954 - DNA, 972 bp, Artificial Sequence
  derived and/or modified sequence
atgagtgctgctgtagcatgccttgattatttcgccgctgagtgtttagtgtctatgtccgcaggggctgttgtccaccgacgccctcccgatcccgagggggctggcggtgccgcaggttctgaagtgggggccgcgcatccagagtctgccctacccggccccggaccttctgggcccgcatctgtgccccagttgccccaggtcccggccccctcccctggggctggaggggccgccccacacctcctggcagcctccgtgtgggccgatctgcggggcagtagtggtgagggatcttgggagaattctggcgaggccccccgagccagttccggcttctctgatcctatcccttgttcagtacaaacaccttgctccgaactcgctccggcctctggggcagctgccgtgtgcgcgcctgagagctcgagcgacgcaccagctgtgcccagcgctcccgccgcacccggcgctccagcagcaagcggcggcttttccggcggcgcacttggcgcgggacccgctcctgccgcggaccaagcgccacgccgacggtcagttacacctgctgcaaaacgtcaccagtgtccattccccggatgtaccaaggcctattacaagagcagccacttaaagagtcaccagagaacccacacaggcgagaggcccttctcctgtgattggctggattgcgacaaaaagtttacaagaagcgacgagctcgctaggcactatcgcactcacaccggcgagaagagattttcctgtccactttgtcccaagcagttttcccgatcggatcatctgacaaagcatgcacgtaggcatcccacctaccacccggacatgatagagtatagaggccggagaaggaccccgcgcattgatcccccactcacatccgaagtcgagagcagtgcctcaggctccggtccgggccccgcacctagttttacgacttgcctgtag

SEQ ID NO: 236955 - DNA, 972 bp, Artificial Sequence
  derived and/or modified sequence
atgtctgctgctgtggcctgcctggactactttgctgctgagtgcctggtgtccatgtctgctggagctgtggtgcacagaagacctccagaccctgagggcgccggcggcgctgctggcagcgaggtgggcgccgcccaccctgagagcgccctgcccggccctggccccagcggccctgcctctgtgccccagctgccccaggtgcctgcccccagccctggggccggcggggccgccccccacctgctggccgcctctgtgtgggccgacctgcggggcagcagcggggagggctcctgggagaacagcggggaggccccccgggccagcagcggcttcagtgaccccatcccctgcagcgtgcagaccccctgcagcgagctggccccagccagcggggctgctgctgtgtgtgcccctgagagcagcagtgatgccccagctgtgcccagcgccccagctgcccctggggccccagctgccagcggcggcttctctggaggagccctgggcgccggccctgccccagctgctgaccaggcccccaggagaagatctgtgaccccagctgccaagaggcaccagtgccccttccctggctgcaccaaggcctactacaagagcagccacctgaagagccaccagaggacccacactggagagcggcccttcagctgtgactggctggactgtgacaagaagttcaccaggagtgatgagctggcccggcactaccgcacccacactggagagaagcgcttcagctgccccctgtgccccaagcagttcagcagaagtgaccacctgaccaagcacgcccggcggcaccccacctaccacccagacatgattgagtaccggggcagaagaaggaccccaagaattgacccccccctgaccagcgaggtggagagcagcgccagcggcagcggccctggccctgcccccagcttcaccacctgcctgtag

SEQ ID NO: 236956 - DNA, 972 bp, Artificial Sequence
  derived and/or modified sequence
atgagcgccgccgtggcctgcctggactacttcgccgccgagtgcttggtttccatgagtgctggcgccgtggtacatagacgccctcctgatccggagggggcaggaggtgccgcggggtcagaagtcggcgccgctcacccggagagcgcactgccaggccccggaccaagtggtccggctagtgtgcctcagctgccccaggtgcccgcacctagcccaggggccggaggcgctgcgccacacctccttgcagcgagcgtgtgggcggatttgagaggaagcagcggcgaagggagctgggaaaatagtggcgaggctccgagagcttcatcggggttctctgatcctataccctgttctgtccagaccccgtgtagcgagctagcccccgcctcgggtgccgccgcagtatgcgctcccgaatcctcatccgatgctccggcagtcccctcagcaccagctgctcccggagctcccgccgccagcggaggattttctggcggggctctgggggccggacctgcgccagcggcagaccaggcccctcgcaggagaagtgtcacccccgccgctaaacgccatcagtgccctttccccggttgtaccaaagcatattacaaatcttcacatttgaaaagccatcagaggacacacaccggtgagagaccattctcctgcgactggctggactgtgataagaaattcaccaggagtgacgaacttgcccgccactaccggacccacacaggtgagaagaggttctcttgcccgttatgcccaaaacagttctcccgatccgaccatctgacaaaacacgccagacgccaccctacctatcatccagatatgatcgaataccgtggtagacggagaactccgcgcatcgaccctccattgacatctgaagtcgagagttccgcatcaggttcaggccctggacccgccccaagtttcacgacctgtttgtag

SEQ ID NO: 236957 - DNA, 972 bp, Artificial Sequence
  derived and/or modified sequence
atgagtgctgccgtggcttgtcttgactactttgccgcagaatgcctggtgtcaatgagtgcaggggctgtggtgcaccggcgtcccccagacccggaaggtgctggcggagcggctggatccgaggtcggagctgctcatcccgaaagcgctctcccaggtccgggaccctccggccctgcctctgtccctcagcttccccaggtgcctgccccatctcccggagcaggaggtgccgcacctcatctgcttgcagcttctgtctgggcagacctgcgagggtctagtggcgaaggctcgtgggagaacagtggagaggcaccgcgagcctcctccggtttttccgatcccattccatgctccgtccaaacaccttgcagtgaactggctccagcctccggcgcagcagccgtgtgcgcaccggaaagctctagcgatgctcctgcggttccatcagccccagccgctcctggggcacccgcagcatcgggcggattctccggtggcgcattgggagctggccctgctcccgcagccgaccaagccccacgcaggcgatctgtgacaccagccgctaaaagacatcagtgtccctttccgggatgtacaaaggcgtattataagagcagtcacctcaagtcccatcaaaggacccacaccggcgagcgccctttctcctgcgattggttggactgcgacaagaaattcaccagaagcgacgagctcgcccgacactataggactcacaccggggagaagcgtttcagttgccctttatgccctaagcagttcagtaggagcgaccatctgactaagcacgcgaggcgacaccccacatatcatccagacatgattgagtatagagggagacggcgaacacctaggatcgatcctcctcttactagcgaagtggaaagctctgcgtccgggtccgggcctggccctgcgccaagcttcacaacatgcctctag

SEQ ID NO: 236958 - DNA, 972 bp, Artificial Sequence
  derived and/or modified sequence
atgagcgccgccgtggcctgcctggactacttcgccgccgagtgcctggtgagcatgagcgccggcgccgtggtgcacagaagaccccccgaccccgagggcgccggcggcgccgccggcagcgaggtgggcgccgcccaccccgagagcgccctgcccggccccggccccagcggccccgccagcgtgccccagctgccccaggtgcccgcccccagccccggcgccggcggcgccgccccccacctgctggccgccagcgtgtgggccgacctgagaggcagcagcggcgagggcagctgggagaacagcggcgaggcccccagagccagcagcggcttcagcgaccccatcccctgcagcgtgcagaccccctgcagcgagctggcccccgccagcggcgccgccgccgtgtgcgcccccgagagcagcagcgacgcccccgccgtgcccagcgcccccgccgcccccggcgcccccgccgccagcggcggcttcagcggcggcgccctgggcgccggccccgcccccgccgccgaccaggcccccagaagaagaagcgtgacccccgccgccaagagacaccagtgccccttccccggctgcaccaaggcctactacaagagcagccacctgaagagccaccagagaacccacaccggcgagagacccttcagctgcgactggctggactgcgacaagaagttcaccagaagcgacgagctggccagacactacagaacccacaccggcgagaagagattcagctgccccctgtgccccaagcagttcagcagaagcgaccacctgaccaagcacgccagaagacaccccacctaccaccccgacatgatcgagtacagaggcagaagaagaacccccagaatcgacccccccctgaccagcgaggtggagagcagcgccagcggcagcggccccggccccgcccccagcttcaccacctgcctgtag

SEQ ID NO: 236959 - DNA, 435 bp, Artificial Sequence
  derived and/or modified sequence
atgatccgggccgccctgctggagccccagccccccaagctgaagcagagcagccacctgagcccccagggcgccggcaccaccggggccggcccccacacccccctgaccttcctgtacttcttccggctggagctgctgcaggccgccctgcccccccagccccccaaggtgctggtgcggcagcccggcggcaaggacagcctggccgagagcccctttgacctgagcactggaagaaatgccccctgtggcggggccctgggcaacctgcggcacctgcagtggggcggggcctggcccctgctcttcctgggcggcacctgggacagcgtgtaccaggccggcagcaccctggccctgggccgggtgtctgtgtccctcttcttcttcctgcccaacaagttccacagccaccccagccgccacctgtag

SEQ ID NO: 236960 - protein, 229 aa, Artificial Sequence
  derived and/or modified sequence
MIPLQKDNQEEGVCPICQESLKEAVSTNCGHLFCRVCLTQHVEKASASGVFCCPLCRKPCSEEVLGTGYICPNHQKRVCRFCEESRLLLCVECLVSPEHMSHHELTIENALSHYKERLNRRSRKLRKDIAELQRLKAQQEKKLQALQQWLGQLEHMPAEAARILDISRAVTQLRSLVIDLERTAKELDTNTLKNAGDLLNRSAPQKLEVIYPQLEKGVSELLLQPPQKL

SEQ ID NO: 236961 - protein, 229 aa, Artificial Sequence
  derived and/or modified sequence
MIPLQKDNQEEGVCPICQESLKEAVSTNCGHLFCRVCLTQHVEKASASGVFCCPLCRKPCSEEVLGTGYICPNHQKRVCRFCEESRLLLCVECLVSPEHMSHHELTIENALSHYKERLNRRSRKLRKDIAELQRLKAQQEKKLQALQQWLGQLEHMPAEAARILDISRAVTQLRSLVIDLERMAKELDTNTLKNAGDLLNRSAPQKLEVIYPQLKKGVSELLLQPPQKL

SEQ ID NO: 236962 - protein, 229 aa, Artificial Sequence
  derived and/or modified sequence
MIPLQKDNQEEGVCPICQESLKEAVSTNCGHLFCRVCLTQHVEKASASGVFCCPLCRKPCSEEVLGTGYICPNHQKRVCRFCEESRLLLCVECLVSPEHMSHHELTIENALSHCKERLNRRSRKLRKDIAELQRLKAQQEKKLQALQQWLGQLEHMPAEAARILDISRAVTQLRSLVIDLERTAKELDTNTLKNAGDLLNRSAPQKLEVIYPQLEKGVSELLLQPPQKL

SEQ ID NO: 236963 - DNA, 1939 bp, Artificial Sequence
  derived and/or modified sequence
gtgtatgaaaaataatttcaagtttaacaaacacaaggaaaccgcagggtccatgtcaaagctgatgagctatttctgaaactcgtgcagaattgtggtttgtgtggtctatgtcacggcacccttgagggagagtgggcaattgcctgaacttggaggctgtgtcctgtccccaggctgctccagggctgcctccttccgactgggccttcttatctgggactgttgagggcaacaggccttccgaagaccagtgaagaaggaggccctgcaaacaggaggctgacagggtaggaacgaggccatgatccctttgcagaaggacaaccaggaggagggtgtctgccccatctgccaggagagcctgaaggaggccgtgagcaccaactgcggacatctcttctgtcgagtgtgcctgacacagcatgtggagaaggcctcagcctctggggtcttctgctgccccctctgccggaagccctgttctgaggaggtgctagggacaggctatatctgccccaaccaccagaagagggtgtgcaggttctgtgaggagagcagacttcttctatgtgtggaatgcctggtgtcccctgaacacatgtctcatcatgaactgaccattgaaaatgccctcagccactacaaggaacgactcaatcgccggagcaggaagctcagaaaggacattgcagaacttcagcggctcaaggctcagcaggagaagaaactgcaggctctgcagcagtggctgggccagctggagcacatgccagcagaagcggccagaatccttgacatctccagggcagtaacacagctcagaagcctggtcattgatctggaaaggacggccaaggaattagacaccaacacactgaagaatgctggtgacttactgaacaggagtgctccacagaaattagaggttatttatccccagttggagaaaggagtcagtgaattgcttcttcagccccctcagaagctctgacctgttcatccctgggacacctcacttcaggctcacctcagcctcctctctctccttcctccaacctgtccaggcccccactgggtctacccagtgcatcttcgggcctgccagctcctgaacatgtcaccatttcttcatgtccacagtcatcacctgatgcctgaccctctgactcttggacgatagccagcctccttccaggacaggctcatgcttggggctgccactgtggaggtcggggcccatggtctccaggagcatttgtgaaatctccattttgcctgtaaactgatggtagtgcccatctctcacaatctcattcaaataggatcctccaggcctctgaatggcccgagctcatcagcagtgacaccacctcacatgtggagcccagctgagttcctgcagtacttgttgtctgtaccactcacctggcacttatttattattgttgtggaagacagactcaaagacagcctcccttcatgatcctcacctcttggaattcatgcccttgtttggtcccctccccttgagtgtaagtgggatctgtgacttgcttctaatgaatggaataaggcaaaggtgatagggtgtcactctggcaactgtgttgcattgtatagaactcctccttgctggcccacccttttagagcccctcctaggagccaagagcagcttccagccaacaacaagcagaggccctcagtcttgtggctgcaagaacctgaattctgccaacaacccgagtgagcttggaagcagattcttccccaactgagccggataagaacctagtccagccaacaccttgattatagtcttgtgagtacctaagctgaggacccagtgaagctgtgccaaaatttcccacccacagaaacagtgtgacaataaatgtgtgtgtgtttttttgttaaaaaataaaaaaaaaaaaaaa

SEQ ID NO: 236964 - DNA, 690 bp, Artificial Sequence
  derived and/or modified sequence
atgatccccctgcagaaggacaaccaggaggagggcgtgtgccccatctgccaggagagcctgaaggaggccgtgagcaccaactgcggccacctgttctgcagagtgtgcctgacccagcacgtggagaaggccagcgccagcggcgtgttctgctgccccctgtgcagaaagccctgcagcgaggaggtgctgggcaccggctacatctgccccaaccaccagaagagagtgtgcagattctgcgaggagagcagactgctgctgtgcgtggagtgcctggtgagccccgagcacatgagccaccacgagctgaccatcgagaacgccctgagccactacaaggagagactgaacagaagaagcagaaagctgagaaaggacatcgccgagctgcagagactgaaggcccagcaggagaagaagctgcaggccctgcagcagtggctgggccagctggagcacatgcccgccgaggccgccagaatcctggacatcagcagagccgtgacccagctgagaagcctggtgatcgacctggagagaaccgccaaggagctggacaccaacaccctgaagaacgccggcgacctgctgaacagaagcgccccccagaagctggaggtgatctacccccagctggagaagggcgtgagcgagctgctgctgcagcccccccagaagctgtag

SEQ ID NO: 236965 - DNA, 690 bp, Artificial Sequence
  derived and/or modified sequence
atgatccccctgcagaaggacaaccaggaggagggcgtgtgccccatctgccaggagagcctgaaggaggccgtgagcaccaactgcggccacctgttctgcagagtgtgcctgacccagcacgtggagaaggccagcgccagcggcgtgttctgctgccccctgtgcagaaagccctgcagcgaggaggtgctgggcaccggctacatctgccccaaccaccagaagagagtgtgcagattctgcgaggagagcagactgctgctgtgcgtggagtgcctggtgagccccgagcacatgagccaccacgagctgaccatcgagaacgccctgagccactacaaggagagactgaacagaagaagcagaaagctgagaaaggacatcgccgagctgcagagactgaaggcccagcaggagaagaagctgcaggccctgcagcagtggctgggccagctggagcacatgcccgccgaggccgccagaatcctggacatcagcagagccgtgacccagctgagaagcctggtgatcgacctggagagaatggccaaggagctggacaccaacaccctgaagaacgccggcgacctgctgaacagaagcgccccccagaagctggaggtgatctacccccagctgaagaagggcgtgagcgagctgctgctgcagcccccccagaagctgtag

SEQ ID NO: 236966 - DNA, 690 bp, Artificial Sequence
  derived and/or modified sequence
atgatccccctgcagaaggacaaccaggaggagggcgtgtgccccatctgccaggagagcctgaaggaggccgtgagcaccaactgcggccacctgttctgcagagtgtgcctgacccagcacgtggagaaggccagcgccagcggcgtgttctgctgccccctgtgcagaaagccctgcagcgaggaggtgctgggcaccggctacatctgccccaaccaccagaagagagtgtgcagattctgcgaggagagcagactgctgctgtgcgtggagtgcctggtgagccccgagcacatgagccaccacgagctgaccatcgagaacgccctgagccactgcaaggagagactgaacagaagaagcagaaagctgagaaaggacatcgccgagctgcagagactgaaggcccagcaggagaagaagctgcaggccctgcagcagtggctgggccagctggagcacatgcccgccgaggccgccagaatcctggacatcagcagagccgtgacccagctgagaagcctggtgatcgacctggagagaaccgccaaggagctggacaccaacaccctgaagaacgccggcgacctgctgaacagaagcgccccccagaagctggaggtgatctacccccagctggagaagggcgtgagcgagctgctgctgcagcccccccagaagctgtag

SEQ ID NO: 236967 - DNA, 690 bp, Artificial Sequence
  derived and/or modified sequence
atgataccactgcagaaggacaaccaggaggagggagtgtgcccaatttgccaggagtccctcaaagaagccgtgagtacgaattgcggccacctcttctgccgcgtgtgcctaacccagcacgtggagaaggcaagtgcatcaggcgtattctgctgtcctttgtgccggaagccctgtagcgaagaggtcctaggtacaggatatatctgtccaaaccatcagaaacgcgtgtgccgattttgtgaagaaagccgccttctcctttgtgtggagtgtctcgtgtcccccgaacacatgagtcatcatgaacttaccatcgagaacgccttgtcacactacaaggagaggctaaacagacgaagcagaaagctgaggaaggacattgctgagttgcagagactgaaggctcagcaggaaaagaaactccaagctctgcagcagtggctgggtcagttggaacacatgcccgccgaggcagcaagaatcctggacatctcgagagcagtgacacaactgaggtccctcgtcatcgatctggagagaacagcaaaagagctagatacaaacaccctgaaaaatgccggcgatctactgaatcgctccgccccccaaaaattggaagtgatatatccgcagcttgagaaaggtgtgtccgaactacttctccagccgccgcagaaactttag

SEQ ID NO: 236968 - DNA, 690 bp, Artificial Sequence
  derived and/or modified sequence
atgatacccctgcagaaggacaaccaagaagagggtgtgtgccctatttgtcaggaaagcctgaaagaggccgtttccaccaactgtggtcacctcttctgtagggtttgccttacacaacacgtggaaaaggcgtcagcaagtggagtgttctgttgtcccctgtgccggaaaccttgcagcgaagaggtactaggtaccggctacatctgtcccaaccaccagaagagagtgtgccggttctgtgaagaatcacgactcctcttgtgtgttgaatgtctcgtgtcacccgaacacatgagtcaccacgaacttaccattgagaatgctctttcccactataaagaacgcctcaatcgacggtctagaaaactccgcaaagacatcgcggaactacaacggctcaaggcccagcaggagaagaagctccaggctttacagcagtggctagggcagctcgagcacatgccggccgaggcagccaggatcctggatatcagtcgagctgtgactcagctcaggagcctcgtgatcgatctggagaggactgccaaagagttagacactaataccctaaagaatgctggagatcttctaaataggtcggccccccaaaagctagaagtcatctaccctcagctggaaaaaggagtgtctgagttactgctccagccaccccaaaagctgtag

SEQ ID NO: 236969 - DNA, 690 bp, Artificial Sequence
  derived and/or modified sequence
atgatccctctgcagaaagataatcaggaggagggcgtttgccccatctgtcaggaatcattaaaagaagcagtctctaccaattgtggccacctcttttgtcgcgtctgtctgactcagcacgtagagaaagccagcgcttcaggcgttttctgctgtccactgtgccgtaagccttgcagcgaggaagtgctggggacagggtatatatgccctaatcatcagaaaagggtttgtcgtttctgcgaggagtcccggctcctcttgtgtgtcgagtgcctcgtaagtcctgaacatatgtcccaccatgagctgactatagagaatgctctaagccattataaagagaggcttaatagacggtctcgaaaactcagaaaggacatcgccgagttacagaggctgaaggctcagcaggagaaaaagttgcaagcccttcagcagtggctagggcagctcgaacatatgcctgccgaggccgcacgaatactcgacatctcgcgcgctgtgacacaacttaggtctctggtgatagatctggaacggatggccaaagagctggacacaaacactctaaagaacgcaggggacctactaaatcgctctgccccgcaaaaattagaggttatttacccccagctcaagaaaggggttagtgagttgttgctgcagcccccacagaagttgtag

SEQ ID NO: 236970 - DNA, 690 bp, Artificial Sequence
  derived and/or modified sequence
atgatcccccttcaaaaagataaccaggaggaaggagtatgccccatttgtcaagagagccttaaagaagccgtcagtaccaactgtggacacctgttttgtagagtatgtctcacccagcacgtggagaaagccagcgcctcgggagtcttctgctgccccttatgccggaagccttgctcagaagaggttctcgggacgggttatatttgtccgaaccaccagaagcgcgtgtgtcgtttctgcgaggaaagtagactgcttttatgtgtggagtgtctggtttctcctgagcatatgtctcaccacgaactaactatcgaaaacgcattaagccactacaaagagaggctgaacagacggtcaaggaagctgcgcaaagatattgccgaacttcagcgactaaaggctcaacaagaaaagaagcttcaggcattgcaacaatggttagggcaactcgagcatatgcccgccgaggctgctcggatcctcgatatttcaagggccgtgacacagctgaggagcctcgtgattgaccttgaaaggactgcgaaggaactggacactaatactcttaagaacgctggcgacctgctcaacagatctgcacctcagaaacttgaagtgatataccctcagcttgaaaagggagtgtctgagctgctgcttcagcctccacaaaagctgtag

SEQ ID NO: 236971 - DNA, 690 bp, Artificial Sequence
  derived and/or modified sequence
atgatccccctgcagaaggataatcaggaagagggggtttgccccatctgtcaggagtccctaaaggaagccgtctccaccaactgcggacacctcttctgcagagtgtgcctgacacaacacgttgagaaagctagcgcctcgggcgtcttctgttgtcctttgtgcagaaagccctgctccgaggaagtgctcggcacaggctacatatgcccaaatcaccagaaacgcgtctgcagattctgtgaggaatctcgactcttactgtgtgtggaatgcctcgtgtctccagagcacatgagtcaccatgagctaaccattgaaaacgcgctgagccattataaggaaagattaaacaggcggagccggaagttaagaaaggacattgccgagctccagcggctgaaagcacagcaggaaaaaaaactgcaggcactccagcagtggcttggccagctggagcacatgcccgcagaggctgccagaatcctcgacatctcgagggctgtgactcaactgcgcagtctcgtcatcgacctggagaggactgcaaaggagctggatactaacactctgaaaaatgcaggggacctgcttaaccgctcagctcctcagaagctcgaagtgatctatccccagctggaaaaaggcgtgagtgaattgctgctgcaaccccctcagaaactctag

SEQ ID NO: 236972 - DNA, 690 bp, Artificial Sequence
  derived and/or modified sequence
atgatccctctccagaaggacaaccaagaagagggcgtctgcccaatttgccaagagtcccttaaagaggctgtgtcgacaaactgtggccacctgttctgcagagtgtgtctgacccagcacgttgaaaaggctagcgcgtcaggagtgttttgctgccccctttgtagaaagccatgcagtgaagaggtgcttggcaccggatatatatgtcctaaccatcagaaaagggtctgcagattctgcgaagagagtcgcctgctactttgtgttgagtgcttagtttccccggaacacatgtctcaccatgagcttactatcgagaacgcactctctcattataaggaacgtctgaataggaggtcccgaaagctccggaaagatatcgccgaattgcaaagactcaaagctcagcaagagaaaaaactacaggcgctgcagcagtggctcggacaactcgagcatatgcctgcagaagctgccagaattctggacatttccagagccgtgacgcaactgaggagcctggttatcgacctggaacggacggccaaggaactcgatacgaatacattgaagaatgctggggatttgctgaatagatctgctcctcagaagcttgaagtgatttatccacagctggaaaaaggcgtgtccgagctcctacttcagcccccccaaaaactgtag

SEQ ID NO: 236973 - DNA, 690 bp, Artificial Sequence
  derived and/or modified sequence
atgattccattacagaaagataaccaggaggaaggagtttgtcctatttgtcaagaaagcctgaaggaagccgtgtctacgaattgcggtcatctgttctgccgggtatgcctgacacagcacgtggagaaggccagcgcctccggtgtgttctgttgtccgctgtgcagaaagccctgttccgaggaggtcctgggcaccgggtacatctgtcccaaccaccagaaacgggtctgcaggttttgcgaagagtcgaggcttttattatgtgtcgagtgtctggttagccctgagcacatgtcccaccatgaactcactatcgagaacgctctgtcccactgtaaagaacggctgaatagaagatcccggaagctgcgaaaggacattgccgaacttcaacgcctgaaggcccagcaagaaaaaaagctgcaggccttgcagcagtggttgggccaactggagcacatgcctgctgaagcagcccgcatactagacatctcccgcgccgtgactcagcttcggagtcttgttattgaccttgaacggactgccaaggagctcgataccaacactctgaagaatgccggggatctgctgaaccgcagtgctccccagaagctcgaggtgatataccctcagctggagaaaggtgtttccgagttattgctacagcctccccaaaaactgtag

SEQ ID NO: 236974 - DNA, 690 bp, Artificial Sequence
  derived and/or modified sequence
atgattccactgcaaaaggataatcaggaggagggcgtgtgcccaatctgtcaggaaagcttaaaagaagctgtatcaacgaactgtggacatttattctgtcgagtctgtctgactcaacacgtggaaaaagctagcgcaagtggtgtgttctgctgccctctgtgcaggaaaccttgcagtgaagaagtcctgggaaccggatacatctgccccaaccaccagaagcgggtgtgtcggttttgtgaggagtcacgtctgctcctgtgcgtagaatgcctggttagccccgaacacatgagtcatcacgaactgacaatcgagaacgctctctcacattataaagaacggttgaacagacgttccaggaaactccgaaaggatatagcagagctgcagcgcctaaaggctcagcaggaaaaaaagcttcaggccctgcagcagtggttaggccagctggaacatatgcctgctgaagctgcgagaatcctcgacatcagtagagcggttacacagctgcgctccctggtaatcgacttagagcgcatggcaaaagagctcgataccaatacgctgaagaacgctggagacctgctgaacaggtcggccccacaaaaactcgaggtgatctaccctcagctgaagaaaggggtgagcgaactgttgctgcagccccctcagaagttatag

SEQ ID NO: 236975 - DNA, 690 bp, Artificial Sequence
  derived and/or modified sequence
atgatccccctgcagaaggacaaccaggaggagggcgtgtgccccatctgccaggagagcctgaaggaggccgtgtccaccaactgtggccacctgttctgccgggtgtgcctgacccagcacgtggagaaggccagcgccagcggggtcttctgctgccccctgtgcaggaagccctgcagcgaggaggtgctgggcaccggctacatctgccccaaccaccagaagagggtgtgccgcttctgtgaggagagccggctgctgctgtgtgtggagtgcctggtgtccccagagcacatgagccaccacgagctgaccattgaaaatgccctgagccactacaaggagcggctgaacagaagaagcaggaagctgaggaaggacattgctgagctgcagaggctgaaggcccagcaggagaagaagctgcaggccctgcagcagtggctgggccagctggagcacatgcctgctgaggccgcccgcatcctggacatcagcagagctgtgacccagctgcggagcctggtgattgacctggagaggacagccaaggagctggacaccaacaccctgaagaatgctggggacctgctgaacagaagtgccccccagaagctggaggtgatctacccccagctggagaagggcgtgtctgagctgctgctgcagcccccccagaagctgtag

SEQ ID NO: 236976 - DNA, 690 bp, Artificial Sequence
  derived and/or modified sequence
atgatccccctgcagaaggacaaccaggaggagggcgtgtgccccatctgccaggagagcctgaaggaggccgtgtccaccaactgtggccacctgttctgccgggtgtgcctgacccagcacgtggagaaggccagcgccagcggggtcttctgctgccccctgtgcaggaagccctgcagcgaggaggtgctgggcaccggctacatctgccccaaccaccagaagagggtgtgccgcttctgtgaggagagccggctgctgctgtgtgtggagtgcctggtgtccccagagcacatgagccaccacgagctgaccattgaaaatgccctgagccactacaaggagcggctgaacagaagaagcaggaagctgaggaaggacattgctgagctgcagaggctgaaggcccagcaggagaagaagctgcaggccctgcagcagtggctgggccagctggagcacatgcctgctgaggccgcccgcatcctggacatcagcagagctgtgacccagctgcggagcctggtgattgacctggagaggatggccaaggagctggacaccaacaccctgaagaatgctggggacctgctgaacagaagtgccccccagaagctggaggtgatctacccccagctgaagaagggcgtgtctgagctgctgctgcagcccccccagaagctgtag

SEQ ID NO: 236977 - DNA, 690 bp, Artificial Sequence
  derived and/or modified sequence
atgatccccctgcagaaggacaaccaggaggagggcgtgtgccccatctgccaggagagcctgaaggaggccgtgtccaccaactgtggccacctgttctgccgggtgtgcctgacccagcacgtggagaaggccagcgccagcggggtcttctgctgccccctgtgcaggaagccctgcagcgaggaggtgctgggcaccggctacatctgccccaaccaccagaagagggtgtgccgcttctgtgaggagagccggctgctgctgtgtgtggagtgcctggtgtccccagagcacatgagccaccacgagctgaccattgaaaatgccctgagccactgcaaggagcggctgaacagaagaagcaggaagctgaggaaggacattgctgagctgcagaggctgaaggcccagcaggagaagaagctgcaggccctgcagcagtggctgggccagctggagcacatgcctgctgaggccgcccgcatcctggacatcagcagagctgtgacccagctgcggagcctggtgattgacctggagaggacagccaaggagctggacaccaacaccctgaagaatgctggggacctgctgaacagaagtgccccccagaagctggaggtgatctacccccagctggagaagggcgtgtctgagctgctgctgcagcccccccagaagctgtag

SEQ ID NO: 236978 - DNA, 690 bp, Artificial Sequence
  derived and/or modified sequence
atgatccccctgcagaaggacaaccaggaggagggcgtgtgccccatatgtcaggagagcctcaaagaagccgtctccaccaattgcggacatctcttctgcagggtgtgcctgacacagcacgtcgagaaggcgtcagcctctggggtcttttgctgccccctctgcagaaagccttgctccgaagaagtcctcgggacggggtatatctgtcctaaccatcagaaacgcgtgtgccgcttctgcgaggagtcacggttattgctctgcgtagaatgcctggtgtctccagaacacatgtcacaccacgaactgactatagagaatgctctctcacattacaaagaacgcctcaaccggagatcaaggaaactccggaaagatatcgctgagctacagagactgaaagcccaacaggagaagaaacttcaggccctgcagcagtggttagggcagctcgagcacatgccagccgaagccgcccgaattttggacatctcccgggctgtgacccagctgagatccctggttattgatctggagcgaacagcaaaagaactggacaccaataccctcaagaacgcgggcgatctcttgaatcgaagcgcccctcagaaattagaagttatttatccccagctggagaaaggtgtcagcgaactcctgcttcagccacctcagaagctgtag

SEQ ID NO: 236979 - DNA, 690 bp, Artificial Sequence
  derived and/or modified sequence
atgatccccctgcagaaggacaaccaggaggagggcgtgtgccccatatgtcaggagtcgttgaaggaggcagtctcaaccaactgcggccacctgttttgtagagtttgcctcacacaacatgtggaaaaggcctccgcctccggcgtgttctgttgtccactctgtaggaaaccttgtagcgaagaggtgctgggaactggttacatctgcccaaaccatcaaaagcgtgtgtgtagattttgtgaggaaagcaggttgctgctgtgtgtcgagtgcctggtgagtcccgaacacatgtcgcaccacgaactcacgatcgaaaatgctctctctcattataaggagcggctgaatagacgctccaggaagttacgaaaggacatcgctgagctgcaaaggttaaaagctcagcaggaaaaaaaactgcaggcattgcagcagtggctcggacagctcgaacatatgcccgctgaggcagcacgtatcctggatattagccgtgctgtgacacagctccgcagtctggtgattgatctcgagagaactgcgaaggaactcgataccaacaccctcaagaatgctggagacctattaaaccggagcgctccccagaagttggaggtgatttatccccagctagagaagggcgtctctgaattgctccttcaaccaccacagaaactctag

SEQ ID NO: 236980 - DNA, 690 bp, Artificial Sequence
  derived and/or modified sequence
atgatccccctgcagaaggacaaccaggaggagggcgtgtgccccatatgtcaggagtctctgaaagaagccgttagtactaattgcggacacctgttttgtcgggtttgtctaacacagcacgtcgagaaagcatctgcctcaggggtgttctgctgtccactgtgcagaaagccttgctccgaggaggtcttaggcaccgggtacatttgcccgaaccaccaaaagcgagtgtgtagattctgtgaggaaagcaggttattgctgtgtgtagagtgtctggtatccccggaacacatgagtcaccacgagttaacgatagaaaacgcgctttctcattacaaagagcggctgaaccggcggtcgaggaaactgcggaaagacattgccgagctgcagaggttaaaagctcagcaagaaaagaagctgcaggccctgcagcaatggctgggccagttggagcacatgccggctgaggctgccaggatcttggatattagccgcgctgtcacacagctcagatccctcgtgattgacctcgaaaggatggccaaggagcttgatacaaacacgttgaaaaacgccggggacctgctcaatagaagcgcccctcaaaaactggaagtgatctatccccagttaaagaagggagtgtctgagttgttgctgcaacctccgcagaagctgtag

SEQ ID NO: 236981 - DNA, 690 bp, Artificial Sequence
  derived and/or modified sequence
atgatccccctgcagaaggacaaccaggaggagggcgtgtgccccatttgtcaggagtccctgaaagaagccgtatccactaattgcggccatctgttttgcagagtatgcctcactcagcacgtggaaaaggcgagcgcctccggggtgttctgttgtccactatgtcgaaagccttgctcagaagaagtgcttggcactgggtacatttgtccaaaccaccagaagagagtgtgtcgtttttgcgaagaatcaagactcctactatgcgttgaatgccttgtctcacctgagcacatgtctcatcatgagctgacgatcgagaacgctttgtcacactataaagagcgtttgaatagacggtccagaaaactccgaaaggacatcgctgagctacaaaggttgaaagcacaacaggaaaagaagcttcaggcacttcagcagtggctcgggcagttggagcacatgcccgccgaggcagctcgtatactggacatctcccgcgcagtcacccagctgcgatccttggtgatcgatttggaaagaacagccaaggagctcgacaccaacactctgaagaacgcaggcgacttgctgaaccggtctgcgcctcaaaaactggaggttatttatccgcaattggagaaaggcgtgtcagaactgctgttgcaacctccacagaagctctag

SEQ ID NO: 236982 - DNA, 690 bp, Artificial Sequence
  derived and/or modified sequence
atgatccccctgcagaaggacaaccaggaggagggcgtgtgccccatctgccaggaatcccttaaagaagcagtttctaccaactgtggacatttgttctgcagggtgtgccttacacagcacgtcgaaaaagcatctgcgagcggggtgttctgttgcccactttgccggaagccgtgctccgaggaggtgctaggaacaggctacatctgtccaaaccatcagaagagagtgtgccgattttgtgaagagagccgattgcttctatgcgtggagtgcttggtcagcccggagcatatgtcccatcatgagctaaccatagaaaacgcactgagccattataaggagaggcttaacagacggagtcggaaactgcgcaaagatattgccgagctccagcggctcaaggcccaacaggagaagaagctccaagctcttcaacagtggctcggtcagcttgagcatatgccagccgaggccgcccgcattttagacatttcccgcgcggtcacccagctgcggtcactggtgatcgatctggagcgcaccgccaaggaactagatactaacaccctgaagaacgccggggacctgctgaatagatctgctcctcaaaagctggaagtaatttatccacagctggaaaaaggagtgagtgagctcctgctgcagcctcctcagaagctgtag

SEQ ID NO: 236983 - DNA, 690 bp, Artificial Sequence
  derived and/or modified sequence
atgatccccctgcagaaggacaaccaggaggagggcgtgtgccccatctgccaggagtctctcaaggaggctgtcagtacgaactgtggacacctgttctgtcgagtctgcttgacacaacatgtcgagaaagcttctgcgtccggggtcttctgttgcccactgtgtagaaaaccatgctctgaagaggtgctgggaacgggctacatctgtcctaatcatcagaaacgggtttgtcgattctgcgaggagtctcgactgcttttatgtgtggaatgtttggtgagcccggagcacatgtcacaccatgagctgaccatagaaaacgctctgagccattacaaggagcgactgaacaggcgtagtcggaaactgcggaaggacattgctgagctccaacggttaaaggcacaacaggagaagaagctccaggcactccaacagtggcttgggcagctcgagcatatgccagccgaggccgccaggattctcgatatctcacgggccgtgacccagctgcggagcctggttattgatctcgaaagaaccgccaaagaactggacactaacacacttaaaaatgcaggcgacctgcttaacaggagtgcgccccagaagcttgaggttatctacccacagctggaaaagggcgtgagcgagcttctgctgcaaccaccacaaaagctgtag

SEQ ID NO: 236984 - DNA, 690 bp, Artificial Sequence
  derived and/or modified sequence
atgatccccctgcagaaggacaaccaggaggagggcgtgtgccccatctgtcaggaaagcctgaaggaggctgtttcaaccaattgcgggcatctcttttgtcgtgtgtgtcttacacagcacgtggagaaggcgtcagcctccggcgttttctgctgtcccctgtgtagaaagccttgcagcgaagaggtgctcggcaccggatatatttgccccaaccaccagaagagggtctgccgattctgcgaggagtccaggctcctgttatgcgttgaatgcctggtgagtccagagcatatgtcacaccatgaactcacgatcgaaaacgctctgagtcattgtaaggagcgactgaataggaggtccagaaaactgagaaaagatatagcagagcttcagcgcctgaaggcacagcaggagaaaaagttacaggctcttcagcaatggttaggtcagttggagcacatgccggccgaagctgcccgaatcctggacattagcagggcagtgacccagctgcgctctttggtaattgacctcgaacgcacagcaaaagagctggatacaaacacacttaagaacgcaggtgatctgctaaaccgatctgcaccacagaaactggaagtgatttatccccaactcgagaagggcgttagtgagctgctccttcaacccccacaaaaactgtag

SEQ ID NO: 236985 - DNA, 690 bp, Artificial Sequence
  derived and/or modified sequence
atgatccccctgcagaaggacaaccaggaggagggcgtgtgccccatatgtcaagagtcactgaaagaagctgtctctaccaactgtggacatctgttctgtagagtctgcctcacgcagcacgtggaaaaggcttcggcaagcggcgtgttctgctgcccactgtgcaggaaaccatgctccgaggaggtgctgggcaccgggtatatttgccctaatcaccagaagcgggtctgtcggttttgcgaagaatcacgcttgctcctgtgcgttgaatgtttggttagccccgagcatatgtcccaccatgaactcacaatagaaaatgccctttcacattataaagaacggctgaaccgaaggtccagaaagctgcgaaaggatatcgcagaactacagaggctgaaagcccagcaggagaaaaagcttcaggccttgcagcagtggctggggcaactcgagcatatgcccgcagaggccgcgagaatcctggacatctccagagcggtgactcagctgcgctccctggtcattgatctcgagcgtatggccaaggaactcgataccaacactctgaagaatgctggtgacctgctgaaccggagcgcgccgcaaaagctcgaggtcatctacccacaattgaagaagggcgtgtccgagctcctactgcagccgccacagaagctatag

SEQ ID NO: 236986 - DNA, 690 bp, Artificial Sequence
  derived and/or modified sequence
atgatcccgctccagaaggataaccaggaagaaggcgtttgtcctatttgccaggaatcgcttaaggaggccgtatcaaccaactgcggccatctgttctgtagagtgtgcctcacacagcatgttgagaaagcgagtgcatccggagtgttctgctgccccctgtgcaggaaaccctgttcggaagaagtgcttggtactggttatatctgccccaatcatcagaagcgcgtgtgcagattctgcgaagagtcccggctgcttctctgtgtagagtgtctcgtaagccccgagcacatgagtcaccatgagttgaccatcgaaaatgcattatcccattacaaagagagactgaacagaaggagcaggaagctgaggaaagatattgccgaactgcagcgcctgaaagcacaacaggagaagaagctgcaagctctgcagcagtggctcggccaactggaacatatgccggctgaagccgctagaatcctggacattagtagagccgtgactcagctgcgatccctggtgatcgacctcgagaggaccgcaaaggagcttgatacaaataccctcaaaaacgctggcgacttgctcaacagaagtgcacctcaaaagcttgaggtaatttatccgcagctagagaagggggtatcagaactgctgctgcagccacctcagaagctgtag

SEQ ID NO: 236987 - DNA, 690 bp, Artificial Sequence
  derived and/or modified sequence
atgattcccctgcagaaggataatcaagaagaaggcgtctgccccatctgtcaagaaagcctaaaggaggccgtctcaaccaattgtggacacctgttctgtagggtttgcctgacgcagcatgtggaaaaagcctccgctagcggggtgttctgttgccccctctgtcgcaaaccatgctcggaggaggtgctgggtacaggatatatctgtccaaaccaccagaaaagggtctgtaggttctgcgaagagagccggctcctgttatgcgttgagtgtctggtgtccccagaacatatgtcccatcatgagttaacaatcgaaaatgctctgtctcactacaaggagaggctgaacaggcgcagccgaaagctgcggaaggatatcgccgagctccagaggcttaaggctcaacaggagaaaaaactgcaagctttgcaacaatggctgggtcagcttgaacatatgcccgctgaggctgctcggattctcgacatctcaagggcagtcacccagctccgatcacttgtgatcgatctcgagcgtacggcgaaggaacttgacaccaacactttgaagaacgctggggacctgctgaatcgaagcgcaccgcagaagctcgaggtgatctacccccaattagagaaaggtgtcagcgagctccttttgcagcctccgcagaagctgtag

SEQ ID NO: 236988 - DNA, 690 bp, Artificial Sequence
  derived and/or modified sequence
atgattcccttgcagaaagataatcaggaagagggcgtatgtcctatctgccaggaaagcctcaaagaggccgtcagtaccaattgtggccatcttttctgtagagtgtgtctcacccaacacgtagagaaggcgtctgccagcggcgttttctgttgtcctctgtgtaggaaaccctgcagtgaggaagtgctgggcacaggctatatttgtccgaatcatcagaagcgggtgtgtcgtttttgcgaagagagccgactgctcctctgcgttgagtgcctcgtcagcccagaacatatgtctcaccatgaactcaccattgagaatgctctgtcccactataaagaacggttaaacaggcggtcacgcaagctcagaaaggacatcgccgaactgcagaggctcaaggcacaacaggagaagaaactgcaggctctgcagcagtggctgggccagttggagcacatgcctgctgaggccgctcgtattctagatatatcaagagccgtaacccaacttcgctcattagtgatcgatctggaacgcatggcgaaagaactagataccaacacacttaaaaatgcaggggacctccttaacagatccgcccctcagaagctcgaagttatctatccccagctcaaaaagggcgtgtcagaactcctcctacaaccccctcaaaaactgtag

SEQ ID NO: 236989 - DNA, 690 bp, Artificial Sequence
  derived and/or modified sequence
atgatacccctgcagaaggataatcaagaggaaggcgtgtgccctatctgccaagaaagcctcaaggaagccgtttccacaaactgcgggcacctcttttgccgagtgtgcttgacacaacatgtggagaaggcctccgcatctggagtcttttgctgccccctgtgccgcaagccttgcagtgaggaggtcctcggcacaggatacatttgtcccaaccaccagaaacgcgtgtgtagattttgtgaggagagtcgtctgctcctgtgtgttgagtgtctcgtaagtcccgagcacatgtctcaccatgagctgacgatagagaatgccctgagccactacaaagaacgacttaatcggaggtcccgcaaactgcgtaaagacattgctgagttacaacgccttaaagcccagcaggaaaagaaactgcaagctctgcagcagtggctgggacagctagaacacatgccagccgaagctgccagaatcctagacatctccagagcagtaacccagttgcgcagcttggtcatcgatctcgagcgcaccgcaaaggagctggacacaaataccctcaagaacgcaggagacttactaaataggagcgccccacagaaattagaagtcatttacccacagcttgaaaagggtgttagcgagctgctgctccaacccccacagaagctgtag

SEQ ID NO: 236990 - DNA, 690 bp, Artificial Sequence
  derived and/or modified sequence
atgattcctctgcaaaaagataaccaggaggaaggagtctgcccaatttgtcaggagtccctcaaagaggcagtgtctaccaactgtggtcacttgttctgccgtgtatgtctgacacagcatgtagagaaagcttctgcaagcggggtgttttgctgtcctctttgccgcaagccttgtagcgaggaggttctcggcaccggatacatatgccctaatcatcagaaacgcgtgtgcagattttgtgaggagtccaggctgctgttgtgtgtggaatgccttgttagccctgagcacatgtctcaccatgagttgaccattgaaaatgccttgtctcattataaagagcgacttaaccgcaggtctcgcaaactgcgcaaggatattgccgagttgcaaaggctcaaggctcagcaggagaagaaacttcaagctttacagcagtggcttgggcaactggaacatatgcccgcagaagccgcacggatcctggatatctcaagggccgtaacccagctcaggagtctggtcattgacctcgaaaggaccgccaaggagttggacactaatacactgaagaatgccggtgatctgctgaaccgctcagccccacaaaaactggaagtgatttacccccagctggagaagggtgtctctgaattgctgttacaaccaccccagaagctatag

SEQ ID NO: 236991 - DNA, 690 bp, Artificial Sequence
  derived and/or modified sequence
atgatccctctccaaaaggacaatcaggaggaaggcgtctgccctatatgtcaggaatcccttaaagaggcggtgtctactaattgcggacatctgttttgccgcgtgtgcctcacacagcatgtggaaaaagcaagcgcaagcggcgtgttctgttgtcctctatgtagaaaaccttgtagtgaagaggtgcttggtactggatatatttgccccaaccatcaaaagcgggtctgtcggttttgcgaggaatcacgcctcctactgtgcgtggagtgcctggtcagtcccgagcatatgagccaccatgagctgaccatcgaaaatgctctctcacattacaaggagaggctcaatcggaggtctaggaagttaagaaaggacattgccgaactccagagactgaaggcccagcaggagaagaagctgcaggcgctacaacagtggctgggccagctcgagcatatgcccgctgaagcagccagaatactcgacatctctcgtgcagtcactcagcttcgctctctcgttatagatttggagaggactgcaaaggaactggacactaacacgctgaaaaatgctggagacctgctgaacaggagcgcaccccagaaattggaggtaatttacccccaactagaaaagggagtctcagagttgttgcttcagcctccgcagaagctctag

SEQ ID NO: 236992 - DNA, 690 bp, Artificial Sequence
  derived and/or modified sequence
atgattcccctgcagaaggacaatcaggaggagggggtatgtcctatctgtcaggaaagcctcaaggaggcagttagcacaaactgtggccatctgttctgtagagtttgtctgacacagcatgttgagaaggcaagcgcgtctggagttttctgttgcccattgtgtcgcaagccgtgctccgaggaagtactcggaactgggtacatctgcccaaaccaccagaaaagagtatgtagattctgtgaagagagccgactgctgttgtgtgtagagtgcctcgtttcgcccgaacacatgtcccaccacgaactcacaatagagaatgcactgagtcactgcaaggagcggctgaaccgcagatctagaaaactgaggaaggatatcgctgaactccagaggctcaaagcccagcaggaaaagaagcttcaggccttacagcagtggctgggccagctagaacacatgcccgcagaagccgcacggatactcgacatctctcgagccgtcactcagttgcgtagcctcgttatcgatctggagaggacggcaaaagagttggatacaaataccctgaagaacgctggggatctcctgaataggagcgcaccacagaaactagaggtaatctatcctcagttggaaaagggtgtaagtgaactcctcctacagccaccccagaagttatag

SEQ ID NO: 236993 - DNA, 690 bp, Artificial Sequence
  derived and/or modified sequence
atgataccattacagaaagacaatcaagaggagggagtttgtcctatctgccaagaatctctgaaggaagctgtctcaactaactgtggacacttgttctgtagagtgtgtttgacccaacacgtggagaaagcttctgccagtggtgtgttttgctgcccactctgcaggaaaccatgttccgaagaggtgttgggcaccggatatatatgtcccaatcaccagaagagagtgtgcaggttctgtgaggaatcaagacttctgctttgcgtagaatgcctggtgagtcccgagcacatgagtcaccacgaattgactatcgagaacgccctgagccactataaggagagactgaatcgcagaagcaggaagctacgtaaagatatcgcagagcttcagcgtttgaaagctcagcaagagaagaaattgcaggctctgcagcaatggctgggacagctagagcatatgcctgccgaagccgcacggatcttagacatctctcgggcagtgactcagctgcggagtctggtgatcgatctggagcgcatggctaaagagctcgacacgaacaccctgaagaacgccggagacttgctgaaccgctcagcacctcagaagctcgaggtgatttaccctcagctcaaaaaaggggtgtcagagctccttctgcagccacctcagaaactttag

SEQ ID NO: 236994 - DNA, 1640 bp, Artificial Sequence
  derived and/or modified sequence
ggaggctgacagggtaggaacgaggccatgatccctttgcagaaggacaaccaggaggagggtgtctgccccatctgccaggagagcctgaaggaggccgtgagcaccaactgcggacatctcttctgtcgagtgtgcctgacacagcatgtggagaaggcctcagcctctggggtcttctgctgccccctctgccggaagccctgttctgaggaggtgctagggacaggctatatctgccccaaccaccagaagagggtgtgcaggttctgtgaggagagcagacttcttctatgtgtggaatgcctggtgtcccctgaacacatgtctcatcatgaactgaccattgaaaatgccctcagccactacaaggaacgactcaatcgccggagcaggaagctcagaaaggacattgcagaacttcagcggctcaaggctcagcaggagaagaaactgcaggctctgcagcagtggctgggccagctggagcacatgccagcagaagcggccagaatccttgacatctccagggcagtaacacagctcagaagcctggtcattgatctggaaaggacggccaaggaattagacaccaacacactgaagaatgctggtgacttactgaacaggagtgctccacagaaattagaggttatttatccccagttggagaaaggagtcagtgaattgcttcttcagccccctcagaagctctgacctgttcatccctgggacacctcacttcaggctcacctcagcctcctctctctccttcctccaacctgtccaggcccccactgggtctacccagtgcatcttcgggcctgccagctcctgaacatgtcaccatttcttcatgtccacagtcatcacctgatgcctgaccctctgactcttggacgatagccagcctccttccaggacaggctcatgcttggggctgccactgtggaggtcggggcccatggtctccaggagcatttgtgaaatctccattttgcctgtaaactgatggtagtgcccatctctcacaatctcattcaaataggatcctccaggcctctgaatggcccgagctcatcagcagtgacaccacctcacatgtggagcccagctgagttcctgcagtacttgttgtctgtaccactcacctggcacttatttattattgttgtggaagacagactcaaagacagcctcccttcatgatcctcacctcttggaattcatgcccttgtttggtcccctccccttgagtgtaagtgggatctgtgacttgcttctaatgaatggaataaggcaaaggtgatagggtgtcactctggcaactgtgttgcattgtatagaactcctccttgctggcccacccttttagagcccctcctaggagccaagagcagcttccagccaacaacaagcagaggccctcagtcttgtggctgcaagaacctgaattctgccaacaacccgagtgagcttggaagcagattcttccccaactgagccggataagaacctagtccagccaacaccttgattatagtcttgtgagtacctaagctgaggacccagtgaagctgtgccaaaatttcccacccacagaaacagtgtgacaataaatgtgtgtgtgtttttttgtt

SEQ ID NO: 236995 - DNA, 1640 bp, Artificial Sequence
  derived and/or modified sequence
ggaggctgacagggtaggaacgaggccatgatccctttgcagaaggacaaccaggaggagggtgtctgccccatctgccaggagagcctgaaggaggccgtgagcaccaactgcggacatctcttctgtcgagtgtgcctgacacagcatgtggagaaggcctcagcctctggggtcttctgctgccccctctgccggaagccctgttctgaggaggtgctagggacaggctatatctgccccaaccaccagaagagggtgtgcaggttctgtgaggagagcagacttcttctatgtgtggaatgcctggtgtcccctgaacacatgtctcatcatgaactgaccattgaaaatgccctcagccactacaaggaacgactcaatcgccggagcaggaagctcagaaaggacattgcagaacttcagcggctcaaggctcagcaggagaagaaactgcaggctctgcagcagtggctgggccagctggagcacatgccagcagaagcggccagaatccttgacatctccagggcagtaacacagctcagaagcctggtcattgatctggaaaggacggccaaggaattagacaccaacacactgaagaatgctggtgacttactgaacaggagtgctccacagaaattagaggttatttatccccagttggagaaaggagtcagtgaattgcttcttcagccccctcagaagctctgacctgttcatccctgggacacctcacttcaggctcacctcagcctcctctctctccttcctccaacctgtccaggcccccactgggtctacccagtgcatcttcgggcctgccagctcctgaacatgtcaccatttcttcatgtccacagtcatcacctgatgcctgaccctctgactcttggacgatagccagcctccttccaggacaggctcatgcttggggctgccactgtggaggtcggggcccatggtctccaggagcatttgtgaaatctccattttgcctgtaaactgatggtagtgcccatctctcacaatctcattcaaataggatcctccaggcctctgaatggcccgagctcatcagcagtgacaccacctcacatgtggagcccagctgagttcctgcagtacttgttgtctgtaccactcacctggcacttatttattattgttgtggaagacagactcaaagacagcctcccttcgtgatcctcacctcttggaattcatgcccttgtttggtcccctccccttgagtgtaagtgggatctgtgacttgcttctaatgaatggaataaggcaaaggtgatagggtgtcactctggcaactgtgttgcattgtatagaactcctccttgctggcccacccttttagagcccctcctaggagccaagagcagcttccagccaacaacaagcagaggccctcagtcttgtggctgcaagaacctgaattctgccaacaacccgagtgagcttggaagcagattcttccccaactgagccggataagaacctagtccagccaacaccttgattatagtcttgtgagtacctaagctgaggacccagtgaagctgtgccaaaatttcccacccacagaaacagtgtgacaataaatgtgtgtgtgtttttttgtt

SEQ ID NO: 236996 - DNA, 1640 bp, Artificial Sequence
  derived and/or modified sequence
ggaggctgacagggtaggaacaaggccatgatccctttgcagaaggacaaccaggaggagggtgtctgccccatctgccaggagagcctgaaggaggccgtgagcaccaactgcggacatctcttctgtcgagtgtgcctgacacagcatgtggagaaggcctcagcctctggggtcttctgctgccccctctgccggaagccctgttctgaggaggtgctagggacaggctatatctgccccaaccaccagaagagggtgtgcaggttctgtgaggagagcagacttcttctatgtgtggaatgcttggtgtcccctgaacacatgtctcatcatgaactgaccattgaaaatgccctcagccactacaaggaacgactcaatcgccggagcaggaagctcagaaaggacattgcagaacttcagcggctcaaggctcagcaggagaagaaactgcaggctctgcagcagtggctgggccagctggagcacatgccagcagaagcggccagaatccttgacatctccagggcagtaacacagctcagaagcctggtcattgatctggaaaggatggccaaggaattagacaccaacacactgaagaatgctggtgacttactgaacaggagtgctccacagaaattagaggttatttatccccagttgaagaaaggagtcagtgaattgcttcttcagccccctcagaagctctgacctgttcatccctgggacacctcacttcaggctcacctcagcctcctctctctccttcctccaacctgtccaggcccccactgggtctacccagtgcatcttcgggcctgccagctcctgaacatgtcaccatttcttcatgtccacagtcatcacctgatgcctgaccctctgactcttggacgatagccagcctccttccaggacaggctcatgcttggggctgccactgtggaggtcggggcccatggtctccaggagcatttgtgaaatctccattttgcctgtaaactgatggtagtgcccatctctcacaatctcattcaaataggatcctccaggcctctgaatggcccgagctcatcagcagtgacatcacctcacatgtggagcccagctgagttcctgcagtacttgttgtctgtaccactcacctggcacttatttattattgttgtggaagacagactcaaagacagcctcccttcgtgatcctcacctcttggaattcatgcccttgtttggtcccctccccttgagtgtaagtgggatctgtgacttgcttctaatcaatggaataaggcaaaggtgatagggtgtcactctggcaactgtgttgcattgtatagaactcctccttgctggcccacccttttagagcccctcctaggagccaagagcagcttccagccaacaacaagcagaggccctcagtcttgtggctgcaagaacctgaattctgccaacaacctgagtgagcttggaagcagattcttccccaactgagccggataagaacctagtccagccaacaccttgattatagtcttgtgagtacctaagctgaggacccagtgaagctgtgccaaaatttcccacccacagaaacagtgtgacaataaatgtgtgtgtgtttttttgtt

SEQ ID NO: 236997 - DNA, 1640 bp, Artificial Sequence
  derived and/or modified sequence
ggaggctgacagggtaggaacgaggccatgatccctttgcagaaggacaaccaggaggagggtgtctgccccatctgccaggagagcctgaaggaggccgtgagcaccaactgcggacatctcttctgtcgagtgtgcctgacacagcatgtggagaaggcctcagcctctggggtcttctgctgccccctctgccggaagccctgttctgaggaggtgctagggacaggctatatctgccccaaccaccagaagagggtgtgcaggttctgtgaggagagcagacttcttctatgtgtggaatgcctggtgtcccctgaacacatgtctcatcatgaactgaccattgaaaatgccctcagccactacaaggaacgactcaatcgccggagcaggaagctcagaaaggacattgcagaacttcagcggctcaaggctcagcaggagaagaaactgcaggctctgcagcagtggctgggccagctggagcacatgccagcagaagcggccagaatccttgacatctccagggcagtaacacagctcagaagcctggtcattgatctggaaaggacggccaaggaattagacaccaacacactgaagaatgctggtgacttactgaacaggagtgctccacagaaattagaggttatttatccccagttggagaaaggagtcagtgaattgcttcttcagccccctcagaagctctgacctgttcatccctgggacacctcacttcaggctcacctcagcctcctctctctccttcctccaacctgtccaggcccccactgggtctacccagtgcatcttcgggcctgccagctcctgaacatgtcaccatttcttcatgtccacagtcatcacctgatgcctgaccctctgactcttggacgatagccagcctccttccaggacaggctcatgcttggggctgccactgtggaggtcggggcccatggtctccaggagcatttgtgaaatctccattttgcctgtaaactgatggtagtgcccatctctcacaatctcattcaaataggatcctccaggcctctgaatggcccaagctcatcagcagtgacaccacctcacatgtggagcccagctgagttcctgcagtacttgttgtctgtaccactcacctggcacttatttattattgttgtggaagacagactcaaagacagcctcccttcgtgatcctcacctcttggaattcatgcccttgtttggtcccctccccttgagtgtaagtgggatctgtgacttgcttctaatgaatggaataaggcaaaggtgatagggtgtcactctggcaactgtgttgcattgtatagaactcctccttgctggcccacccttttagagcccctcctaggagccaagagcagcttccagccaacaacaagcagaggccctcagtcttgtggctgcaagaacctgaattctgccaacaacccgagtgagcttggaagcagattcttccccaactgagccggataagaacctagtccagccaacaccttgattatagtcttgtgagtacctaagctgaggacccagtgaagctgtgccaaaatttcccacccacagaaacagtgtgacaataaatgtgtgtgtgtttttttgtt

SEQ ID NO: 236998 - DNA, 1640 bp, Artificial Sequence
  derived and/or modified sequence
ggaggctgacagggtaggaacgaggccatgatccctttgcagaaggacaaccaggaggagggtgtctgccccatctgccaggagagcctgaaggaggccgtgagcaccaactgcggacatctcttctgtcgagtgtgcctgacacagcatgtggagaaggcctcagcctctggggtcttctgctgccccctctgccggaagccctgttctgaggaggtgctagggacaggctatatctgccccaaccaccagaagagggtgtgcaggttctgtgaggagagcagacttcttctatgtgtggaatgcctggtgtcccctgaacacatgtctcatcatgaactgaccattgaaaatgccctcagccactgcaaggaacgactcaatcgccggagcaggaagctcagaaaggacattgcagaacttcagcggctcaaggctcagcaggagaagaaactgcaggctctgcagcagtggctgggccagctggagcacatgccagcagaagcggccagaatccttgacatctccagggcagtaacacagctcagaagcctggtcattgatctggaaaggacggccaaggaattagacaccaacacactgaagaatgctggtgacttactgaacaggagtgctccacagaaattagaggttatttatccccagttggagaaaggagtcagtgaattgcttcttcagccccctcagaagctctgacctgttcatccctgggacacctcacttcaggctcacctcagcctcctctctctccttcctccaacctgtccaggcccccactgggtctacccagtgcatcttcgggcctgccagctcctgaacatgtcaccatttcttcatgtccacagtcatcacctgatgcctgaccctctgactcttggacgatagccagcctccttccaggacaggctcatgcttggggctgccactgtggaggtcggggcccatggtctccaggagcatttgtgaaatctccattttgcctgtaaactgatggtagtgcccatctctcacaatctcattcaaataggatcctccaggcctctgaatggcccaagctcatcagcagtgacaccacctcacatgtggagcccagctgagttcctgcagtacttgttgtctgtaccactcacctggcacttatttattattgttgtggaagacagactcaaagacagcctcccttcgtgatcctcacctcttggaattcatgcccttgtttggtcccctccccttgagtgtaagtgggatctgtgacttgcttctaatgaatggaataaggcaaaggtgatagggtgtcactctggcaactgtgttgcattgtatagaactcctccttgctggcccacccttttagagcccctcctaggagccaagagcagcttccagccaacaacaagcagaggccctcagtcttgtggctgcaagaacctgaattctgccaacaacccgagtgagcttggaagcagattcttccccaactgagccggataagaacctagtccagccaacaccttgattatagtcttgtgagtacctaagctgaggacccagtgaagctgtgccaaaatttcccacccacagaaacagtgtgacaataaatgtgtgtgtgtttttttgtt

SEQ ID NO: 236999 - DNA, 1640 bp, Artificial Sequence
  derived and/or modified sequence
ggaggctgacagggtaggaacaaggccatgatccctttgcagaaggacaaccaggaggagggtgtctgccccatctgccaggagagcctgaaggaggccgtgagcaccaactgcggacatctcttctgtcgagtgtgcctgacacagcatgtggagaaggcctcagcctctggggtcttctgctgccccctctgccggaagccctgttctgaggaggtgctagggacaggctatatctgccccaaccaccagaagagggtgtgcaggttctgtgaggagagcagacttcttctatgtgtggaatgcctggtgtcccctgaacacatgtctcatcatgaactgaccattgaaaatgccctcagccactacaaggaacgactcaatcgccggagcaggaagctcagaaaggacattgcagaacttcagcggctcaaggctcagcaggagaagaaactgcaggctctgcagcagtggctgggccagctggagcacatgccagcagaagcggccagaatccttgacatctccagggcagtaacacagctcagaagcctggtcattgatctggaaaggatggccaaggaattagacaccaacacactgaagaatgctggtgacttactgaacaggagtgctccacagaaattagaggttatttatccccagttgaagaaaggagtcagtgaattgcttcttcagccccctcagaagctctgacctgttcatccctgggacacctcacttcaggctcacctcagcctcctctctctccttcctccaacctgtccaggcccccactgggtctacccagtgcatcttcgggcctgccagctcctgaacatgtcaccatttcttcatgtccacagtcatcacctgatgcctgaccctctgactcttggacgatagccagcctccttccaggacaggctcatgcttggggctgccactgtggaggtcggggcccatggtctccaggagcatttgtgaaatctccattttgcctgtaaactgatggtagtgcccatctctcacaatctcattcaaataggatcctccaggcctctgaatggcccgagctcatcagcagtgacatcacctcacatgtggagcccagctgagttcctgcagtacttgttgtctgtaccactcacctggcacttatttattattgttgtggaagacagactcaaagacagcctcccttcgtgatcctcacctcttggaattcatgcccttgtttggtcccctccccttgagtgtaagtgggatctgtgacttgcttctaatcaatggaataaggcaaaggtgatagggtgtcactctggcaactgtgttgcattgtatagaactcctccttgctggcccacccttttagagcccctcctaggagccaagagcagcttccagccaacaacaagcagaggccctcagtcttgtggctgcaagaacctgaattctgccaacaacctgagtgagcttggaagcagattcttccccaactgagccggataagaacctagtccagccaacaccttgattatagtcttgtgagtacctaagctgaggacccagtgaagctgtgccaaaatttcccacccacagaaacagtgtgacaataaatgtgtgtgtgtttttttgtt

SEQ ID NO: 237000 - protein, 179 aa, Artificial Sequence
  derived and/or modified sequence
MQRQNFRPPTPPYPGPGGGGWGSGSSFRGTPGGGGPRPPSPRDGYGSPHHTPPYGPRSRPYGSSHSPRHGGSFPGGRFGSPSPGGYPGSYSRSPAGSQQQFGYSPGQQQTHPQGSPRTSTPFGSGRVREKRMSNELENYFKPSMLEDPWAGLEPVSVVDISQQYSNTQTFTGKKGRYFC

SEQ ID NO: 237001 - DNA, 540 bp, Artificial Sequence
  derived and/or modified sequence
atgcaacgccagaattttaggccgccaacccccccttatcccggacccgggggcgggggatggggctccgggagttccttccgggggacccccggcgggggcggccctcgcccgccgtcacctcgggacggatacggcagtccccatcacaccccaccttacggcccccggtcccgcccctacggatcaagtcatagtcctaggcacggagggtcgttcccaggaggcaggtttggctccccgtctcctggcggatatccaggtagttacagtaggagtccagctggctctcaacagcagtttggatacagcccaggacagcagcagacacacccccagggaagcccccgcacatccactccctttggttctggccgggtccgggaaaagcgaatgagtaatgaactcgagaactacttcaagccatccatgctcgaggacccatgggccggcctggaaccagtctcagtggtggacatctcacagcagtacagtaacacccaaacattcacaggcaagaaggggcgttatttctgctag

SEQ ID NO: 237002 - DNA, 540 bp, Artificial Sequence
  derived and/or modified sequence
atgcagaggcagaacttccggccccccaccccaccctacccaggccctgggggcggcggctggggcagcggcagcagcttccggggcaccccaggcggcggcggcccccggccccccagccccagagatggctacggcagcccccaccacaccccaccctacggccccaggagccggccctacggcagcagccacagccccaggcatggaggcagcttccctgggggccgcttcggcagccccagccctgggggctacccaggcagctacagccgcagccctgctggcagccagcagcagtttggctacagccctggccagcagcagacccacccccagggcagccccaggaccagcacccccttcggcagcggccgggtgcgggagaagaggatgagcaatgagctggagaactacttcaagcccagcatgctggaggacccctgggccggcctggagcctgtgtctgtggtggacatcagccagcagtacagcaacacccagaccttcaccgggaagaagggccgctacttctgctag

SEQ ID NO: 237003 - DNA, 540 bp, Artificial Sequence
  derived and/or modified sequence
atgcagcggcagaacttccggccccccacccccccctaccccggcccagggggcggcgggtggggcagtgggagctcatttcgcggtacacctggggggggcggccccaggccgccttctccccgggacggctacggatctccgcaccacactcctccctacggtcctagatctagaccttacggctcttcacacagcccaaggcacggggggagcttcccaggcggccgctttggtagtcccagtcccggcggctaccccggatcatattcccgtagcccggccggctcccaacaacagtttggctactcgcctgggcaacaacaaacccatccacagggatctccccggactagcaccccttttggatctggcagggtgcgagaaaagagaatgagtaatgagttggagaattattttaagccgtcgatgctggaggacccatgggccgggttggaacctgttagtgtcgtcgacatatctcaacagtacagcaacacgcagacctttacggggaagaaaggacggtatttctgttag

SEQ ID NO: 237004 - DNA, 540 bp, Artificial Sequence
  derived and/or modified sequence
atgcagaggcagaattttcgccctccgacccccccttatccaggaccaggcggtggagggtggggttcaggatcttctttcagaggtactcctgggggtggcggtcctaggccccctagtccaagggatggatatggcagcccgcaccacaccccaccttacggcccaagatccagaccatatggctcttctcattccccaaggcatggcggttcgtttccaggagggcgttttgggtcccctagtcctggaggatatccagggagctatagtcgatcccccgctggcagccagcagcaatttggctattccccaggacaacagcaaacccacccacaaggatccccaaggacatcaacacccttcgggtcaggccgagtccgggagaagagaatgtccaacgaactagaaaactactttaaaccatcaatgctggaggatccgtgggccggtttggaacctgtgagcgtcgttgatatctctcagcagtactccaatacccagactttcacgggcaaaaagggacggtatttctgttag

SEQ ID NO: 237005 - DNA, 948 bp, Artificial Sequence
  derived and/or modified sequence
tggtaaaggactagcagttctctgcggagggccggttgatacagttccggtgggagaacgcggctgcgaggttttcggctttggctcctgatatgcagcgacagaattttcggcccccaactcctccttaccctggtccgggtggaggaggttggggtagcggaagcagcttccggggaaccccgggcgggggcggaccacggccgccctcccctcgagacgggtacgggagtccgcaccacacgccgccgtacgggccccggtctaggccgtacgggagcagtcactctccgcgacacggcggcagcttcccggggggccggttcgggtctccgtcccctggcggctaccctggctcctactccaggtcccccgcggggtcccagcagcaattcggctactccccagggcagcagcagacccacccccagggttctccaaggacatctacaccatttggatcagggcgtgttagagaaaaaagaatgtctaatgagttggaaaattatttcaagccttcaatgcttgaagatccttgggctggcctagaaccagtatctgtagtggatataagccaacaatacagcaatactcaaacattcacaggcaaaaaaggaagatacttttgttaacatttctgaaattcaactggaagcttcatgtgtcaggaacatcttggacaaaactttaagttgtgttgatataaatttacccaaagatgatgactttgattggataattagtaaggtctttttgttatttttcatcgtatcaggtattgttgatattagagaaaaaagtaggataacttgcaacatttagctctggaagtacctaccacattttagagatttaccgtttccatatatttaacattcctggttacataatggacatttgtcttttaatgttttttcaatgttttaaaataaaacattttgtcttcta

SEQ ID NO: 237006 - DNA, 540 bp, Artificial Sequence
  derived and/or modified sequence
atgcagagacagaacttcagaccccccacccccccctaccccggccccggcggcggcggctggggcagcggcagcagcttcagaggcacccccggcggcggcggccccagaccccccagccccagagacggctacggcagcccccaccacacccccccctacggccccagaagcagaccctacggcagcagccacagccccagacacggcggcagcttccccggcggcagattcggcagccccagccccggcggctaccccggcagctacagcagaagccccgccggcagccagcagcagttcggctacagccccggccagcagcagacccacccccagggcagccccagaaccagcacccccttcggcagcggcagagtgagagagaagagaatgagcaacgagctggagaactacttcaagcccagcatgctggaggacccctgggccggcctggagcccgtgagcgtggtggacatcagccagcagtacagcaacacccagaccttcaccggcaagaagggcagatacttctgctag

SEQ ID NO: 237007 - protein, 643 aa, Artificial Sequence
  derived and/or modified sequence
MLLPCHWVLDATFSDGSLGQWVKNTCATYALSPVVLPPQPQPRKKATDKDYSAFHLGHLREVRLFLRGGTSDQRMDSLVLCPTYFKLWRTLSGSPGLQLSDLHFGSQPEGKFSLRRAVSVKQREEPQDWPLNEKRTLWKDSDLPTWRRGTGYTLSLPAVSPGKRLWGEKAGSLPESEPLFTYTLDEKVDKLVQFLLLKYQAKEPLTRAEMQMNVINTYTGYFPMIFRKAREFIEILFGISLTEVDPDHFYVFVNTLDLTCEGSLSDEQGMPQNRLLILILSVIFIKGNCASEEVIWEVLNAIGPWSALAGFADVLSRLALWESEGPEAFCEESGLRSAEGSVLDLANPQGLAGHRQEDGRRGLTEASPQQKKGGEDEDMPAAGMPPLPQSPPEIPPQGPPKISPQGPPQSPPQSPLDSCSSPLLWTRLDEESSSEEEDTATWHALPESESLPRYALDEKVAELVQFLLLKYQTKEPVTKAEMLTTVIKKYKDYFPMIFGKAHEFIELIFGIALTDMDPDNHSYFFEDTLDLTYEGSLIDDQGMPKNCLLILILSMIFIKGSCVPEEVIWEVLSAIGPIQRPAREVLEFLSKLSSIIPSAFPSWYMDALKDMEDRAQAIIDTTDDATAMASASPSVMSTNFCPE

SEQ ID NO: 237008 - protein, 126 aa, Artificial Sequence
  derived and/or modified sequence
MDTGQLQLSRERSPGAGQQARRELCGRIAISQHGGKAQASPSHSLLSPLDKTDGEPWSALAGFADVLSRLALWESEGPEAFCEESGLRSAEGSVLDLANPQGKGPKGELRDFAPRTEEAPVCPALP

SEQ ID NO: 237009 - DNA, 1932 bp, Artificial Sequence
  derived and/or modified sequence
atgttactgccatgtcattgggtgctggatgcaacgttcagcgacgggagcttggggcaatgggtcaagaatacatgcgcaacatacgccttgtctccagtcgtgctgccccctcaaccccagcctcgcaagaaggccacagataaggactactccgcgtttcacttgggacacctgcgggaggtgcgactcttccttcgcggaggtaccagtgaccaaagaatggatagcctcgtgctttgcccgacttactttaaattgtggaggaccctcagcgggtcacctgggctgcagctcagtgatctgcattttggctcccagccagaaggaaagttttccctaagaagggctgtcagtgtgaagcagcgcgaagagccccaggattggcctttaaacgaaaagcgcacattatggaaggattcagatctcccaacttggcggagaggcaccggatataccctttctctgccagctgtgagtcctggaaagcggttgtggggcgagaaggctggaagccttcctgagtctgaacccctcttcacatatacacttgacgagaaagttgataagctggtgcaattcctgcttttgaagtaccaagccaaggaaccattaacccgtgcagaaatgcaaatgaacgtcattaatacatacacaggctatttccctatgattttccgaaaagcacgagagtttatcgagattctgttcggcattagtctgaccgaggtcgaccctgaccacttctacgttttcgtgaatacgctggaccttacctgtgagggctccttgagtgacgagcagggcatgccccagaacaggcttcttatactgatcctcagcgttattttcatcaagggaaattgtgcttctgaggaggtaatctgggaggtcttgaatgcaattgggccgtggtccgctctggcaggctttgctgacgtcctgagtcgcttggccctttgggaaagcgaagggccggaggcattttgcgaagaaagcggcctccggagcgccgaagggtccgttttggacctggctaacccacagggcctcgccggacatagacaggaggacgggagaagagggctgactgaggccagccctcaacaaaaaaagggcggcgaggacgaggatatgcccgcggcaggtatgccccccctccctcaaagcccacctgaaatccctccacagggcccgcccaaaatctcaccccaaggacctcctcagtctcccccacagtctcccctggattcatgctcctctcccctgctctggactagactggacgaggaatcgtcaagtgaggaagaggacactgccacatggcatgccctccctgagagcgagtcgcttccgaggtacgccctggacgagaaagtagcagagctcgtccagtttttgttacttaaataccaaaccaaggagccagtgacaaaagccgaaatgctcaccaccgtgatcaagaaatataaagattacttccccatgatcttcggcaaggcccatgagtttatcgaattgatcttcggaattgccctgacagacatggaccccgacaaccactcgtacttcttcgaagacactttggacttgacctacgagggctccctcatcgatgatcagggaatgcctaaaaactgtctactcatactgattttaagcatgattttcatcaaggggtcttgcgtgcctgaagaagtcatctgggaggtcctttcagctatcggccctatacagcgcccagcccgcgaggtgctggagttcctgagtaagctgtctagcatcataccaagcgcgtttccctcctggtacatggatgcactgaaagacatggaggaccgggcacaggccattattgataccaccgatgacgcaaccgcaatggctagtgcatcaccatctgtgatgagtacaaatttctgtccagagtag

SEQ ID NO: 237010 - DNA, 381 bp, Artificial Sequence
  derived and/or modified sequence
atggacacaggccaactccaactctctagagaaagatctcccggggccggacaacaggctcgcagagaactctgcggccggattgcgatttcccaacatggaggaaaagcacaggccagtccctcccacagcctgctgtctccgctggataagacggatggggaaccttggagtgcactggccggattcgccgatgtgctgagccgactcgcactgtgggaatcagaaggaccagaagccttctgtgaagagagcggactgagaagcgctgaaggctccgtcctcgaccttgctaaccctcaggggaaagggccaaagggagagctaagggacttcgccccacgcactgaagaggcgcctgtgtgtcccgccctgccctag

SEQ ID NO: 237011 - DNA, 1932 bp, Artificial Sequence
  derived and/or modified sequence
atgctgctgccctgccactgggtgctggatgccaccttcagtgatggcagcctgggccagtgggtgaagaacacctgtgccacctacgccctgagccctgtggtgctgcccccccagccccagcccaggaagaaggccacagacaaggactacagcgccttccacctgggccacctgcgggaggtgcggctcttcctgcggggcggcaccagtgaccagaggatggacagcctggtgctgtgccccacctacttcaagctgtggaggaccctgagcggcagccctggcctgcagctgagtgacctgcacttcggcagccagcctgagggcaagttcagcctgcggcgggctgtgtctgtgaagcagcgggaggagccccaggactggcccctgaatgagaagaggaccctgtggaaggacagcgacctgcccacctggaggcggggcaccggctacaccctgagcctgcctgctgtgtccccaggcaagaggctgtggggcgagaaggccggcagcctgcctgagagcgagcccctcttcacctacaccctggatgagaaggtggacaagctggtgcagttcctgctgctgaagtaccaggccaaggagcccctgaccagggctgagatgcagatgaatgtcatcaacacctacacaggctacttccccatgatcttcaggaaggcccgggagttcatcgagatcctgtttggcatcagcctgacagaggtggaccctgaccacttctacgtgtttgtgaacaccctggacctgacctgtgagggcagcctgagtgatgagcagggcatgccccagaaccggctgctgatcctgatcctgagcgtcatcttcatcaagggcaactgtgccagcgaggaggtgatctgggaggtgctgaatgccatcggcccctggagcgccctggccggctttgctgatgtgctgagccggctggccctgtgggagagcgagggccctgaggccttctgtgaggagagcggcctgcggtctgctgagggctctgtgctggacctggccaacccccagggcctggccggccaccggcaggaggatggccggcggggcctgacagaggccagcccccagcagaagaagggaggagaagatgaggacatgcctgctgctggcatgccacccctgccccagagccccccagagatccccccccagggcccccccaagatcagcccccagggccccccccagagccccccccagagccccctggacagctgcagcagccccctgctgtggacccggctggatgaggagagcagcagcgaggaggaggacacagccacctggcacgccctgcctgagagcgagagcctgcccaggtatgccctggatgagaaggtggccgagctggtgcagttcctgctgctgaagtaccagaccaaggagcctgtgaccaaggccgagatgctgaccaccgtcatcaagaagtacaaggactacttccccatgatctttgggaaggcccacgagttcatcgagctgatctttggaattgccctgacagacatggaccctgacaaccacagctacttctttgaggacaccctggacctgacctatgagggcagcctgattgatgaccagggcatgcccaagaactgcctgctgatcctgatcctgtccatgatcttcatcaagggcagctgtgtgcctgaggaggtgatctgggaggtgctgagcgccatcggccccatccagaggcctgcccgggaggtgctggagttcctgagcaagctgagcagcatcatccccagcgccttccccagctggtacatggatgccctgaaggacatggaggaccgggcccaggccatcatcgacaccacagatgatgccacagccatggccagcgccagccccagcgtgatgagcaccaacttctgcccagagtag

SEQ ID NO: 237012 - DNA, 381 bp, Artificial Sequence
  derived and/or modified sequence
atggacaccggccagctgcagctgagccgggagaggagccctggggccggccagcaggcccggcgggagctgtgtggccgcatcgccatcagccagcacggcggcaaggcccaggccagccccagccacagcctgctgagccccctggacaagacagatggagagccctggagcgccctggccggctttgctgatgtgctgagccggctggccctgtgggagagcgagggccctgaggccttctgtgaggagagcggcctgcggtctgctgagggctctgtgctggacctggccaacccccagggcaagggccccaagggggagctgcgggactttgcccccaggacagaggaggcccctgtgtgcccagccctgccctag

SEQ ID NO: 237013 - DNA, 1932 bp, Artificial Sequence
  derived and/or modified sequence
atgctgctgccctgccactgggtgttggatgccaccttcagtgatggcagtctaggccagtgggtgaaaaacacatgtgccacatatgccttatccccagtggtgctcccacctcagccccagccccggaaaaaggccacagataaggactattctgcctttcatcttgggcatctgagggaggtgaggctttttctgaggggtggaacttcagatcagcgaatggatagtcttgtcctctgccccacatacttcaagctctggaggaccctatcagggtccccaggtttacaactttctgacttgcattttgggagtcagccggaggggaagttttctctgaggagggcagtttcagttaagcagagggaggaaccccaggactggccactcaacgagaagagaactctgtggaaggacagtgaccttccaacatggaggagaggcacaggctacaccctttcccttcctgccgtcagccctggaaaaaggttgtggggggagaaagcggggagcttgccagagagcgagcccttgttcacttatacactggatgaaaaggtggacaagttggtgcagtttcttctcctcaaatatcaagcaaaagagcctctcacaagagcagagatgcagatgaatgtcatcaacacatacacgggctactttcctatgatcttcaggaaagcccgtgagttcatagagattctttttggcatttccctgacagaagtggaccccgaccatttctatgtctttgtaaacacattagacctcacctgtgaggggagtctgagtgatgagcagggcatgccccagaaccgcctcctgattcttattctgagtgtgatcttcataaagggcaactgtgcatctgaggaggtcatctgggaagtgctgaatgcaatagggccctggtcagccttggcagggttcgcggatgtgctttcccgacttgcactgtgggagtctgaaggacctgaagcattttgcgaggagtctggactcaggtcagcagagggaagcgtcttagacctggccaatcctcaaggacttgcaggccacagacaggaagatggccgccgagggctgaccgaggcgtccccacaacagaagaagggaggagaagatgaggatatgcctgctgctgggatgccacctcttccccagagtcctcctgagattcctccccagggtcctcccaagatctctccccagggtcctccgcagagtcctccccagagtcctctagactcctgctcatcccctcttttgtggacccgattggatgaggagtccagcagtgaagaggaggatacagctacttggcatgccttgccagaaagtgaatccttgcccaggtatgccctggatgaaaaggtggctgagttggtgcagtttcttctcctcaaatatcaaacaaaagagcctgtcacaaaggcagagatgctgacgactgtcatcaagaagtataaggactattttcccatgatcttcgggaaagcccatgagttcatagagctaatttttggcattgccctgactgatatggaccccgacaaccactcctatttctttgaagacacattagacctcacctatgagggaagcctgattgatgaccagggcatgcccaagaactgtctcctgattcttattctcagtatgatcttcataaagggcagctgtgtccccgaggaggtcatctgggaagtgttgagtgcaatagggcccattcagaggccagcaagagaagtcttagagtttttatccaagctatccagtatcatccctagtgcctttccatcctggtacatggatgctttgaaagatatggaagacagagcccaggccataattgacaccacagatgatgctactgccatggccagtgcaagccccagtgtcatgtccaccaacttctgtcctgagtga

SEQ ID NO: 237014 - DNA, 966 bp, Artificial Sequence
  derived and/or modified sequence
ttaaattctgatgggaccatgcagtccagaactgtggggctctgggagtctggtcagccccagctgtcagccttgggaggcccaagactctgcttgcagtctttagcctgaggggctccctcacttcctcttgcaggtgctccaggaaccaggagttgaagacctgggtctgaggcacacttcctaaagtcagcacagcagaggaggcccaggcaatatcaggagtcaaggttcccaggggacaaaccccctaggatggcaggtgacccgtgaggccctagagcaccaccttaagagaagaagagctgtaagccggcctttgtcagaaccaccatggacacggggcagcttcagttaagcagagaaaggagccccggggctggccaacaagcaagaagggaactctgtggaaggatagctatctcccaacacggagggaaggcccaggcgtcgcccagccactccttgctgtcacccctggacaaaacagatggagagccctggtcagccttggcagggttcgcggatgtgctttcccgacttgcactgtgggagtctgaaggacctgaagcattttgcgaggagtctggactcaggtcagcagagggaagcgtcttagacctggccaatcctcaaggtaagggccctaagggagaactgagggacttcgcaccaaggacagaagaagccccggtctgccctgcgctgccataggacttgcaggccacagacaggaagatggccgccgagggctgaccgaggcgtccccacaacagaagaagggaggaggtgccagccctctagggaataaataggaagacattgaggaggactgggggaacccccacctcagaggacagcttcccagagattcccaccctgctcctcatatcagccctcgtagagctcctcagtcagctcaggctgagcggcagtcctctcattgctgggggaggggtggagggg

SEQ ID NO: 237015 - DNA, 1932 bp, Artificial Sequence
  derived and/or modified sequence
atgctgctgccctgccactgggtgctggacgccaccttcagcgacggaagtctcggccagtgggtgaagaatacctgcgccacatacgctctcagtcccgtggtcttacctccccaaccacagccacgaaagaaagcaactgataaggattacagtgccttccacctgggccatttgcgcgaggtcaggctgttcctgaggggcggcacttccgatcagcgcatggatagcctggtcctgtgccccacctacttcaagttgtggaggactctgtccggatctcctggcctacaacttagtgatctgcacttcggaagtcagccagagggcaagttctctctgcggcgggctgtgagcgtcaagcagagagaggagccccaggactggcccctgaatgagaagcgcaccttgtggaaagattccgacctgccaacatggcgaagggggaccgggtacactctgtccctccccgctgtttccccaggaaagagactttggggcgaaaaagctggctctttacccgagagcgagcctctctttacatatactctcgacgaaaaagttgacaagctcgtccagttcctccttttgaaataccaggccaaagagccattgacccgcgcggaaatgcagatgaatgtgatcaatacctacactggatacttccctatgatcttcaggaaagctagggagtttatcgagatcctgttcggcatttcactcaccgaagttgatccggatcacttttatgtctttgtgaatacattagatctgacttgcgagggatctctgagtgacgaacaggggatgccccagaatagattgctgattctcatcttgtctgtcatcttcatcaagggcaactgcgcttccgaagaggttatatgggaagtactaaatgccataggcccctggtccgccttggctggcttcgctgatgtcctgagtcgcctggcgttatgggaatctgagggcccagaagccttctgcgaggagtcaggtttaagaagcgcagagggatcggtcttagatttggctaaccctcagggcctggctggtcaccggcaggaggacggtcgaaggggactgactgaggccagcccccaacagaagaaaggaggcgaggatgaggatatgccagcagccgggatgcccccgctgccccagtcccctcctgagatccctccgcaaggtccccctaagatctccccacaaggacccccgcagagccctccccagtctcctctggattcatgttcttcacctctgttatggacaaggctcgatgaggaatcctcaagcgaagaggaagataccgcaacctggcacgctctccccgaaagcgaatcactccccaggtatgccctcgatgaaaaagtcgcagagttggtgcagttcctgctgctgaaataccagactaaggagccagtaaccaaggcggagatgctgacaactgtgatcaagaagtacaaggattatttcccaatgattttcgggaaggctcacgagttcatcgagttaatttttggcatcgccctgacagacatggaccccgataatcactcttacttcttcgaggacacgttggacctgacgtatgagggttccttaattgatgatcagggtatgcccaaaaattgcctgcttatcttgatcctgagcatgatattcataaaagggtcatgcgtgcctgaagaggtcatttgggaggtgctgagcgctatcggccccatccagcgccctgcccgcgaggtcctagagttcctcagtaaactgtcgagcattatcccgagtgcctttccttcctggtacatggacgctctgaaggacatggaggaccgcgcgcaggcaatcattgacacgaccgacgatgcgaccgccatggcttcagcgtccccatcagtgatgagcacaaacttttgcccggagtag

SEQ ID NO: 237016 - DNA, 381 bp, Artificial Sequence
  derived and/or modified sequence
atggacaccggccagctgcagctgagccgggagcggagccccggcgcaggtcaacaggctagacgcgaactgtgcgggcggatcgctatcagccaacacggggggaaggcgcaggcatcaccatcacactccttgttaagccctctagataaaaccgacggggagccttggtctgccctggccggatttgctgatgtgctttcccgccttgccctttgggagtccgaaggtcccgaagccttctgcgaggagtctggattgaggtcggctgaaggtagcgtgttggatttggcaaatccccaaggaaagggaccaaagggcgagctaagagacttcgcaccacgtactgaggaagccccggtttgccccgccctgccctag

SEQ ID NO: 237017 - DNA, 1932 bp, Artificial Sequence
  derived and/or modified sequence
atgctgttaccttgccattgggtgctggacgccaccttttccgacggcagtctcggtcagtgggttaaaaatacatgtgcgacatacgccctgtcaccggtggtgctgcctccccaaccgcagccccgtaagaaggctacagataaggactacagtgccttccacctcggccatctcagagaagtgagacttttcctgcgaggaggaacaagcgatcagcgcatggacagcctcgtcttgtgccctacctattttaagctgtggcgaaccttgtcaggcagtcccggacttcagttatccgaccttcatttcggatctcagcctgaggggaagttctccctgcgcagggcggtctcagttaagcagagagaggagcctcaagactggccgctcaacgagaagcgtaccttgtggaaagacagcgatctgcctacttggcggagaggcacaggatacacattatcgctcccagctgtctctccaggcaagagactctggggcgagaaggccggaagcctgccagaatccgagccactatttacttataccctggacgagaaagtcgacaaactggtccagttcctgctcctgaaataccaagcaaaagagcctctgacccgcgcagagatgcagatgaacgtcataaacacttacaccggatacttcccaatgatattcagaaaagccagggagtttatcgaaatactctttgggataagcctcacggaggtggatcccgaccatttctacgtctttgttaacaccctggacctcacttgtgaggggtctttatccgatgagcaaggtatgccgcagaataggttactaatcctgatcctgtccgtgatctttatcaaaggaaattgcgccagtgaagaggtgatctgggaggtcctcaacgcgataggaccctggtcagccctcgctggctttgctgacgtgttgtctcggcttgcattgtgggagtcggagggtcccgaggcattctgtgaagaaagcggactcagatccgctgagggcagcgtgctcgatcttgcgaatcctcagggccttgccggacaccggcaggaagacgggagaaggggcctaacagaagcttcgccccaacagaaaaaaggaggcgaggacgaggatatgcctgcagccggtatgccacctctgcctcagtcacctcctgagataccaccacagggaccacccaagattagtcctcaggggccaccccagtcaccgccacaatcccctttagactcttgctcttcaccactcttgtggacccggctggacgaggaatcgtcttctgaagaagaggatacagccacttggcacgctctgcccgaaagcgagagccttcctcgctacgcattggatgagaaggtagccgagctggtccagttcttacttctgaagtaccagaccaaggagcctgtaacaaaagctgagatgcttaccaccgtgataaaaaaatataaagactactttccaatgatctttggaaaggcgcacgaatttatcgaactgatttttggtatagctctgaccgatatggaccccgataaccactcttatttctttgaagatacactggacctcacctacgagggctccttgattgacgatcagggcatgcccaaaaattgcctgctgatcctgatcttatcaatgatattcatcaagggtagttgtgtccccgaagaggtgatatgggaagtactctccgccatcggcccaatccagagacccgctcgagaagtcctggagttcctgagcaaattgtccagcatcatcccatcagcatttccgtcttggtacatggatgcactcaaggacatggaggatcgggctcaggcaatcattgacacaaccgatgatgcgaccgccatggcctctgccagcccttccgtcatgtcgacaaacttctgcccagaatag

SEQ ID NO: 237018 - DNA, 381 bp, Artificial Sequence
  derived and/or modified sequence
atggacaccgggcagctacagctaagcagagaacgctcacccggagctggccaacaggccagacgggaactatgtgggagaatcgccattagccagcacgggggaaaggcacaagcctctccctctcatagcttattgagccctctggacaaaactgatggggaaccctggtccgcactagccggttttgccgacgtattgagccgacttgctctgtgggagtcagaaggtcccgaggcattttgcgaggagtctgggctgagatcagctgagggctccgtgctcgacctggctaaccctcaaggtaaagggcctaaaggcgagctgcgggatttcgccccacgtacggaggaagccccagtgtgccctgcactgccatag

SEQ ID NO: 237019 - DNA, 1932 bp, Artificial Sequence
  derived and/or modified sequence
atgctgctgccctgccactgggtgctggacgccaccttcagcgacggcagcctgggccagtgggtgaagaacacctgcgccacctacgccctgagccccgtggtgctgcccccccagccccagcccagaaagaaggccaccgacaaggactacagcgccttccacctgggccacctgagagaggtgagactgttcctgagaggcggcaccagcgaccagagaatggacagcctggtgctgtgccccacctacttcaagctgtggagaaccctgagcggcagccccggcctgcagctgagcgacctgcacttcggcagccagcccgagggcaagttcagcctgagaagagccgtgagcgtgaagcagagagaggagccccaggactggcccctgaacgagaagagaaccctgtggaaggacagcgacctgcccacctggagaagaggcaccggctacaccctgagcctgcccgccgtgagccccggcaagagactgtggggcgagaaggccggcagcctgcccgagagcgagcccctgttcacctacaccctggacgagaaggtggacaagctggtgcagttcctgctgctgaagtaccaggccaaggagcccctgaccagagccgagatgcagatgaacgtgatcaacacctacaccggctacttccccatgatcttcagaaaggccagagagttcatcgagatcctgttcggcatcagcctgaccgaggtggaccccgaccacttctacgtgttcgtgaacaccctggacctgacctgcgagggcagcctgagcgacgagcagggcatgccccagaacagactgctgatcctgatcctgagcgtgatcttcatcaagggcaactgcgccagcgaggaggtgatctgggaggtgctgaacgccatcggcccctggagcgccctggccggcttcgccgacgtgctgagcagactggccctgtgggagagcgagggccccgaggccttctgcgaggagagcggcctgagaagcgccgagggcagcgtgctggacctggccaacccccagggcctggccggccacagacaggaggacggcagaagaggcctgaccgaggccagcccccagcagaagaagggcggcgaggacgaggacatgcccgccgccggcatgccccccctgccccagagcccccccgagatccccccccagggcccccccaagatcagcccccagggccccccccagagccccccccagagccccctggacagctgcagcagccccctgctgtggaccagactggacgaggagagcagcagcgaggaggaggacaccgccacctggcacgccctgcccgagagcgagagcctgcccagatacgccctggacgagaaggtggccgagctggtgcagttcctgctgctgaagtaccagaccaaggagcccgtgaccaaggccgagatgctgaccaccgtgatcaagaagtacaaggactacttccccatgatcttcggcaaggcccacgagttcatcgagctgatcttcggcatcgccctgaccgacatggaccccgacaaccacagctacttcttcgaggacaccctggacctgacctacgagggcagcctgatcgacgaccagggcatgcccaagaactgcctgctgatcctgatcctgagcatgatcttcatcaagggcagctgcgtgcccgaggaggtgatctgggaggtgctgagcgccatcggccccatccagagacccgccagagaggtgctggagttcctgagcaagctgagcagcatcatccccagcgccttccccagctggtacatggacgccctgaaggacatggaggacagagcccaggccatcatcgacaccaccgacgacgccaccgccatggccagcgccagccccagcgtgatgagcaccaacttctgccccgagtag

SEQ ID NO: 237020 - DNA, 381 bp, Artificial Sequence
  derived and/or modified sequence
atggacaccggccagctgcagctgagcagagagagaagccccggcgccggccagcaggccagaagagagctgtgcggcagaatcgccatcagccagcacggcggcaaggcccaggccagccccagccacagcctgctgagccccctggacaagaccgacggcgagccctggagcgccctggccggcttcgccgacgtgctgagcagactggccctgtgggagagcgagggccccgaggccttctgcgaggagagcggcctgagaagcgccgagggcagcgtgctggacctggccaacccccagggcaagggccccaagggcgagctgagagacttcgcccccagaaccgaggaggcccccgtgtgccccgccctgccctag

SEQ ID NO: 237021 - protein, 384 aa, Artificial Sequence
  derived and/or modified sequence
MAFPCRRSLTAKTLACLLVGVSFLALQQWFLQAPRSPREERSPQEETPEGPTDAPAADEPPSELVPGPPCVANASANATADFEQLPARIQDFLRYRHCRHFPLLWDAPAKCAGGRGVFLLLAVKSAPEHYERRELIRRTWGQERSYGGRPVRRLFLLGTPGPEDEARAERLAELVALEAREHGDVLQWAFADTFLNLTLKHLHLLDWLAARCPHARFLLSGDDDVFVHTANVVRFLQAQPPGRHLFSGQLMEGSVPIRDSWSKYFVPPQLFPGSAYPVYCSGGGFLLSGPTARALRAAARHTPLFPIDDAYMGMCLERAGLAPSGHEGIWPFGVQLPGAQQSSFDPCMYRELLLVHRFAPYEMLLMWKALHSPALSCDRGHRVS

SEQ ID NO: 237022 - protein, 263 aa, Artificial Sequence
  derived and/or modified sequence
MAFPCRRSLTAKTLACLLVGVSFLALQQRRRQRVPPTLPRPARAHPGLPAVPQERSYGGRPVRRLFLLGTPGPEDEARAERLAELVALEAREHGDVLQWAFADTFLNLTLKHLHLLDWLAARCPHARFLLSGDDDVFVHTANVVRFLQAQPPGRHLFSGQLMEGSVPIRDSWSKYFVPPQLFPGSAYPVYCSGGGFLLSGLAPSGHEGIPSACSLPGAQQSSFDPCMYRELLLVHRFAPYEMLLMWKALHSPALSCDRGHRVS

SEQ ID NO: 237023 - protein, 121 aa, Artificial Sequence
  derived and/or modified sequence
MAFPCRRSLTAKTLACLLVGVSFLALQQWFLQAPRSPREERSPQEETPEGPTDAPAADEPPSELVPGPPCVANASANATADFEQLPARIQDFLRYRHCRHFPLLWDAPAKCAGGRGVFLLL

SEQ ID NO: 237024 - protein, 385 aa, Artificial Sequence
  derived and/or modified sequence
MAFPCRRSLTAKTLACLLVGVSFLALQQWFLQAPRSPREERSPQEETPEGPTDAPAADEPPSELVPGPPCVANASANATADFEQLPARIQDFLRYRHCRHFPLLWDAPAKCAGGRGVFLLLAVKSAPEHYERRELIRRTWGQERSYGGRPVRRLFLLGTPGPEDEARAERLAELVALEAREHGDVLQWAFADTFLNLTLKHLHLLDWLAARCPHARFLLSGDDDVFVHTANVVRFLQAQPPGRHLFSGQLMEGSVPIRDSWSKYFVPPQLFPGSAYPVYCSGGGFLLSGPTARALRAAARHTPLFPIDDAYMGMCLGARRPGAQRPRGHPGPSACSLPGAQQSSFDPCMYRELLLVHRFAPYEMLLMWKALHSPALSCDRGHRVS

SEQ ID NO: 237025 - DNA, 1155 bp, Artificial Sequence
  derived and/or modified sequence
atggccttcccctgcagaagaagcctgaccgccaagaccctggcctgcctgctggtgggcgtgagcttcctggccctgcagcagtggttcctgcaggcccccagaagccccagagaggagagaagcccccaggaggagacccccgagggccccaccgacgcccccgccgccgacgagccccccagcgagctggtgcccggccccccctgcgtggccaacgccagcgccaacgccaccgccgacttcgagcagctgcccgccagaatccaggacttcctgagatacagacactgcagacacttccccctgctgtgggacgcccccgccaagtgcgccggcggcagaggcgtgttcctgctgctggccgtgaagagcgcccccgagcactacgagagaagagagctgatcagaagaacctggggccaggagagaagctacggcggcagacccgtgagaagactgttcctgctgggcacccccggccccgaggacgaggccagagccgagagactggccgagctggtggccctggaggccagagagcacggcgacgtgctgcagtgggccttcgccgacaccttcctgaacctgaccctgaagcacctgcacctgctggactggctggccgccagatgcccccacgccagattcctgctgagcggcgacgacgacgtgttcgtgcacaccgccaacgtggtgagattcctgcaggcccagccccccggcagacacctgttcagcggccagctgatggagggcagcgtgcccatcagagacagctggagcaagtacttcgtgcccccccagctgttccccggcagcgcctaccccgtgtactgcagcggcggcggcttcctgctgagcggccccaccgccagagccctgagagccgccgccagacacacccccctgttccccatcgacgacgcctacatgggcatgtgcctggagagagccggcctggcccccagcggccacgagggcatctggcccttcggcgtgcagctgcccggcgcccagcagagcagcttcgacccctgcatgtacagagagctgctgctggtgcacagattcgccccctacgagatgctgctgatgtggaaggccctgcacagccccgccctgagctgcgacagaggccacagagtgagctag

SEQ ID NO: 237026 - DNA, 792 bp, Artificial Sequence
  derived and/or modified sequence
atggccttcccctgcagaagaagcctgaccgccaagaccctggcctgcctgctggtgggcgtgagcttcctggccctgcagcagagaagaagacagagagtgccccccaccctgcccagacccgccagagcccaccccggcctgcccgccgtgccccaggagagaagctacggcggcagacccgtgagaagactgttcctgctgggcacccccggccccgaggacgaggccagagccgagagactggccgagctggtggccctggaggccagagagcacggcgacgtgctgcagtgggccttcgccgacaccttcctgaacctgaccctgaagcacctgcacctgctggactggctggccgccagatgcccccacgccagattcctgctgagcggcgacgacgacgtgttcgtgcacaccgccaacgtggtgagattcctgcaggcccagccccccggcagacacctgttcagcggccagctgatggagggcagcgtgcccatcagagacagctggagcaagtacttcgtgcccccccagctgttccccggcagcgcctaccccgtgtactgcagcggcggcggcttcctgctgagcggcctggcccccagcggccacgagggcatccccagcgcctgcagcctgcccggcgcccagcagagcagcttcgacccctgcatgtacagagagctgctgctggtgcacagattcgccccctacgagatgctgctgatgtggaaggccctgcacagccccgccctgagctgcgacagaggccacagagtgagctag

SEQ ID NO: 237027 - DNA, 366 bp, Artificial Sequence
  derived and/or modified sequence
atggccttcccctgcagaagaagcctgaccgccaagaccctggcctgcctgctggtgggcgtgagcttcctggccctgcagcagtggttcctgcaggcccccagaagccccagagaggagagaagcccccaggaggagacccccgagggccccaccgacgcccccgccgccgacgagccccccagcgagctggtgcccggccccccctgcgtggccaacgccagcgccaacgccaccgccgacttcgagcagctgcccgccagaatccaggacttcctgagatacagacactgcagacacttccccctgctgtgggacgcccccgccaagtgcgccggcggcagaggcgtgttcctgctgctgtag

SEQ ID NO: 237028 - DNA, 1158 bp, Artificial Sequence
  derived and/or modified sequence
atggccttcccctgcagaagaagcctgaccgccaagaccctggcctgcctgctggtgggcgtgagcttcctggccctgcagcagtggttcctgcaggcccccagaagccccagagaggagagaagcccccaggaggagacccccgagggccccaccgacgcccccgccgccgacgagccccccagcgagctggtgcccggccccccctgcgtggccaacgccagcgccaacgccaccgccgacttcgagcagctgcccgccagaatccaggacttcctgagatacagacactgcagacacttccccctgctgtgggacgcccccgccaagtgcgccggcggcagaggcgtgttcctgctgctggccgtgaagagcgcccccgagcactacgagagaagagagctgatcagaagaacctggggccaggagagaagctacggcggcagacccgtgagaagactgttcctgctgggcacccccggccccgaggacgaggccagagccgagagactggccgagctggtggccctggaggccagagagcacggcgacgtgctgcagtgggccttcgccgacaccttcctgaacctgaccctgaagcacctgcacctgctggactggctggccgccagatgcccccacgccagattcctgctgagcggcgacgacgacgtgttcgtgcacaccgccaacgtggtgagattcctgcaggcccagccccccggcagacacctgttcagcggccagctgatggagggcagcgtgcccatcagagacagctggagcaagtacttcgtgcccccccagctgttccccggcagcgcctaccccgtgtactgcagcggcggcggcttcctgctgagcggccccaccgccagagccctgagagccgccgccagacacacccccctgttccccatcgacgacgcctacatgggcatgtgcctgggcgccagaagacccggcgcccagagacccagaggccaccccggccccagcgcctgcagcctgcccggcgcccagcagagcagcttcgacccctgcatgtacagagagctgctgctggtgcacagattcgccccctacgagatgctgctgatgtggaaggccctgcacagccccgccctgagctgcgacagaggccacagagtgagctag

SEQ ID NO: 237029 - DNA, 1155 bp, Artificial Sequence
  derived and/or modified sequence
atggccttcccatgccgacgctctcttaccgctaaaacgctcgcctgtctactcgtgggtgtatccttccttgccttgcagcagtggttcctgcaggccccacggtccccaagggaggaaagatcaccccaggaagagacgccggaagggcctaccgatgcccccgccgctgacgagcccccaagtgaactggtgcctggacccccctgcgtggccaatgcatcagccaacgctacagccgatttcgagcagctgccagccaggatccaggattttctccgttaccgacactgtcgccattttcccctgctctgggacgccccggctaagtgcgccgggggaagaggggtcttcctgttgctggctgtcaagagcgcacctgaacactatgagaggcgagagttgattcgccggacttggggccaagaaagatcttacggcgggcgccccgttcggcggctcttcctgcttggcacccctggccctgaagacgaggcacgggccgagcgtctggccgaactggtcgcacttgaagctcgcgaacacggagatgttttacaatgggcattcgctgatacatttcttaatctgactctgaagcatctgcacttattggactggcttgctgccaggtgcccacatgcccggttcctgcttagtggagacgacgatgttttcgtgcacaccgccaacgtagtcagatttctgcaggcgcagccacccggaaggcacctattttcaggacagttgatggaggggagtgtgcccatcagggattcttggagcaaatatttcgttccgccccagctgttccctggatcagcctaccctgtctattgtagcggtggcgggttccttctctctggccctactgcccgagctctgcgggctgccgcgaggcatacccccctttttcccatagatgatgcttatatggggatgtgtctggagcgtgcagggctagcccccagcggacatgagggaatttggcccttcggagttcagctgcctggagcacagcaaagctccttcgacccctgtatgtacagggaactgctcttggtgcacaggtttgccccttatgaaatgttgctcatgtggaaagcgctgcactctccagcacttagttgtgacaggggccacagagtctcttag

SEQ ID NO: 237030 - DNA, 792 bp, Artificial Sequence
  derived and/or modified sequence
atggctttcccgtgcagaagaagcctgaccgctaaaacgctggcatgtcttcttgttggggtttccttcctggccctgcagcaacggcggcgacagcgggtacccccgaccttgcctcgcccagccagagcgcatccgggactgcctgcggtaccgcaggaacgcagctacggcggaagaccagtgcggcggctttttttactgggtacacctggacccgaggacgaggcccgggccgagagactggcagagctcgttgccctggaggcccgagagcacggagatgtcctccagtgggcgttcgccgataccttcctcaacctaaccctgaaacatctgcatctgcttgactggctcgccgcccgctgcccccacgcacggttcctgctgtcaggtgacgacgacgtgtttgtccacaccgccaatgtggtaagattcctgcaagcccagccgcccggaagacatctgttttccggacagctcatggagggctccgtgccaatccgtgactcttggagcaagtatttcgtaccaccccaactttttcccggctctgcctatcccgtctattgctctggtgggggctttttactgagcggcctcgcgccatccggccatgagggcatcccatctgcatgttcacttcccggggcgcagcagagcagctttgacccttgtatgtaccgtgaactccttctcgtgcaccggtttgcgccctatgagatgcttttgatgtggaaggccctgcattcaccagctttaagctgtgatcgcggccatagagtatcatag

SEQ ID NO: 237031 - DNA, 366 bp, Artificial Sequence
  derived and/or modified sequence
atggccttcccctgtcgacggtcactaactgccaaaacactggcatgtctgcttgtgggggtctcctttctcgcccttcagcaatggttcttgcaggccccccggtcccctcgcgaggaacgttctccccaggaggagacccccgagggacccacggacgcaccggccgccgacgaacccccaagcgagctggtgcctggcccaccatgtgttgcaaacgcaagcgcgaacgcaactgccgatttcgaacagctcccggcgaggatccaggacttcctacggtaccgacattgccgacacttcccacttctttgggatgcacccgctaagtgcgccggtgggcgtggagtgttcctcttattgtag

SEQ ID NO: 237032 - DNA, 1158 bp, Artificial Sequence
  derived and/or modified sequence
atggcttttccgtgtagaagaagcctgaccgccaaaacactcgcctgcctactggtgggtgtgagcttcctcgcactgcagcagtggtttctgcaggcacccagatcaccgagagaggaaagatctccccaggaggagacacctgaaggacccacagatgctcctgctgcagatgaaccacctagtgagctggtgccaggtcccccatgcgtggcaaacgcttcagctaatgcgaccgctgattttgagcaactcccggcccgaatccaggactttcttcggtacaggcactgtagacacttccccctgctgtgggacgcccccgcaaagtgtgctggtggtcgcggggtttttttacttctggccgtgaagtccgcacctgagcattacgaacggagagagctgattcgccgcacatggggccaagaaagaagctacggagggagacctgtgaggcggttatttctgctgggaacgcccggaccagaggatgaagctagggcagaaagactagctgaattggtggcactcgaagctcgagaacacggcgacgtgctccagtgggcatttgccgacaccttcttaaatttgacactcaaacacttgcatttgctggattggctcgctgcaaggtgcccacacgctaggtttttacttagcggggatgacgacgtgtttgttcacaccgcaaatgtagtgcgttttttacaggcccagccacccggccgccatctgttttctgggcagttgatggagggcagtgtccctattcgggactcttggtcaaaatatttcgtcccacctcagctttttccaggttccgcataccctgtttattgctcaggcggggggttcttgctatccggacctacagcgcgggctctgcgggctgcggcccggcacactcccctgttccccatagacgatgcctatatgggcatgtgtctgggagcccggcggcctggggcacagaggccaagaggacatccaggaccctccgcgtgcagcctacccggggcgcagcagtcatcattcgacccctgcatgtatagagaattactgttagtacacaggtttgcgccctatgaaatgctcctgatgtggaaggccttacactcccctgcgttatcttgtgatcgtggacacagggtgtcctag

SEQ ID NO: 237033 - DNA, 1155 bp, Artificial Sequence
  derived and/or modified sequence
atggccttcccctgccgccgcagcctgacagccaagaccctggcctgcctgctggtgggcgtgtccttcctggccctgcagcagtggttcctgcaggcccccaggagcccccgggaggagaggagcccccaggaggagaccccagagggccccacagatgccccagctgctgatgagccccccagcgagctggtgcccggccccccctgtgtggccaatgccagcgccaatgccacagctgactttgagcagctgcctgcccgcatccaggacttcctgcgctaccgccactgccgccacttccccctgctgtgggatgccccagccaagtgtgccggcggccggggcgtcttcctgctgctggccgtgaagagcgcccctgagcactatgaaagaagagagctgatccggaggacctggggccaggagaggagctatggaggccggcctgtgcggcggctcttcctgctgggcaccccaggcccagaagatgaggcccgggcagagcggctggccgagctggtggccctggaggcccgggagcacggagatgtgctgcagtgggcctttgctgacaccttcctgaacctgaccctgaagcacctgcacctgctggactggctggccgcccgctgcccccacgcccgcttcctgctgtctggagatgatgatgtgtttgtgcacacagccaacgtggtgcgcttcctgcaggcccagcccccaggccgccacctgttcagcggccagctgatggagggctctgtgcccatccgggacagctggagcaagtactttgtgcccccccagctgtttcctggcagcgcctaccctgtgtactgcagcggcggcggcttcctgctgagcggccccacagcccgggccctgcgggccgccgcccggcacacccccctcttccccattgatgatgcctacatgggcatgtgcctggagagagctggcctggcccccagcggccacgagggcatctggcccttcggcgtgcagctgcccggggcccagcagagcagctttgacccctgcatgtaccgggagctgctgctggtgcacagatttgccccctatgagatgctgctgatgtggaaggccctgcacagccctgccctgagctgtgaccggggccaccgggtgtcctag

SEQ ID NO: 237034 - DNA, 792 bp, Artificial Sequence
  derived and/or modified sequence
atggccttcccctgccgccgcagcctgacagccaagaccctggcctgcctgctggtgggcgtgtccttcctggccctgcagcagaggcggcggcagagggtgccccccaccctgcccaggcctgcccgggcccaccctggcctgcctgctgtgccccaggagaggagctatggaggccggcctgtgagaagactcttcctgctgggcaccccaggcccagaagatgaggcccgggcagagcggctggccgagctggtggccctggaggcccgggagcacggagatgtgctgcagtgggcctttgctgacaccttcctgaacctgaccctgaagcacctgcacctgctggactggctggccgcccgctgcccccacgcccgcttcctgctgtctggagatgatgatgtgtttgtgcacacagccaacgtggtgcgcttcctgcaggcccagcccccaggccgccacctgttcagcggccagctgatggagggctctgtgcccatccgggacagctggagcaagtactttgtgcccccccagctgtttcctggcagcgcctaccctgtgtactgcagcggcggcggcttcctgctgagcggcctggcccccagcggccacgagggcatccccagcgcctgcagcctgcccggggcccagcagagcagctttgacccctgcatgtaccgggagctgctgctggtgcacagatttgccccctatgagatgctgctgatgtggaaggccctgcacagccctgccctgagctgtgaccggggccaccgggtgtcctag

SEQ ID NO: 237035 - DNA, 366 bp, Artificial Sequence
  derived and/or modified sequence
atggccttcccctgccgccgcagcctgacagccaagaccctggcctgcctgctggtgggcgtgtccttcctggccctgcagcagtggttcctgcaggcccccaggagcccccgggaggagaggagcccccaggaggagaccccagagggccccacagatgccccagctgctgatgagccccccagcgagctggtgcccggccccccctgtgtggccaatgccagcgccaatgccacagctgactttgagcagctgcctgcccgcatccaggacttcctgcgctaccgccactgccgccacttccccctgctgtgggatgccccagccaagtgtgccggcggccggggcgtcttcctgctgctgtag

SEQ ID NO: 237036 - DNA, 1158 bp, Artificial Sequence
  derived and/or modified sequence
atggccttcccctgccgccgcagcctgacagccaagaccctggcctgcctgctggtgggcgtgtccttcctggccctgcagcagtggttcctgcaggcccccaggagcccccgggaggagaggagcccccaggaggagaccccagagggccccacagatgccccagctgctgatgagccccccagcgagctggtgcccggccccccctgtgtggccaatgccagcgccaatgccacagctgactttgagcagctgcctgcccgcatccaggacttcctgcgctaccgccactgccgccacttccccctgctgtgggatgccccagccaagtgtgccggcggccggggcgtcttcctgctgctggccgtgaagagcgcccctgagcactatgaaagaagagagctgatccggaggacctggggccaggagaggagctatggaggccggcctgtgcggcggctcttcctgctgggcaccccaggcccagaagatgaggcccgggcagagcggctggccgagctggtggccctggaggcccgggagcacggagatgtgctgcagtgggcctttgctgacaccttcctgaacctgaccctgaagcacctgcacctgctggactggctggccgcccgctgcccccacgcccgcttcctgctgtctggagatgatgatgtgtttgtgcacacagccaacgtggtgcgcttcctgcaggcccagcccccaggccgccacctgttcagcggccagctgatggagggctctgtgcccatccgggacagctggagcaagtactttgtgcccccccagctgtttcctggcagcgcctaccctgtgtactgcagcggcggcggcttcctgctgagcggccccacagcccgggccctgcgggccgccgcccggcacacccccctcttccccattgatgatgcctacatgggcatgtgcctgggcgcccggcggcctggggcccagaggccccggggccaccctggccccagcgcctgcagcctgcccggggcccagcagagcagctttgacccctgcatgtaccgggagctgctgctggtgcacagatttgccccctatgagatgctgctgatgtggaaggccctgcacagccctgccctgagctgtgaccggggccaccgggtgtcctag

SEQ ID NO: 237037 - DNA, 1155 bp, Artificial Sequence
  derived and/or modified sequence
atggccttcccctgccggcggagcctgaccgccaagaccctggcctgccttctggtgggagtgagttttcttgcgctccagcaatggttcctgcaggctcccaggtcccctcgtgaagaaagatccccacaggaagaaacacctgaggggcccacagatgccccagccgccgacgaaccgcccagcgaattggtcccaggcccaccctgcgtagccaacgcttccgccaacgctaccgccgatttcgagcaactgccagcgcggattcaggacttcttgcgctataggcattgccggcacttccccctactgtgggatgcaccggctaaatgcgccggcggccgcggcgtgtttctgttactggcagttaagtccgcacccgaacattacgagcggcgcgagcttatccggcggacgtggggccaagagcggtcgtacggtggtagaccagtccgtaggctgtttctcttgggtactcctgggccagaggacgaagctagagctgagcgactggccgaactggtcgctctcgaggcccgggagcatggggacgtgttgcaatgggcttttgccgatacatttctgaacttgacactcaaacacttgcatctgctcgattggctcgccgcaagatgtccgcacgcccgatttctgttatctggcgacgatgatgtgttcgttcacaccgccaatgtggttcggttcctacaggcacaacctcccggtaggcatctgttcagtggccaactcatggagggatccgtacctatcagagattcatggtctaagtacttcgtgcctccacaattatttcctggtagcgcctatcctgtgtattgcagcgggggcggctttttattgtctgggccaacagccagggcgctgagagctgccgccagacatacaccactgtttcctatcgacgatgcctatatgggcatgtgtctggagcgggccggcctggccccatctggacacgaaggaatctggccatttggtgttcagctgcctggagcccagcagtctagcttcgacccatgtatgtatcgggagctcctgcttgtgcataggtttgccccctatgaaatgctgcttatgtggaaagccctacactcacccgccctgtcctgcgaccggggtcatagagtttcgtag

SEQ ID NO: 237038 - DNA, 792 bp, Artificial Sequence
  derived and/or modified sequence
atggccttcccctgccggcggagcctgaccgccaagaccctggcctgcctgttggtgggcgtctcatttctcgcccttcaacagcggcgacgccagcgtgtcccccctaccctccctaggcctgcccgggcgcacccggggctccctgctgtgcctcaggagcgttcctatggcggtcggccagtccggcgcctgttcctgctcgggacacccggccctgaggacgaggcgcgggctgagcggcttgccgagctggttgccctggaagcgcgggaacacggcgacgtgctgcaatgggcttttgctgatacctttttgaacttaaccctgaagcatctgcatctgctggactggctggccgcccgctgccctcatgccagattcctcctttctggcgatgacgatgtgttcgtgcacaccgccaatgttgtgaggttccttcaggcccagccccctggcaggcacttgttctcaggtcaactgatggagggcagcgtccccattagggattcatggtcgaagtacttcgtcccgccccaattatttcccggctctgcataccccgtgtactgtagcggaggtggatttcttttatcaggcttagctcctagcgggcatgagggcattcccagtgcctgtagtctccctggcgctcagcagtcctccttcgacccgtgcatgtaccgggagttactactcgtgcaccggtttgctccctatgaaatgctgttgatgtggaaagcactgcattcccccgcactgtcctgtgaccgcgggcaccgcgtatcgtag

SEQ ID NO: 237039 - DNA, 366 bp, Artificial Sequence
  derived and/or modified sequence
atggccttcccctgccggcggagcctgaccgccaagaccctggcctgtttgctggtcggggtgtccttccttgcgctgcagcagtggttccttcaagcaccacggtccccccgcgaggagcgtagccctcaagaggagactcctgagggacctacagatgcccccgcagctgatgagccgccatccgaactcgttcccggaccgccctgcgtggctaacgcctccgctaatgctacagccgactttgagcagctccctgcacgcatacaggactttctgcgctatcggcattgtcggcactttccactgctatgggacgctccggcaaagtgtgccggggggagaggagtattcctcctgctgtag

SEQ ID NO: 237040 - DNA, 1158 bp, Artificial Sequence
  derived and/or modified sequence
atggccttcccctgccggcggagcctgaccgccaagaccctggcctgtctcctagtgggagtctctttcttagccctacagcagtggtttctccaagcccctcgtagtcctcgggaggagcggtcgccacaggaggaaactccagagggccctactgatgctccggctgcagacgagcccccctcggagcttgttccgggccctccctgcgtagccaacgcctcggcgaatgcaacagccgacttcgaacagcttcccgctagaatccaggacttcctcaggtaccgtcactgccggcacttcccgttgctctgggatgcccccgctaagtgcgccggaggcaggggagtgttcctgctgctcgccgtaaaaagtgccccggagcattacgaacggcgggagttgataaggagaacttggggccaggaaaggagctatggcgggcgcccggtgagaagactcttcttgctggggacacccggcccagaggatgaggcacgggccgaacgcctggccgaactcgtggcactcgaggcccgcgagcatggcgacgtcttgcaatgggcttttgctgacacgtttctcaatctaacgctgaaacacttacacctgctggactggctcgccgccagatgcccacatgcacggttcctgttgagcggcgacgacgatgtgttcgtgcatacagctaacgtggtgaggtttctacaggcgcagccccccggaagacatctgttttctggacagctgatggagggctctgtccccatcagagattcctggtccaagtatttcgttcctccacaactcttcccgggatctgcctacccagtgtattgctcaggaggcggctttcttctgagtggacctacagctagagcgctccgcgcggcagcgcgacatacaccactcttccctatcgatgacgcgtacatgggtatgtgcttgggtgcgcgccggcccggggcccagaggcctcgcggtcatcctggcccttcagcctgctcgttaccaggcgcacaacagtcctcttttgacccatgcatgtaccgtgagctgctcctcgttcataggttcgcaccctacgagatgctcctgatgtggaaagcgttacacagccccgcactctcttgcgatcgcggtcatcgtgtgtcttag

SEQ ID NO: 237041 - DNA, 1155 bp, Artificial Sequence
  derived and/or modified sequence
atggcgttcccgtgtaggagatccttgactgctaaaaccttggcatgcctgctggtcggcgtgagttttttggccctacagcagtggttcttgcaagcaccccgtagtccccgtgaagagagatccccgcaggaggagactccagagggtcctacagatgcacccgcagccgacgagccacctagtgagctggttcccggaccaccttgtgtggccaatgcctctgccaatgcaaccgcggacttcgagcagctccccgctaggatccaggacttcctaaggtataggcattgcaggcacttcccactgctgtgggacgctccggcaaaatgcgcaggtggtaggggggtcttcctgcttctcgcagtcaagtcagctcctgaacattacgagcggagggagctcatacggaggacctggggccaggagcggagctacggaggtcgccctgtgcggaggctctttctccttggcacaccaggcccagaagacgaggccagagctgaacggcttgcagagcttgtggccctggaagcccgagaacatggtgacgtcctgcagtgggctttcgcagacacatttttaaaccttacacttaaacatctgcatcttctggattggttggcagcgagatgcccccatgccaggtttctcctgtcaggggacgatgatgtctttgtgcataccgctaacgtggtgcggttcttacaggcacagcctcctggacggcacctcttctcaggccaactgatggaaggaagcgtgcccattcgcgattcatggagcaagtacttcgtcccccctcaactatttccaggtagcgcttatcctgtgtactgctcagggggaggttttttgttatcaggccctacggcacgagcactgcgcgcagcggctcgacatactcccttgtttcccattgatgatgcctatatgggcatgtgcctcgaacgggctggattggcaccctcgggccatgagggcatctggccatttggggtccagctcccaggggcacagcagagtagcttcgacccgtgtatgtacagagagctgctgctcgttcacagatttgccccatatgagatgcttctgatgtggaaagcgttgcacagtccagccctgtcatgcgaccgagggcatagagtgtcttag

SEQ ID NO: 237042 - DNA, 792 bp, Artificial Sequence
  derived and/or modified sequence
atggcctttccctgtaggaggtctcttaccgcgaagactctcgcctgccttcttgtgggggtgtcatttcttgctctgcagcaacgcagaaggcaaagagtgccgccaaccctgcctcgccctgcccgagcccaccctggcctgcccgcagtcccccaggagcgtagttatggtgggagacctgtacggagactgttcctgcttggcacaccagggcctgaggacgaggcccgtgctgaacgactggccgaacttgtagccttggaagcgagggaacacggcgatgtgctgcagtgggcctttgcggacacttttctgaacttgacactgaagcacctgcacctgctcgattggctggccgctcgatgcccccatgctagatttttactgagcggcgacgacgatgtgttcgtacatacagccaatgtggtgcgatttctgcaggcccaacctccaggcagacacctgttctcaggccagctcatggaggggtctgtgcctattcgggattcttggtctaagtatttcgtcccaccccagcttttcccgggtagtgcttacccggtctattgttccgggggaggctttctcctctctgggcttgccccttctggccacgagggcataccgagtgcctgctctctgcctggcgcacagcagtcgagtttcgatccttgcatgtatagggagctcctgctggtgcatcgatttgcaccatatgaaatgctcctgatgtggaaggctcttcacagtccagctctttcttgcgatagaggccatcgagtgtcctag

SEQ ID NO: 237043 - DNA, 366 bp, Artificial Sequence
  derived and/or modified sequence
atggcatttccctgccgcaggtcactgactgccaagacactggcctgccttttggtgggagtgtcattcctggccctgcagcagtggttcctacaggcaccgaggtctcctcgagaggaaagatcacctcaagaggaaactcctgagggacccaccgatgcccctgcagccgacgagcccccaagcgagctggtccctggccctccttgtgtggccaacgcctccgctaacgccacagctgatttcgagcaattgcccgctcggattcaggactttctgcgttaccgacactgccgccatttcccccttctgtgggatgcccctgcaaaatgcgccggagggaggggtgtgttcctgttgctgtag

SEQ ID NO: 237044 - DNA, 1158 bp, Artificial Sequence
  derived and/or modified sequence
atggctttcccctgtcggaggagcttgactgccaagaccctcgcatgtttgctggtgggtgtgtcatttctggcacttcagcagtggttcctgcaggcccctaggtctccacgggaggaacgcagccctcaggaagagacacctgagggacctaccgatgccccagctgcagatgaacccccaagcgagttggtgcctggacctccatgtgttgcaaacgcctctgctaatgccacggccgactttgaacagctgcctgcccgaattcaggactttttgagataccggcactgcaggcacttcccccttctgtgggacgcacctgctaaatgcgcgggtggccgaggagtgttcctgctgctagccgtgaagtcagcacccgagcactacgaacgcagggagctcattaggcgcacttgggggcaagaaagaagctatggtggaagacctgtgaggcggctttttctcctgggcacaccagggccagaggacgaggctcgggcagaacgcctggccgagctggtcgcactagaggctcgcgaacacggtgacgtcctccagtgggcatttgcagacacttttctcaatctcacactgaagcacctccatctgttagactggctggctgcacgctgcccgcacgctcgattcctgttgagcggcgatgacgatgtgttcgtacacaccgccaacgtggtacgattcctgcaagcccaacctccaggcagacatctcttctccggacaacttatggaaggtagcgtgccaatcagagactcctggtccaagtattttgtaccgcctcagcttttcccgggttcggcctatcctgtctactgcagcggcggaggctttctgcttagcggacctaccgcccgagctctgcgggcagctgcaaggcatactcctctgttccccatcgatgacgcgtatatgggcatgtgcctgggagcccgtcgacctggcgctcaacgaccaagaggccatcctggtccttcagcctgttcattgcctggagcccagcagagtagctttgatccatgtatgtatagagaactcctgcttgtacacagatttgccccatatgagatgctcctgatgtggaaggccctccatagcccagcattatcttgcgatcggggtcatagggtttcctag

SEQ ID NO: 237045 - DNA, 2493 bp, Artificial Sequence
  derived and/or modified sequence
gaacctcagtgtgtgaagtaaagggattaaaggctagtctcaggctggggatggctcctgtctatttcttctctctcagagactgcagatggcttttccctgccgcaggtccctgactgccaagactctggcctgcctcctggtgggcgtgagtttcttagcactgcagcagtggttcctccaggcgccaaggtccccgcgggaggagaggtccccgcaggaggagacgccagagggtcccaccgacgctcccgcggctgacgagccgccctcggagctcgtccccgggcccccgtgcgtggcgaacgcctcggcgaacgccacggccgacttcgagcagctgcccgcgcgcatccaggacttcctgcggtaccgccactgccgccacttcccgctgctttgggacgcaccggccaagtgcgccggcggccgaggcgtgttcctgctcctggcggtgaagtcggcgcctgagcactacgagcgacgcgagctcatccggcgcacgtgggggcaagagcgcagctacggcgggcggccagtgcgccgcctctttctattgggcaccccgggccccgaggacgaggcgcgcgcggagcggctggcggagctggtggcgctggaggcgcgcgagcacggcgacgtgctgcagtgggccttcgcggacaccttcctcaacctcacgctcaagcacctgcacttgctcgactggctggctgcacgctgcccgcacgcgcgctttctgctcagcggcgacgacgacgtgttcgtgcacaccgccaacgtagtccgcttcctgcaggcgcagccacccggccgccacctgttctccggccagctcatggagggctccgtgcccatccgcgacagctggagcaagtacttcgtgccgccgcagctcttccccgggtccgcttacccggtgtactgcagcggcggcggcttcctcctgtccggccccacggcccgggccctgcgcgcggccgcccgccacaccccgctcttccccatcgacgacgcctacatgggcatgtgtttggagcgcgccggcctggcgcccagcggccacgagggcatctggcccttcggcgtgcagttgcctggcgcacagcagtcctccttcgacccctgcatgtaccgcgagttgctgctagtgcaccgcttcgcgccctacgagatgctgctcatgtggaaggcgctgcacagccccgcgctcagctgtgaccggggacaccgggtctcctgaggccagttgggcggcttcagccccgggcctccaaccatgtccatgctgagaaggcagctttcccgctctgggtaccttacgtcctgcccagctctgtgcacctgaaccccagctgcgcactgaaatcagctggggtggggggtgtggaaaatgcctacatcctggctccatctcccgaagtttcgatttgattagtctggggtggacccagacatgttaagtattttttaagttcctccagtgatgcgaatgtgcagctaggcctgaggaccactcggctagactatctcttcatcctcgcaaagccagctccaccgccctctctgcaagaattccgggcccctcgctcccacactcgggtcctcttgagcagtggagcaagggagacctgggagcgtgggagccaggatcagcgccccctgccatgtgcctacaaatgtcagttgtgatttccactgtttacaagtgagtggagctggagctgggctgacagtatcaggtggatcccgcttccccctcccccaagaagtcagccaacacgcagctgaggcgcatgtggtggccttcttcccaccactaccccagtacaccgtgaggtagaaatcttcaccgtgcaaagtggaaaccagaggcccggtcagacagtgactaatccagggccgtggcattcccagacagcacaccactgtggtcccctccacactcaccccaaccaaagctaatggcctagttgggtcctgcccgccaataatcacccccacgggtcagagacaggctccttgccggggtctgggcctcaggctcagtgggccttggacaacccagcagggagttccggggagtccgaagtggagaaaggctggtgggaacatggaggccagtgttggggagcctgtggaggcaggtgtgtagaattgtgttcgggaggtgggggatctgagaccgaagtggacagtggttaagattgtggggccgggcgaggtggctcacgcctgtaatcccagcactttgggaggctgaggaggtcggatcatgaggtcaagagttcgagaccagcctggccaatatggtgaaaccccgtctctattgggagtacaaaaattagccggccatagtggctcgtgcctgtaatctcagctatttgggaggctgaggcaggagaatcacttgaacctgggaggcggaggttgcagtgagccgagatcgtgccactgcactccagcctgggcgacagagcaagactgcatctc

SEQ ID NO: 237046 - DNA, 792 bp, Artificial Sequence
  derived and/or modified sequence
atggcttttccctgccgcaggtccctgactgccaagactctggcctgcctcctggtgggcgtgagtttcttagcactgcagcagaggagacgccagagggtcccaccgacgctcccgcggcctgcccgcgcgcatccaggacttcctgcggtaccgcaagagcgcagctacggcgggcggccagtgcgccgcctctttctattgggcaccccgggccccgaggacgaggcgcgcgcggagcggctggcggagctggtggcgctggaggcgcgcgagcacggcgacgtgctgcagtgggccttcgcggacaccttcctcaacctcacgctcaagcacctgcacttgctcgactggctggctgcacgctgcccgcacgcgcgctttctgctcagcggcgacgacgacgtgttcgtgcacaccgccaacgtagtccgcttcctgcaggcgcagccacccggccgccacctgttctccggccagctcatggagggctccgtgcccatccgcgacagctggagcaagtacttcgtgccgccgcagctcttccccgggtccgcttacccggtgtactgcagcggcggcggcttcctcctgtccggcctggcgcccagcggccacgagggcatcccttcggcgtgcagcttgcctggcgcacagcagtcctccttcgacccctgcatgtaccgcgagttgctgctagtgcaccgcttcgcgccctacgagatgctgctcatgtggaaggcgctgcacagccccgcgctcagctgtgaccggggacaccgggtctcctga

SEQ ID NO: 237047 - DNA, 568 bp, Artificial Sequence
  derived and/or modified sequence
agtgtgtgaagtaaagggattaaaggctagtctcaggctggggatggctcctgtctatttcttctctctcagagactgcagctgcgggaggggagaggtcggccgagagcaagatggtgtgtagagacaccaagcaggacgctacttcatgtgaggcgggaatgttagtttggatcaacctgttgatagagggaatgaaagcagatggcttttccctgccgcaggtccctgactgccaagactctggcctgcctcctggtgggcgtgagtttcttagcactgcagcagtggttcctccaggcgccaaggtccccgcgggaggagaggtccccgcaggaggagacgccagagggtcccaccgacgctcccgcggctgacgagccgccctcggagctcgtccccgggcccccgtgcgtggcgaacgcctcggcgaacgccacggccgacttcgagcagctgcccgcgcgcatccaggacttcctgcggtaccgccactgccgccacttcccgctgctttgggacgcaccggccaagtgcgccggcggccgaggcgtgttcctgctcctgg

SEQ ID NO: 237048 - DNA, 2639 bp, Artificial Sequence
  derived and/or modified sequence
gatgtcatggattggtcagattcaagagaactgaaccacaggcctgcgtggaacctcagtgtgtgaagtaaagggattaaaggctagtctcaggctggggatggctcctgtctatttcttctctctcagagactgcagatggcttttccctgccgcaggtccctgactgccaagactctggcctgcctcctggtgggcgtgagtttcttagcactgcagcagtggttcctccaggcgccaaggtccccgcgggaggagaggtccccgcaggaggagacgccagagggtcccaccgacgctcccgcggctgacgagccgccctcggagctcgtccccgggcccccgtgcgtggcgaacgcctcggcgaacgccacggccgacttcgagcagctgcccgcgcgcatccaggacttcctgcggtaccgccactgccgccacttcccgctgctttgggacgcaccggccaagtgcgccggcggccgaggcgtgttcctgctcctggcggtgaagtcggcgcctgagcactacgagcgacgcgagctcatccggcgcacgtgggggcaagagcgcagctacggcgggcggccagtgcgccgcctctttctattgggcaccccgggccccgaggacgaggcgcgcgcggagcggctggcggagctggtggcgctggaggcgcgcgagcacggcgacgtgctgcagtgggccttcgcggacaccttcctcaacctcacgctcaagcacctgcacttgctcgactggctggctgcacgctgcccgcacgcgcgctttctgctcagcggcgacgacgacgtgttcgtgcacaccgccaacgtagtccgcttcctgcaggcgcagccacccggccgccacctgttctccggccagctcatggagggctccgtgcccatccgcgacagctggagcaagtacttcgtgccgccgcagctcttccccgggtccgcttacccggtgtactgcagcggcggcggcttcctcctgtccggccccacggcccgggccctgcgcgcggccgcccgccacaccccgctcttccccatcgacgacgcctacatgggcatgtgtcttggagcgcgccggcctggcgcccagcggccacgagggcatcctggcccttcggcgtgcagcttgcctggcgcacagcagtcctccttcgacccctgcatgtaccgcgagttgctgctagtgcaccgcttcgcgccctacgagatgctgctcatgtggaaggcgctgcacagccccgcgctcagctgtgaccggggacaccgggtctcctgaggccagttgggcggcttcagccccgggcctccaaccatgtccatgctgagaaggcagctttcccgctctgggtaccttacgtcctgcccagctctgtgcacctgaaccccagctgcgcactgaaatcagctggggtggggggtgtggaaaatgcctacatcctggctccatctcccgaagtttcgatttgattagtctggggtggacccagacatgttaagtattttttaagttcctccagtgatgcgaatgtgcagctaggcctgaggaccactcggctagactatctcttcatcctcgcaaagccagctccaccgccctctctgcaagaattccgggcccctcgctcccacactcgggtcctcttgagcagtggagcaagggagacctgggagcgtgggagccaggatcagcgccccctgccatgtgcctacaaatgtcagttgtgatttccactgtttacaagtgagtggagctggagctgggctgacagtatcaggtggatcccgcttccccctcccccaagaagtcagccaacacgcagctgaggcgcatgtggtggccttcttcccaccactaccccagtacaccgtgaggtagaaatcttcaccgtgcaaagtggaaaccagaggcccggtcagacagtgactaatccagggccgtggcattcccagacagcacaccactgtggtcccctccacactcaccccaaccaaagctaatggcctagttgggtcctgcccgccaataatcacccccacgggtcagagacaggctccttgccggggtctgggcctcaggctcagtgggccttggacaacccagcagggagttccggggagtccgaagtggagaaaggctggtgggaacatggaggccagtgttggggagcctgtggaggcaggtgtgtagaattgtgttcgggaggtgggggatctgagaccgaagtggacagtggttaagattgtggggccgggcgaggtggctcacgcctgtaatcccagcactttgggaggctgaggaggtcggatcatgaggtcaagagttcgagaccagcctggccaatatggtgaaaccccgtctctattgggagtacaaaaattagccggccatagtggctcgtgcctgtaatctcagctatttgggaggctgaggcaggagaatcacttgaacctgggaggcggaggttgcagtgagccgagatcgtgccactgcactccagcctgggcgacagagcaagactgcatctcaaaaaaaaaaaaaaaaaggagagtttgcaagggtgggtgggaacttggtgcctggggctctgagaaccaggctgtggtcctgacctccagcag

SEQ ID NO: 237049 - DNA, 114 bp, Artificial Sequence
  derived and/or modified sequence
atgatggtgcggtgggccctgctgtgcggcgagtgccggatcctgggaaggcactgccagggtatactgctggaggattccatgccttggcccatcccctcggtacagctctag

SEQ ID NO: 237050 - protein, 1549 aa, Artificial Sequence
  derived and/or modified sequence
MPSDFISLLSADLDLESPKSLYSRDSLKLHPSQNFHRAGLLEESVYDLLPKELQLPPSRETSVASMSQTSGGEAGSPPPAVVAADASSAPSSSSMGGACSSFTTSSSPTIYSTSVTDSKAMQVESCSSAVGVSNRGVSEKQLTSNTVQQHPSTPKRHTVLYISPPPEDLLDNSRMSCQDEGCGLESEQSCSMWMEDSPSNFSNMSTSSYNDNTEVPRKSRKRNPKQRPGVKRRDCEESNMDIFDADSAKAPHYVLSQLTTDNKGNSKAGNGTLENQKGTGVKKSPMLCGQYPVKSEGKELKIVVQPETQHRARYLTEGSRGSVKDRTQQGFPTVKLEGHNEPVVLQVFVGNDSGRVKPHGFYQACRVTGRNTTPCKEVDIEGTTVIEVGLDPSNNMTLAVDCVGILKLRNADVEARIGIAGSKKKSTRARLVFRVNIMRKDGSTLTLQTPSSPILCTQPAGVPEILKKSLHSCSVKGEEEVFLIGKNFLKGTKVIFQENVSDENSWKSEAEIDMELFHQNHLIVKVPPYHDQHITLPVSVGIYVVTNAGRSHDVQPFTYTPDPAAAGALNVNVKKEISSPARPCSFEEAMKAMKTTGCNLDKVNIIPNALMTPLIPSSMIKSEDVTPMEVTAEKRSSTIFKTTKSVGSTQQTLENISNIAGNGSFSSPSSSHLPSENEKQQQIQPKAYNPETLTTIQTQDISQPGTFPAVSASSQLPNSDALLQQATQFQTRETQSREILQSDGTVVNLSQLTEASQQQQQSPLQEQAQTLQQQISSNIFPSPNSVSQLQNTIQQLQAGSFTGSTASGSSGSVDLVQQVLEAQQQLSSVLFSAPDGNENVQEQLSADIFQQVSQIQSGVSPGMFSSTEPTVHTRPDNLLPGRAESVHPQSENTLSNQQQQQQQQQQVMESSAAMVMEMQQSICQAAAQIQSELFPSTASANGNLQQSPVYQQTSHMMSALSTNEDMQMQCELFSSPPAVSGNETSTTTTQQVATPGTTMFQTSSSGDGEETGTQAKQIQNSVFQTMVQMQHSGDNQPQVNLFSSTKSMMSVQNSGTQQQGNGLFQQGNEMMSLQSGNFLQQSSHSQAQLFHPQNPIADAQNLSQETQGSLFHSPNPIVHSQTSTTSSEQMQPPMFHSQSTIAVLQGSSVPQDQQSTNIFLSQSPMNNLQTNTVAQEAFFAAPNSISPLQSTSNSEQQAAFQQQAPISHIQTPMLSQEQAQPPQQGLFQPQVALGSLPPNPMPQSQQGTMFQSQHSIVAMQSNSPSQEQQQQQQQQQQQQQQQQQSILFSNQNTMATMASPKQPPPNMIFNPNQNPMANQEQQNQSIFHQQSNMAPMNQEQQPMQFQSQSTVSSLQNPGPTQSESSQTPLFHSSPQIQLVQGSPSSQEQQVTLFLSPASMSALQTSINQQDMQQSPLYSPQNNMPGIQGATSSPQPQATLFHNTAGGTMNQLQNSPGSSQQTSGMFLFGIQNNCSQLLTSGPATLPDQLMAISQPGQPQNEGQPPVTTLLSQQMPENSPLASSINTNQNIEKIDLLVSLQNQGNNLTGSF

SEQ ID NO: 237051 - DNA, 4650 bp, Artificial Sequence
  derived and/or modified sequence
atgcccagcgacttcatcagcctgctgagcgccgacctggacctggagagccccaagagcctgtacagcagagacagcctgaagctgcaccccagccagaacttccacagagccggcctgctggaggagagcgtgtacgacctgctgcccaaggagctgcagctgccccccagcagagagaccagcgtggccagcatgagccagaccagcggcggcgaggccggcagccccccccccgccgtggtggccgccgacgccagcagcgcccccagcagcagcagcatgggcggcgcctgcagcagcttcaccaccagcagcagccccaccatctacagcaccagcgtgaccgacagcaaggccatgcaggtggagagctgcagcagcgccgtgggcgtgagcaacagaggcgtgagcgagaagcagctgaccagcaacaccgtgcagcagcaccccagcacccccaagagacacaccgtgctgtacatcagccccccccccgaggacctgctggacaacagcagaatgagctgccaggacgagggctgcggcctggagagcgagcagagctgcagcatgtggatggaggacagccccagcaacttcagcaacatgagcaccagcagctacaacgacaacaccgaggtgcccagaaagagcagaaagagaaaccccaagcagagacccggcgtgaagagaagagactgcgaggagagcaacatggacatcttcgacgccgacagcgccaaggccccccactacgtgctgagccagctgaccaccgacaacaagggcaacagcaaggccggcaacggcaccctggagaaccagaagggcaccggcgtgaagaagagccccatgctgtgcggccagtaccccgtgaagagcgagggcaaggagctgaagatcgtggtgcagcccgagacccagcacagagccagatacctgaccgagggcagcagaggcagcgtgaaggacagaacccagcagggcttccccaccgtgaagctggagggccacaacgagcccgtggtgctgcaggtgttcgtgggcaacgacagcggcagagtgaagccccacggcttctaccaggcctgcagagtgaccggcagaaacaccaccccctgcaaggaggtggacatcgagggcaccaccgtgatcgaggtgggcctggaccccagcaacaacatgaccctggccgtggactgcgtgggcatcctgaagctgagaaacgccgacgtggaggccagaatcggcatcgccggcagcaagaagaagagcaccagagccagactggtgttcagagtgaacatcatgagaaaggacggcagcaccctgaccctgcagacccccagcagccccatcctgtgcacccagcccgccggcgtgcccgagatcctgaagaagagcctgcacagctgcagcgtgaagggcgaggaggaggtgttcctgatcggcaagaacttcctgaagggcaccaaggtgatcttccaggagaacgtgagcgacgagaacagctggaagagcgaggccgagatcgacatggagctgttccaccagaaccacctgatcgtgaaggtgcccccctaccacgaccagcacatcaccctgcccgtgagcgtgggcatctacgtggtgaccaacgccggcagaagccacgacgtgcagcccttcacctacacccccgaccccgccgccgccggcgccctgaacgtgaacgtgaagaaggagatcagcagccccgccagaccctgcagcttcgaggaggccatgaaggccatgaagaccaccggctgcaacctggacaaggtgaacatcatccccaacgccctgatgacccccctgatccccagcagcatgatcaagagcgaggacgtgacccccatggaggtgaccgccgagaagagaagcagcaccatcttcaagaccaccaagagcgtgggcagcacccagcagaccctggagaacatcagcaacatcgccggcaacggcagcttcagcagccccagcagcagccacctgcccagcgagaacgagaagcagcagcagatccagcccaaggcctacaaccccgagaccctgaccaccatccagacccaggacatcagccagcccggcaccttccccgccgtgagcgccagcagccagctgcccaacagcgacgccctgctgcagcaggccacccagttccagaccagagagacccagagcagagagatcctgcagagcgacggcaccgtggtgaacctgagccagctgaccgaggccagccagcagcagcagcagagccccctgcaggagcaggcccagaccctgcagcagcagatcagcagcaacatcttccccagccccaacagcgtgagccagctgcagaacaccatccagcagctgcaggccggcagcttcaccggcagcaccgccagcggcagcagcggcagcgtggacctggtgcagcaggtgctggaggcccagcagcagctgagcagcgtgctgttcagcgcccccgacggcaacgagaacgtgcaggagcagctgagcgccgacatcttccagcaggtgagccagatccagagcggcgtgagccccggcatgttcagcagcaccgagcccaccgtgcacaccagacccgacaacctgctgcccggcagagccgagagcgtgcacccccagagcgagaacaccctgagcaaccagcagcagcagcagcagcagcagcagcaggtgatggagagcagcgccgccatggtgatggagatgcagcagagcatctgccaggccgccgcccagatccagagcgagctgttccccagcaccgccagcgccaacggcaacctgcagcagagccccgtgtaccagcagaccagccacatgatgagcgccctgagcaccaacgaggacatgcagatgcagtgcgagctgttcagcagcccccccgccgtgagcggcaacgagaccagcaccaccaccacccagcaggtggccacccccggcaccaccatgttccagaccagcagcagcggcgacggcgaggagaccggcacccaggccaagcagatccagaacagcgtgttccagaccatggtgcagatgcagcacagcggcgacaaccagccccaggtgaacctgttcagcagcaccaagagcatgatgagcgtgcagaacagcggcacccagcagcagggcaacggcctgttccagcagggcaacgagatgatgagcctgcagagcggcaacttcctgcagcagagcagccacagccaggcccagctgttccacccccagaaccccatcgccgacgcccagaacctgagccaggagacccagggcagcctgttccacagccccaaccccatcgtgcacagccagaccagcaccaccagcagcgagcagatgcagccccccatgttccacagccagagcaccatcgccgtgctgcagggcagcagcgtgccccaggaccagcagagcaccaacatcttcctgagccagagccccatgaacaacctgcagaccaacaccgtggcccaggaggccttcttcgccgcccccaacagcatcagccccctgcagagcaccagcaacagcgagcagcaggccgccttccagcagcaggcccccatcagccacatccagacccccatgctgagccaggagcaggcccagcccccccagcagggcctgttccagccccaggtggccctgggcagcctgccccccaaccccatgccccagagccagcagggcaccatgttccagagccagcacagcatcgtggccatgcagagcaacagccccagccaggagcagcagcagcagcagcagcagcagcagcagcagcagcagcagcagcagcagagcatcctgttcagcaaccagaacaccatggccaccatggccagccccaagcagcccccccccaacatgatcttcaaccccaaccagaaccccatggccaaccaggagcagcagaaccagagcatcttccaccagcagagcaacatggcccccatgaaccaggagcagcagcccatgcagttccagagccagagcaccgtgagcagcctgcagaaccccggccccacccagagcgagagcagccagacccccctgttccacagcagcccccagatccagctggtgcagggcagccccagcagccaggagcagcaggtgaccctgttcctgagccccgccagcatgagcgccctgcagaccagcatcaaccagcaggacatgcagcagagccccctgtacagcccccagaacaacatgcccggcatccagggcgccaccagcagcccccagccccaggccaccctgttccacaacaccgccggcggcaccatgaaccagctgcagaacagccccggcagcagccagcagaccagcggcatgttcctgttcggcatccagaacaactgcagccagctgctgaccagcggccccgccaccctgcccgaccagctgatggccatcagccagcccggccagccccagaacgagggccagccccccgtgaccaccctgctgagccagcagatgcccgagaacagccccctggccagcagcatcaacaccaaccagaacatcgagaagatcgacctgctggtgagcctgcagaaccagggcaacaacctgaccggcagcttctag

SEQ ID NO: 237052 - DNA, 4650 bp, Artificial Sequence
  derived and/or modified sequence
atgccttcagatttcatttctctactcagcgcagacctcgatctggagagcccaaaatcactctattctagagactcattgaagcttcacccttctcagaactttcaccgcgccggccttttagaggagtcagtctacgatctgctgcccaaagagctgcagttgcccccatcaagggagacatctgtggctagcatgagccaaactagcgggggggaggccggctctcccccgcctgcagtcgttgccgccgatgcatcgtcagcgccttccagctcatccatgggcggcgcttgctcgtcatttacgacatcttctagccccacaatatattcgactagcgtcaccgactcaaaagctatgcaggtcgagagttgttcaagcgcggtgggggtgtccaatcggggtgtgtccgagaagcagctgaccagcaacaccgtccagcagcaccctagtactccgaagcggcacactgttctttacattagtcctccccctgaggatctgttggacaattcaaggatgagctgtcaggatgaaggctgcggcttggagagcgaacagtcttgcagcatgtggatggaggactcccccagtaacttttctaacatgtcaacgtctagctataatgataataccgaagtccctagaaaaagtagaaagcgcaatccgaagcagcgccccggtgtgaaaaggcgagattgtgaggagtctaacatggatatcttcgatgctgattcggcgaaagcgccccactatgtgctatcccagctgacaacagacaacaaggggaattccaaggccgggaatggcacgttggaaaaccagaaaggcacaggggtcaagaagtcaccaatgctgtgtggccagtaccccgtgaaatcagaaggaaaagaactgaaaatcgtggtgcagcccgagacacaacatagagcgcggtatctcactgaggggtcaaggggatctgtcaaggatcgtacacagcagggatttccaactgtcaagctggagggccacaacgaaccagtggtactacaagtctttgtgggaaatgacagtggccgagtaaagccccacgggttctaccaggcatgccgcgtaactggacgtaacactacaccgtgcaaagaagtggatatagagggtacaacggtcatagaagttggacttgacccttctaacaacatgacactggcagtggactgtgttggaatcctgaagttgaggaatgccgacgtggaagccaggatagggattgccggctccaagaagaagagtacaagagcgcgattggtgttccgagtgaacattatgcgcaaggacggttccacactgacgctccaaacgcccagctccccaatcctgtgcacccagcctgccggcgtgcccgagatcctgaaaaagagtcttcattcctgtagtgtgaagggtgaggaggaagtctttctaatcggtaaaaatttcctcaaaggcactaaagtcatattccaggagaatgtttctgacgagaattcatggaagtcagaggcagagatcgatatggagctgtttcatcagaatcatcttatagttaaagttcccccatatcacgaccaacatatcacccttcccgtctcagtcggcatttatgtagtgacgaacgccggacgttcccacgacgtgcaacctttcacttataccccagacccagcagccgctggagcactaaatgtcaatgtgaaaaaggagatatctagtccagccaggccctgttcctttgaagaagccatgaaggccatgaagacaaccggttgcaacctcgacaaggtgaatatcattcccaacgcactgatgacacccttgatcccttcaagcatgatcaagagcgaggatgtgacacccatggaagtcacagcagagaaacgaagcagtaccatatttaaaaccaccaaaagcgtgggctctacacagcaaacgctagagaatatttctaatatcgctggcaatggctctttttcgagcccctctagttctcatctgccgagcgaaaacgagaagcagcagcagatccagcctaaggcctataatcccgaaacgttgacaactatccagacacaggacatctctcagccggggacgtttcccgcagtgtctgcctcgtctcagctccctaacagcgacgccctcctccagcaagcgactcagttccagacgcgtgagacccagagccgtgaaatcctgcagagcgacggcaccgtcgttaacttgagccaactaaccgaggctagccagcagcagcaacagtccccattgcaggagcaggcacagacgttgcagcagcagatttcatctaacatctttccttcacccaatagtgtgtcgcagctgcagaatactattcaacagcttcaggccggctctttcacaggatccacagccagcggctctagtggaagtgtggacttagttcagcaggtgttagaggcacagcagcagctgagctctgtcctcttttcagcacctgatggcaatgagaacgtccaagaacagctgagtgcagacatcttccaacaagtgtctcaaatccaatcaggagtgtctccggggatgttctccagcaccgagccaacagtgcatacgagaccagacaacctcctgcctgggcgagccgagtctgtgcatccacaaagcgagaacacactgagcaaccaacagcagcagcaacagcagcagcagcaggtaatggagagtagcgctgcaatggtgatggaaatgcagcagagcatctgccaagcagctgcccagattcagagtgaactgtttcctagcacagcctcagccaatgggaacctgcagcagagcccagtttatcagcagacaagccacatgatgagtgccctgtctacaaacgaagacatgcaaatgcagtgtgagctgttcagttcgccacccgccgtgtccgggaacgagacttctaccacaacaactcagcaagtggccacccccggtacgacgatgttccagaccagttcctctggagatggtgaagagaccggtactcaagctaaacagattcaaaactcagtgtttcagaccatggtgcagatgcaacactcaggagataaccaaccccaggtcaaccttttctctagcacgaaatccatgatgtctgtgcagaactctggcactcagcagcagggtaatggtctgttccagcagggcaatgagatgatgtctttacagagcggaaactttctgcagcaatcgtcccactcacaggcccagcttttccaccctcagaaccccattgctgatgcccagaatctgtcacaggaaacacaggggagtctgttccacagtccaaatcccattgtccacagtcaaaccagcacaacatccagcgaacagatgcagccgccaatgttccattctcaaagtaccatagcagtgctccaggggtcaagcgtccctcaagaccaacagagcaccaatattttcctctcccagtctcctatgaataatctgcagacgaacacagtcgcccaggaagcttttttcgccgcacctaacagtatatccccgctgcagagcacctctaatagcgagcagcaggctgctttccagcagcaagcacccatcagccacatccagactcccatgctttcacaggaacaggcccagcctccgcaacagggcttgttccagcctcaggtcgccctgggcagtctcccacccaaccctatgcctcagtctcagcaggggacaatgtttcagtcccagcattccatcgtagctatgcagtctaatagcccttcgcaggagcagcagcagcaacagcagcagcaacagcagcagcagcagcagcaacagcagtcaattctgtttagcaaccagaataccatggcaactatggctagtccgaagcagccccccccaaatatgatcttcaatcctaaccaaaaccccatggctaatcaggagcagcagaaccagtcaatcttccaccaacaatctaacatggcgcctatgaatcaagagcagcagcctatgcagtttcaatcacagagtacagtgtcctccctgcagaacccagggcctactcagtctgaaagcagtcagacaccactttttcacagctctcctcagatccagctcgttcagggctcacctagctcacaggaacagcaggtgacgttattcctgagccccgcatcgatgtccgcactccagacctccattaatcaacaggatatgcaacagtctccattgtactcacctcaaaacaacatgcctggtattcagggcgccacctcttcgcctcagcctcaggcgaccctcttccacaacaccgctggtggaacaatgaaccagcttcagaattcccctggctcatctcaacagacgagcggaatgttcctctttggcatccagaacaattgttctcaactactcaccagcggccctgcaaccctgcccgaccaattgatggccatctcccagccggggcagcctcagaacgagggccagccaccggtcaccaccctcctcagccagcagatgccggagaacagtcccttggcctctagcataaataccaaccaaaatatcgagaagattgatctactggtctcactgcagaatcaaggaaataacctgacgggctcattctag

SEQ ID NO: 237053 - DNA, 4650 bp, Artificial Sequence
  derived and/or modified sequence
atgcccagcgacttcatcagcctgctgtctgctgacctggacctggagagccccaagagcctgtacagccgggacagcctgaagctgcaccccagccagaacttccaccgggccggcctgctggaggagagcgtgtatgacctgctgcccaaggagctgcagctgccccccagccgggagacctctgtggcctccatgagccagaccagcggcggggaggccggcagccccccacctgctgtggtggccgcagatgccagcagcgcccccagcagcagctccatgggcggggcctgcagcagcttcaccaccagcagcagccccaccatctacagcacctctgtgacagacagcaaggccatgcaggtggagagctgcagcagcgctgtgggcgtgagcaacagaggagtgtctgagaagcagctgaccagcaacacagtgcagcagcaccccagcacccccaagaggcacacagtgctgtacatcagccccccacctgaggacctgctggacaacagcaggatgagctgccaggatgagggctgcggcctggagagcgagcagagctgcagcatgtggatggaggacagccccagcaacttcagcaacatgagcaccagcagctacaatgacaacacagaggtgcccaggaagagcaggaagaggaaccccaagcagaggcctggggtgaagaggcgggactgtgaggagagcaacatggacatctttgatgctgacagcgccaaggccccccactacgtgctgagccagctgaccacagacaacaagggcaacagcaaggctggaaatggcaccctggagaaccagaagggcactggagtgaagaagagccccatgctgtgtggccagtaccctgtgaagtctgagggcaaggagctgaagatcgtggtgcagcctgagacccagcaccgggcccgctacctgacagagggcagccggggctctgtgaaggacaggacccagcagggcttccccaccgtgaagctggagggccacaatgaacctgtggtgctgcaggtgtttgtgggcaatgattctggccgggtgaagccccacggcttctaccaggcctgccgggtgacaggcaggaacaccaccccctgcaaggaggtggacatcgagggcaccaccgtcatcgaggtgggcctggaccccagcaacaacatgaccctggccgtggactgtgtgggcatcctgaagctgagaaatgctgatgtggaggccagaattggaattgctggcagcaagaagaagagcacccgggcccggctggtgttccgggtgaacatcatgaggaaggatggcagcaccctgaccctgcagacccccagcagccccatcctgtgcacccagcctgctggggtgcctgagatcctgaagaagagcctgcacagctgcagcgtgaagggggaggaggaggtgttcctgattggcaagaacttcctgaagggcaccaaggtgatcttccaggagaatgtgtctgatgaaaattcctggaagtctgaggccgagattgacatggagctgttccaccagaaccacctgattgtgaaggtgcccccctaccatgaccagcacatcaccctgcctgtgtctgtgggcatctacgtggtgaccaatgccggccgcagccatgatgtgcagcccttcacctacaccccagaccctgctgctgctggggccctgaatgtgaatgtgaagaaggagatcagcagccctgcccggccctgcagctttgaggaggccatgaaggccatgaagaccaccggctgcaacctggacaaggtgaacatcatccccaatgccctgatgacccccctcatccccagctccatgatcaagtcagaagatgtgacccccatggaggtgacagctgagaagaggagcagcaccatcttcaagaccaccaagtctgtgggcagcacccagcagaccctggagaacatcagcaacattgctggaaatggcagcttcagcagccccagcagcagccacctgcccagtgaaaatgagaagcagcagcagatccagcccaaggcctacaaccctgagaccctgaccaccatccagacccaggacatcagccagcccggcaccttccctgctgtgtctgccagcagccagctgcccaacagtgatgccctgctgcagcaggccacccagttccagacccgggagacccagagccgggagatcctgcagagtgatggcaccgtggtgaacctgagccagctgacagaggccagccagcagcagcagcagagccccctgcaggagcaggcccagaccctgcagcagcagatcagcagcaacatcttccccagccccaacagcgtgtcccagctgcagaacaccatccagcagctgcaggccggcagcttcaccggcagcacagccagcggcagcagcggctctgtggacctggtgcagcaggtgctggaggcccagcagcagctgagctctgtgctcttcagcgccccagatggaaatgaaaatgtgcaggagcagctgtctgctgacatcttccagcaggtgtcccagatccagagcggcgtgtccccaggcatgttcagcagcacagagcccaccgtgcacaccaggccagacaacctgctgcccggccgggcagagagcgtgcacccccagagcgagaacaccctgagcaaccagcagcagcagcagcagcagcagcagcaggtgatggagagcagcgctgccatggtgatggagatgcagcagagcatctgccaggccgccgcccagatccagagcgagctgttccccagcacagccagcgccaatggaaacctgcagcagagccctgtgtaccagcagaccagccacatgatgtctgccctgagcaccaatgaagacatgcagatgcagtgtgagctgttcagcagccccccagctgtgtctggaaatgagaccagcaccaccaccacccagcaggtggccaccccaggcaccaccatgttccagaccagcagcagtggagatggagaggagaccggcacccaggccaagcagatccagaacagcgtcttccagaccatggtgcagatgcagcacagcggggacaaccagccccaggtgaacctcttcagcagcaccaagtccatgatgtctgtgcagaacagcggcacccagcagcagggcaatggcctcttccagcagggcaatgagatgatgagcctgcagagcggcaacttcctgcagcagagcagccacagccaggcccagctgttccacccccagaaccccatcgcagatgcccagaacctgagccaggagacccagggcagcctcttccacagccccaaccccatcgtgcacagccagaccagcaccaccagcagcgagcagatgcagccccccatgttccacagccagagcaccatcgctgtgctgcagggcagctctgtgccccaggaccagcagagcaccaacatcttcctgagccagagccccatgaacaacctgcagaccaacacagtggcccaggaggccttctttgctgcccccaacagcatcagccccctgcagagcaccagcaacagcgagcagcaggccgccttccagcagcaggcccccatcagccacatccagacccccatgctgagccaggagcaggcccagcccccccagcagggcctcttccagccccaggtggccctgggcagcctgccccccaaccccatgccccagagccagcagggcaccatgttccagagccagcacagcatcgtggccatgcagagcaacagccccagccaggagcagcagcagcagcagcagcagcagcagcagcagcagcagcagcagcagcagagcatcctcttcagcaaccagaacaccatggccaccatggccagccccaagcagcccccacccaacatgatcttcaaccccaaccagaaccccatggccaaccaggagcagcagaaccagagcatcttccaccagcagagcaacatggcccccatgaaccaggagcagcagcccatgcagttccagagccagagcacagtgagcagcctgcagaaccctggccccacccagagcgagagcagccagacccccctcttccacagcagcccccagatccagctggtgcagggcagccccagcagccaggagcagcaggtgaccctcttcctgagccctgcctccatgtctgccctgcagaccagcatcaaccagcaggacatgcagcagagccccctgtacagcccccagaacaacatgcctggcatccagggcgccaccagcagcccccagccccaggccaccctcttccacaacacagctgggggcaccatgaaccagctgcagaacagccctggcagcagccagcagaccagcggcatgttcctgtttggcatccagaacaactgcagccagctgctgaccagcggccctgccaccctgcctgaccagctgatggccatcagccagcccggccagccccagaatgaaggccagccccctgtgaccaccctgctgagccagcagatgcctgagaacagccccctggccagcagcatcaacaccaaccagaacatcgagaagattgacctgctggtgtccctgcagaaccagggcaacaacctgaccggcagcttctag

SEQ ID NO: 237054 - DNA, 4650 bp, Artificial Sequence
  derived and/or modified sequence
atgcccagcgacttcatcagcctgctgagcgccgacctggacctggagagtccaaagagtctttattccagggattctctcaagctgcatccctcacagaatttccacagagcagggttactggaggaaagtgtgtacgacctgctccccaaggaactacagctccccccatctcgggagactagcgtggcgtccatgtctcagacaagcggtggcgaggcgggctcccctccgcctgccgtggtcgcagccgatgcgtcctctgctcctagttccagcagtatgggaggtgcctgctccagcttcaccacctcttcaagtccaactatttactccaccagcgtgacggactctaaggccatgcaagtcgaatcatgcagttcggctgtgggagtttcaaataggggagtgagcgagaagcagctaacttctaacacagtgcagcaacatccctctacccccaaacgccatacggtgttatacataagtcctccccctgaggaccttctggataacagccgtatgtcgtgccaagatgagggctgcggactagagtctgagcagagttgttcgatgtggatggaggactccccgagtaacttttctaacatgagtacctcttcttacaatgataatactgaagtgccccgaaaaagtagaaagagaaatcccaagcagcggcccggagtcaaaaggcgcgactgcgaggagagtaatatggatatcttcgatgctgattccgccaaggcgccacactacgtgctgagccagctcaccactgataataagggtaattcgaaagccggcaacggcacactcgaaaaccagaaggggactggcgtgaagaaatcccctatgctgtgtggacagtacccggtgaagagtgagggcaaggagctaaagatcgtcgtgcagcccgagacccaacaccgggcacgctacttgaccgagggatcaagagggagtgtcaaagacaggacacaacaggggttccccaccgtgaaactcgagggacacaacgagcccgtcgttcttcaggtgttcgtaggaaacgatagtgggagggtgaagcctcacggattctatcaggcctgtcgagtcacagggcgcaacaccaccccgtgtaaggaggtagacatcgaggggaccaccgtgatcgaggtgggtctggaccccagtaacaatatgactctggccgtggattgcgttggcatactcaaattacgcaatgccgacgtcgaagcgaggataggcatcgctggaagcaagaagaagtcaaccagagctaggttagtcttccgtgtcaacatcatgcgaaaagatggctcaacattgaccttgcagacacccagctctccgatactttgtacacagcctgccggtgtcccagaaatccttaaaaagagtttgcattcttgtagtgtgaaaggcgaggaggaagtgttcctgataggtaaaaactttttgaaagggaccaaggtgatttttcaggagaacgtttccgacgagaactcatggaaatctgaggcagaaatcgacatggaactgtttcaccaaaaccatcttatcgttaaggtgcccccatatcatgaccagcatatcaccttgccagtgtccgtgggcatctacgtcgtcactaacgccgggagatctcatgatgtccagccgtttacctacaccccagaccctgccgccgccggagcgctgaatgtaaacgtgaagaaagagataagcagtcctgcgcgaccttgctcatttgaggaagccatgaaagctatgaagacaacgggttgcaatctcgataaggtcaacatcatcccgaatgctcttatgactcccttgattccatctagcatgattaagagtgaagacgtaacgccaatggaagtgacagccgagaagagatcaagtacaattttcaagactactaagagtgtggggtccacgcagcagactcttgagaatatttccaacatcgctgggaacggtagcttcagtagcccaagctcttctcatctgccatctgagaatgagaaacagcagcagatacaacctaaagcttataaccccgagaccctaacaaccatccagacacaggatatttcacagcccggcactttccctgcagtctcagcctcttcccagttgccaaatagcgatgctctgttgcagcaagctactcagttccagacccgcgagactcagtctcgcgagatattacagtccgatggcactgtggtcaatctgagccaattaacagaagcctcccagcagcaacagcagagccccctgcaggaacaagcccagacactccagcaacagatttcctccaacatctttccaagccctaactctgtttcacaattgcaaaacactattcagcagttgcaggccgggtcattcaccgggagcactgcatccggctccagcggatcagtggatctggtgcaacaggttttggaggctcagcagcagttgtcctccgtgctgttcagcgcgcctgacggtaatgagaacgtccaagagcagctctctgcagacatatttcagcaggtttctcagattcagtcaggagtgagccctggcatgttcagtagcacagagccgacagtacatacaaggcccgacaatctgttgccgggccgggctgaatctgtgcaccctcagtccgaaaatactctaagtaatcaacagcagcagcagcaacagcagcaacaggtcatggagtcatctgcagctatggtaatggagatgcagcagagtatctgccaagccgctgcacagatacagagcgaactgtttccatcgactgccagtgccaatggaaacctacaacagtcacccgtctaccagcagactagccacatgatgtcagcactgtccaccaacgaagacatgcaaatgcagtgtgaacttttctccagtccccctgccgtttccgggaacgagacatccaccacaactacccagcaggtggccacccctggcacgactatgttccaaacttcttcttctggtgacggtgaagagactggcacccaagcgaaacaaatccagaattctgtgtttcagaccatggtgcagatgcaacactctggagacaatcagccccaggtcaatctcttctcaagcactaagtcgatgatgtcagtccagaattcaggcacccaacagcaggggaatggcctctttcagcaggggaacgagatgatgagtctgcagagtggtaacttcctccagcagtcaagtcactcgcaggcccagctttttcatccgcaaaatcccatcgctgatgcacagaacctcagtcaggagactcaagggagtcttttccattctccaaatcccatagtgcatagccaaacaagcactacctcatcagagcagatgcaaccgccgatgttccacagtcagtctacaatcgccgtgctgcaggggagttcagtgcctcaggaccagcaatctactaacatcttcctttcacagtctcccatgaacaatctccaaacaaatacggttgctcaggaagccttctttgcggcaccaaactcaatttcgccactgcagtcaacttcgaactccgaacaacaggctgcctttcagcagcaggcccccatttcccatatccaaaccccaatgttaagccaggaacaggcccagcctccccagcaaggcctgtttcagccacaggtggctctgggtagtctgcccccaaatccgatgcctcagagtcagcagggcactatgttccagtcacagcattccatcgtcgccatgcagagtaacagcccatcacaggagcagcagcagcagcagcagcaacagcagcagcagcagcagcagcaacagcaaagcatcttgttttccaatcagaacactatggcgaccatggcctctcctaagcaacccccaccgaacatgatctttaaccccaatcaaaatcccatggcaaaccaggaacagcagaaccaatccattttccatcagcagagcaacatggcccccatgaatcaggaacaacaaccgatgcagtttcaaagccagtccacagtgagctctctccaaaaccctggccccacccagtcagaaagctctcaaaccccactgttccatagttcaccacagatccagcttgtccaaggctcaccctcatcccaggaacaacaagtgaccctattcctcagtccggcatccatgtctgctctccagacctccattaaccagcaagatatgcagcagagccccctgtatagtcctcagaataacatgccaggtattcagggggccacaagttccccacagcctcaggcgacattgttccacaacacagccggtggaaccatgaatcagcttcaaaatagccccggcagctcacagcagacatccggaatgttcttgttcggaatccagaataattgttcccagctgctcactagcggtccggctacgttgcccgatcaactgatggccatcagtcagccagggcaaccacagaacgaaggtcagccaccagttaccaccctgctgtcacagcagatgccagaaaattctccgcttgctagttccatcaataccaaccagaacattgaaaagatagacctgctcgtcagcctgcagaatcaagggaacaatctcactggcagcttctag

SEQ ID NO: 237055 - DNA, 14157 bp, Artificial Sequence
  derived and/or modified sequence
tgcaacggaaacttttggctccacgaacagaaaagcaagagcaaaaactcagttaaatgcgttcttcctccatctttgcctagtccaaaaggaaaaaaaaagaaacagaaaaaagaaaaactgtttggaagagtagcgttgaggtttgctttttacctgtttttcctctagaacagccaggtggattcacatgatccaattttttaattgtcttctatgtcccactccgaataacccggatgccccagcacaatcagagagatcgttttttttaaaaaaaatttcagcctccaaaggtaggaggggagtgttaggggagaaagtactttaattaaaaatcaataactcgaggtttttgggatacggtttgccatttcctaattaagaaatgggtttgacagtccctttgtacacactgctatgcaaaccccaaagggttggcggctgtccgggcgatgacactccggtcccctgcgagaccccgggccagccaggcccgtccgccgccggcctctggggtccgtccccggctcgcgcagacctctcgcttctctcggctctgtctcctgcgctcagctctgctcggggccggccgcctcaggctcgccgccaccaggtcgttgcaaataccttttccctccccggggccccagcgcgcggccacctcccagcctccccccctcccaccctggcagcggggccctttcccggctcaggaacagcagcagcccgggccgcgccggcaggaagcgaggcccatgttgctgctgttccctggcgcgcctccccgccctccgggggccgccacggctcttccgcgctcccgggcacccccctccgcgcctgcgctgtgccccacgggggcggggctcagattcctgtcagcggcggcggcggtggcggcgaccgtcagttttcgctgaggagaaacacgaaacggaccctttggctctcccccttccccttccccgtcctgaacccctctcctggtcaccgagaatcagtccccgtggagttccccctccacctcgccatcgtttcctcggtcctcggcccagtggaagtcactaccctcgaggaggaggcagcggcagccgccctcgcgtcgccgcccccggttcggtgcccgcggtcccggagaggaggtgccgccgccaccgccgctccccccctcccgctgccctcgggccgggctgggtcgagctgcgatgccctcggacttcatctcattgctcagcgcggacctagacctggaatcgcccaagtccctctactcgcgagattctctgaagttacacccatcacagaattttcatagagctggactattggaagaatctgtctatgatcttctcccaaaggagttacagttacctccatctagagaaacatctgtagcatcaatgagtcagacaagcggtggtgaggcaggctcgcctcctccagctgttgttgctgctgatgcttcttcagctccctcctcttcctccatgggcggtgcttgcagctcctttaccacctcttccagccctaccatttattctacctcagtcaccgacagcaaggctatgcaagtggagagctgctcctcagccgtgggggtaagtaacagaggggtaagtgaaaagcagttaaccagtaacacagttcagcagcatccatcaacaccgaagaggcacacagtcttgtacatctcaccaccacctgaggacttgctggataacagtcggatgtcctgccaggatgaggggtgtggattggaatctgagcagagctgcagtatgtggatggaggattccccctccaacttcagtaacatgagcaccagttcctacaatgataacactgaggtacctcgtaaatcacgaaaacgaaatccaaagcagaggccgggggtcaaacgacgagattgtgaagaatctaatatggatatatttgatgccgacagtgccaaagcacctcactatgtgctttctcagcttaccacggacaacaaaggcaactcaaaagcgggaaatggaacattggaaaaccaaaaaggaactggagtaaagaagagccctatgttgtgtggacaatatcctgttaaaagtgagggaaaggagctgaagatagttgtacaacctgagacacagcaccgagctcggtacctgactgagggcagccgtggctcagtgaaagatagaacacagcaaggctttcctacagtaaagctggaaggccataatgaacctgtagtgttgcaagtgtttgtgggcaacgactctggacgagtgaaaccacatggattttatcaggcctgcagagtaactggacgaaatacaactccttgcaaagaagtggacattgaaggcactactgttatagaagtcggccttgatcctagcaacaacatgacactggcggtggactgcgtagggatattgaaattgaggaatgctgatgtcgaagccagaataggaattgctggttccaagaagaaaagcactcgtgccagattggtttttcgagttaatatcatgaggaaagatggctccactttgacactgcaaacaccctcttctccaattttgtgtactcagccagcaggagtgccagaaatcttaaagaaaagcttgcatagctgttcagtgaaaggagaagaagaagtgtttttaatcggcaagaactttctgaaaggaactaaagttattttccaagaaaatgtttctgatgaaaactcttggaagtcagaagctgaaattgatatggaactatttcatcagaatcatcttattgtgaaggttcctccctatcatgaccaacatataactttgcctgtgtcagtgggaatatatgtagtgacaaatgctggaagatctcatgatgttcaaccattcacttacactccagacccagcagcagctggtgctttgaatgtaaatgtgaagaaggaaatatctagtccagcaagaccttgctcttttgaagaggccatgaaagcaatgaaaactactggatgtaatttagataaggtaaatattatccctaatgccctgatgactccactcataccaagcagtatgattaagagtgaagatgttactccaatggaagtaacagcagaaaaaagatcttccactatttttaagactacaaagtctgttggatcaactcagcaaacattagaaaacatctcaaacatagcaggaaatggctctttttcatcaccatcatcttcccacctaccttctgaaaatgaaaaacagcagcagattcagcccaaggcatacaacccagagaccctgacaactattcaaacccaggacatctcacagcctggtacttttccagcagtttctgcttctagtcagctgcccaacagcgatgcactattgcagcaggctacacagtttcagacaagagaaactcagtctagagagatattacagtcagatggtacagtggttaatttgtcacaactgactgaggcatcacaacaacagcagcagtcaccactacaagaacaagcacagactttacagcagcagatttcatcaaatatttttccatcaccaaatagtgtgagtcagcttcagaatactattcagcagctgcaagcagggagtttcacaggcagtactgctagtggcagcagtggaagtgttgacttggtccaacaagttttagaggcacagcagcagttatcttcagttttattttctgctccagatggtaatgagaatgttcaagagcagcttagtgcagatatttttcaacaagtcagtcaaattcagagtggtgtaagccctggaatgttttcctcaacagagccaacagtccataccagaccagataatttattacctggaagagctgaaagtgttcatccacagtctgaaaacacgttatctaatcaacagcagcagcagcagcagcaacagcaagtgatggaatcttcagccgcaatggtgatggagatgcaacagagtatctgccaggcagctgcccagattcagtcagagttattcccttcaactgcttcagcaaatggaaaccttcagcaatcgccagtttaccagcagacttctcacatgatgagtgcattgtctaccaatgaggatatgcaaatgcagtgtgaattgttttcttctcctcctgcagtttctggaaatgaaacttctacaactaccacacagcaggttgcaacccctggcactaccatgtttcagacatcaagttcaggagatggagaagaaactggaacacaagcaaaacagattcagaacagtgtctttcagaccatggtccaaatgcaacatagtggggacaatcaacctcaagttaaccttttttcatccacaaaaagtatgatgagtgttcagaatagtggtacccaacaacaaggtaatggtttattccagcaagggaatgagatgatgtcacttcaatctggaaattttttgcagcagtcttctcattcacaggcccaactttttcatcctcaaaatcctattgccgatgctcagaacctttcccaggaaactcaaggttctctctttcatagtccaaatcctattgtccacagtcagacttctacaacctcctctgaacaaatgcagcctccaatgtttcactctcaaagtaccattgctgtgttacagggctcttcagttcctcaagaccagcagtcaaccaacatatttctttcccagagtcccatgaataatcttcagactaacacagtagcccaagaagcattttttgcagcaccgaactcaatttctccacttcagtcaacatcaaacagtgaacaacaagctgctttccaacagcaagctccaatatcacacatccagactcctatgctttcccaagaacaggcacaacccccgcagcagggtttatttcagcctcaggtggccctgggctcccttccacctaatccaatgcctcaaagccaacaaggaaccatgttccagtcacagcactcaatagttgccatgcagagtaactctccatcccaggaacagcagcagcagcagcaacagcagcagcaacagcagcagcaacaacaacagagcattttattcagtaatcagaataccatggctacaatggcgtctccaaagcaaccaccaccaaacatgatattcaacccaaatcaaaatccaatggctaatcaggagcaacagaaccagtcaatttttcaccaacaaagtaacatggccccaatgaatcaagagcaacagcccatgcaatttcagagtcagtccacagtttcctcacttcagaacccaggtcctacccagtcggaatcatcacagacccccttgttccatagctctcctcagattcagttggtacaagggtcacctagttctcaagagcagcaagtaactctcttcttatctccagcatccatgtctgccttgcagaccagtataaatcaacaagatatgcaacagtctcctctttattcccctcagaacaacatgcctggaattcaaggagccacatcttcgcctcaaccacaggctactttatttcacaacacagcaggaggcacaatgaaccaactgcagaattctcctggctcatctcagcagacatcaggaatgttcttatttggcattcaaaataactgtagtcagcttttaacctctggaccagctacattgcctgatcagttgatggccataagtcagccaggccaaccacaaaacgagggccagccacctgtgacaacacttctttctcagcaaatgccagagaattctccactggcatcctctataaacaccaaccagaacatcgaaaagattgatttgcttgtttcattgcaaaaccaagggaacaacttgactggctccttttaactggatataaattccacgaagaaaatcctgattccaagatgtcctgagatcttgtggttccatgagaattattactttaaaaacaaaacaaaatataaaaaactgtgtttgagtaaactgatagattttactctgactgcaaaagagcacacctatgctgcttgttgcagtaactaaccaccaatgttaacatcttcatattttatattcctaataacagtgatgactgagaatctatttgagtttccagctggcagaattaattgttattattttcctaggcgcaatttccttaaacgtacagtttaaattcaaggctggaccactcagttattattgctattagaaaataatatatcatgtttacttttgttcttcattattttctttcctgcattgttttagtcaagtaatggcttttgaaaaagtaaagttcaataataactaaggctgtgatttttttcaatataaaaggcacagctgttggccaaagtgaaggaatcttttttcagttttattggagaaactgaagggtaacattctaacaagtaaactgtatgtgcagataaaagtactcttgatttaacacaaaggcagatgatacacttataaaactgggaacagctggaatgcttcttgattttattttttcagagagttgttagttctctgggtttctactaaggggtttagccataactgtgcatagaaaaataattatctgtaaaaaatgaaggggataatatatgataaattatgttctgatatcctcctacagtagtttaaattgacagaaaaatttgaatgttttcttcttaacccagtcttaggctggtattccctttttatatatatctatattacttttcacctctttttcactttactttagagaactattaatatactactggcttcatgaccctgtagcatctttggccactttaatctagggtgacctagcaatcctgcagcacagggcagagagtactgtcttaggaattattaggagttgattcctgagaaacaacacatttttccccatgaacggtgctgttctgaagtcttcaaatttttccctctaataggaaacagtataaattttaattaaaaaaaaaaggcaaactaaaatttcttgaaatatcacttctccctgatctgcagtgagtataaattcacttgtcacctcagtgctttacagtttgaagtggtcacttacctgatggttcccacaagccttaggctttacagggttgtatcattgacttaaaatgaagaattaacttgtgttacatctataaagagcaaaataacacactccagaacttggcagttgtagcattagttatacagttttgggtgttcttgccacccgtgggatgcctgcttctcactaccacctgtgtctggacacatgcttatgtctcattttccttttggcatgtggaaagctgtcaatgcagtgtaaggccaacgtgtgtgtggcttctatgtgttgagataatgttttggtatccttgtccgtttcatttattttttaagtgtacaaaaaataacctgttaattgttgaaggctacttttctgttctttttttttttttttttctatcctgtacatttagttgaactgtgcggaattgtggtgttggttttgtttacacagccagatttttccttctttttgttttgtgatgatcttcctttgttctttgaatgtgctcttttgtctttttctcttttttctcatgttttcttccctccacctccacccctttctttctttctctctctgattgagaggcattgaattacgttttcagtagtacaggcttcttgccgatatgaagggaacttttcagaaagagacctactctgggtcatttaattttgaatacagttttcaatcgttcaagttttggatggtttatatctaatgtgtgtttcatttttttggaaagctatattttgtatttaggaaatggtatactattttgctatttgtactgagtgagtacattggcataaatatagaaatttatatatatacatatatataaactattcttttttgccacacatttttgtggtaaatttgtgagtttgtctgatgttctaccacaacgtggcgtctgataacagtgagggggggtggggtttgttatgtctttattgagtatttaagtatcttttgaaacaaatgacctgttcatctgtggccattccatcaggcagttagttccttgatgtcagtagtgggctaaaggcagcttactgtgtgtttgctggagctttcactcagccaagtgttagagtcaggaaacccattgaggcaatggcgtcaaatggtgtttcacaagaatgagccattcagtctttgctcactatatatttaatattttattattgttgttattgttattattaattggctttctgtattctatgccttttatttataaagacactaagaaaacccatgtttgtaattttaataacatttttcccatcttgtaatatccagagctactttataaattctctgaaccaaaagtattttcctcagtgtatctcttctcccccagcccctattgggaaaaattacccagtatagttcaggttatgaggaggatcagccacacaatccagtgcttcagtttgaaaatgtaaaattctaaccctaaagtagggttggttgaaatttcagacaaagcaaacccagcaggtataaaaagtagtataaatacaaatctgtaagttatttttgaattttctgaacttttttctaagagattacataggagactaaagaaatctatctgttcaagttctaattaggatgattgttaatactgcactgtggatgaagtggcgactggcttgtgtgctgacttctgtggtttagcaagaggtttattgttatcaaatgctaattggcaatgccaagtcactgggaccaattttctgttttataatatctaagtttagaacagaatatatacctgaactgtagtggtttgatcggatggagacagaaaacccgatttttattctcataaattttgtggttatttatacaagggctgtgctatgctaccatattcttgttcaataataataggtttgttgttttttttacattgttaaatgttccttacccctaaaggtcaatgttaagtacaacattctgaaaatacaatttggctacgaagagtattcatcttctttgaagctcagtggttgatatttgtgctaataatgcaatttcctgattactgttacaagttatagctacatatgggagagactcagtgagccagcaaaggccatagaaacaacaatttattaaatgtatttatggcagaaggacctaaataaactgtgagccaccttttcttctttatattgttacatttaagtgttcttgctttcagcaactcacattaatgcttggagcttatctctttctctctctctctctctctctctgtgtgtgtgtgtgtatgtgtgtgtgtgtgtgtgtgtgtttccttattgtcattccattatatatccacaccaacatgggtgacgataattcaaagtcatattttgcctctaagcttgatcatgttacctttatgattaaagtatcatgttatttagccaatgcaaatctgttttaaaacaaatagtttaaaaaaagaacaagtttttaagggctttattatagaagaagtattaatgaaggactttccttcctccctccctttcctcccctccctgcctcccttcttcccttccatctccccctcctccctgccttctttgtttctccttcccttattcctccctccctcctttctcccttccttcctttcttccattcatccttccttgccttttatttttattttttgtaatatcacatgtgctgtagtttggaattttattctagtgcatttcttgctcatcagaacctcagctaatctacctaggaaaaatagtatcaaaggaaatgagaaagttgtatctgagtccctccagaactaagataattctttttgaccatttaagcctttataaatgcgttttgaccatttaagcctttataaatgcttgttttaggaaagtgaatctgttagatgcatcaacaaataatgaccaggacaaaacgatttaataattaaagtctcaaatcaccatggttatacattttcaccagaaatagtaatcttacaatttttcatttttctgatgaagatttctgttccaatatctgtttcctaatagattttttaaattaattagctttcctctgctttatgaccacaggttttatccctaaccgagacagctgtcttatatctgcatgccttagactgtgtggagggactccatgaagaaagaccataggttagaaaaataactcatagtatataccctagtaagtgggttagtagaatctcataacatgtattaaaaagaggttttcttctctgcttgtttgtgtcactagagcaaaattgtagagataatgctcataatgcagtaaatatcagaataatatctacaatatcatttgtggatggtcccaggtcccagtgctctagttactttacttctttttttttttttgagatggagtcttgctctgtctctcaggctagagcagtgtgcgatctcagctcactgcagcctccacctcccaggttcaagcgattctcctgcctcagcctcccaagtagccaggattacaggcaccctccactaggcccggctaattttttttgtatttttttagtagagatggggttttgccatgttggccaggctggtttcgaactcctaacctccagtgatccacctgcctcggcgtcccaaagtgctaggattacaggcatgagccaccacatccggcctaattacttctttaatccccatttatttttatgccattctagcctcatttattaataaaattatgtttttactttctctttcaggaaattttttaaattaatattttatatctagatctaatgctatggaaaagtgcctttttatcatttataatttcatttttcactatttccaaaaacacataaacaaatagtttcagtaggtcccagcttttactttttccatttaaaccttcttttctccatttcttccctttggcttaagaataaaagaaaaggtacattgctagaattgtttctttgggagagggtaaaagattacagaattagactgttcagcctttatataaactaaatttgtcttcatctcaaccagctaatggtaggtcttatctgaatactcatgagaattttagcatctgtgaaactccatgcaccagatgtgtgtaaatttcaggaagaaagtgttgaaagcattttctctgatgttaattagatggaaataaatcactaaaacatagtttaggtaaagcctgattatgccacttttttttaactagacagggcaaagttgtttatgttagtgtacttcttgtctatcctcagttaatttacctagacaaaaagtgtcaaaggaaatgagaaaaaggttatatctgactccctccagacctaagataattccttttgatcagatacagtcagatggagtgccttggtttttgttaattttgcctctattccagctccttaccacagcggtggtgcttaaagaaaggatcatcagcaacaggtcaggatagttctacctttgggatagggctgctttccccgtgctagtatttctgtgactgttagtggcactgaggactgcaaacttttatgcaatattcttaataccctattgatattatgcactttaatcattccaaagaagccaagaatgctgtatagtgatgattccttcctaatgaattcatcttaactatttagaatgttatgtcccttttcttttggatagccaacttggtataaatgttatatggatttttctaaaatgactatataggacttaagactttgaaatgtaatttacttataaggggaaataattatgctttagcacatcattttagaaacgtcacattttagaaacattcagcttgctaacctacatgtttgggaattcattaaaaccagttgtctatatattttgtgccatgtatataagaacattacaatatatctttttctacatatgtagtatgtgcaaccagtggttctcagagtatggttctcagcccaccagctagtatcagtatcacctgggaactagttagaaatgtaaattctttggccccatcccagacatactgagtcagaaactctggaatagggcccccgcaatctgttttcacaagccctccaggtgattctgatgcacactttaaagtttaggaaccactgggctaagactctgttgagatatagagtttttcttccactcagactgatatagttatacattgttcttcatgtaaattcagcttaacctggttatctataatcttttattggcaaaagttaattctcagtactgcctatagagatacagtgtattttatgtacatacacaattagtctaattcttgataattcagttaatttagtttggcattttcctaccacttactaaaaggtttacattaaatgactgatttaaatatataggtgcaatgttctatgtttattttaattgttatgacatttaagtagctaatataattgaccggtgctaaagtctcctgtttatccataaaatgggtacattatgggcagtgtaatacaagctttcttttcattgcctagtactttaccagcagaccacagttttgccctggctagaccaaccctcagaacaaaatcatcattccttgtatttatatttgtatctgagatagtaaacaagatggctggccaggtcaacatggcaccttaacttatttttttaataggtaaaacttcttcaaaagtagcttgctttgtataagaactaagctatcagtatagatatagctatccttggagcttatgtttcagacaagaattatttactaaaataaataataaacaagataatgcattatacaatttgggcatttctcgtttctcaagtgtatgcatcatggtaaatataaactaaccacaagataggtagattgattcatttcattttaatctccttgtgtaattcagtacctccataattgttctaatcttcttcccactgtttacaaattaccagttaattaactcgtgaaagaaaaattcacatatcagaataaaaataaatgtatactcactttataaaaatcaccactgctgtctttccttaatactagcagtggaaatgtaagtggcttactctacaaattttggtgctggcaaatacataggcaaactgttgggagctgctctagttacattcctcccttcttattccctttttctcttcctcactttattgcataacatattcctgtacccaaagcattctaccacagttctatttgactcccacttgtaataactcctttaaaaaattccatgtttaaccatatgaccctgcttgcttactcatattctccctccctctccccttcctttctctctcttccagaagtcatttgcctggtttgaaatattttgtagggattgcttattatattattttagctgatgaacctcaggacaacgtctacacacacacacatacatacacgcacacaaaatctcagctgttgaagagtgggcttggaatcagacttctgtgtccagtaaaaaactcctgcactgaagtcattgtgacttgagtagttacagactgattccagtgaacttgatctaatttcttttgatctaatgaatgtgtctgcttaccttgtttccttttaattgataagctccaagtagttgctaattttttgacaactttaaatgagtttcattcacttcttttacttaatgttttaagtatagtaccaataatttcattaacctgttctcaagtggtttagctaccattctgccatttttaatttttatttaattttatttgcttgagcacactgatcaaccactgaactgccttcttccattgtcctgcaatgatataagggttacatttttgtgtatatggctttcatagttgggatttcagagcactgataccagatattttcagtttgttctctgggggaatttcatttgcatctatgtttttagctatctgtgataacttgttaaatattaaaaagatattttgcttctattggaacatttgtatactcgcaactatatttctgtaaacagctgcagtcaaaaataaaacactgaaagtt

SEQ ID NO: 237056 - DNA, 4649 bp, Artificial Sequence
  derived and/or modified sequence
atgccaagtgatttcatctctctgttatctgccgacctggacctggagagccccaagtcgttgtactccagagattctcttaagctgcatccttcgcaaaacttccacagggccggactattggaggagagtgtgtacgacttacttccaaaagagcttcaactgcccccatcacgggagacatctgtggcaagtatgagccagacctcgggcggagaggcaggaagcccccctcccgctgttgtagcagccgacgcctcttccgcaccttcctcctcgtccatggggggtgcgtgctcatccttcaccacctctagctcgccgacaatctactcaacgtccgtcacagactcaaaggcaatgcaggttgaatcctgtagtagtgcagtaggggttagcaatagaggtgtctctgaaaagcagttaaccagtaacacagtacagcagcatcctagcactcccaagaggcacacggtactgtacatctccccaccgcctgaggacttgctcgataattcgcggatgtcctgccaagatgagggctgtggactggagtcggagcaaagctgttcaatgtggatggaggattccccctcgaattttagtaacatgtcgactagttcatacaacgacaataccgaggtgccacggaagagtagaaagagaaatcccaaacagcgaccaggtgtgaagagacgagactgtgaggaatcaaacatggacatctttgacgccgattctgctaaagcgcctcattatgtcctttcacaactgactacggataataaaggaaattcaaaggccggaaatgggaccctcgaaaaccaaaaaggcacgggcgtcaaaaaatcacccatgttatgtggccaatacccggtgaagagcgaaggcaaagagctcaagatagttgtgcagcccgagacacagcatagggcacggtatctgaccgaaggcagccggggatctgttaaagatagaactcagcaaggctttcccactgtcaagcttgaggggcacaacgagcccgttgtgttacaggtattcgtcggcaacgactctggaagagttaaaccccatgggttttaccaggcttgccgtgtgaccggccgtaataccactccttgcaaagaagtggacatagagggaactacggtgattgaggtggggctggacccttctaataacatgacactcgcagtggattgcgtcgggattctgaaactgcgcaacgctgatgtggaggctcgcataggcattgctggttcaaaaaagaagtctacccgagcgcgactggttttccgtgttaacattatgagaaaagatggttccaccctaaccctccaaacaccatcatcccctatattatgtacccagcctgctggtgtgccagaaattctgaagaaatccttgcactcctgctccgtgaaaggagaggaggaagtcttcctgattggtaaaaatttcctgaagggaaccaaggtgatatttcaggagaatgtaagcgacgagaattcgtggaagagtgaggcagaaatcgacatggagttattccaccagaatcatttaattgtgaaagtgccgccttatcacgatcagcatataactctgccggtaagcgtgggaatctacgtcgtaacgaacgccggacgctcgcatgatgtccaaccatttacatacacacccgatccggctgcggcaggagccctcaacgtgaacgtgaagaaagagatctcatcccccgcaaggccgtgttcattcgaagaggccatgaaggccatgaaaacaactgggtgcaacttagacaaggtgaacatcatcccgaacgcactgatgacaccactgattccttccagcatgattaaatctgaggatgtcacgccaatggaagtgactgctgagaagcgttcctccacaatctttaaaaccacgaaatctgtgggcagtacgcaacagactctagagaacatttccaatatcgcagggaatggatctttttcctcgccttcatcgagccatctgccttccgaaaacgaaaaacagcagcagatccaacctaaagcttataatccagaaacgcttactacaattcagacccaggacatttcgcagcccggaaccttccccgctgtgagtgcctcaagccagcttcccaatagcgatgcgttacttcagcaggctactcagttccagactagagaaacacagagtagggaaattctccagtcagatggaacggtcgtcaacctcagccagttgacagaggcatcgcagcaacagcagcagtctcccctccaagagcaggcgcagaccctgcaacagcagataagctccaatatatttccctctcctaactctgtttcgcagctccaaaatactatccagcagttgcaagccggaagcttcacagggagcaccgcctctggctcaagtggcagtgtggacctagttcagcaggttcttgaggcccagcagcagctcagcagtgtgctgttctcagccccagatgggaacgagaacgtgcaggagcagctctctgccgatatcttccaacaagtctctcagatacagagcggtgtgtcgccaggcatgttctcttccaccgaacccacggtgcatacccggcctgataatcttctgcctgggcgagccgaatcagtgcaccctcaatcagagaataccctgtccaatcagcagcagcagcagcagcagcaacaacaggtcatggagagttccgctgccatggtgatggagatgcagcagtcaatttgtcaggctgctgcccagatccagtcggaactgttcccctcaacagccagtgcaaatggtaatctgcagcagtctcctgtgtatcaacagactagccatatgatgtctgcactctctacaaacgaggacatgcagatgcagtgcgaactattctctagcccaccagccgtttcgggaaatgaaacatcaacaaccaccacacagcaagtggcaacgcctggcaccacaatgttccagacaagctcatccggggacggcgaagagacaggcacgcaggcaaaacagatccagaatagtgttttccagactatggtgcagatgcagcattcaggagataatcaaccgcaggtgaatctcttttcgagcaccaaatccatgatgtcagttcagaatagcggcacgcaacagcaaggaaacggccttttccagcagggcaacgaaatgatgtctctccagtccggaaacttcctgcagcagtcgtcacatagccaggcacagcttttccacccccagaaccctatcgccgacgcccagaacttgtcccaggagactcaaggatctctgttccacagccccaacccaatagtacatagtcagactagcaccacctctagtgaacagatgcagccacctatgttccattcacaaagtactattgcagtcttgcagggatccagcgtcccacaagaccaacaatcaaccaacatcttcctctctcagtcccccatgaacaacctgcagacaaataccgtggcgcaggaggcatttttcgctgctccaaattccatttcaccactacagtctaccagcaactcagagcagcaggcagccttccagcagcaagccccaatcagccacatccagacgccgatgctgtcacaggagcaggcgcagcctccacagcaaggattattccagccccaggtcgcactggggagcctgccacctaacccgatgccgcagagccagcaggggactatgtttcaaagccagcatagcatcgttgctatgcagtccaattcacccagtcaagagcagcagcagcagcaacagcaacaacagcagcagcagcagcagcagcagcagagcatcctcttctctaaccagaacacgatggctacaatggcctctcccaagcaacctccccctaacatgatctttaaccccaaccagaatccaatggccaaccaggagcagcagaaccagagcatttttcatcagcaaagcaatatggcgcctatgaatcaggagcagcaaccaatgcagtttcagtcgcagtcaacggtgtcctctctgcaaaacccgggacccactcaatcagagtcctcccagaccccactgttccatagctctccacagatacaacttgtccaggggagtccgtccagccaagagcaacaggttaccctcttcctgagccccgcaagtatgagtgcccttcagactagtattaatcagcaggatatgcagcagtcacctctatattccccccagaacaatatgcctgggatccagggagcaacaagctccccccagccacaggctactttgtttcataacacagcgggaggcactatgaatcagctccagaacagccccggttcatcccaacagacaagcggcatgttcctcttcggcattcagaacaactgtagccagctgctcacgtccggtccggcaacattgccagaccagctgatggcgatctctcagcccggacagccccaaaatgaagggcaacctccagttacgacactgctgagtcagcagatgcctgagaattccccactggcgagttcaatcaacaccaaccaaaacatcgagaaaatcgacttgctggtgtcgcttcagaaccagggcaataatcttaccggaagttttta

SEQ ID NO: 237057 - DNA, 4368 bp, Artificial Sequence
  derived and/or modified sequence
atgggcggcgcctgcagcagcttcaccaccagcagcagccccaccatctacagcaccagcgtgaccgacagcaaggccatgcaggtggagagctgcagcagcgccgtgggcgtgagcaacagaggcgtgagcgagaagcagctgaccagcaacaccgtgcagcagcaccccagcacccccaagagacacaccgtgctgtacatcagccccccccccgaggacctgctggacaacagcagaatgagctgccaggacgagggctgcggcctggagagcgagcagagctgcagcatgtggatggaggacagccccagcaacttcagcaacatgagcaccagcagctacaacgacaacaccgaggtgcccagaaagagcagaaagagaaaccccaagcagagacccggcgtgaagagaagagactgcgaggagagcaacatggacatcttcgacgccgacagcgccaaggccccccactacgtgctgagccagctgaccaccgacaacaagggcaacagcaaggccggcaacggcaccctggagaaccagaagggcaccggcgtgaagaagagccccatgctgtgcggccagtaccccgtgaagagcgagggcaaggagctgaagatcgtggtgcagcccgagacccagcacagagccagatacctgaccgagggcagcagaggcagcgtgaaggacagaacccagcagggcttccccaccgtgaagctggagggccacaacgagcccgtggtgctgcaggtgttcgtgggcaacgacagcggcagagtgaagccccacggcttctaccaggcctgcagagtgaccggcagaaacaccaccccctgcaaggaggtggacatcgagggcaccaccgtgatcgaggtgggcctggaccccagcaacaacatgaccctggccgtggactgcgtgggcatcctgaagctgagaaacgccgacgtggaggccagaatcggcatcgccggcagcaagaagaagagcaccagagccagactggtgttcagagtgaacatcatgagaaaggacggcagcaccctgaccctgcagacccccagcagccccatcctgtgcacccagcccgccggcgtgcccgagatcctgaagaagagcctgcacagctgcagcgtgaagggcgaggaggaggtgttcctgatcggcaagaacttcctgaagggcaccaaggtgatcttccaggagaacgtgagcgacgagaacagctggaagagcgaggccgagatcgacatggagctgttccaccagaaccacctgatcgtgaaggtgcccccctaccacgaccagcacatcaccctgcccgtgagcgtgggcatctacgtggtgaccaacgccggcagaagccacgacgtgcagcccttcacctacacccccgaccccgccgccgccggcgccctgaacgtgaacgtgaagaaggagatcagcagccccgccagaccctgcagcttcgaggaggccatgaaggccatgaagaccaccggctgcaacctggacaaggtgaacatcatccccaacgccctgatgacccccctgatccccagcagcatgatcaagagcgaggacgtgacccccatggaggtgaccgccgagaagagaagcagcaccatcttcaagaccaccaagagcgtgggcagcacccagcagaccctggagaacatcagcaacatcgccggcaacggcagcttcagcagccccagcagcagccacctgcccagcgagaacgagaagcagcagcagatccagcccaaggcctacaaccccgagaccctgaccaccatccagacccaggacatcagccagcccggcaccttccccgccgtgagcgccagcagccagctgcccaacagcgacgccctgctgcagcaggccacccagttccagaccagagagacccagagcagagagatcctgcagagcgacggcaccgtggtgaacctgagccagctgaccgaggccagccagcagcagcagcagagccccctgcaggagcaggcccagaccctgcagcagcagatcagcagcaacatcttccccagccccaacagcgtgagccagctgcagaacaccatccagcagctgcaggccggcagcttcaccggcagcaccgccagcggcagcagcggcagcgtggacctggtgcagcaggtgctggaggcccagcagcagctgagcagcgtgctgttcagcgcccccgacggcaacgagaacgtgcaggagcagctgagcgccgacatcttccagcaggtgagccagatccagagcggcgtgagccccggcatgttcagcagcaccgagcccaccgtgcacaccagacccgacaacctgctgcccggcagagccgagagcgtgcacccccagagcgagaacaccctgagcaaccagcagcagcagcagcagcagcagcagcaggtgatggagagcagcgccgccatggtgatggagatgcagcagagcatctgccaggccgccgcccagatccagagcgagctgttccccagcaccgccagcgccaacggcaacctgcagcagagccccgtgtaccagcagaccagccacatgatgagcgccctgagcaccaacgaggacatgcagatgcagtgcgagctgttcagcagcccccccgccgtgagcggcaacgagaccagcaccaccaccacccagcaggtggccacccccggcaccaccatgttccagaccagcagcagcggcgacggcgaggagaccggcacccaggccaagcagatccagaacagcgtgttccagaccatggtgcagatgcagcacagcggcgacaaccagccccaggtgaacctgttcagcagcaccaagagcatgatgagcgtgcagaacagcggcacccagcagcagggcaacggcctgttccagcagggcaacgagatgatgagcctgcagagcggcaacttcctgcagcagagcagccacagccaggcccagctgttccacccccagaaccccatcgccgacgcccagaacctgagccaggagacccagggcagcctgttccacagccccaaccccatcgtgcacagccagaccagcaccaccagcagcgagcagatgcagccccccatgttccacagccagagcaccatcgccgtgctgcagggcagcagcgtgccccaggaccagcagagcaccaacatcttcctgagccagagccccatgaacaacctgcagaccaacaccgtggcccaggaggccttcttcgccgcccccaacagcatcagccccctgcagagcaccagcaacagcgagcagcaggccgccttccagcagcaggcccccatcagccacatccagacccccatgctgagccaggagcaggcccagcccccccagcagggcctgttccagccccaggtggccctgggcagcctgccccccaaccccatgccccagagccagcagggcaccatgttccagagccagcacagcatcgtggccatgcagagcaacagccccagccaggagcagcagcagcagcagcagcagcagcagcagcagcagcagcagcagcagcagagcatcctgttcagcaaccagaacaccatggccaccatggccagccccaagcagcccccccccaacatgatcttcaaccccaaccagaaccccatggccaaccaggagcagcagaaccagagcatcttccaccagcagagcaacatggcccccatgaaccaggagcagcagcccatgcagttccagagccagagcaccgtgagcagcctgcagaaccccggccccacccagagcgagagcagccagacccccctgttccacagcagcccccagatccagctggtgcagggcagccccagcagccaggagcagcaggtgaccctgttcctgagccccgccagcatgagcgccctgcagaccagcatcaaccagcaggacatgcagcagagccccctgtacagcccccagaacaacatgcccggcatccagggcgccaccagcagcccccagccccaggccaccctgttccacaacaccgccggcggcaccatgaaccagctgcagaacagccccggcagcagccagcagaccagcggcatgttcctgttcggcatccagaacaactgcagccagctgctgaccagcggccccgccaccctgcccgaccagctgatggccatcagccagcccggccagccccagaacgagggccagccccccgtgaccaccctgctgagccagcagatgcccgagaacagccccctggccagcagcatcaacaccaaccagaacatcgagaagatcgacctgctggtgagcctgcagaaccagggcaacaacctgaccggcagcttctag

SEQ ID NO: 237058 - DNA, 4368 bp, Artificial Sequence
  derived and/or modified sequence
atgggcggcgcatgcagtagctttacaacctcatcctctcccacgatttatagcacgtccgtcaccgatagtaaagccatgcaagtggaatcttgctctagcgccgtaggcgtctccaaccggggggtgagcgaaaaacagctcacatcaaacaccgtccagcaacatccgtccactccgaagcgccacacagtcttgtatatcagccctcccccagaggatcttctagataatagccgtatgtcctgtcaggacgaggggtgtgggctggagtctgagcagtcttgttccatgtggatggaagattcacccagtaatttctccaacatgagcacgtcatcctataacgataacacagaagtgccaagaaagtccaggaagaggaaccctaaacagagacctggagtcaagaggcgagactgtgaggagtctaacatggatattttcgatgccgatagcgccaaggctcctcattacgtcctctcacaactgactacagacaataaaggaaactcaaaagctggcaacgggacccttgagaaccagaaaggcaccggggtgaaaaagtctccaatgttgtgtggccagtatcctgttaaaagtgagggcaaggaacttaaaattgtagtgcaaccagagacacagcaccgcgcacgttatctcaccgaagggtcacgaggttcagtgaaggatcgaacacagcaggggttccctactgtaaagctggagggacataacgaacccgttgtcttacaggtctttgtgggaaacgactccgggcgggttaagcctcacggtttttatcaagcatgcagagtaaccgggaggaataccacaccatgtaaggaagtggacattgaaggaaccacagtgattgaggtggggcttgaccctagcaacaatatgacattggctgtggactgtgtcgggattttgaaactacggaacgcagatgttgaagcaagaatcgggatcgccggcagtaagaagaagagcacgagggcgagattggtgttcagagttaatatcatgcggaaagatggtagtactctgactctacagacaccctccagtcctatcctttgcacccagcctgccggtgttcccgagattcttaaaaaaagtctccattcctgctccgtcaaaggagaagaggaagtgttcctcatcggcaaaaatttcctgaaaggcaccaaggtcatctttcaagagaatgtatccgacgagaatagctggaaaagtgaggctgagatcgatatggagctgtttcatcagaaccaccttattgtaaaagttccaccgtaccacgatcaacacatcacactgcccgtttctgtgggcatttatgtagtgaccaatgctggtcgcagtcatgatgtccaaccattcacgtacacacccgaccccgctgcagcaggtgccctaaacgtaaatgtgaagaaggagatatctagtccagccaggccatgttcttttgaggaggccatgaaggctatgaagactaccggatgcaaccttgacaaggtcaacattattcctaacgccctcatgacaccgctgatcccttcctccatgatcaagtccgaggatgtaactcctatggaggtgaccgcggaaaagcgatcttctactatcttcaaaaccaccaagagtgtcggatcaacacaacagacacttgaaaatattagcaacatagctggaaacggctcattctcttccccatcttcaagtcatttgccttccgagaacgagaagcagcagcagattcaaccaaaagcctacaaccctgaaacgctgacaaccatacaaacccaagacatctcccagcctggcacctttccggcggtctcggccagtagccagctacctaattcagacgccctgctccagcaggcaacccaatttcaaaccagagagacacaatcacgggaaatcctgcagagtgatgggaccgtggtgaatctcagccaactaaccgaggcatcacaacagcagcagcagtccccattgcaagaacaagcccaaacacttcagcaacagatcagcagcaacatcttccccagtccaaacagcgtatctcagctccagaacaccatccagcagttgcaggccggatcatttactggtagtacagccagcgggtccagtggttccgtcgacttagtgcagcaggtgctcgaggctcaacagcagctgagcagcgtgttgttctctgctcccgacggcaatgagaacgtccaagagcagctatccgctgacatattccaacaggtcagtcaaatccagagtggcgtcagtcccggcatgttcagcagcaccgagcctacagtgcacacacgtcctgataatctgctgcccgggcgagccgagagcgtacacccccaaagcgagaatacattgagcaatcagcagcagcagcagcagcagcagcagcaggtgatggagtcctctgccgccatggtcatggagatgcaacagtcaatctgtcaagccgctgctcagattcagtcagaactgtttcccagtacagcctcagctaacggaaatttgcagcaaagtcctgtttaccagcaaactagccatatgatgtcggcactgagtacaaacgaggacatgcagatgcagtgtgagctattttcctctccacctgcggtctccggcaatgagactagtacgaccaccactcaacaggtcgccaccccggggacaacaatgtttcagacatcttctagcggtgatggtgaagaaactggcacccaggcaaaacagatccaaaatagtgtgttccagacaatggttcaaatgcagcattctggggacaatcagccacaagtcaacttgttctcctctaccaagtccatgatgagtgtgcagaactccggtacacagcagcaggggaacggtttgtttcagcaaggcaatgagatgatgagtctgcagtccggaaacttcctccagcagagtagccatagccaggcccagctgttccacccacagaatcctattgcagacgcgcagaatttatctcaggagacacaggggtctctcttccatagtcccaaccctatagttcactctcaaacctctacaacttctagtgaacagatgcaaccccctatgttccactctcaatctacgatcgccgtactgcaaggttctagtgttcctcaggatcagcagagcactaacatcttcttgagccagtcacctatgaataacttgcaaacaaatacagtagctcaggaagcatttttcgccgcaccgaactcaatctcgccacttcaatcaactagtaacagcgagcaacaggctgctttccagcagcaggcaccaatctctcatattcagacacctatgttgtcacaagagcaagctcaaccccctcaacagggattgtttcaaccacaggtcgccctgggaagtctgccgcctaatccaatgccacaaagccagcaggggaccatgtttcagagccagcacagcattgtggcgatgcagtccaattctcccagccaggagcagcaacagcaacagcagcagcagcaacagcagcagcagcagcagcagcaatccatccttttttccaatcaaaacaccatggccactatggcttccccaaagcagcctcctcccaacatgatcttcaatcccaatcaaaatcccatggccaatcaggagcagcagaatcagtcgatatttcatcagcaaagtaacatggctccaatgaaccaggaacagcagcctatgcagtttcagtctcagagcaccgtgtcctcgctccagaacccgggcccaacacaaagcgaatcttcccaaactccactcttccacagctcgccgcagatacaactagtgcagggctctcccagctcccaggaacagcaggtaaccctttttctgagcccagccagtatgtcagccttgcagaccagtataaatcagcaggatatgcagcagagtcctttgtactcacctcagaataacatgcctggcatccaaggcgctacctccagtccccagcctcaggccacactatttcataacaccgctggaggcactatgaaccaactccagaactccccaggctcttctcaacagacgtctgggatgttccttttcggaattcagaacaattgttcccaactccttaccagcggacccgcaacactgcccgatcagttaatggcaatctcccagccgggacagccccagaatgagggccagcctcccgtcacaaccttgctcagtcagcagatgccagaaaacagccccctggcttcaagcatcaacactaatcaaaatatcgagaagattgacctcctcgtgagtctccaaaaccaggggaacaacctaacgggctccttttag

SEQ ID NO: 237059 - DNA, 4368 bp, Artificial Sequence
  derived and/or modified sequence
atgggtggtgcctgctcttcttttacgacatcgagcagtcctacgatctactcaacgtccgttaccgactccaaggcaatgcaggttgagtcttgctccagtgctgtcggggtctcaaataggggtgtatctgagaagcaactcacttctaacacggtccaacaacacccgtctactcctaaaagacatacagtactgtatatctcccctccacctgaggatctcttggacaactcaagaatgagttgtcaggatgagggctgcggactggagtctgagcaaagttgctcgatgtggatggaggactccccaagcaactttagcaacatgtccacctcatcttataatgataataccgaggtgccccgcaaaagcaggaagagaaaccccaagcagaggccgggggttaagagacgagattgcgaagaaagtaacatggacatttttgacgctgattcagcaaaagcaccacactatgtgctatctcagcttaccactgataataaggggaactcaaaggccggcaatggcactctggagaatcaaaagggaacgggggtaaaaaaatcccctatgctgtgcggacagtaccctgtgaagagcgaagggaaagaactaaagatcgtcgtccagcccgagacccagcacagagcccgttatctcacagaggggtcccggggctcagtcaaagatagaacgcagcaggggtttcccacagtgaaattggaggggcacaacgagcccgttgtgctccaggtcttcgtcggaaatgactccggccgtgtcaaaccccacggcttctaccaggcctgtagagtgactggccggaataccaccccttgtaaagaggtagatatcgagggcactaccgtgatagaagtaggtcttgacccaagcaacaatatgaccctggccgtcgattgcgtaggaatcctcaaattgcgcaacgcagatgtcgaggctcggatagggattgccgggtccaagaaaaagagcacaagagcccgactagtgtttagagtgaacattatgcgcaaggacggatccacacttactcttcagaccccaagcagccccatcttatgcacgcaacccgccggggtccctgagatcctcaagaagtctctacacagctgttcagtcaagggtgaggaagaagtcttccttatcggtaagaattttttaaaaggtacgaaagtaatatttcaagagaatgtgagcgacgaaaactcctggaaatctgaggccgagattgatatggagctgttccaccaaaatcatctgatcgtgaaggttccaccctaccatgatcagcacattacgctgcctgtgtcagtgggtatttacgttgtgaccaatgccggacgcagccatgacgtccagccattcacttacacaccagaccccgcagcggccggagcccttaacgtcaatgtcaaaaaagaaattagcagccccgccaggccttgttctttcgaagaagcgatgaaggctatgaaaacaactggctgcaacctcgacaaagtgaacattatcccgaacgcgcttatgacccccttaatcccatcaagcatgattaaatctgaagacgtgacccccatggaggttaccgccgagaagcgatctagcaccatcttcaagaccaccaagtcggttggcagcacgcagcagaccctcgagaacatcagcaatatcgccggaaacgggtcttttagcagtccctcttcctctcatctgccgtccgagaacgagaagcaacagcagatacagcctaaggcctacaatcccgagaccctgacaactattcaaacccaggatataagtcaaccaggtacattcccggctgtgtcagcgagcagtcagttgccaaactccgatgccctgctgcaacaggcgacacaatttcagactcgagagactcaatccagagagattctgcagagtgacggcacagtcgtgaacctgtcccagctcacggaggctagtcagcagcaacagcagtcccccttacaagaacaggcccagacattacagcaacaaataagctcaaatatcttccctagccctaacagcgtgtctcagctgcagaacacaattcaacagctccaagcaggctccttcacaggctccactgcgtccgggagttcaggctcagtcgacttggtgcaacaggtcctcgaagcccagcagcaactctcgtcagtgcttttcagtgctcctgatggaaatgagaacgtgcaggaacagttgtccgccgacatcttccaacaggtgtctcagattcagtcaggagtcagtccaggcatgttttctagtaccgagcccaccgtacacacgcgtcctgacaacctgctgcctgggcgcgcagagagcgtgcatccccagtcggaaaataccctgagtaatcagcagcagcagcaacagcagcagcaacaagtaatggagtcatcagccgccatggttatggaaatgcaacagagcatctgtcaggccgccgcacagatccaaagcgaactttttccctcaacggccagcgctaatggaaacctgcagcagtcgccagtgtatcaacaaacatctcatatgatgagcgctctttctaccaatgaagacatgcagatgcagtgcgaattgtttagctcacctccagctgtgagcggtaacgaaactagtacgactactacacagcaagtcgccacccccggcactacaatgtttcaaacctctagttctggcgatggggaagaaactggaacccaggccaagcaaattcagaatagtgtgtttcaaaccatggttcagatgcagcacagcggcgacaaccagccccaggtcaacctgttctcaagcaccaaatccatgatgtccgttcagaactccggaacccagcaacagggaaacgggctgtttcagcaagggaatgagatgatgtcactccaatcaggcaacttcctccagcaaagtagccacagccaggcccagctgttccatccacagaacccgatcgcagacgcacagaacctttcccaggagacccagggaagcttattccactcacctaatcctatcgtgcattcacagactagtacgacttccagcgagcagatgcagccacccatgtttcatagccagagcaccatcgcggtgctgcaggggtcttccgtcccccaggatcaacaaagtacaaatatctttctgtctcagagtccaatgaacaacctacagaccaataccgttgcccaggaggcgttcttcgccgcacctaatagcatttctcccctgcaatccacatctaattcagagcaacaggccgcatttcaacagcaagcccctataagccacatacagactccaatgctgtcccaggaacaggctcagcctccccagcaaggattgttccagccacaggtggcattgggatcacttccccctaaccctatgccacagtcacagcaagggaccatgttccaatctcaacattccatcgtggcaatgcagagtaacagcccaagccaggagcaacagcagcagcagcagcagcagcagcagcagcagcagcagcagcagcaaagcattctcttcagcaaccaaaacaccatggcgactatggcatcgcctaaacaaccccccccaaacatgattttcaacccaaatcaaaacccaatggccaatcaggagcagcagaatcagagtatctttcatcagcaatcaaatatggcacccatgaatcaggagcagcaacccatgcaattccaaagtcaaagcacagtctcctccctgcagaaccccggtccaacacaatccgagagctcccaaacccctctgttccacagcagcccacagatacaactagtacaaggttctccgtccagccaggaacaacaggtaaccctgtttctctctcccgcgagtatgagtgccctgcagacatctatcaatcaacaggacatgcagcagtcccccctatacagcccccaaaacaacatgcctggaatccagggcgcaacaagctcacctcaaccgcaagcaacgctgttccacaacacagctggtggtaccatgaaccaactgcagaactctcctgggagctctcagcagacgagcggaatgtttctgttcggcatccaaaacaactgctctcaactgctaaccagcggaccagcaactcttccagaccagctgatggctatctcacagcctggccagccccaaaatgaaggccaacccccggtgactacacttctttcacagcagatgccggagaattctcctctcgcttcatcaatcaatactaaccagaacattgagaagatagacctgctggtctccctccaaaatcaaggaaacaatttgactggatccttctag

SEQ ID NO: 237060 - DNA, 4368 bp, Artificial Sequence
  derived and/or modified sequence
atgggcggggcatgcagcagctttactacctcttcttccccgaccatatactccacctcagttacagactccaaggctatgcaggttgaatcgtgttccagtgccgtgggagtgtcaaaccgcggcgtctcagagaagcagcttacatcaaacacagttcagcagcatccgagtacacctaagagacacactgtcctgtatataagcccacccccagaggacctgctagataactcccgaatgtcttgtcaagatgaggggtgcggcttggagtcggagcagtcatgttccatgtggatggaagactcgccctccaacttcagcaacatgtctacctctagttacaacgacaatactgaggtgccacggaaatcaagaaaacgaaaccctaaacagcggccgggggtgaagcggcgggactgcgaggagtctaacatggacatcttcgacgccgatagcgccaaagccccccattatgtcttatcacagcttaccactgacaacaagggcaactcgaaggccgggaatggcacattagagaaccagaaggggaccggagtgaaaaaaagtccaatgctgtgcggtcagtacccagtgaaatcggaggggaaagagttgaaaattgtggtacagccagaaacccagcaccgagcgcggtaccttaccgagggaagccgcggaagcgtgaaagacagaactcagcaaggcttcccaactgttaagctggagggccataacgaacccgtggttttgcaagttttcgtgggaaacgactcagggagagtcaagccccacgggttctatcaggcctgcagagtcacgggccgcaacactacaccttgcaaagaggttgacatagaggggaccactgtgatagaagtgggcctggacccctctaacaatatgaccttggccgtcgactgcgtgggtattctgaagctgagaaacgccgacgtggaggcgcggattgggatcgcagggtccaagaagaagagcacacgcgcccgacttgtgtttagggtgaacatcatgcgcaaggatggatccactctgaccttacaaacaccgagctcacccattctctgtacccagcctgcaggagtccccgagattctgaagaaatccctgcactcttgcagcgtgaaaggagaggaagaagtctttctcatcggaaaaaatttcctcaagggcacgaaagtaatctttcaagagaatgtgagtgatgaaaatagttggaagagtgaggcggagatcgatatggaactttttcaccagaatcatcttatagtgaaggttcctccctaccatgaccagcacattacccttccagtgagcgtcgggatctacgtggtgaccaatgcaggccgatcccacgacgtccagccatttacctatacaccagacccagccgctgccggcgcgctgaacgttaatgtaaagaaggagattagttctcccgccagaccctgttcctttgaagaggccatgaaggccatgaaaaccaccggatgcaatttggacaaagtaaacattatcccaaatgccctgatgacccccctgatcccatccagcatgattaagtctgaagacgttactcccatggaagtgacagccgagaagcgctccagcactatatttaagacaactaagtcagtgggcagcacacaacagacactagagaatatatcaaatattgctgggaacggaagctttagtagccccagtagctcacatctgccctcagaaaacgagaagcagcaacagattcagcccaaagcctataaccccgaaaccctgaccaccattcaaacacaggacatctcacagcccggcacttttccggcggtctctgcatcatcccagcttccgaattctgatgcactcctgcagcaggctacccaattccagacccgggagacgcagtctcgagagattctgcaatccgacgggactgtcgtgaacctttctcaacttaccgaagcttctcagcagcagcaacagtctcctttgcaggaacaagcccagacgctccaacaacagattagctcaaatattttcccatcacccaacagtgttagtcagctgcaaaacaccatccaacagctgcaggccgggagtttcaccgggtctactgcatcaggtagctccggttcggtggatcttgtgcagcaggtgctggaagcacagcagcagcttagctcagtgctgtttagcgcgcccgatggtaatgagaatgtccaagaacagttgtcagctgatatctttcaacaagtctcgcaaatccagagcggggtctcacctgggatgttttctagtacagaacccacggtgcatacccggcccgacaacctattgccaggcagggccgaaagcgtgcatcctcagtccgaaaacaccttatcaaatcagcagcagcagcagcagcagcagcagcaggtcatggagtctagcgcagccatggttatggagatgcagcagtcaatttgccaagccgctgctcagattcaaagcgaactgttccctagcacagcctccgccaatggcaaccttcaacagagtccggtgtaccagcagaccagtcatatgatgtccgctttaagcaccaacgaggacatgcaaatgcagtgcgaattattttccagcccccctgccgtttctggcaacgaaacgagcaccacaaccacacagcaggtggccacgcctggcactaccatgtttcagacatcctcatccggcgacggtgaggagaccggcactcaggcaaagcagattcaaaattccgtatttcaaacaatggtccaaatgcagcattccggggataaccagccacaagtcaatcttttttcatcaaccaaaagcatgatgtccgtccaaaatagcggtacccagcaacagggaaacggcttgttccagcagggcaacgaaatgatgtccttacagtctgggaacttcctccagcaaagctcccactctcaggcccagctgttccacccccaaaacccgattgcggacgctcagaacctgtctcaggaaacccagggatcactgtttcacagccctaaccccattgtgcattctcagacgagtacaacctcaagtgagcagatgcaaccccccatgtttcacagccagtccacaatagcagtcctgcaggggtcctccgtgccccaggatcagcagtcaactaatatctttctttcccaaagcccgatgaacaatctccaaacaaacactgttgcccaggaagcattttttgctgcccccaatagcatctctccgctgcaatctacaagcaattcagaacagcaggccgcattccaacaacaagctcccatttctcacatccagacacccatgctgagccaagagcaggcccagccacctcagcaggggctgtttcagccccaggtggcgctgggttcattaccgccaaatccgatgcctcagtcccagcagggaaccatgtttcagtcacagcactctatcgttgccatgcagtccaactcaccgtcccaggagcagcagcaacagcagcagcagcagcagcagcagcagcagcagcagcagcagagtattctcttctccaatcagaacacgatggctaccatggcatcacctaagcagcctccacctaacatgatctttaatccaaatcagaatcccatggcgaatcaggagcagcagaaccagagcatttttcatcagcagagtaatatggcgcctatgaatcaggagcaacagccaatgcaattccaaagtcagtcgacagtgagttcattacagaacccaggccctacgcagtctgaaagcagtcagacccctcttttccatagcagtccccaaatacagcttgtccagggtagtcccagctctcaggagcagcaggtcacactgttcctctcccccgcatctatgagtgccctgcaaactagtatcaaccagcaggatatgcagcagtccccgttatacagtccccagaataatatgcccgggatccaaggcgcaactagttcgcctcagcctcaggccactctgttccataacaccgccggtggtactatgaatcaactgcagaactctcctggatcaagtcaacagacaagcggtatgtttctgttcggcattcagaataattgttcacagctactcacctctggaccagcaaccctgcccgatcagctcatggccatttcacagcctggtcaacctcagaatgagggccagcccccagtcacgacactcctttcccagcagatgcctgaaaacagccccctggctagctccatcaacacgaaccagaacattgaaaaaatcgatcttctcgtgtcactgcagaaccaggggaataacctgaccggcagcttttag

SEQ ID NO: 237061 - DNA, 4368 bp, Artificial Sequence
  derived and/or modified sequence
atgggcggggcctgcagcagcttcaccaccagcagcagccccaccatctacagcacctctgtgacagacagcaaggccatgcaggtggagagctgcagcagcgctgtgggcgtgagcaacagaggagtgtctgagaagcagctgaccagcaacacagtgcagcagcaccccagcacccccaagaggcacacagtgctgtacatcagccccccacctgaggacctgctggacaacagcaggatgagctgccaggatgagggctgcggcctggagagcgagcagagctgcagcatgtggatggaggacagccccagcaacttcagcaacatgagcaccagcagctacaatgacaacacagaggtgcccaggaagagcaggaagaggaaccccaagcagaggcctggggtgaagaggcgggactgtgaggagagcaacatggacatctttgatgctgacagcgccaaggccccccactacgtgctgagccagctgaccacagacaacaagggcaacagcaaggctggaaatggcaccctggagaaccagaagggcactggagtgaagaagagccccatgctgtgtggccagtaccctgtgaagtctgagggcaaggagctgaagatcgtggtgcagcctgagacccagcaccgggcccgctacctgacagagggcagccggggctctgtgaaggacaggacccagcagggcttccccaccgtgaagctggagggccacaatgaacctgtggtgctgcaggtgtttgtgggcaatgattctggccgggtgaagccccacggcttctaccaggcctgccgggtgacaggcaggaacaccaccccctgcaaggaggtggacatcgagggcaccaccgtcatcgaggtgggcctggaccccagcaacaacatgaccctggccgtggactgtgtgggcatcctgaagctgagaaatgctgatgtggaggccagaattggaattgctggcagcaagaagaagagcacccgggcccggctggtgttccgggtgaacatcatgaggaaggatggcagcaccctgaccctgcagacccccagcagccccatcctgtgcacccagcctgctggggtgcctgagatcctgaagaagagcctgcacagctgcagcgtgaagggggaggaggaggtgttcctgattggcaagaacttcctgaagggcaccaaggtgatcttccaggagaatgtgtctgatgaaaattcctggaagtctgaggccgagattgacatggagctgttccaccagaaccacctgattgtgaaggtgcccccctaccatgaccagcacatcaccctgcctgtgtctgtgggcatctacgtggtgaccaatgccggccgcagccatgatgtgcagcccttcacctacaccccagaccctgctgctgctggggccctgaatgtgaatgtgaagaaggagatcagcagccctgcccggccctgcagctttgaggaggccatgaaggccatgaagaccaccggctgcaacctggacaaggtgaacatcatccccaatgccctgatgacccccctcatccccagctccatgatcaagtcagaagatgtgacccccatggaggtgacagctgagaagaggagcagcaccatcttcaagaccaccaagtctgtgggcagcacccagcagaccctggagaacatcagcaacattgctggaaatggcagcttcagcagccccagcagcagccacctgcccagtgaaaatgagaagcagcagcagatccagcccaaggcctacaaccctgagaccctgaccaccatccagacccaggacatcagccagcccggcaccttccctgctgtgtctgccagcagccagctgcccaacagtgatgccctgctgcagcaggccacccagttccagacccgggagacccagagccgggagatcctgcagagtgatggcaccgtggtgaacctgagccagctgacagaggccagccagcagcagcagcagagccccctgcaggagcaggcccagaccctgcagcagcagatcagcagcaacatcttccccagccccaacagcgtgtcccagctgcagaacaccatccagcagctgcaggccggcagcttcaccggcagcacagccagcggcagcagcggctctgtggacctggtgcagcaggtgctggaggcccagcagcagctgagctctgtgctcttcagcgccccagatggaaatgaaaatgtgcaggagcagctgtctgctgacatcttccagcaggtgtcccagatccagagcggcgtgtccccaggcatgttcagcagcacagagcccaccgtgcacaccaggccagacaacctgctgcccggccgggcagagagcgtgcacccccagagcgagaacaccctgagcaaccagcagcagcagcagcagcagcagcagcaggtgatggagagcagcgctgccatggtgatggagatgcagcagagcatctgccaggccgccgcccagatccagagcgagctgttccccagcacagccagcgccaatggaaacctgcagcagagccctgtgtaccagcagaccagccacatgatgtctgccctgagcaccaatgaagacatgcagatgcagtgtgagctgttcagcagccccccagctgtgtctggaaatgagaccagcaccaccaccacccagcaggtggccaccccaggcaccaccatgttccagaccagcagcagtggagatggagaggagaccggcacccaggccaagcagatccagaacagcgtcttccagaccatggtgcagatgcagcacagcggggacaaccagccccaggtgaacctcttcagcagcaccaagtccatgatgtctgtgcagaacagcggcacccagcagcagggcaatggcctcttccagcagggcaatgagatgatgagcctgcagagcggcaacttcctgcagcagagcagccacagccaggcccagctgttccacccccagaaccccatcgcagatgcccagaacctgagccaggagacccagggcagcctcttccacagccccaaccccatcgtgcacagccagaccagcaccaccagcagcgagcagatgcagccccccatgttccacagccagagcaccatcgctgtgctgcagggcagctctgtgccccaggaccagcagagcaccaacatcttcctgagccagagccccatgaacaacctgcagaccaacacagtggcccaggaggccttctttgctgcccccaacagcatcagccccctgcagagcaccagcaacagcgagcagcaggccgccttccagcagcaggcccccatcagccacatccagacccccatgctgagccaggagcaggcccagcccccccagcagggcctcttccagccccaggtggccctgggcagcctgccccccaaccccatgccccagagccagcagggcaccatgttccagagccagcacagcatcgtggccatgcagagcaacagccccagccaggagcagcagcagcagcagcagcagcagcagcagcagcagcagcagcagcagcagagcatcctcttcagcaaccagaacaccatggccaccatggccagccccaagcagcccccacccaacatgatcttcaaccccaaccagaaccccatggccaaccaggagcagcagaaccagagcatcttccaccagcagagcaacatggcccccatgaaccaggagcagcagcccatgcagttccagagccagagcacagtgagcagcctgcagaaccctggccccacccagagcgagagcagccagacccccctcttccacagcagcccccagatccagctggtgcagggcagccccagcagccaggagcagcaggtgaccctcttcctgagccctgcctccatgtctgccctgcagaccagcatcaaccagcaggacatgcagcagagccccctgtacagcccccagaacaacatgcctggcatccagggcgccaccagcagcccccagccccaggccaccctcttccacaacacagctgggggcaccatgaaccagctgcagaacagccctggcagcagccagcagaccagcggcatgttcctgtttggcatccagaacaactgcagccagctgctgaccagcggccctgccaccctgcctgaccagctgatggccatcagccagcccggccagccccagaatgaaggccagccccctgtgaccaccctgctgagccagcagatgcctgagaacagccccctggccagcagcatcaacaccaaccagaacatcgagaagattgacctgctggtgtccctgcagaaccagggcaacaacctgaccggcagcttctag

SEQ ID NO: 237062 - DNA, 4368 bp, Artificial Sequence
  derived and/or modified sequence
atgggcggcgcctgcagcagcttcaccaccagcagcagccccaccatttactccacctctgtaaccgatagcaaagcgatgcaggttgagtcttgctcaagcgccgtaggagtaagtaaccgtggagtcagtgaaaaacaactgacctcgaatacagtgcagcagcatccctccacacccaagaggcatactgtgctgtatatctcccccccccccgaagacctcttagataactcccgaatgagttgtcaggacgaaggctgtggactcgagagcgagcagagttgtagcatgtggatggaagactcacccagcaatttttctaatatgtccactagttcctacaacgataatacagaggttcctaggaaatcgcggaagcgtaaccccaaacagaggcctggagttaaaagaagagactgcgaggagagtaatatggacatctttgacgcagattccgctaaagcacctcattatgtcctctctcagctgaccactgacaacaagggaaactcaaaggccgggaacggaaccctggaaaaccaaaagggtacaggggttaagaagagcccaatgctgtgtggtcagtatccagtgaagtcggagggtaaagagcttaaaattgtggtgcaacctgaaactcagcatagggctagatacctgactgagggaagtcgcggttctgtcaaggatagaacccaacagggctttcccacagttaaactcgaaggccacaacgaacctgtggtccttcaggttttcgttggaaacgactctggcagagttaagccccatggtttttatcaggcctgcagggtcaccggaagaaataccacaccctgtaaggaagtggacattgaagggacaactgttattgaggttggcttggaccccagtaacaacatgactctggccgtggactgcgtgggcattcttaagctgaggaacgctgacgtcgaagcacgtatcgggatcgcaggctccaaaaagaaaagtactcgcgcccgcctcgtctttagagtaaacataatgcggaaagacggatcaacactgaccttgcagacccctagctctccaatcctgtgcactcagcctgccggggtacctgaaattctcaaaaagtctctgcatagctgctcagtcaaaggtgaggaggaggtgtttctgataggaaagaacttccttaagggaaccaaggttattttccaagaaaatgtctccgatgaaaattcctggaagagcgaggccgaaattgatatggagttattccatcagaaccacctaatcgtgaaagttccaccttaccacgaccaacacatcactctgcctgtctcagttggcatttacgttgtcaccaacgccggtagaagccatgatgtgcagccattcacctacacacctgatcctgccgcagccggggccctaaatgtgaacgtaaagaaggaaatttccagccctgctagaccttgctctttcgaggaggcaatgaaggccatgaagaccaccgggtgcaacctggacaaagtgaacattatcccaaatgctctgatgacacccttaattccctcgtcaatgatcaagagtgaggatgtcaccccgatggaagtcacggcggagaaacggtcttcgactattttcaagactaccaagtcggtcgggtcaactcagcaaacgctggagaacatatccaatattgccggtaacggcagcttctcatctccgtctagttcacaccttccctcagagaacgagaagcagcagcagatccaacctaaagcttacaatcctgagactctgacaactatccagacacaggacatatctcagcccggcacttttccggctgttagtgccagcagccagctccccaactcagacgcactacttcagcaggccacccagtttcaaactagagagacgcagtcacgggaaatactacagtcagacggtacagtggtgaatttatcccaactgacggaggcgtcccaacagcaacaacagtcgccacttcaggagcaggcccagaccctacagcagcagatcagctcaaacatttttccgagccccaactcagtgtcccagctccaaaatactattcagcagctccaggctggctcttttactggcagtaccgcctcaggctctagcgggagcgtagaccttgtgcaacaggtacttgaggctcaacagcaactgtctagcgttctcttcagtgctcctgacggaaacgagaacgtccaggaacagctttccgctgacattttccagcaggttagtcaaatccaatctggcgtgtctccaggaatgttcagcagtaccgagccgactgtgcacactcggcctgacaacttactgcccgggcgtgctgagagtgtgcacccccagtctgagaacaccttgagcaatcagcagcagcagcagcagcagcagcagcaagtgatggagtcatcagcggcaatggtgatggaaatgcagcaatctatatgtcaagctgcggcccagattcagtccgagctgtttccctcaactgcatcagcgaatggaaacttacagcagtcccccgtgtatcagcagacttcgcacatgatgtctgctctgagtacaaacgaagatatgcagatgcagtgcgagctgttctcctccccaccagctgtctccggcaatgaaacaagcacaactacaacccagcaggtggcaacccccggaacaaccatgtttcagacatcaagctctggcgatggcgaggagacagggacacaggcgaagcagatccagaacagcgtttttcagaccatggtccagatgcagcacagtggcgacaaccaacctcaagtgaatctgttttcttctactaaatcgatgatgtcggtgcagaattcagggacacagcagcaggggaacggactcttccagcagggtaacgaaatgatgtccctgcaatctgggaactttctgcaacaatcatctcacagccaggcacagctgttccacccgcaaaaccctattgctgacgcacagaacctatctcaggaaacacagggtagtctgttccatagtccaaatccaattgtccacagccagacctctaccaccagcagcgaacagatgcaaccacctatgtttcatagccagtcaacaatcgctgtgctccaggggagcagtgttccccaagatcagcagtccacaaacatcttcctctcacaatcacctatgaacaacctacagacgaataccgtcgcccaggaagccttcttcgcagctccaaactctatatccccgctgcagtccacctccaactctgagcaacaggctgcctttcagcagcaggcacccatttctcacattcagacccctatgctttcccaggagcaagcgcagcccccccagcagggtttattccagccccaagtggcactcggctccctgccccctaatcccatgcctcagagccaacaaggaacaatgttccagagtcaacacagcatcgttgctatgcagtcaaacagtccgagtcaagaacaacagcaacagcagcagcaacagcagcagcagcagcaacagcagcaacagagcatccttttcagtaatcagaacacaatggcgacgatggcatctccaaagcagccccctccgaacatgattttcaaccccaatcagaaccccatggccaatcaggagcagcagaatcagagcatcttccaccagcagtcaaatatggctccgatgaatcaggagcaacaaccaatgcaattccagtctcagtctaccgtgtcatcccttcagaatcccggaccaacccagagcgagtctagccagactccgctcttccattctagccctcaaattcagctggtgcaggggagtcctagcagtcaagagcagcaggttactctgttcctaagcccagccagcatgtccgctttacagacttccatcaaccagcaggacatgcagcagtcccccctgtatagtccccagaacaatatgccaggaatacagggtgccacgagcagcccgcaaccccaagctacactttttcacaacactgcaggcgggactatgaaccagctgcagaattccccaggatctagccaacagaccagtggtatgttcttgttcggcatccagaacaattgcagccagctgttaacttcggggcccgccacactcccagaccagctcatggccattagccagcccggccagccccagaacgaaggccagcctcctgttacaaccctgctctctcagcagatgcccgagaatagtcctttagccagtagtatcaacactaatcagaatatcgaaaaaatagacctgctggtgtcactccagaaccaaggtaacaatctgaccggctccttctag

SEQ ID NO: 237063 - DNA, 4368 bp, Artificial Sequence
  derived and/or modified sequence
atgggcggcgcctgcagcagcttcaccaccagcagcagccccaccatttactctactagcgtgacagactcaaaggctatgcaggtagagtcatgctcgtcagcagtcggtgtgtccaaccggggtgtgtccgaaaagcagcttactagtaataccgtgcaacagcatccatcaaccccgaaacgccacaccgtcctgtacatctcccctccccctgaggacctgctggataactcaaggatgagttgccaagacgaaggctgtggactggagagcgagcaatcttgctccatgtggatggaggactcaccgtcaaacttctccaacatgtcaacttcttcatacaacgacaacacagaggttccaagaaagtcccgcaagagaaaccccaagcagcgccctggagtgaaacgtagggattgtgaagagtctaatatggacatctttgacgcggatagtgcaaaagcaccccactacgtgctgtctcagctgacaactgataataagggaaactccaaggccgggaatggaaccttggagaatcagaagggaacaggtgtgaaaaaaagcccaatgttgtgtggacagtacccagtgaaaagcgagggtaaggaactgaagattgtggtccagccagaaacccaacatcgcgcccgctatttgaccgaagggagtagaggctccgtgaaagaccgtacgcagcagggttttccaacggtcaaactggaaggccacaacgagcctgtcgtgttacaggtctttgtgggaaatgatagtggaagggtgaaaccccacggcttttatcaggcctgtcgcgttaccggtcgcaatactaccccatgcaaggaagtcgatattgagggtaccaccgtgatcgaggtaggcctggatccttctaacaatatgaccctggctgtggactgtgttggaattcttaaactcagaaacgcagacgttgaggctcggattgggatcgcgggatctaagaaaaaaagtacccgagcacggcttgtcttccgcgtcaacattatgagaaaggatggctccacgctgacactccagaccccctctagtcccatcttgtgtacccaaccggccggcgtccccgaaatcttgaagaagtccctgcacagttgctcagtcaagggggaagaagaggtttttcttatcggtaaaaactttctgaaaggaactaaggtcatcttccaggagaatgtgagtgatgagaatagctggaagtcagaggccgagatcgatatggaactcttccaccagaaccatctaattgtgaaggtgcccccataccacgatcagcatatcaccttgccagtgagtgtcggaatatacgtcgtaacaaacgcaggacgtagtcacgacgtgcagccattcacttataccccggacccagccgccgccggagctctcaatgttaatgtgaagaaggaaatttccagtcccgctcggccctgctcatttgaggaggcgatgaaggcaatgaaaactaccggctgcaatctggataaagttaacataatacccaatgctctgatgacacctctgattccatcgtccatgatcaagtcagaggatgtgacccccatggaggtgacggcagagaagaggtcgagcactatctttaagaccaccaagagtgttggctccacacagcagaccttagagaatatttctaatatagccggaaatggctcatttagctcccccagcagttctcatttaccatcagaaaacgaaaaacagcagcaaatccagccaaaggcctacaatcctgaaacactcacaaccatccaaacccaggacatcagtcagcccggcacatttccagctgtctcagccagttcacaactgccaaactctgacgccttgctgcagcaggcaactcagtttcagacaagagagacccagagccgggagatcctccaatcagacggcaccgtggtgaacctgtcacagctgacagaggctagccaacagcagcagcagtcacccttacaggaacaagcgcagaccctgcagcaacagatcagcagtaacatttttcctagtcccaattcagtgtctcagcttcagaatacgatccagcaactgcaggccgggtcttttaccggtagcacagcatctggtagtagcggaagcgttgatctagtgcagcaggtgctagaagcgcagcagcagctttcttctgtcctgttctccgctcctgatgggaatgaaaacgttcaagagcagctgagcgccgacattttccaacaggtgtcccagatccagtccggtgtctcaccgggaatgttttcaagcaccgaacctacagtccacacaaggcctgataacctcctcccaggccgtgcagagtcagtacatccacagagcgaaaacaccctgtctaatcagcaacagcaacagcagcagcagcagcaggtgatggagagctcagccgccatggtaatggagatgcaacaatccatctgtcaggccgcagcacagatccagtcagaattatttccgtctacagcaagtgcgaatggaaacctccaacagtcaccggtatatcaacagacctcgcatatgatgagcgccctctccacgaacgaggacatgcagatgcagtgcgaattatttagcagccccccggcagtgagcggaaatgaaacaagtaccactactacccagcaggttgccacacccggcaccaccatgtttcagacatcttcaagtggggacggagaggagactgggactcaagcaaaacagatacagaacagtgtctttcagaccatggttcagatgcagcactccggggataaccaaccacaagtgaacctcttctcttcaactaagtcaatgatgagcgtgcaaaattctgggactcagcagcaaggaaacgggcttttccagcaaggcaatgagatgatgagccttcaatcaggaaattttttacagcagtcttcccatagccaagcccagctctttcatcctcagaaccccattgccgacgcacagaatctttctcaggaaacgcaggggtctctattccattctcctaatccaattgttcattcacaaaccagcaccacttcctcagagcagatgcaaccaccaatgttccatagccagtctactatagctgtgctccagggttcgtcagtcccccaggaccagcagagtacaaatattttcctgagccagagtcctatgaataatctgcaaactaacacagtggcacaagaggccttctttgctgcaccaaatagcatcagccctctacagagcacgtcgaacagcgagcagcaggccgcatttcagcagcaagcaccaatatcccacatacagacccccatgctgtctcaggaacaggcacagcccccccagcaggggctgttccagccacaggtggcactgggcagcttgccgcccaaccccatgcctcagtcgcagcaggggaccatgtttcagagtcagcactccatcgttgcgatgcagagcaattccccttcccaggagcagcagcagcaacaacagcagcaacagcagcagcagcaacaacaacaacaatccatcctcttcagtaaccaaaacaccatggccactatggcaagtccaaagcagcctcccccaaacatgattttcaatccgaatcagaaccccatggccaaccaagagcagcagaaccagagcattttccatcaacagtcaaacatggctccaatgaaccaagaacaacagcccatgcagttccagtctcagtctaccgtctcctccttgcagaaccctggtccgacacagtctgagtcaagccaaacaccactgtttcacagctccccacagattcaactcgtccagggttccccttcatcacaggaacagcaggtgaccctattcctctcacccgcatctatgtctgcactccagacaagcattaatcagcaagacatgcagcagtcccccttatacagcccccagaacaatatgcccgggatccagggcgctacttcatctccccaaccacaggctactctgttccacaacaccgcgggggggaccatgaatcagctgcaaaattcaccgggttcgtcccagcagaccagtggcatgtttctgtttggcattcagaataactgctcacagcttctgacttcaggtccagccactcttccggatcagctgatggcaatatctcagccaggccagccacagaatgaggggcaacctcccgtgacaactctcctgagccagcagatgccagagaacagccccctcgcctcttcaataaatacgaaccagaatatagagaagatcgatttgctggtgtcactgcaaaaccaaggaaataacctgactggaagcttctag

SEQ ID NO: 237064 - DNA, 4368 bp, Artificial Sequence
  derived and/or modified sequence
atgggcggcgcctgcagcagcttcaccaccagcagcagccccaccatttacagtacaagcgtaacagatagcaaagcaatgcaggtggaatcatgttccagcgctgtaggggtgagtaaccgaggagtgtccgaaaaacagctcacgagcaacacagtgcagcagcacccctcaacacctaagagacacacagttctgtatatctccccaccacccgaggatctgttagacaacagcaggatgtcttgccaggacgagggatgcggcttggaaagtgagcaaagctgcagcatgtggatggaggatagcccatcaaattttagtaatatgtccacctcaagttataacgacaatactgaggtgccgcggaaatcaaggaaacggaatcccaaacaacgtcccggcgtgaaacgacgggattgtgaggaaagtaacatggatatttttgatgctgacagcgccaaggcaccacactacgtcctctcccaattgacaactgacaataagggaaatagtaaggctggcaacggcacccttgaaaaccaaaaagggacgggtgtgaagaaatcccctatgctctgtgggcaatatcctgtcaagtctgagggtaaggagctgaaaatcgttgtacagcctgagacacagcaccgagctcggtatcttacggagggcagcagggggtctgtgaaggacagaacccagcaggggtttcccactgttaagctagaaggacataacgagccagtcgtgttacaggtgtttgttgggaatgatagcgggagagtgaaaccacacggcttctaccaggcgtgccgagtgactggccggaacacaaccccttgcaaggaagtagacatagagggcacgaccgtgatagaggtgggcttagacccttccaataacatgacactggctgtggattgcgtaggaattttaaaactgaggaatgccgatgttgaagcccgcattggcatagccggaagtaaaaagaagtccacgcgggcccgtctggtctttcgagtgaacattatgaggaaggatggctcaaccttgacattgcaaactccgagctcccctatcttgtgtacacaaccagcaggagtgcccgaaatcctaaagaagtccttgcattcctgctctgtcaaaggcgaggaggaagtgtttctgatcggcaaaaatttcctgaaaggcacaaaagtgatcttccaggagaacgtctcagacgaaaacagctggaaatcagaagccgagattgatatggaactgtttcaccagaaccacctgatcgtgaaagttccaccctaccatgaccagcatatcaccttgcccgtatccgtgggcatttatgtcgtcaccaatgcaggtaggagccatgacgtgcagccatttacatatacccccgatccagccgctgctggggctttgaacgttaatgtcaagaaggagatctctagtccagcacgcccatgcagcttcgaggaggcgatgaaggccatgaaaacgactggttgcaacctggataaggtgaatatcataccaaatgcccttatgactcctttaatccctagttcgatgattaagtccgaggatgtcactcctatggaagtgactgccgaaaagagaagttccactattttcaaaacaacgaagagtgtggggagcacacagcaaactctcgagaatattagcaatattgccggaaatggcagcttctctagcccctcctctagccatttgccaagcgagaacgaaaagcagcagcagatacagcctaaggcctataatcccgagaccctgaccactatccagacacaggacatctctcagccaggcacttttccagcagtctcagccagcagccaactgccgaacagtgacgctttactccagcaggcaactcagttccaaaccagggaaactcagtcgcgcgagattttgcaatcagacggtactgtggtgaatttgtcccagctgactgaagctagccagcagcagcaacaaagccctctccaagagcaggctcagactctgcagcaacagattagttctaacattttcccttctccaaatagtgtgagccagttacagaacactattcaacagctgcaagcaggctcctttacggggtcaacagcatccggctcctctgggagtgtggacctggttcagcaggttctcgaggcgcaacagcagctaagttccgttctgtttagcgcacccgatggtaacgaaaatgtgcaagagcagctgagcgccgatatattccagcaggtgagccagatacagtccggcgtttcgcccggtatgtttagcagtacggaaccaaccgttcacactcgcccagacaacctcttgcccgggcgagccgagagcgtgcatccgcaaagcgagaatactctgtccaatcagcagcagcagcagcagcagcaacagcaggtaatggagtccagtgccgccatggtcatggagatgcagcagtcaatctgtcaggccgctgcgcaaatccagagtgagctgttcccatcaactgcctccgcaaatggaaacctgcagcagtcgccagtctaccagcagaccagccacatgatgtcagcattgtctacaaatgaagatatgcaaatgcagtgtgagcttttcagctcgccgcctgcagtgagtggcaacgaaacatcaacaaccaccacacagcaggtggccacccccgggaccaccatgttccaaacatcttcttcaggggacggcgaagaaaccggtacccaggctaagcaaatccagaactctgtgtttcaaacaatggtacagatgcagcactccggtgacaatcagcctcaggtgaacctcttctcaagtactaagtcaatgatgtctgtgcagaatagcgggacccagcaacagggtaacggcctttttcagcagggcaacgagatgatgtctttacagagcgggaactttctacagcagagctcgcactctcaggcccaactgttccaccctcaaaacccaattgctgatgcgcaaaacctttctcaagagacacaagggtcactattccacagtcccaacccaatcgtgcacagccagactagcacaaccagctcagaacaaatgcagcccccaatgttccactcccagtcaaccatcgccgtcctacagggatctagcgttccacaggatcaacagtctacaaacatttttttgtcgcaatctccgatgaataatctacagacgaacacggttgctcaagaggcttttttcgcagcaccaaatagcatatcacccttacaatccacctctaacagtgagcagcaggccgccttccagcagcaggctcctatctctcatatccagacccccatgctgtcccaagagcaggctcagcccccccagcaggggttatttcagccgcaggttgcactgggatccctgccgcctaatcccatgccacaatcacagcagggaacgatgtttcagtcccagcattctattgtggcaatgcagagcaacagccccagccaggaacagcaacagcagcaacagcagcagcaacagcagcagcagcaacagcagcagtcaattttgttctcgaatcagaacacaatggccacaatggctagcccaaagcagcccccaccaaacatgatattcaaccccaatcagaatcccatggcgaatcaggagcagcagaaccagagcatcttccaccagcagagcaacatggccccaatgaatcaggagcagcagccgatgcagtttcagagtcaatctacagtgagctctctgcagaaccccgggccgacccagtccgagagtagccagacacccctgtttcatagttcccctcagatccagctagtgcaggggtcaccgtcaagccaagaacagcaggtgactttgtttctatcccccgcttcaatgagcgccctgcaaaccagtatcaaccagcaggatatgcaacagagtcccctgtacagcccacagaataatatgcctggcatacagggggccacgagttcaccccagccccaggcaacccttttccataatacagctgggggcactatgaaccagctccagaactccccagggtccagtcagcaaacaagtgggatgttcttgtttgggatccagaacaactgcagccaactcctgacctccgggcccgcaaccctacctgatcagctgatggcaatctctcagcccggccagccacagaacgagggtcagccacctgtgaccacgttactttctcaacagatgcctgaaaattcccctctggcctcatccatcaacactaaccagaatattgaaaagatcgaccttctcgtttcactgcagaaccaaggaaataacctaaccggatccttctag

SEQ ID NO: 237065 - DNA, 4914 bp, Artificial Sequence
  derived and/or modified sequence
cgcccaagtccctctactcgcgagaatctgtctatgatcttctcccaaaggagttacagttacctccatctagagaaacatctgtagcatcaatgagtcagacaagcggtggtgaggcaggctcgcctcctccagctgttgttgctgctggatttgcctctgaagcagggagtgtctgcattaaaaatgacctgtagttctctgcttcatagatgcttcttcagctccctcctcttcctccatgggcggtgcttgcagctcctttaccacctcttccagccctaccatttattctacctcagtcaccgacagcaaggctatgcaagtggagagctgctcctcagccgtgggggtaagtaacagaggggtaagtgaaaagcagttaaccagtaacacagttcagcagcatccatcaacaccgaagaggcacacagtcttgtacatctcaccaccacctgaggacttgctggataacagtcggatgtcctgccaggatgaggggtgtggattggaatctgagcagagctgcagtatgtggatggaggattccccctccaacttcagtaacatgagcaccagttcctacaatgataacactgaggtacctcgtaaatcacgaaaacgaaatccaaagcagaggccgggggtcaaacgacgagattgtgaagaatctaatatggatatatttgatgccgacagtgccaaagcacctcactatgtgctttctcagcttaccacggacaacaaaggcaactcaaaagcgggaaatggaacattggaaaaccaaaaaggaactggagtaaagaagagccctatgttgtgtggacaatatcctgttaaaagtgagggaaaggagctgaagatagttgtacaacctgagacacagcaccgagctcggtacctgactgagggcagccgtggctcagtgaaagatagaacacagcaaggctttcctacagtaaagctggaaggccataatgaacctgtagtgttgcaagtgtttgtgggcaacgactctggacgagtgaaaccacatggattttatcaggcctgcagagtaactggacgaaatacaactccttgcaaagaagtggacattgaaggcactactgttatagaagtcggccttgatcctagcaacaacatgacactggcggtggactgcgtagggatattgaaattgaggaatgctgatgtcgaagccagaataggaattgctggttccaagaagaaaagcactcgtgccagattggtttttcgagttaatatcatgaggaaagatggctccactttgacactgcaaacaccctcttctccaattttgtgtactcagccagcaggagtgccagaaatcttaaagaaaagcttgcatagctgttcagtgaaaggagaagaagaagtgtttttaatcggcaagaactttctgaaaggaactaaagttattttccaagaaaatgtttctgatgaaaactcttggaagtcagaagctgaaattgatatggaactatttcatcagaatcatcttattgtgaaggttcctccctatcatgaccaacatataactttgcctgtgtcagtgggaatatatgtagtgacaaatgctggaagatctcatgatgttcaaccattcacttacactccagacccagcagcagctggtgctttgaatgtaaatgtgaagaaggaaatatctagtccagcaagaccttgctcttttgaagaggccatgaaagcaatgaaaactactggatgtaatttagataaggtaaatattatccctaatgccctgatgactccactcataccaagcagtatgattaagagtgaagatgttactccaatggaagtaacagcagaaaaaagatcttccactatttttaagactacaaagtctgttggatcaactcagcaaacattagaaaacatctcaaacatagcaggaaatggctctttttcatcaccatcatcttcccacctaccttctgaaaatgaaaaacagcagcagattcagcccaaggcatacaacccagagaccctgacaactattcaaacccaggacatctcacagcctggtacttttccagcagtttctgcttctagtcagctgcccaacagcgatgcactattgcagcaggctacacagtttcagacaagagaaactcagtctagagagatattacagtcagatggtacagtggttaatttgtcacaactgactgaggcatcacaacaacagcagcagtcaccactacaagaacaagcacagactttacagcagcagatttcatcaaatatttttccatcaccaaatagtgtgagtcagcttcagaatactattcagcagctgcaagcagggagtttcacaggcagtactgctagtggcagcagtggaagtgttgacttggtccaacaagttttagaggcacagcagcagttatcttcagttttattttctgctccagatggtaatgagaatgttcaagagcagcttagtgcagatatttttcaacaagtcagtcaaattcagagtggtgtaagccctggaatgttttcctcaacagagccaacagtccataccagaccagataatttattacctggaagagctgaaagtgttcatccacagtctgaaaacacgttatctaatcaacagcagcagcagcagcagcaacagcaagtgatggaatcttcagccgcaatggtgatggagatgcaacagagtatctgccaggcagctgcccagattcagtcagagttattcccttcaactgcttcagcaaatggaaaccttcagcaatcgccagtttaccagcagacttctcacatgatgagtgcattgtctaccaatgaggatatgcaaatgcagtgtgaattgttttcttctcctcctgcagtttctggaaatgaaacttctacaactaccacacagcaggttgcaacccctggcactaccatgtttcagacatcaagttcaggagatggagaagaaactggaacacaagcaaaacagattcagaacagtgtctttcagaccatggtccaaatgcaacatagtggggacaatcaacctcaagttaaccttttttcatccacaaaaagtatgatgagtgttcagaatagtggtacccaacaacaaggtaatggtttattccagcaagggaatgagatgatgtcacttcaatctggaaattttttgcagcagtcttctcattcacaggcccaactttttcatcctcaaaatcctattgccgatgctcagaacctttcccaggaaactcaaggttctctctttcatagtccaaatcctattgtccacagtcagacttctacaacctcctctgaacaaatgcagcctccaatgtttcactctcaaagtaccattgctgtgttacagggctcttcagttcctcaagaccagcagtcaaccaacatatttctttcccagagtcccatgaataatcttcagactaacacagtagcccaagaagcattttttgcagcaccgaactcaatttctccacttcagtcaacatcaaacagtgaacaacaagctgctttccaacagcaagctccaatatcacacatccagactcctatgctttcccaagaacaggcacaacccccgcagcagggtttatttcagcctcaggtggccctgggctcccttccacctaatccaatgcctcaaagccaacaaggaaccatgttccagtcacagcactcaatagttgccatgcagagtaactctccatcccaggaacagcagcagcagcagcaacagcagcagcaacagcagcagcaacaacaacagagcattttattcagtaatcagaataccatggctacaatggcgtctccaaagcaaccaccaccaaacatgatattcaacccaaatcaaaatccaatggctaatcaggagcaacagaaccagtcaatttttcaccaacaaagtaacatggccccaatgaatcaagagcaacagcccatgcaatttcagagtcagtccacagtttcctcacttcagaacccaggtcctacccagtcggaatcatcacagacccccttgttccatagctctcctcagattcagttggtacaagggtcacctagttctcaagagcagcaagtaactctcttcttatctccagcatccatgtctgccttgcagaccagtataaatcaacaagatatgcaacagtctcctctttattcccctcagaacaacatgcctggaattcaaggagccacatcttcgcctcaaccacaggctactttatttcacaacacagcaggaggcacaatgaaccaactgcagaattctcctggctcatctcagcagacatcaggaatgttcttatttggcattcaaaataactgtagtcagcttttaacctctggaccagctacattgcctgatcagttgatggccataagtcagccaggccaaccacaaaacgagggccagccacctgtgacaacacttctttctcagcaaatgccagagaattctccactggcatcctctataaacaccaaccagaacatcgaaaagattgatttgcttgtttcattgcaaaaccaagggaacaacttgactggctccttttaactggatatgtaagtattgcattttggcttcttattgaaaagcatcagattttattcttcttaacagatttaggttaagtaatagtagttctaatcttttaaaatgtggctttctcacaagatgatacttttttactctgaataaaattattctgaatgatagcttatggtcatatagttaatacagaccaggccgggcgtggtggctcatgcctgtaatcccagcactttgagagaccaaggtgggcggatcacgaggtcaggcgatcgagaccatcctggctaacatggtgaaaccccgtctct

SEQ ID NO: 237066 - DNA, 14219 bp, Artificial Sequence
  derived and/or modified sequence
tgcaacggaaacttttggctccacgaacagaaaagcaagagcaaaaactcagttaaatgcgttcttcctccatctttgcctagtccaaaaggaaaaaaaaagaaacagaaaaaagaaaaactgtttggaagagtagcgttgaggtttgctttttacctgtttttcctctagaacagccaggtggattcacatgatccaattttttaattgtcttctatgtcccactccgaataacccggatgccccagcacaatcagagagatcgttttttttaaaaaaaatttcagcctccaaaggtaggaggggagtgttaggggagaaagtactttaattaaaaatcaataactcgaggtttttgggatacggtttgccatttcctaattaagaaatgggtttgacagtccctttgtacacactgctatgcaaaccccaaagggttggcggctgtccgggcgatgacactccggtcccctgcgagaccccgggccagccaggcccgtccgccgccggcctctggggtccgtccccggctcgcgcagacctctcgcttctctcggctctgtctcctgcgctcagctctgctcggggccggccgcctcaggctcgccgccaccaggtcgttgcaaataccttttccctccccggggccccagcgcgcggccacctcccagcctccccccctcccaccctggcagcggggccctttcccggctcaggaacagcagcagcccgggccgcgccggcaggaagcgaggcccatgttgctgctgttccctggcgcgcctccccgccctccgggggccgccacggctcttccgcgctcccgggcacccccctccgcgcctgcgctgtgccccacgggggcggggctcagattcctgtcagcggcggcggcggtggcggcgaccgtcagttttcgctgaggagaaacacgaaacggaccctttggctctcccccttccccttccccgtcctgaacccctctcctggtcaccgagaatcagtccccgtggagttccccctccacctcgccatcgtttcctcggtcctcggcccagtggaagtcactaccctcgaggaggaggcagcggcagccgccctcgcgtcgccgcccccggttcggtgcccgcggtcccggagaggaggtgccgccgccaccgccgctccccccctcccgctgccctcgggccgggctgggtcgagctgcgatgccctcggacttcatctcattgctcagcgcggacctagacctggaatcgcccaagtccctctactcgcgagattctctgaagttacacccatcacagaattttcatagagctggactattggaagaatctgtctatgatcttctcccaaaggagttacagttacctccatctagagaaacatctgtagcatcaatgagtcagacaagcggtggtgaggcaggctcgcctcctccagctgttgttgctgctggatttgcctctgaagcagggagtgtctgcattaaaaatgacctgtagttctctgcttcatagatgcttcttcagctccctcctcttcctccatgggcggtgcttgcagctcctttaccacctcttccagccctaccatttattctacctcagtcaccgacagcaaggctatgcaagtggagagctgctcctcagccgtgggggtaagtaacagaggggtaagtgaaaagcagttaaccagtaacacagttcagcagcatccatcaacaccgaagaggcacacagtcttgtacatctcaccaccacctgaggacttgctggataacagtcggatgtcctgccaggatgaggggtgtggattggaatctgagcagagctgcagtatgtggatggaggattccccctccaacttcagtaacatgagcaccagttcctacaatgataacactgaggtacctcgtaaatcacgaaaacgaaatccaaagcagaggccgggggtcaaacgacgagattgtgaagaatctaatatggatatatttgatgccgacagtgccaaagcacctcactatgtgctttctcagcttaccacggacaacaaaggcaactcaaaagcgggaaatggaacattggaaaaccaaaaaggaactggagtaaagaagagccctatgttgtgtggacaatatcctgttaaaagtgagggaaaggagctgaagatagttgtacaacctgagacacagcaccgagctcggtacctgactgagggcagccgtggctcagtgaaagatagaacacagcaaggctttcctacagtaaagctggaaggccataatgaacctgtagtgttgcaagtgtttgtgggcaacgactctggacgagtgaaaccacatggattttatcaggcctgcagagtaactggacgaaatacaactccttgcaaagaagtggacattgaaggcactactgttatagaagtcggccttgatcctagcaacaacatgacactggcggtggactgcgtagggatattgaaattgaggaatgctgatgtcgaagccagaataggaattgctggttccaagaagaaaagcactcgtgccagattggtttttcgagttaatatcatgaggaaagatggctccactttgacactgcaaacaccctcttctccaattttgtgtactcagccagcaggagtgccagaaatcttaaagaaaagcttgcatagctgttcagtgaaaggagaagaagaagtgtttttaatcggcaagaactttctgaaaggaactaaagttattttccaagaaaatgtttctgatgaaaactcttggaagtcagaagctgaaattgatatggaactatttcatcagaatcatcttattgtgaaggttcctccctatcatgaccaacatataactttgcctgtgtcagtgggaatatatgtagtgacaaatgctggaagatctcatgatgttcaaccattcacttacactccagacccagcagcagctggtgctttgaatgtaaatgtgaagaaggaaatatctagtccagcaagaccttgctcttttgaagaggccatgaaagcaatgaaaactactggatgtaatttagataaggtaaatattatccctaatgccctgatgactccactcataccaagcagtatgattaagagtgaagatgttactccaatggaagtaacagcagaaaaaagatcttccactatttttaagactacaaagtctgttggatcaactcagcaaacattagaaaacatctcaaacatagcaggaaatggctctttttcatcaccatcatcttcccacctaccttctgaaaatgaaaaacagcagcagattcagcccaaggcatacaacccagagaccctgacaactattcaaacccaggacatctcacagcctggtacttttccagcagtttctgcttctagtcagctgcccaacagcgatgcactattgcagcaggctacacagtttcagacaagagaaactcagtctagagagatattacagtcagatggtacagtggttaatttgtcacaactgactgaggcatcacaacaacagcagcagtcaccactacaagaacaagcacagactttacagcagcagatttcatcaaatatttttccatcaccaaatagtgtgagtcagcttcagaatactattcagcagctgcaagcagggagtttcacaggcagtactgctagtggcagcagtggaagtgttgacttggtccaacaagttttagaggcacagcagcagttatcttcagttttattttctgctccagatggtaatgagaatgttcaagagcagcttagtgcagatatttttcaacaagtcagtcaaattcagagtggtgtaagccctggaatgttttcctcaacagagccaacagtccataccagaccagataatttattacctggaagagctgaaagtgttcatccacagtctgaaaacacgttatctaatcaacagcagcagcagcagcagcaacagcaagtgatggaatcttcagccgcaatggtgatggagatgcaacagagtatctgccaggcagctgcccagattcagtcagagttattcccttcaactgcttcagcaaatggaaaccttcagcaatcgccagtttaccagcagacttctcacatgatgagtgcattgtctaccaatgaggatatgcaaatgcagtgtgaattgttttcttctcctcctgcagtttctggaaatgaaacttctacaactaccacacagcaggttgcaacccctggcactaccatgtttcagacatcaagttcaggagatggagaagaaactggaacacaagcaaaacagattcagaacagtgtctttcagaccatggtccaaatgcaacatagtggggacaatcaacctcaagttaaccttttttcatccacaaaaagtatgatgagtgttcagaatagtggtacccaacaacaaggtaatggtttattccagcaagggaatgagatgatgtcacttcaatctggaaattttttgcagcagtcttctcattcacaggcccaactttttcatcctcaaaatcctattgccgatgctcagaacctttcccaggaaactcaaggttctctctttcatagtccaaatcctattgtccacagtcagacttctacaacctcctctgaacaaatgcagcctccaatgtttcactctcaaagtaccattgctgtgttacagggctcttcagttcctcaagaccagcagtcaaccaacatatttctttcccagagtcccatgaataatcttcagactaacacagtagcccaagaagcattttttgcagcaccgaactcaatttctccacttcagtcaacatcaaacagtgaacaacaagctgctttccaacagcaagctccaatatcacacatccagactcctatgctttcccaagaacaggcacaacccccgcagcagggtttatttcagcctcaggtggccctgggctcccttccacctaatccaatgcctcaaagccaacaaggaaccatgttccagtcacagcactcaatagttgccatgcagagtaactctccatcccaggaacagcagcagcagcagcaacagcagcagcaacagcagcagcaacaacaacagagcattttattcagtaatcagaataccatggctacaatggcgtctccaaagcaaccaccaccaaacatgatattcaacccaaatcaaaatccaatggctaatcaggagcaacagaaccagtcaatttttcaccaacaaagtaacatggccccaatgaatcaagagcaacagcccatgcaatttcagagtcagtccacagtttcctcacttcagaacccaggtcctacccagtcggaatcatcacagacccccttgttccatagctctcctcagattcagttggtacaagggtcacctagttctcaagagcagcaagtaactctcttcttatctccagcatccatgtctgccttgcagaccagtataaatcaacaagatatgcaacagtctcctctttattcccctcagaacaacatgcctggaattcaaggagccacatcttcgcctcaaccacaggctactttatttcacaacacagcaggaggcacaatgaaccaactgcagaattctcctggctcatctcagcagacatcaggaatgttcttatttggcattcaaaataactgtagtcagcttttaacctctggaccagctacattgcctgatcagttgatggccataagtcagccaggccaaccacaaaacgagggccagccacctgtgacaacacttctttctcagcaaatgccagagaattctccactggcatcctctataaacaccaaccagaacatcgaaaagattgatttgcttgtttcattgcaaaaccaagggaacaacttgactggctccttttaactggatataaattccacgaagaaaatcctgattccaagatgtcctgagatcttgtggttccatgagaattattactttaaaaacaaaacaaaatataaaaaactgtgtttgagtaaactgatagattttactctgactgcaaaagagcacacctatgctgcttgttgcagtaactaaccaccaatgttaacatcttcatattttatattcctaataacagtgatgactgagaatctatttgagtttccagctggcagaattaattgttattattttcctaggcgcaatttccttaaacgtacagtttaaattcaaggctggaccactcagttattattgctattagaaaataatatatcatgtttacttttgttcttcattattttctttcctgcattgttttagtcaagtaatggcttttgaaaaagtaaagttcaataataactaaggctgtgatttttttcaatataaaaggcacagctgttggccaaagtgaaggaatcttttttcagttttattggagaaactgaagggtaacattctaacaagtaaactgtatgtgcagataaaagtactcttgatttaacacaaaggcagatgatacacttataaaactgggaacagctggaatgcttcttgattttattttttcagagagttgttagttctctgggtttctactaaggggtttagccataactgtgcatagaaaaataattatctgtaaaaaatgaaggggataatatatgataaattatgttctgatatcctcctacagtagtttaaattgacagaaaaatttgaatgttttcttcttaacccagtcttaggctggtattccctttttatatatatctatattacttttcacctctttttcactttactttagagaactattaatatactactggcttcatgaccctgtagcatctttggccactttaatctagggtgacctagcaatcctgcagcacagggcagagagtactgtcttaggaattattaggagttgattcctgagaaacaacacatttttccccatgaacggtgctgttctgaagtcttcaaatttttccctctaataggaaacagtataaattttaattaaaaaaaaaaggcaaactaaaatttcttgaaatatcacttctccctgatctgcagtgagtataaattcacttgtcacctcagtgctttacagtttgaagtggtcacttacctgatggttcccacaagccttaggctttacagggttgtatcattgacttaaaatgaagaattaacttgtgttacatctataaagagcaaaataacacactccagaacttggcagttgtagcattagttatacagttttgggtgttcttgccacccgtgggatgcctgcttctcactaccacctgtgtctggacacatgcttatgtctcattttccttttggcatgtggaaagctgtcaatgcagtgtaaggccaacgtgtgtgtggcttctatgtgttgagataatgttttggtatccttgtccgtttcatttattttttaagtgtacaaaaaataacctgttaattgttgaaggctacttttctgttctttttttttttttttttctatcctgtacatttagttgaactgtgcggaattgtggtgttggttttgtttacacagccagatttttccttctttttgttttgtgatgatcttcctttgttctttgaatgtgctcttttgtctttttctcttttttctcatgttttcttccctccacctccacccctttctttctttctctctctgattgagaggcattgaattacgttttcagtagtacaggcttcttgccgatatgaagggaacttttcagaaagagacctactctgggtcatttaattttgaatacagttttcaatcgttcaagttttggatggtttatatctaatgtgtgtttcatttttttggaaagctatattttgtatttaggaaatggtatactattttgctatttgtactgagtgagtacattggcataaatatagaaatttatatatatacatatatataaactattcttttttgccacacatttttgtggtaaatttgtgagtttgtctgatgttctaccacaacgtggcgtctgataacagtgagggggggtggggtttgttatgtctttattgagtatttaagtatcttttgaaacaaatgacctgttcatctgtggccattccatcaggcagttagttccttgatgtcagtagtgggctaaaggcagcttactgtgtgtttgctggagctttcactcagccaagtgttagagtcaggaaacccattgaggcaatggcgtcaaatggtgtttcacaagaatgagccattcagtctttgctcactatatatttaatattttattattgttgttattgttattattaattggctttctgtattctatgccttttatttataaagacactaagaaaacccatgtttgtaattttaataacatttttcccatcttgtaatatccagagctactttataaattctctgaaccaaaagtattttcctcagtgtatctcttctcccccagcccctattgggaaaaattacccagtatagttcaggttatgaggaggatcagccacacaatccagtgcttcagtttgaaaatgtaaaattctaaccctaaagtagggttggttgaaatttcagacaaagcaaacccagcaggtataaaaagtagtataaatacaaatctgtaagttatttttgaattttctgaacttttttctaagagattacataggagactaaagaaatctatctgttcaagttctaattaggatgattgttaatactgcactgtggatgaagtggcgactggcttgtgtgctgacttctgtggtttagcaagaggtttattgttatcaaatgctaattggcaatgccaagtcactgggaccaattttctgttttataatatctaagtttagaacagaatatatacctgaactgtagtggtttgatcggatggagacagaaaacccgatttttattctcataaattttgtggttatttatacaagggctgtgctatgctaccatattcttgttcaataataataggtttgttgttttttttacattgttaaatgttccttacccctaaaggtcaatgttaagtacaacattctgaaaatacaatttggctacgaagagtattcatcttctttgaagctcagtggttgatatttgtgctaataatgcaatttcctgattactgttacaagttatagctacatatgggagagactcagtgagccagcaaaggccatagaaacaacaatttattaaatgtatttatggcagaaggacctaaataaactgtgagccaccttttcttctttatattgttacatttaagtgttcttgctttcagcaactcacattaatgcttggagcttatctctttctctctctctctctctctctctgtgtgtgtgtgtgtatgtgtgtgtgtgtgtgtgtgtgtttccttattgtcattccattatatatccacaccaacatgggtgacgataattcaaagtcatattttgcctctaagcttgatcatgttacctttatgattaaagtatcatgttatttagccaatgcaaatctgttttaaaacaaatagtttaaaaaaagaacaagtttttaagggctttattatagaagaagtattaatgaaggactttccttcctccctccctttcctcccctccctgcctcccttcttcccttccatctccccctcctccctgccttctttgtttctccttcccttattcctccctccctcctttctcccttccttcctttcttccattcatccttccttgccttttatttttattttttgtaatatcacatgtgctgtagtttggaattttattctagtgcatttcttgctcatcagaacctcagctaatctacctaggaaaaatagtatcaaaggaaatgagaaagttgtatctgagtccctccagaactaagataattctttttgaccatttaagcctttataaatgcgttttgaccatttaagcctttataaatgcttgttttaggaaagtgaatctgttagatgcatcaacaaataatgaccaggacaaaacgatttaataattaaagtctcaaatcaccatggttatacattttcaccagaaatagtaatcttacaatttttcatttttctgatgaagatttctgttccaatatctgtttcctaatagattttttaaattaattagctttcctctgctttatgaccacaggttttatccctaaccgagacagctgtcttatatctgcatgccttagactgtgtggagggactccatgaagaaagaccataggttagaaaaataactcatagtatataccctagtaagtgggttagtagaatctcataacatgtattaaaaagaggttttcttctctgcttgtttgtgtcactagagcaaaattgtagagataatgctcataatgcagtaaatatcagaataatatctacaatatcatttgtggatggtcccaggtcccagtgctctagttactttacttctttttttttttttgagatggagtcttgctctgtctctcaggctagagcagtgtgcgatctcagctcactgcagcctccacctcccaggttcaagcgattctcctgcctcagcctcccaagtagccaggattacaggcaccctccactaggcccggctaattttttttgtatttttttagtagagatggggttttgccatgttggccaggctggtttcgaactcctaacctccagtgatccacctgcctcggcgtcccaaagtgctaggattacaggcatgagccaccacatccggcctaattacttctttaatccccatttatttttatgccattctagcctcatttattaataaaattatgtttttactttctctttcaggaaattttttaaattaatattttatatctagatctaatgctatggaaaagtgcctttttatcatttataatttcatttttcactatttccaaaaacacataaacaaatagtttcagtaggtcccagcttttactttttccatttaaaccttcttttctccatttcttccctttggcttaagaataaaagaaaaggtacattgctagaattgtttctttgggagagggtaaaagattacagaattagactgttcagcctttatataaactaaatttgtcttcatctcaaccagctaatggtaggtcttatctgaatactcatgagaattttagcatctgtgaaactccatgcaccagatgtgtgtaaatttcaggaagaaagtgttgaaagcattttctctgatgttaattagatggaaataaatcactaaaacatagtttaggtaaagcctgattatgccacttttttttaactagacagggcaaagttgtttatgttagtgtacttcttgtctatcctcagttaatttacctagacaaaaagtgtcaaaggaaatgagaaaaaggttatatctgactccctccagacctaagataattccttttgatcagatacagtcagatggagtgccttggtttttgttaattttgcctctattccagctccttaccacagcggtggtgcttaaagaaaggatcatcagcaacaggtcaggatagttctacctttgggatagggctgctttccccgtgctagtatttctgtgactgttagtggcactgaggactgcaaacttttatgcaatattcttaataccctattgatattatgcactttaatcattccaaagaagccaagaatgctgtatagtgatgattccttcctaatgaattcatcttaactatttagaatgttatgtcccttttcttttggatagccaacttggtataaatgttatatggatttttctaaaatgactatataggacttaagactttgaaatgtaatttacttataaggggaaataattatgctttagcacatcattttagaaacgtcacattttagaaacattcagcttgctaacctacatgtttgggaattcattaaaaccagttgtctatatattttgtgccatgtatataagaacattacaatatatctttttctacatatgtagtatgtgcaaccagtggttctcagagtatggttctcagcccaccagctagtatcagtatcacctgggaactagttagaaatgtaaattctttggccccatcccagacatactgagtcagaaactctggaatagggcccccgcaatctgttttcacaagccctccaggtgattctgatgcacactttaaagtttaggaaccactgggctaagactctgttgagatatagagtttttcttccactcagactgatatagttatacattgttcttcatgtaaattcagcttaacctggttatctataatcttttattggcaaaagttaattctcagtactgcctatagagatacagtgtattttatgtacatacacaattagtctaattcttgataattcagttaatttagtttggcattttcctaccacttactaaaaggtttacattaaatgactgatttaaatatataggtgcaatgttctatgtttattttaattgttatgacatttaagtagctaatataattgaccggtgctaaagtctcctgtttatccataaaatgggtacattatgggcagtgtaatacaagctttcttttcattgcctagtactttaccagcagaccacagttttgccctggctagaccaaccctcagaacaaaatcatcattccttgtatttatatttgtatctgagatagtaaacaagatggctggccaggtcaacatggcaccttaacttatttttttaataggtaaaacttcttcaaaagtagcttgctttgtataagaactaagctatcagtatagatatagctatccttggagcttatgtttcagacaagaattatttactaaaataaataataaacaagataatgcattatacaatttgggcatttctcgtttctcaagtgtatgcatcatggtaaatataaactaaccacaagataggtagattgattcatttcattttaatctccttgtgtaattcagtacctccataattgttctaatcttcttcccactgtttacaaattaccagttaattaactcgtgaaagaaaaattcacatatcagaataaaaataaatgtatactcactttataaaaatcaccactgctgtctttccttaatactagcagtggaaatgtaagtggcttactctacaaattttggtgctggcaaatacataggcaaactgttgggagctgctctagttacattcctcccttcttattccctttttctcttcctcactttattgcataacatattcctgtacccaaagcattctaccacagttctatttgactcccacttgtaataactcctttaaaaaattccatgtttaaccatatgaccctgcttgcttactcatattctccctccctctccccttcctttctctctcttccagaagtcatttgcctggtttgaaatattttgtagggattgcttattatattattttagctgatgaacctcaggacaacgtctacacacacacacatacatacacgcacacaaaatctcagctgttgaagagtgggcttggaatcagacttctgtgtccagtaaaaaactcctgcactgaagtcattgtgacttgagtagttacagactgattccagtgaacttgatctaatttcttttgatctaatgaatgtgtctgcttaccttgtttccttttaattgataagctccaagtagttgctaattttttgacaactttaaatgagtttcattcacttcttttacttaatgttttaagtatagtaccaataatttcattaacctgttctcaagtggtttagctaccattctgccatttttaatttttatttaattttatttgcttgagcacactgatcaaccactgaactgccttcttccattgtcctgcaatgatataagggttacatttttgtgtatatggctttcatagttgggatttcagagcactgataccagatattttcagtttgttctctgggggaatttcatttgcatctatgtttttagctatctgtgataacttgttaaatattaaaaagatattttgcttctattggaacatttgtatactcgcaactatatttctgtaaacagctgcagtcaaaaataaaacactgaaagtt

SEQ ID NO: 237067 - DNA, 13067 bp, Artificial Sequence
  derived and/or modified sequence
ccggttcggtgcccgcggtcccggagaggaggtgccgccgccaccgccgctccccccctcccgctgccctcgggccgggctgggtcgagctgcgatgccctcggacttcatctcattgctcagcgcggacctagacctggaatcgcccaagtccctctactcgcgagaatctgtctatgatcttctcccaaaggagttacagttacctccatctagagaaacatctgtagcatcaatgagtcagacaagcggtggtgaggcaggctcgcctcctccagctgttgttgctgctggatttgcctctgaagcagggagtgtctgcattaaaaatgacctgtagttctctgcttcatagatgcttcttcagctccctcctcttcctccatgggcggtgcttgcagctcctttaccacctcttccagccctaccatttattctacctcagtcaccgacagcaaggctatgcaagtggagagctgctcctcagccgtgggggtaagtaacagaggggtaagtgaaaagcagttaaccagtaacacagttcagcagcatccatcaacaccgaagaggcacacagtcttgtacatctcaccaccacctgaggacttgctggataacagtcggatgtcctgccaggatgaggggtgtggattggaatctgagcagagctgcagtatgtggatggaggattccccctccaacttcagtaacatgagcaccagttcctacaatgataacactgaggtacctcgtaaatcacgaaaacgaaatccaaagcagaggccgggggtcaaacgacgagattgtgaagaatctaatatggatatatttgatgccgacagtgccaaagcacctcactatgtgctttctcagcttaccacggacaacaaaggcaactcaaaagcgggaaatggaacattggaaaaccaaaaaggaactggagtaaagaagagccctatgttgtgtggacaatatcctgttaaaagtgagggaaaggagctgaagatagttgtacaacctgagacacagcaccgagctcggtacctgactgagggcagccgtggctcagtgaaagatagaacacagcaaggctttcctacagtaaagctggaaggccataatgaacctgtagtgttgcaagtgtttgtgggcaacgactctggacgagtgaaaccacatggattttatcaggcctgcagagtaactggacgaaatacaactccttgcaaagaagtggacattgaaggcactactgttatagaagtcggccttgatcctagcaacaacatgacactggcggtggactgcgtagggatattgaaattgaggaatgctgatgtcgaagccagaataggaattgctggttccaagaagaaaagcactcgtgccagattggtttttcgagttaatatcatgaggaaagatggctccactttgacactgcaaacaccctcttctccaattttgtgtactcagccagcaggagtgccagaaatcttaaagaaaagcttgcatagctgttcagtgaaaggagaagaagaagtgtttttaatcggcaagaactttctgaaaggaactaaagttattttccaagaaaatgtttctgatgaaaactcttggaagtcagaagctgaaattgatatggaactatttcatcagaatcatcttattgtgaaggttcctccctatcatgaccaacatataactttgcctgtgtcagtgggaatatatgtagtgacaaatgctggaagatctcatgatgttcaaccattcacttacactccagacccagcagcagctggtgctttgaatgtaaatgtgaagaaggaaatatctagtccagcaagaccttgctcttttgaagaggccatgaaagcaatgaaaactactggatgtaatttagataaggtaaatattatccctaatgccctgatgactccactcataccaagcagtatgattaagagtgaagatgttactccaatggaagtaacagcagaaaaaagatcttccactatttttaagactacaaagtctgttggatcaactcagcaaacattagaaaacatctcaaacatagcaggaaatggctctttttcatcaccatcatcttcccacctaccttctgaaaatgaaaaacagcagcagattcagcccaaggcatacaacccagagaccctgacaactattcaaacccaggacatctcacagcctggtacttttccagcagtttctgcttctagtcagctgcccaacagcgatgcactattgcagcaggctacacagtttcagacaagagaaactcagtctagagagatattacagtcagatggtacagtggttaatttgtcacaactgactgaggcatcacaacaacagcagcagtcaccactacaagaacaagcacagactttacagcagcagatttcatcaaatatttttccatcaccaaatagtgtgagtcagcttcagaatactattcagcagctgcaagcagggagtttcacaggcagtactgctagtggcagcagtggaagtgttgacttggtccaacaagttttagaggcacagcagcagttatcttcagttttattttctgctccagatggtaatgagaatgttcaagagcagcttagtgcagatatttttcaacaagtcagtcaaattcagagtggtgtaagccctggaatgttttcctcaacagagccaacagtccataccagaccagataatttattacctggaagagctgaaagtgttcatccacagtctgaaaacacgttatctaatcaacagcagcagcagcagcagcaacagcaagtgatggaatcttcagccgcaatggtgatggagatgcaacagagtatctgccaggcagctgcccagattcagtcagagttattcccttcaactgcttcagcaaatggaaaccttcagcaatcgccagtttaccagcagacttctcacatgatgagtgcattgtctaccaatgaggatatgcaaatgcagtgtgaattgttttcttctcctcctgcagtttctggaaatgaaacttctacaactaccacacagcaggttgcaacccctggcactaccatgtttcagacatcaagttcaggagatggagaagaaactggaacacaagcaaaacagattcagaacagtgtctttcagaccatggtccaaatgcaacatagtggggacaatcaacctcaagttaaccttttttcatccacaaaaagtatgatgagtgttcagaatagtggtacccaacaacaaggtaatggtttattccagcaagggaatgagatgatgtcacttcaatctggaaattttttgcagcagtcttctcattcacaggcccaactttttcatcctcaaaatcctattgccgatgctcagaacctttcccaggaaactcaaggttctctctttcatagtccaaatcctattgtccacagtcagacttctacaacctcctctgaacaaatgcagcctccaatgtttcactctcaaagtaccattgctgtgttacagggctcttcagttcctcaagaccagcagtcaaccaacatatttctttcccagagtcccatgaataatcttcagactaacacagtagcccaagaagcattttttgcagcaccgaactcaatttctccacttcagtcaacatcaaacagtgaacaacaagctgctttccaacagcaagctccaatatcacacatccagactcctatgctttcccaagaacaggcacaacccccgcagcagggtttatttcagcctcaggtggccctgggctcccttccacctaatccaatgcctcaaagccaacaaggaaccatgttccagtcacagcactcaatagttgccatgcagagtaactctccatcccaggaacagcagcagcagcagcaacagcagcagcaacagcagcagcaacaacaacagagcattttattcagtaatcagaataccatggctacaatggcgtctccaaagcaaccaccaccaaacatgatattcaacccaaatcaaaatccaatggctaatcaggagcaacagaaccagtcaatttttcaccaacaaagtaacatggccccaatgaatcaagagcaacagcccatgcaatttcagagtcagtccacagtttcctcacttcagaacccaggtcctacccagtcggaatcatcacagacccccttgttccatagctctcctcagattcagttggtacaagggtcacctagttctcaagagcagcaagtaactctcttcttatctccagcatccatgtctgccttgcagaccagtataaatcaacaagatatgcaacagtctcctctttattcccctcagaacaacatgcctggaattcaaggagccacatcttcgcctcaaccacaggctactttatttcacaacacagcaggaggcacaatgaaccaactgcagaattctcctggctcatctcagcagacatcaggaatgttcttatttggcattcaaaataactgtagtcagcttttaacctctggaccagctacattgcctgatcagttgatggccataagtcagccaggccaaccacaaaacgagggccagccacctgtgacaacacttctttctcagcaaatgccagagaattctccactggcatcctctataaacaccaaccagaacatcgaaaagattgatttgcttgtttcattgcaaaaccaagggaacaacttgactggctccttttaactggatataaattccacgaagaaaatcctgattccaagatgtcctgagatcttgtggttccatgagaattattactttaaaaacaaaacaaaatataaaaaactgtgtttgagtaaactgatagattttactctgactgcaaaagagcacacctatgctgcttgttgcagtaactaaccaccaatgttaacatcttcatattttatattcctaataacagtgatgactgagaatctatttgagtttccagctggcagaattaattgttattattttcctaggcgcaatttccttaaacgtacagtttaaattcaaggctggaccactcagttattattgctattagaaaataatatatcatgtttacttttgttcttcattattttctttcctgcattgttttagtcaagtaatggcttttgaaaaagtaaagttcaataataactaaggctgtgatttttttcaatataaaaggcacagctgttggccaaagtgaaggaatcttttttcagttttattggagaaactgaagggtaacattctaacaagtaaactgtatgtgcagataaaagtactcttgatttaacacaaaggcagatgatacacttataaaactgggaacagctggaatgcttcttgattttattttttcagagagttgttagttctctgggtttctactaaggggtttagccataactgtgcatagaaaaataattatctgtaaaaaatgaaggggataatatatgataaattatgttctgatatcctcctacagtagtttaaattgacagaaaaatttgaatgttttcttcttaacccagtcttaggctggtattccctttttatatatatctatattacttttcacctctttttcactttactttagagaactattaatatactactggcttcatgaccctgtagcatctttggccactttaatctagggtgacctagcaatcctgcagcacagggcagagagtactgtcttaggaattattaggagttgattcctgagaaacaacacatttttccccatgaacggtgctgttctgaagtcttcaaatttttccctctaataggaaacagtataaattttaattaaaaaaaaaaggcaaactaaaatttcttgaaatatcacttctccctgatctgcagtgagtataaattcacttgtcacctcagtgctttacagtttgaagtggtcacttacctgatggttcccacaagccttaggctttacagggttgtatcattgacttaaaatgaagaattaacttgtgttacatctataaagagcaaaataacacactccagaacttggcagttgtagcattagttatacagttttgggtgttcttgccacccgtgggatgcctgcttctcactaccacctgtgtctggacacatgcttatgtctcattttccttttggcatgtggaaagctgtcaatgcagtgtaaggccaacgtgtgtgtggcttctatgtgttgagataatgttttggtatccttgtccgtttcatttattttttaagtgtacaaaaaataacctgttaattgttgaaggctacttttctgttctttttttttttttttttctatcctgtacatttagttgaactgtgcggaattgtggtgttggttttgtttacacagccagatttttccttctttttgttttgtgatgatcttcctttgttctttgaatgtgctcttttgtctttttctcttttttctcatgttttcttccctccacctccacccctttctttctttctctctctgattgagaggcattgaattacgttttcagtagtacaggcttcttgccgatatgaagggaacttttcagaaagagacctactctgggtcatttaattttgaatacagttttcaatcgttcaagttttggatggtttatatctaatgtgtgtttcatttttttggaaagctatattttgtatttaggaaatggtatactattttgctatttgtactgagtgagtacattggcataaatatagaaatttatatatatacatatatataaactattcttttttgccacacatttttgtggtaaatttgtgagtttgtctgatgttctaccacaacgtggcgtctgataacagtgagggggggtggggtttgttatgtctttattgagtatttaagtatcttttgaaacaaatgacctgttcatctgtggccattccatcaggcagttagttccttgatgtcagtagtgggctaaaggcagcttactgtgtgtttgctggagctttcactcagccaagtgttagagtcaggaaacccattgaggcaatggcgtcaaatggtgtttcacaagaatgagccattcagtctttgctcactatatatttaatattttattattgttgttattgttattattaattggctttctgtattctatgccttttatttataaagacactaagaaaacccatgtttgtaattttaataacatttttcccatcttgtaatatccagagctactttataaattctctgaaccaaaagtattttcctcagtgtatctcttctcccccagcccctattgggaaaaattacccagtatagttcaggttatgaggaggatcagccacacaatccagtgcttcagtttgaaaatgtaaaattctaaccctaaagtagggttggttgaaatttcagacaaagcaaacccagcaggtataaaaagtagtataaatacaaatctgtaagttatttttgaattttctgaacttttttctaagagattacataggagactaaagaaatctatctgttcaagttctaattaggatgattgttaatactgcactgtggatgaagtggcgactggcttgtgtgctgacttctgtggtttagcaagaggtttattgttatcaaatgctaattggcaatgccaagtcactgggaccaattttctgttttataatatctaagtttagaacagaatatatacctgaactgtagtggtttgatcggatggagacagaaaacccgatttttattctcataaattttgtggttatttatacaagggctgtgctatgctaccatattcttgttcaataataataggtttgttgttttttttacattgttaaatgttccttacccctaaaggtcaatgttaagtacaacattctgaaaatacaatttggctacgaagagtattcatcttctttgaagctcagtggttgatatttgtgctaataatgcaatttcctgattactgttacaagttatagctacatatgggagagactcagtgagccagcaaaggccatagaaacaacaatttattaaatgtatttatggcagaaggacctaaataaactgtgagccaccttttcttctttatattgttacatttaagtgttcttgctttcagcaactcacattaatgcttggagcttatctctttctctctctctctctctctctctgtgtgtgtgtgtgtatgtgtgtgtgtgtgtgtgtgtgtttccttattgtcattccattatatatccacaccaacatgggtgacgataattcaaagtcatattttgcctctaagcttgatcatgttacctttatgattaaagtatcatgttatttagccaatgcaaatctgttttaaaacaaatagtttaaaaaaagaacaagtttttaagggctttattatagaagaagtattaatgaaggactttccttcctccctccctttcctcccctccctgcctcccttcttcccttccatctccccctcctccctgccttctttgtttctccttcccttattcctccctccctcctttctcccttccttcctttcttccattcatccttccttgccttttatttttattttttgtaatatcacatgtgctgtagtttggaattttattctagtgcatttcttgctcatcagaacctcagctaatctacctaggaaaaatagtatcaaaggaaatgagaaagttgtatctgagtccctccagaactaagataattctttttgaccatttaagcctttataaatgcgttttgaccatttaagcctttataaatgcttgttttaggaaagtgaatctgttagatgcatcaacaaataatgaccaggacaaaacgatttaataattaaagtctcaaatcaccatggttatacattttcaccagaaatagtaatcttacaatttttcatttttctgatgaagatttctgttccaatatctgtttcctaatagattttttaaattaattagctttcctctgctttatgaccacaggttttatccctaaccgagacagctgtcttatatctgcatgccttagactgtgtggagggactccatgaagaaagaccataggttagaaaaataactcatagtatataccctagtaagtgggttagtagaatctcataacatgtattaaaaagaggttttcttctctgcttgtttgtgtcactagagcaaaattgtagagataatgctcataatgcagtaaatatcagaataatatctacaatatcatttgtggatggtcccaggtcccagtgctctagttactttacttctttttttttttttgagatggagtcttgctctgtctctcaggctagagcagtgtgcgatctcagctcactgcagcctccacctcccaggttcaagcgattctcctgcctcagcctcccaagtagccaggattacaggcaccctccactaggcccggctaattttttttgtatttttttagtagagatggggttttgccatgttggccaggctggtttcgaactcctaacctccagtgatccacctgcctcggcgtcccaaagtgctaggattacaggcatgagccaccacatccggcctaattacttctttaatccccatttatttttatgccattctagcctcatttattaataaaattatgtttttactttctctttcaggaaattttttaaattaatattttatatctagatctaatgctatggaaaagtgcctttttatcatttataatttcatttttcactatttccaaaaacacataaacaaatagtttcagtaggtcccagcttttactttttccatttaaaccttcttttctccatttcttccctttggcttaagaataaaagaaaaggtacattgctagaattgtttctttgggagagggtaaaagattacagaattagactgttcagcctttatataaactaaatttgtcttcatctcaaccagctaatggtaggtcttatctgaatactcatgagaattttagcatctgtgaaactccatgcaccagatgtgtgtaaatttcaggaagaaagtgttgaaagcattttctctgatgttaattagatggaaataaatcactaaaacatagtttaggtaaagcctgattatgccacttttttttaactagacagggcaaagttgtttatgttagtgtacttcttgtctatcctcagttaatttacctagacaaaaagtgtcaaaggaaatgagaaaaaggttatatctgactccctccagacctaagataattccttttgatcagatacagtcagatggagtgccttggtttttgttaattttgcctctattccagctccttaccacagcggtggtgcttaaagaaaggatcatcagcaacaggtcaggatagttctacctttgggatagggctgctttccccgtgctagtatttctgtgactgttagtggcactgaggactgcaaacttttatgcaatattcttaataccctattgatattatgcactttaatcattccaaagaagccaagaatgctgtatagtgatgattccttcctaatgaattcatcttaactatttagaatgttatgtcccttttcttttggatagccaacttggtataaatgttatatggatttttctaaaatgactatataggacttaagactttgaaatgtaatttacttataaggggaaataattatgctttagcacatcattttagaaacgtcacattttagaaacattcagcttgctaacctacatgtttgggaattcattaaaaccagttgtctatatattttgtgccatgtatataagaacattacaatatatctttttctacatatgtagtatgtgcaaccagtggttctcagagtatggttctcagcccaccagctagtatcagtatcacctgggaactagttagaaatgtaaattctttggccccatcccagacatactgagtcagaaactctggaatagggcccccgcaatctgttttcacaagccctccaggtgattctgatgcacactttaaagtttaggaaccactgggctaagactctgttgagatatagagtttttcttccactcagactgatatagttatacattgttcttcatgtaaattcagcttaacctggttatctataatcttttattggcaaaagttaattctcagtactgcctatagagatacagtgtattttatgtacatacacaattagtctaattcttgataattcagttaatttagtttggcattttcctaccacttactaaaaggtttacattaaatgactgatttaaatatataggtgcaatgttctatgtttattttaattgttatgacatttaagtagctaatataattgaccggtgctaaagtctcctgtttatccataaaatgggtacattatgggcagtgtaatacaagctttcttttcattgcctagtactttaccagcagaccacagttttgccctggctagaccaaccctcagaacaaaatcatcattccttgtatttatatttgtatctgagatagtaaacaagatggctggccaggtcaacatggcaccttaacttatttttttaataggtaaaacttcttcaaaagtagcttgctttgtataagaactaagctatcagtatagatatagctatccttggagcttatgtttcagacaagaattatttactaaaataaataataaacaagataatgcattatacaatttgggcatttctcgtttctcaagtgtatgcatcatggtaaatataaactaaccacaagataggtagattgattcatttcattttaatctccttgtgtaattcagtacctccataattgttctaatcttcttcccactgtttacaaattaccagttaattaactcgtgaaagaaaaattcacatatcagaataaaaataaatgtatactcactttataaaaatcaccactgctgtctttccttaatactagcagtggaaatgtaagtggcttactctacaaattttggtgctggcaaatacataggcaaactgttgggagctgctctagttacattcctcccttcttattccctttttctcttcctcactttattgcataacatattcctgtacccaaagcattctaccacagttctatttgactcccacttgtaataactcctttaaaaaattccatgtttaaccatatgaccctgcttgcttactcatattctccctccctctccccttcctttctctctcttccagaagtcatttgcctggtttgaaatattttgtagggattgcttattatattattttagctgatgaacctcaggacaacgtctacacacacacacatacatacacgcacacaaaatctcagctgttgaagagtgggcttggaatcagacttctgtgtccagtaaaaaactcctgcactgaagtcattgtgacttgagtagttacagactgattccagtgaacttgatctaatttcttttgatctaatgaatgtgtctgcttaccttgtttccttttaattgataagctccaagtagttgctaattttttgacaactttaaatgagtttcattcacttcttttacttaatgttttaagtatagtaccaataatttcattaacctgttctcaagtggtttagctaccattctgccatttttaatttttatttaattttatttgcttgagcacactgatcaaccactgaactgccttcttccattgtcctgcaatgatataagggttacatttttgtgtatatggctttcatagttgggatttcagagcactgataccagatattttcagtttgttctctgggggaatttcatttgcatctatgtttttagctatctgtgataacttgttaaatattaaaaagatattttgcttctattggaacatttgtatactcgcaactatatttctgtaaacagctgcagtcaaaaataaaacactgaaagttttcattttgcagtgga

SEQ ID NO: 237068 - DNA, 4368 bp, Artificial Sequence
  derived and/or modified sequence
atgggcggtgcctgtagcagctttacaacatcttcttcccccacaatttatagtacttcggtcacggatagtaaggcaatgcaggtcgaatcctgcagctcggccgttggagtgtccaaccggggagtgagtgaaaaacagttgacatctaacacagttcagcaacacccgagcaccccaaagcggcatacggtgctctatatctccccccctccagaggatcttctcgacaactctcgaatgtcttgccaggatgagggctgcggcctagaatcggagcagtcatgtagcatgtggatggaagactcaccatctaacttctcaaacatgtcaacatcgagctataatgataacaccgaagttcctagaaagagccgcaaacggaacccaaaacagagacccggtgtaaagcgaagggattgcgaggaatctaatatggatatctttgatgcagatagcgccaaagcgccacactacgtgctgtctcagctgactaccgataacaaaggcaacagcaaggcagggaatggcactctcgagaaccaaaagggcaccggagtgaagaaatcgcctatgctgtgtggacagtaccctgtgaaatccgaaggcaaggagctgaaaatcgttgtccagcccgagacacagcatagggcaagatatctcacagagggatctcgtggttccgttaaagaccgtacccaacagggctttcccacagtcaaactcgagggacacaatgaacccgtggtcctgcaggtgttcgtagggaatgattccggccgtgtaaaacctcacggtttctaccaagcttgcagagtgacgggcaggaacaccactccctgcaaggaagtcgatatcgagggcactacagtgatcgaggtggggctggacccatcaaataatatgacgttggcagtagattgcgttggcatcctcaagctgcgcaatgccgacgtggaggccagaatcggcatagccggtagcaaaaagaaaagtaccagagcacgcctggtcttccgagtgaatataatgcgtaaagatgggagtactttaacccttcagaccccaagcagtcccattttatgtacacagcccgctggcgtgcccgagattttaaaaaaatcccttcattcatgctcggtcaaaggtgaggaagaagtctttctgatcggtaagaattttctaaagggaactaaggtgatttttcaagaaaatgttagcgatgaaaactcctggaaatccgaggctgagatcgatatggaactgttccaccagaatcatctgattgttaaagtgcccccataccacgatcagcacataacccttccagtgagtgttggcatatacgttgtgacgaacgctggcaggagccacgatgtccagccctttacctatactcccgaccccgcagctgccggtgctcttaacgtcaatgtcaagaaagagatcagctcgccagctcgtccttgtagctttgaggaagcaatgaaagcaatgaaaacgaccggttgtaacctagacaaggtcaacattattcctaatgccttaatgacacccctgatcccctctagcatgatcaagagtgaggacgtaacgccaatggaggtgacagccgaaaaaaggtcaagcactattttcaagactacaaaaagtgtcggaagtactcaacagacacttgaaaatatttcaaatatcgcaggcaacggcagctttagctcccccagtagtagtcatctgcccagtgagaatgagaagcaacagcagattcaacccaaagcttataaccccgaaaccctgaccacgattcagactcaagatatcagtcagcccggaaccttcccagctgtttccgccagcagccagttgcctaactcggacgctttacttcagcaagctactcagtttcaaactcgcgaaacccagtctagggaaatcttgcagtcggatgggactgtggtaaatctgagccagcttacagaggcttctcagcagcagcaacaatctcctcttcaggaacaggcccagactttacagcagcaaataagtagcaacatctttcctagtcccaactctgtgtcacagctgcagaacacgattcagcagctgcaagcaggatctttcaccggaagcactgctagcggcagctccggtagcgtggacctggtgcagcaggttttagaggcccagcagcaactgagctccgtgctgtttagcgcacctgatggaaatgagaatgtacaagaacagctttcggccgacatcttccagcaggtctcgcagattcaaagcggggtctcacctggaatgttcagctcaacggagcctactgtgcacacccggccagacaacttactgcctgggagggcagagtcagtccatccccagtccgaaaataccctttccaaccagcagcagcagcagcaacagcagcaacaggttatggagagctcagccgcaatggtgatggagatgcaacaatctatatgtcaggcagcagcccagattcagagcgaactatttccctccacggccagcgctaatgggaacctgcagcagagtccggtgtatcagcagacaagccatatgatgtcggccctttccaccaatgaagacatgcagatgcagtgcgagctgttctcaagtccacccgctgtaagcggaaacgagacatccactactactacccagcaggtcgccactcccggaacaaccatgttccagacctcctcttctggtgatggagaggaaactggaacccaggccaaacagattcagaacagcgtcttccagactatggtgcagatgcagcactccggcgacaaccagccccaggtcaacttgttctctagcactaagagtatgatgtcggtgcagaattcagggacgcagcagcagggtaacggcctgttccagcagggaaatgagatgatgtccctgcagtccggcaattttcttcagcaatctagtcatagccaggcacagctgtttcatccacagaatcctattgctgacgcacagaatctttcacaagagactcaaggtagtctgttccactcacctaatccaatcgtacactcccagacctctactaccagttccgagcagatgcagcctcccatgttccattcccagagcacgatcgccgttctccaggggagctcagttcctcaggatcagcagtctacaaatatatttctttcccaaagtcctatgaataacctgcagacaaacacagtcgcacaggaagcattcttcgcggcacccaactccatttcccccctacagagtacatcaaatagtgagcagcaagcagctttccagcagcaggcccctatttctcatatccagacacctatgctgtcacaagagcaggctcagccccctcagcaagggctgtttcagccacaggtggcattggggtctctcccaccgaaccctatgccccaatctcagcagggaacaatgttccaatctcagcactctatagtggctatgcagagcaattctccctcacaggagcagcagcagcagcagcagcagcaacagcaacagcagcaacagcaacagcaatccatactgttcagcaaccagaacacgatggccaccatggccagtccgaagcagccacctcctaatatgatttttaaccccaatcagaatcctatggcgaaccaggagcagcagaaccagagtatatttcaccagcaatcaaacatggcacccatgaatcaggagcagcaaccgatgcagtttcagtctcagagcaccgtttcatccctccaaaaccccggacctacccagagtgagagctctcagacccctctcttccactcctcacctcaaatccagttggttcagggtagcccgagcagtcaggagcagcaagtgaccctgttcctgagtccagcatccatgtctgctctgcagacgtctatcaatcagcaggacatgcagcagagtcctttgtatagcccgcagaataatatgccaggtatccagggagctacgtcctccccacagccccaagccactctctttcacaacactgccggtgggaccatgaatcagctgcagaatagccctggttcatcacagcagaccagcggaatgttcctgtttgggatccagaataattgcagccagctactaacaagcgggccagctacgctgccagaccaactcatggctatctcacagccaggacagccacagaacgagggacagccgcctgtgactactctcctcagccagcagatgcctgagaattcacccctcgcaagcagcattaatacaaatcagaacatcgaaaaaatcgatctgctggtgtcactgcagaatcagggaaacaatctcacaggctctttctag

SEQ ID NO: 237069 - DNA, 4367 bp, Artificial Sequence
  derived and/or modified sequence
atggggggagcctgcagcagctttactacatctagtagtcctaccatatactctactagcgttacggatagtaaggcaatgcaagtcgaatcttgtagtagcgctgtgggcgtcagtaacagaggcgtcagcgagaaacagctgacaagtaataccgtgcagcagcacccttcaacccctaagaggcacactgtcctttacattagcccacccccagaagacctgctagacaacagtaggatgagttgccaggacgaagggtgcggcctggaaagcgagcaatcatgctctatgtggatggaagactccccaagcaactttagcaatatgtccacttcatcgtataatgacaatactgaggtccccaggaagtcacgtaagcggaaccccaaacagcggccaggagttaaacgcagggactgcgaagaatctaacatggacatatttgatgcagacagcgcaaaagccccacactacgtgctgtcacaactgacaactgacaataaaggaaatagtaaggccggtaatggtacactggaaaatcagaagggtaccggagtcaagaagagtcctatgctctgcggacagtaccctgtcaagtcagaaggaaaggagttaaaaattgtggtccagccagaaacacagcacagagcccgatatttgactgaaggcagcagaggcagtgtgaaagacaggacacagcagggctttccaaccgtgaagctggaagggcataacgagccagtagtgttacaggtatttgtcgggaatgattctggtcgtgtgaaacctcacggcttttaccaggcttgccgtgtcaccggcagaaacacaacaccttgcaaagaagttgatatcgaaggaaccactgttattgaggtcggactagacccttccaacaacatgaccctcgctgtagattgcgtcggcatcttgaagttgaggaacgcggatgtcgaagcgcgaatcggcatcgccggtagcaaaaagaagtctacccgtgctagactggtatttcgagtgaacattatgcgcaaggacggatcaacactgaccctgcagactcctagctcaccgatcctctgcacccaacccgctggggtgcctgagatcctgaagaaatctctgcacagctgcagcgtgaaaggtgaggaggaagtatttcttattgggaagaactttctgaagggcactaaagtgattttccaggagaacgtttctgatgaaaattcttggaaaagcgaagccgagatagatatggaactgttccatcagaatcacctcatcgtgaaagtacccccttatcatgaccagcatattaccttaccggtttccgtggggatttatgttgtgaccaacgctggccgttcgcacgatgtacagcccttcacgtatacacctgaccctgctgccgctggggctctgaacgtgaacgtgaaaaaagagatatcaagccccgctaggccctgctcgttcgaggaagcaatgaaagcaatgaagaccaccggttgtaacttggataaggtgaacattattcctaatgcactcatgactcctctgatacccagctctatgatcaagtcagaggacgtcacacctatggaggtaaccgcagagaaaagatcttccacgatttttaagaccaccaagtctgtcggatcaacacaacagactttagagaacatcagcaatattgccggaaacggtagcttttcctctccctcgagtagccatctaccaagcgaaaacgagaagcagcaacagattcagccaaaagcctacaatccagagacactcacaactatccagacccaggacatcagtcagcccggtacctttcctgcagttagtgctagcagccaactacctaactcagatgcccttctccagcaggcaacccaatttcagacaagagagacacagtcccgcgagattctgcaatctgatggaacagtggtcaacctgtcccagctgacagaggcgagtcagcagcaacagcagagccctctgcaagagcaggctcaaactctgcagcagcaaatttcttctaatatctttccttcgccaaactctgtgagtcaactacaaaacaccatccagcagctccaggcaggctccttcacgggttccacagcatcaggaagctctggctccgtggatctggttcaacaggttctggaggcccagcagcagctgtcctccgtcctgttctcggcacctgacgggaacgaaaacgtacaggagcaactgagcgctgacatctttcagcaggtatcacagattcagtctggtgtgagtcccggaatgttctcttctacagaacccaccgtgcatactcgcccagacaatctgcttcccggtagggcagagtctgtacacccccagtctgaaaacactcttagcaaccagcagcagcagcaacagcaacagcaacaggtgatggaaagcagcgccgctatggttatggaaatgcagcagtcaatctgtcaggctgccgctcagatccagtccgaactcttcccatccactgctagcgctaacggaaacctacagcagtctccagtgtaccagcagacctcgcacatgatgagcgctctttcaacaaacgaagacatgcagatgcaatgtgaactcttctccagcccccctgcagtcagcggaaatgaaacaagcacgaccactacccagcaggtagccacacctggcaccacaatgtttcagacatcttcaagcggggatggggaggagaccggcactcaggccaaacagatacaaaattccgtgttccagacgatggtccaaatgcaacactcgggcgacaatcagccccaggtgaatctctttagctccacaaaatccatgatgagcgtacaaaacagtggtacacagcagcagggcaacggcctgtttcagcaaggtaacgaaatgatgagcctgcagtcaggtaatttcctgcaacagtcttctcattcacaggctcaacttttccatccccagaatcctatagccgatgctcagaacctgtcgcaagaaacacagggcagtctgtttcacagccccaacccgattgttcactcacagacctctaccacaagtagcgagcagatgcagccaccgatgttccattcccaaagcactatcgctgtcttgcagggaagcagcgtcccgcaggaccaacagtcaacaaatatcttcttgagccaatcgcccatgaacaaccttcagaccaacactgtggctcaggaggcattctttgcggctccaaactccatttcccctctgcaatctaccagcaacagcgaacagcaggctgcgtttcagcagcaggcccctatcagccacattcaaacacctatgctgtctcaagagcaggcacagcctccacaacagggcctcttccagccccaggtagccctcgggtccttgcctcccaaccctatgccacagtcccagcagggaaccatgtttcagagccagcattccatcgtagccatgcagagcaacagtccttcccaagagcaacaacagcaacagcaacaacagcaacaacagcagcaacaacaacagcagtcgatcttattctctaaccagaacaccatggcaacaatggcttctcccaaacaaccccctcctaatatgatctttaatccaaatcagaaccctatggcaaatcaggagcagcagaatcagtctattttccatcagcaaagtaacatggcacctatgaatcaggaacagcagcctatgcagttccagtctcaaagcaccgtgtctagcttacagaaccctggacccacgcaaagtgaatcctcccaaacgccgctctttcacagcagcccgcagattcagttagtccaaggcagtcctagcagccaagaacagcaagtgacattgttcctctcgccagcttccatgtctgcgctgcaaacatccatcaatcagcaagacatgcagcagtcgccattatacagtcctcagaataacatgccagggatccaaggcgcaacttctagcccacaaccgcaggccactctgtttcataatacagcaggtggcactatgaatcagcttcaaaactcccctggcagttctcagcagaccagcgggatgtttctgttcgggatccagaacaactgcagtcaactgttgacctccgggccagccactctgcccgatcagctcatggctatttcacagcccggacagcctcaaaatgagggtcaacccccagtgacaactttgttaagccagcagatgcccgaaaatagcccattagcaagctcaattaacactaaccagaatattgagaagatcgacctgttagtgtccctgcaaaaccaagggaataaccttaccggcagcttcta

SEQ ID NO: 237070 - DNA, 4367 bp, Artificial Sequence
  derived and/or modified sequence
atgggtggtgcctgtagctcgttcactaccagtagctctccgaccatttacagcacctccgtgaccgactccaaagccatgcaagtggagtcgtgctctagtgcagtgggagtatcaaacagaggggtctccgagaagcagctgacgtcaaatacagtacagcaacatccttcaacacctaagcggcacaccgtactttacatctcaccaccccctgaggacctccttgacaacagtcgcatgagttgccaggatgaaggttgcgggctcgaaagtgaacaaagctgctctatgtggatggaggattccccttcaaacttctccaatatgtctaccagctcctacaatgataacacagaggtcccgagaaagtctcgtaagaggaacccaaagcagcgccctggagtgaaaagaagagattgcgaagagagcaacatggacattttcgacgccgatagcgctaaagctccccactacgtgctgtctcagttgaccaccgataacaaaggcaactctaaagcaggaaatgggaccctggagaatcaaaagggcactggggttaaaaaaagccccatgctctgtgggcagtacccagttaaatctgaggggaaagagctaaaaattgtggtgcagcccgagacacagcatcgtgccagatacctgactgagggttcccggggttcagtgaaggatagaacccagcagggattccccacagtgaaactggaaggacataacgaacccgtcgtgctccaggtgtttgtgggcaatgacagcggacgcgtcaagccacatggtttctaccaggcatgtcgagtaactggtcgaaataccacgccttgcaaggaggtggatatagaggggacaaccgtgattgaggtgggtttagacccttcaaataacatgacactcgccgtggattgcgtcggcatattgaagctgcggaacgccgacgttgaggcccgaatcggcatcgcaggaagtaagaaaaaatctactcgtgcccgtctggtgttcagggtgaacatcatgcgaaaagatggaagtaccttgacactgcaaacaccatcgtctcccattctgtgtactcagcccgctggtgtcccggaaattctgaaaaagtcactgcattcctgttcagtaaaaggagaagaggaggtcttcttaattggcaagaactttctgaaaggtaccaaagtcatctttcaggaaaatgtgtccgatgagaactcctggaagagtgaagccgagatcgacatggaattgttccaccagaaccaccttatcgtgaaagtccccccttaccacgaccagcatattaccctccccgtttccgtgggtatttatgttgttaccaacgccggtcgtagtcacgacgtccagccatttacatataccccggatccagctgccgcaggggcacttaacgttaatgtaaagaaggaaatctcgtcccccgcacggccttgcagcttcgaagaggctatgaaggcaatgaagacgacagggtgcaacctcgacaaggtgaacatcatccccaatgctttaatgactcctctgataccaagtagcatgatcaaatctgaagatgtcactccaatggaagtaactgcagagaaacggtctagcaccatttttaaaacaactaaatcagtaggatccacgcagcagactttagagaatatttcgaacatagcgggaaacgggtctttcagctctccatcaagtagccatctgccttcggaaaacgagaaacagcaacagattcagccaaaggcgtacaatccagagactctgactaccattcagacccaggacatctcccaacccggaactttcccggctgttagcgcatccagccagctcccaaacagcgatgccctgctccagcaggctacacaatttcagacccgcgagacccagagccgggagatcctccaatccgacggaaccgtcgtcaacctgtcacagcttacggaagccagccagcagcagcagcagtcgcccctgcaggaacaggcgcagacgctgcaacagcagattagctcaaatattttccctagtcctaatagcgtgtctcagttacagaatactatccagcagctgcaggccggaagctttacagggtcaactgcaagcgggtcctcgggatccgtagacctggtccagcaagtcctcgaggcccagcagcagctctcctctgttcttttttcagctcctgatggcaacgagaacgtgcaggaacaactaagcgctgatatcttccaacaagtttcgcagattcagtctggcgtgtcaccagggatgttctctagcaccgagccaaccgttcataccagacccgacaacctcctgccaggacgggctgagtctgtacacccccagtctgagaatactctgtcaaatcaacagcagcagcagcagcagcagcagcaggtgatggaatcttctgccgcaatggttatggagatgcaacaatctatctgtcaagccgcagcccagattcagtccgagctattcccatcgactgcttccgccaatggcaacctgcagcagtctccagtctaccagcaaacctctcacatgatgtccgcgctgagcaccaacgaggatatgcagatgcagtgtgaattgttctctagccctcccgcagtgagtggaaatgagacaagtacaacaacaacacagcaagtagcaacacccggtaccaccatgttccaaacttcctccagcggcgatggggaagagactggaacccaagctaaacagatccagaactccgtctttcaaaccatggtacagatgcaacatagcggcgacaaccagccgcaggtgaatctcttctcctcaaccaaaagcatgatgtctgtgcaaaactctggcacccagcagcaagggaatggactgttccaacaaggtaacgagatgatgtctttgcaatcagggaattttctccagcaatcatcacactctcaggctcaactcttccacccacagaaccccatagcagacgcccagaatctgtctcaagagacacagggcagcctgttccacagcccaaatcctattgtacattcccagacaagcacaacttcttctgaacagatgcaaccacctatgtttcactcccagtccacgatcgctgtgctccaggggtccagcgttccccaggatcagcagtctacaaatatcttcctgtcccagtcgccgatgaacaacctgcagactaatacggtggcccaagaggctttctttgccgctccgaattccattagcccactccagtccacatccaacagtgaacaacaggcagcgtttcaacaacaggcccctataagccatatccagacgccgatgctgagccaagagcaagcacagcccccacagcagggcctgttccagcctcaggtcgccttaggcagtttgccacctaacccaatgccacagtcccagcagggcacaatgtttcagtcccaacactccattgttgcgatgcagagcaactcacccagtcaggaacagcaacagcagcagcagcagcaacagcagcagcagcaacagcagcagcagtcaatactgttttctaaccaaaataccatggccacaatggcgtctcccaagcaaccaccccctaacatgatcttcaatccaaatcagaatcctatggcaaaccaagaacaacagaaccagagcattttccatcagcagtccaatatggctccaatgaatcaggagcagcagccaatgcagttccagtctcagtcaacggtgtctagcctccagaaccccggacccacccaaagtgagagcagccagacgcccttgttccactcttcacctcaaattcaactcgttcagggatccccgagctctcaagagcagcaagtcactctatttctttctcccgcatccatgtccgcccttcaaacgtctatcaatcagcaagacatgcaacaatcgcccttatactccccacagaacaacatgcccggtatacagggagcgacttctagtccccaacctcaagcaacgcttttccataataccgccggaggtaccatgaatcagctccagaactcaccagggagcagtcaacagacctcaggtatgttcctttttgggatacagaataattgttcacagttactcacatcgggcccagccactctacctgatcagctgatggccatttctcaacctgggcagcctcagaacgaaggacagccgcctgtgacaacacttctcagccagcagatgccagaaaactcacctctggcctcttcgataaacacgaaccagaacatagaaaagattgatcttctggtatccctgcagaaccaggggaacaacctcacaggttcttttta

SEQ ID NO: 237071 - protein, 451 aa, Artificial Sequence
  derived and/or modified sequence
MEQWDHFHNQQEDTDSCSESVKFDARSMTALLPPNPKNSPSLQEKLKSFKAALIALYLLVFAVLIPLIGIVAAQLLKWETKNCSVSSTNANDITQSLTGKGNDSEEEMRFQEVFMEHMSNMEKRIQHILDMEANLMDTEHFQNFSMTTDQRFNDILLQLSTLFSSVQGHGNAIDEISKSLISLNTTLLDLQLNIENLNGKIQENTFKQQEEISKLEERVYNVSAEIMAMKEEQVHLEQEIKGEVKVLNNITNDLRLKDWEHSQTLRNITLIQGPPGPPGEKGDRGPTGESGPRGFPGPIGPPGLKGDRGAIGFPGSRGLPGYAGRPGNSGPKGQKGEKGSGNTLTPFTKVRLVGGSGPHEGRVEILHSGQWGTICDDRWEVRVGQVVCRSLGYPGVQAVHKAAHFGQGTGPIWLNEVFCFGRESSIEECKIRQWGTRACSHSEDAGVTCTL

SEQ ID NO: 237072 - protein, 469 aa, Artificial Sequence
  derived and/or modified sequence
MCYLSAIISISLLNKKPSMEQWDHFHNQQEDTDSCSESVKFDARSMTALLPPNPKNSPSLQEKLKSFKAALIALYLLVFAVLIPLIGIVAAQLLKWETKNCSVSSTNANDITQSLTGKGNDSEEEMRFQEVFMEHMSNMEKRIQHILDMEANLMDTEHFQNFSMTTDQRFNDILLQLSTLFSSVQGHGNAIDEISKSLISLNTTLLDLQLNIENLNGKIQENTFKQQEEISKLEERVYNVSAEIMAMKEEQVHLEQEIKGEVKVLNNITNDLRLKDWEHSQTLRNITLIQGPPGPPGEKGDRGPTGESGPRGFPGPIGPPGLKGDRGAIGFPGSRGLPGYAGRPGNSGPKGQKGEKGSGNTLTPFTKVRLVGGSGPHEGRVEILHSGQWGTICDDRWEVRVGQVVCRSLGYPGVQAVHKAAHFGQGTGPIWLNEVFCFGRESSIEECKIRQWGTRACSHSEDAGVTCTL

SEQ ID NO: 237073 - protein, 64 aa, Artificial Sequence
  derived and/or modified sequence
MEQWDHFHNQQEDTDSCSESVKFDARSMTALLPPNPKNSPSLQEKLKSFKAALIALYLLVFAVL

SEQ ID NO: 237074 - DNA, 1356 bp, Artificial Sequence
  derived and/or modified sequence
atggagcagtgggaccacttccacaatcagcaggaggacaccgacagctgcagcgagagtgtgaagtttgacgcgagatccatgaccgccctgcttccccccaaccccaagaattcaccatcattgcaggaaaagctcaaaagtttcaaggcagctctgatcgccctctacttgcttgttttcgccgtgctaatccccttgattggaattgttgctgcacaattgctgaagtgggagaccaaaaactgttcagtttccagcacaaatgccaatgacatcacacagtccctgaccggcaaaggcaacgacagtgaggaagaaatgagattccaggaagtgtttatggaacacatgtcaaacatggagaaacgcattcagcacatccttgatatggaggctaacctcatggacacagagcattttcaaaacttcagcatgaccacagaccagcgattcaatgacattctactacaactgtccactctgttttcttccgtgcaggggcatggcaatgcaattgatgagatatctaagtccctgatcagtctgaatacgacccttctggatttgcagctcaatatcgaaaatctgaacggaaaaatccaggaaaacacgttcaagcagcaggaggaaatctccaaactagaagaacgggtatataacgtgtcagctgagatcatggccatgaaagaggaacaggtgcatctcgagcaagaaattaaaggggaagttaaggtccttaataacataactaacgatctgcggctgaaagactgggaacacagccagacgttacgcaatatcactcttatccaaggcccccccggaccacctggtgaaaaaggggaccgcgggcccaccggagaatccggaccgaggggatttccaggccccattgggcccccagggctgaaaggggatcgcggggctattggattccctggctccaggggcctgccgggttacgcgggtaggccgggtaactccggaccgaagggtcagaagggggaaaagggaagcggtaatactctcacccctttcaccaaagtccgacttgtaggcggcagcggaccgcacgaagggcgagtcgagatattacattctggccaatggggcactatttgtgacgaccggtgggaggtccgcgtgggccaagttgtttgcaggtccttaggttacccgggtgtacaggccgtgcacaaagctgcccactttggtcaagggactggcccgatctggctgaacgaggttttttgttttggcagggaatcttcaattgaggaatgtaaaatcaggcagtggggaacgcgcgcgtgctcacattccgaggatgcaggagtaacctgcacactatag

SEQ ID NO: 237075 - DNA, 1410 bp, Artificial Sequence
  derived and/or modified sequence
atgtgttacctctccgctatcatctccatcagcctcctcaataaaaagcccagtatggagcaatgggaccattttcacaatcagcaggaagacacagactcatgcagtgaatccgtaaaattcgatgcaagatccatgacggccttgcttcctccgaaccctaagaactcgccttccttgcaggagaagctgaaaagtttcaaggccgcattgattgctttgtacctgctggtctttgcagtgttgatcccactaatcggaattgtggccgcccagctgttaaagtgggaaacaaaaaactgctctgtgagcagcactaatgctaacgacatcacacagtctctgacgggtaagggaaacgactccgaggaagagatgagattccaggaggtcttcatggagcatatgtcaaatatggaaaaacggattcagcacatcctagatatggaagctaatttgatggacactgaacattttcagaacttttccatgacaacagatcagaggtttaacgacattttgttgcagttatctactttgttcagctctgttcagggacacgggaatgcaatcgacgaaatttccaaatcattaatcagccttaacactactttgctagacttacagctgaatattgagaacctgaacggaaagattcaggaaaatactttcaaacagcaggaggagatctccaaacttgaggaaagggtgtacaacgtcagcgccgagatcatggccatgaaggaggaacaggtgcatctagaacaggaaataaagggcgaagtcaaggtcctgaacaacatcaccaatgacctgcggctcaaagattgggagcactcccagacgctgagaaacataaccttgattcagggaccacccgggccgccaggagagaagggagaccgcgggcctaccggagaatccgggcctagggggtttcccggacccatcgggcctcctggccttaagggcgaccggggagctattggctttcctggcagccgcggactgcccggctatgccgggcgtccgggtaactcgggcccaaaaggccagaaaggagagaaaggttccggaaacaccctaacaccattcactaaggtgaggctggtgggaggctctggtccacacgagggccgcgtcgaaattctgcactccggccaatgggggaccatctgcgatgaccgctgggaggtacgggtaggccaggtggtgtgcaggagcctggggtacccaggtgtacaggcagtgcacaaggccgctcacttcggtcagggaacggggcccatttggctgaacgaggtgttttgcttcggccgcgagagtagcatcgaggagtgcaagatccgtcaatggggcacccgggcttgtagccactccgaggacgccggggtgacctgcacactctag

SEQ ID NO: 237076 - DNA, 1356 bp, Artificial Sequence
  derived and/or modified sequence
atggagcagtgggaccacttccacaaccagcaggaggacacagacagctgcagcgagagcgtgaagtttgatgcccgctccatgacagccctgctgccccccaaccccaagaacagccccagcctgcaggagaagctgaagagcttcaaggccgccctgattgccctgtacctgctggtgtttgctgtgctgatccccctcatcggcatcgtggccgcccagctgctgaagtgggagaccaagaactgcagcgtgagcagcaccaatgccaatgacatcacccagagcctgactggaaaaggaaatgacagcgaggaggagatgaggttccaggaggtgttcatggagcacatgagcaacatggagaagaggatccagcacatcctggacatggaggccaacctgatggacacagagcacttccagaacttctccatgaccacagaccagcgcttcaatgacatcctgctgcagctgagcaccctcttcagctctgtgcagggccatggaaatgccattgatgagatcagcaagagcctcatcagcctgaacaccaccctgctggacctgcagctgaacatcgagaacctgaatggcaagatccaggagaacaccttcaagcagcaggaggagatcagcaagctggaggagcgggtgtacaacgtgtctgctgagatcatggccatgaaggaggagcaggtgcacctggagcaggagatcaagggggaggtgaaggtgctgaacaacatcaccaatgacctgcggctgaaggactgggagcacagccagaccctgaggaacatcaccctcatccagggccccccaggccccccaggagagaagggggaccggggccccactggagagagcggcccccggggcttccctggccccatcggccccccaggcctgaagggggacagaggagccatcggcttccctggcagccggggcctgcccggctacgccggccggcccggcaacagcggccccaagggccagaagggggagaagggcagcggcaacaccctgacccccttcaccaaggtgcggctggtgggcggcagcggcccccatgagggccgggtggagatcctgcacagcggccagtggggcaccatctgtgatgaccgctgggaggtgcgggtgggccaggtggtgtgccgcagcctgggctacccaggagtgcaggccgtgcacaaggccgcccacttcggccagggcaccggccccatctggctgaatgaggtgttctgcttcggccgggagagcagcattgaggagtgcaagatccggcagtggggcacccgggcctgcagccacagtgaagatgctggggtgacctgcaccctgtag

SEQ ID NO: 237077 - DNA, 1410 bp, Artificial Sequence
  derived and/or modified sequence
atgtgctacctgagcgccatcatcagcatcagcctgctgaacaagaagcccagcatggagcagtgggaccacttccacaaccagcaggaggacacagacagctgcagcgagagcgtgaagtttgatgcccgctccatgacagccctgctgccccccaaccccaagaacagccccagcctgcaggagaagctgaagagcttcaaggccgccctgattgccctgtacctgctggtgtttgctgtgctgatccccctcatcggcatcgtggccgcccagctgctgaagtgggagaccaagaactgcagcgtgagcagcaccaatgccaatgacatcacccagagcctgactggaaaaggaaatgacagcgaggaggagatgaggttccaggaggtgttcatggagcacatgagcaacatggagaagaggatccagcacatcctggacatggaggccaacctgatggacacagagcacttccagaacttctccatgaccacagaccagcgcttcaatgacatcctgctgcagctgagcaccctcttcagctctgtgcagggccatggaaatgccattgatgagatcagcaagagcctcatcagcctgaacaccaccctgctggacctgcagctgaacatcgagaacctgaatggcaagatccaggagaacaccttcaagcagcaggaggagatcagcaagctggaggagcgggtgtacaacgtgtctgctgagatcatggccatgaaggaggagcaggtgcacctggagcaggagatcaagggggaggtgaaggtgctgaacaacatcaccaatgacctgcggctgaaggactgggagcacagccagaccctgaggaacatcaccctcatccagggccccccaggccccccaggagagaagggggaccggggccccactggagagagcggcccccggggcttccctggccccatcggccccccaggcctgaagggggacagaggagccatcggcttccctggcagccggggcctgcccggctacgccggccggcccggcaacagcggccccaagggccagaagggggagaagggcagcggcaacaccctgacccccttcaccaaggtgcggctggtgggcggcagcggcccccatgagggccgggtggagatcctgcacagcggccagtggggcaccatctgtgatgaccgctgggaggtgcgggtgggccaggtggtgtgccgcagcctgggctacccaggagtgcaggccgtgcacaaggccgcccacttcggccagggcaccggccccatctggctgaatgaggtgttctgcttcggccgggagagcagcattgaggagtgcaagatccggcagtggggcacccgggcctgcagccacagtgaagatgctggggtgacctgcaccctgtag

SEQ ID NO: 237078 - DNA, 2132 bp, Artificial Sequence
  derived and/or modified sequence
tgtgtcatttcctttcttcatgtaccagatgctgaaatactatgagataaagattttaggtttcaattgtaaagagagagaagtggataaatcagtgctgctttctttaggacgaaagaagtatggagcagtgggatcactttcacaatcaacaggaggacactgatagctgctccgaatctgtgaaatttgatgctcgctcaatgacagctttgcttcctccgaatcctaaaaacagcccttcccttcaagagaaactgaagtccttcaaagctgcactgattgccctttacctcctcgtgtttgcagttctcatccctctcattggaatagtggcagctcaactcctgaagtgggaaacgaagaattgctcagttagttcaactaatgcaaatgatataactcaaagtctcacgggaaaaggaaatgacagcgaagaggaaatgagatttcaagaagtctttatggaacacatgagcaacatggagaagagaatccagcatattttagacatggaagccaacctcatggacacagagcatttccaaaatttcagcatgacaactgatcaaagatttaatgacattcttctgcagctaagtaccttgttttcctcagtccagggacatgggaatgcaatagatgaaatctccaagtccttaataagtttgaataccacattgcttgatttgcagctcaacatagaaaatctgaatggcaaaatccaagagaataccttcaaacaacaagaggaaatcagtaaattagaggagcgtgtttacaatgtatcagcagaaattatggctatgaaagaagaacaagtgcatttggaacaggaaataaaaggagaagtgaaagtactgaataacatcactaatgatctcagactgaaagattgggaacattctcagaccttgagaaatatcactttaattcaaggtcctcctggacccccgggtgaaaaaggagatcgaggtcccactggagaaagtggtccacgaggatttccaggtccaataggtcctccgggtcttaaaggtgatcggggagcaattggctttcctggaagtcgaggactcccaggatatgccggaaggccaggaaattctggaccaaaaggccagaaaggggaaaaggggagtggaaacacattaactccatttacgaaagttcgactggtcggtgggagcggccctcacgaggggagggtggagatactccacagcggccagtggggtacaatttgtgacgatcgctgggaagtgcgcgttggacaggtcgtctgtaggagcttgggatacccaggtgttcaagccgtgcacaaggcagctcactttggacaaggtactggtccaatatggctgaatgaagtgttttgttttgggagagaatcatctattgaagaatgtaaaattcggcaatgggggacaagagcctgttcacattctgaagatgctggagtcacttgcactttataatgcatcatattttcattcacaactatgaaatcgctgctcaaaaatgattttattaccttgttcctgtaaaatccatttaatcaatatttaagagattaagaatattgcccaaataatattttagattacaggattaatatattgaacaccttcatgcttactattttatgtctatatttaaatcattttaacttctataggtttttaaatggaattttctaatataatgacttatatgctgaattgaacattttgaagtttatagcttccagattacaaaggccaagggtaatagaaatgcataccagtaattggctccaattcataatatgttcaccaggagattacaattttttgctcttcttgtctttgtaatctatttagttgattttaattactttctgaataacggaagggatcagaagatatcttttgtgcctagattgcaaaatctccaatccacacatattgttttaaaataagaatgttatccaactattaagatatctcaatgtgcaataacttgtgtattagatatcaatgttaatgatatgtcttggccactatggaccagggagcttatttttcttgtcatgtactgacaactgtttaattgaatcatgaagtaaattgaaagcaggacatatgagaaaa

SEQ ID NO: 237079 - DNA, 1513 bp, Artificial Sequence
  derived and/or modified sequence
actctgctgttgagacgttggggagatgaggaggaatacccagaaataaataaaactcccctggatgtgctatctcagtgcaatcatcagtatctctcttctcaacaaaaaaccaagtatggagcagtgggatcactttcacaatcaacaggaggacactgatagctgctccgaatctgtgaaatttgatgctcgctcaatgacagctttgcttcctccgaatcctaaaaacagcccttcccttcaagagaaactgaagtccttcaaagctgcactgattgccctttacctcctcgtgtttgcagttctcatccctctcattggaatagtggcagctcaactcctgaagtgggaaacgaagaattgctcagttagttcaactaatgcaaatgatataactcaaagtctcacgggaaaaggaaatgacagcgaagaggaaatgagatttcaagaagtctttatggaacacatgagcaacatggagaagagaatccagcatattttagacatggaagccaacctcatggacacagagcatttccaaaatttcagcatgacaactgatcaaagatttaatgacattcttctgcagctaagtaccttgttttcctcagtccagggacatgggaatgcaatagatgaaatctccaagtccttaataagtttgaataccacattgcttgatttgcagctcaacatagaaaatctgaatggcaaaatccaagagaataccttcaaacaacaagaggaaatcagtaaattagaggagcgtgtttacaatgtatcagcagaaattatggctatgaaagaagaacaagtgcatttggaacaggaaataaaaggagaagtgaaagtactgaataacatcactaatgatctcagactgaaagattgggaacattctcagaccttgagaaatatcactttaattcaaggtcctcctggacccccgggtgaaaaaggagatcgaggtcccactggagaaagtggtccacgaggatttccaggtccaataggtcctccgggtcttaaaggtgatcggggagcaattggctttcctggaagtcgaggactcccaggatatgccggaaggccaggaaattctggaccaaaaggccagaaaggggaaaaggggagtggaaacacattaactccatttacgaaagttcgactggtcggtgggagcggccctcacgaggggagggtggagatactccacagcggccagtggggtacaatttgtgacgatcgctgggaagtgcgcgttggacaggtcgtctgtaggagcttgggatacccaggtgttcaagccgtgcacaaggcagctcactttggacaaggtactggtccaatatggctgaatgaagtgttttgttttgggagagaatcatctattgaagaatgtaaaattcggcaatgggggacaagagcctgttcacattctgaagatgctggagtcacttgcactttataatgcatcatattttcattcacaactatgaaatcgctgctc

SEQ ID NO: 237080 - DNA, 1356 bp, Artificial Sequence
  derived and/or modified sequence
atggagcagtgggaccacttccacaaccagcaggaggacaccgacagttgttcggagtccgtgaagtttgatgcgcggagtatgactgccctgttgccgcccaaccccaagaacagcccttcactccaggaaaagctaaaatcctttaaggccgccctgatcgctttatacttgcttgttttcgccgtgctgattcctctgatcggcatcgtcgcagcgcagttattaaagtgggaaaccaagaactgtagtgtgtcatcaactaatgctaatgatattacgcagagtctgacagggaaagggaatgacagtgaagaagagatgcggtttcaggaagtgttcatggagcacatgtccaacatggagaagcgcatacagcatatcctggacatggaggctaatctcatggacaccgagcattttcagaacttttctatgacaacagatcagcggttcaatgatatcctgctccagctgagcacactgttctcatccgtccagggccacgggaatgccatcgacgagataagtaaaagccttatctcccttaatacaacactgttggatctgcagcttaatatagagaacctcaatggtaaaatccaggagaacaccttcaaacaacaggaagagatcagcaagctggaagaaagagtgtataatgtgagtgccgaaataatggcgatgaaagaagaacaggttcatttggagcaggagataaagggagaagtcaaggtgctaaacaacatcactaatgatctccggcttaaggactgggaacactcacagacccttaggaatatcactctgattcagggccccccagggcccccaggagagaaaggggaccggggacctactggagagtcaggcccaagagggtttcctggacctatcggtccaccgggactcaaaggcgatcgcggtgcaataggatttcccgggagcagaggtctgcccggatacgcgggcagaccaggcaacagcggccccaagggccagaaaggggagaaaggaagtggcaacactctcactccattcactaaggtgcggctcgtgggaggatcagggccacacgagggccgcgtcgagatcctacactctggtcagtggggtacaatttgcgatgacagatgggaggtccgggtgggacaggtggtgtgccgcagtctggggtaccccggagtgcaggcagtgcacaaagctgcacactttggtcaggggactgggcctatctggctgaacgaagtgttttgctttggccgcgagtcatcaattgaggaatgtaaaatccggcagtggggaaccagagcctgtagtcactccgaggatgctggggtgacgtgtacactgtag

SEQ ID NO: 237081 - DNA, 1410 bp, Artificial Sequence
  derived and/or modified sequence
atgtgctacctgagcgccatcatcagcatcagcctgctgaacaagaagccaagtatggaacagtgggaccactttcacaaccaacaggaagacactgatagttgcagcgaatccgtcaagttcgatgcccggagcatgacagctctgctccctccaaaccccaagaatagcccgtccctgcaggagaaactgaagtcatttaaagcggctttgatcgccttatatcttctcgtatttgccgtgctaattccgctgattggaatcgtcgcggcgcagctccttaagtgggagaccaaaaactgcagtgtctccagtactaatgccaacgacatcactcagagccttaccggcaaaggtaacgatagcgaggaagaaatgcgcttccaggaggtttttatggaacatatgtccaatatggagaaacggattcagcacattctagatatggaagccaacctgatggacaccgagcactttcagaatttcagtatgacaactgaccagcgattcaacgatattttgctccagttatcaacgctgtttagctcagtgcaaggccatgggaatgccatcgacgagatctctaaaagtctgatctccctaaacactaccctgctggatctccagctgaatatcgaaaatctaaatggaaagattcaggagaatacctttaaacaacaggaagaaatttcaaaactggaggaacgcgtttacaatgtgagcgctgagattatggccatgaaggaagagcaggtacatctggaacaggaaatcaaaggagaggtgaaggtcctgaataacatcacaaatgatctgcggcttaaggactgggagcattcccagactttacgcaatattacattaattcagggccctccgggtcctcctggggaaaagggagacaggggtccaacaggagagagtggccccagagggtttcccgggcccattggaccgccaggtctcaaaggtgataggggagcgatcggcttcccaggcagcagaggactccctggctacgctggcagaccagggaattccgggccaaaaggccaaaagggcgagaaggggtccggcaatactctgacgccttttaccaaagtgagactggtgggcggctctggaccacacgaggggagggtggaaattttgcatagcggtcagtggggaacaatatgcgacgaccggtgggaggtgagagtaggacaggtcgtttgtagatctctggggtaccctggggtgcaagccgtgcataaagccgcccacttcggtcagggcacaggccccatctggctgaacgaggtgttttgcttcggtagagaaagtagcatcgaagaatgcaagatccgccagtggggcacccgtgcctgctcacattctgaagatgctggcgtgacatgcaccctatag

SEQ ID NO: 237082 - DNA, 1356 bp, Artificial Sequence
  derived and/or modified sequence
atggaacagtgggaccatttccacaaccagcaggaggatacagactcctgtagtgaatcggtaaaatttgacgccaggagtatgacagccctcctgcccccaaatcctaaaaattctccaagcttgcaggaaaaattgaagtcgttcaaggccgcactaattgcactttacctgctcgtttttgccgtgctcattcctctgataggcatcgtcgcagcacagcttttaaagtgggaaaccaaaaattgttccgttagctccaccaatgcaaatgatataacacagtctcttacaggcaagggaaacgactcagaggaggaaatgcgctttcaggaggtgttcatggaacacatgagtaatatggagaaacggattcagcacattctggacatggaggccaatttgatggacacagagcatttccaaaacttctcgatgacgactgatcaaaggttcaacgacatcctgcttcagctttccacgttattttcttcagttcagggccacggcaacgcaattgatgagatctcaaaatctctgatctctcttaatacaacattgttggacctccagttaaacatcgaaaacctgaatggcaagattcaggaaaatacttttaagcagcaagaagagatcagcaagctggaggagagggtgtacaatgtctctgccgagatcatggcgatgaaagaggaacaggtccatttggaacaagagattaaaggagaagtcaaggtgcttaataatatcaccaatgacttaaggctgaaagactgggagcattcccaaaccctcaggaatattaccctgattcaggggccacccggacccccaggcgagaagggtgatcgaggaccgacaggagaatctggccctagaggtttcccaggcccaattgggccaccgggattgaagggtgataggggagctattggatttcctgggagccgaggcctgccagggtacgccggacggccaggcaatagtgggcctaaaggccagaaaggcgagaaagggtctggcaatacgctaacaccatttacaaaggtccggctggtcggaggctcaggtccacacgagggacgagtcgaaatattacacagcggtcagtggggtactatttgtgacgaccgctgggaggttcgcgtggggcaggtggtgtgcaggtccctgggctatccaggtgtccaggccgtacacaaggccgcacacttcggtcagggtaccggcccaatctggctgaatgaggtcttttgcttcggcagagaaagttccatcgaagagtgtaaaattcggcagtgggggaccagagcttgtagtcattctgaagatgctggcgttacctgcacgctctag

SEQ ID NO: 237083 - DNA, 1410 bp, Artificial Sequence
  derived and/or modified sequence
atgtgctacctgtctgccatcatcagtattagcctccttaacaaaaaaccatccatggagcagtgggaccacttccataatcagcaggaagataccgactcctgcagtgaatctgtgaagtttgacgctagaagcatgaccgccctgttgccacctaatccgaaaaattccccttccctgcaggaaaagcttaaatctttcaaggctgccttgattgcactgtacctactggtcttcgccgtgctcatacccttaatcggcatcgtcgcagcacagctgttgaagtgggagaccaaaaattgttcggtgtcttctaccaacgctaatgatatcacgcagtcgttgaccggcaaaggcaatgattctgaggaggaaatgcggttccaagaggtgttcatggagcacatgagtaatatggagaagcggatccagcacattctcgacatggaggctaatctcatggacaccgaacactttcaaaatttcagtatgactaccgaccaacgtttcaatgacatcctgctgcagctgtccaccctgttcagctctgtacaggggcatggaaatgcgatagacgaaataagcaagtcccttatttcactgaacacaactctattagacctgcagctgaacattgaaaatctgaatgggaagatccaagagaatacatttaagcagcaagaggagatttccaaactggaggagcgcgtttataatgtgagtgcggaaatcatggcaatgaaagaagaacaagtacacttagagcaggagataaaaggcgaggttaaggttcttaacaatatcaccaatgacctaagactgaaagactgggagcatagccagacactgagaaacattacgctcatacaaggcccacccggaccaccaggagagaagggggaccgaggtccaacgggtgagagtggaccgaggggcttcccaggtcctatcggccctcctggccttaagggagatagaggcgcaattgggttcccaggttccagggggctgccaggctacgccggtaggccgggaaattccgggcctaaaggccaaaaaggggagaaaggctctggcaatacattgaccccctttacaaaagttcgcttggttggcggaagtggccctcatgaaggacgcgttgaaattcttcactctggtcagtgggggacaatctgtgacgatcggtgggaggtgcgcgttggtcaggtggtgtgtcgctctctggggtacccgggtgtccaagcagtgcataaagctgctcacttcgggcagggcacaggccctatctggctgaatgaagtattctgtttcggaagggagtcgagcattgaagaatgtaagatccgccagtgggggactagggcctgtagccactccgaggacgccggagtaacttgcacactgtag

SEQ ID NO: 237084 - DNA, 1356 bp, Artificial Sequence
  derived and/or modified sequence
atggaacagtgggaccactttcataatcaacaggaggatacagattcctgcagcgagtcagttaagtttgacgccagaagcatgactgcactccttcctcccaacccgaagaattcaccatccctccaggaaaaactgaagtcatttaaggctgctctgatcgccttatatctacttgttttcgcagttctcattcctctaattggaattgtcgccgcccagctcctgaaatgggaaactaaaaactgtagcgtctcttcaactaatgctaatgatatcacacagtccttgactgggaaagggaatgactccgaagaggaaatgagattccaagaagtatttatggagcatatgtctaacatggaaaagcgcattcaacacattcttgatatggaggccaatcttatggacacagagcattttcagaatttttccatgaccacagatcaaagatttaatgacatcctgctgcaactgagcaccctgttttcttcagtgcaaggccacggcaacgctattgacgagatctctaagagtctgataagtttaaacacaaccttgttggatctccaactaaatatcgagaacctgaatggtaaaatccaggagaatacatttaagcagcaggaagaaattagcaagttagaggaaagagtttacaatgttagtgcggagataatggccatgaaggaggagcaagtgcacttggaacaggaaattaaaggtgaggttaaagtattgaataacatcacaaatgacctgcggttgaaggactgggaacattcacagacgcttcggaacattacactaattcaagggccccctggcccacccggtgagaaaggcgaccgcggcccgactggggaatccggaccacgcggttttcctggacctattggcccccctggactgaagggcgatagaggcgctatcggctttccagggagtagaggcctcccaggatatgctggtagaccgggaaattccggcccaaaaggtcagaagggagagaagggatccggtaacaccctcacaccttttaccaaagtgcgcctcgtgggtggcagcgggccacatgaaggccgcgttgagatactacattctgggcaatggggcacaatctgcgacgaccgatgggaagtccgagtagggcaggtcgtgtgcaggtcccttggctatcccggcgttcaggctgttcataaagcagcacatttcggccagggtactggccccatctggcttaacgaagtgttctgcttcggtcgggagtctagtatcgaggaatgtaagattaggcaatggggcacccgcgcatgttcccactctgaggatgctggcgtgacctgtaccctctag

SEQ ID NO: 237085 - DNA, 1410 bp, Artificial Sequence
  derived and/or modified sequence
atgtgttacctgtccgccattatctctataagtttacttaacaaaaaaccgtccatggaacaatgggatcactttcataaccaacaggaagacaccgacagttgttctgagagcgtgaagttcgacgccagaagcatgactgctctacttccacccaaccctaagaactctcccagcctgcaggagaagcttaagagcttcaaggccgccctcattgcactatatcttctggttttcgcagttctcataccattgattggtattgtggccgcccagctccttaaatgggagactaagaactgtagtgtgtctagcacaaatgccaatgacataacccaaagcctgacagggaaaggcaatgactccgaggaggagatgaggttccaggaggtgttcatggagcacatgtcaaacatggagaaaaggatacagcacatcctagacatggaggccaatttaatggatacagaacattttcagaacttttcaatgaccactgaccagcgattcaacgacatattgctgcaacttagcactctgttctccagtgtacagggccacggaaatgctattgatgaaatatctaaaagcctcatcagcctgaatacaactcttctggacctgcagctaaacatagaaaacctaaatgggaagatccaagagaacacctttaagcagcaagaagagatctcgaaactagaagaaagggtatataacgtctcagcagagataatggccatgaaggaagagcaagtccacctggagcaggagataaagggtgaagtcaaagtgttgaataacatcacaaatgatctgcggcttaaagactgggaacattcccaaactcttagaaatataacactcatccaaggtcccccaggccccccaggcgagaaaggtgaccgcgggcctaccggggaatccggacctcgcgggtttccggggcctatcggccctccaggtttgaagggcgacagaggcgctatcggctttcccggcagtagggggttaccaggatatgcgggtaggcccggcaattccgggcccaagggccagaaaggagagaagggctccgggaataccctgactcctttcactaaagtacggctggtagggggctccggcccccatgagggcagggtggagatcctgcacagcgggcagtggggtaccatttgtgacgaccggtgggaagtcagagtaggccaagtcgtttgcagatccctgggataccccggggtccaggctgttcataaagctgcgcatttcggacaggggactggacccatctggctcaacgaggtgttttgtttcgggcgagaatccagcatcgaggagtgtaaaatccggcagtggggaactcgggcttgtagtcacagtgaggatgctggagtcacttgcactttatag

SEQ ID NO: 237086 - DNA, 1356 bp, Artificial Sequence
  derived and/or modified sequence
atggaacaatgggatcacttccataaccagcaggaggataccgattcatgttcagagtcagtgaagttcgacgccagatccatgaccgcattgctaccacccaatcccaaaaattcgcccagcctccaggagaaactaaaatcttttaaggctgctcttatcgccctttacttattggttttcgccgttctaattcctctgatcgggatcgtggccgcacaacttcttaaatgggagacaaagaactgttctgtttcgagcacgaacgccaacgatattacgcagtcacttaccggaaaggggaatgactccgaggaggaaatgcggtttcaagaggtgttcatggaacacatgtcgaatatggaaaaacggattcagcacatccttgatatggaagccaacctgatggatacagagcacttccagaatttttctatgacgacagaccaacgatttaatgacattttactacaattatcaactctgttttcatctgttcaaggccatggcaacgcgatcgatgagatatccaagtccttgatttcgctcaacacgactcttttagatcttcaacttaatatcgagaaccttaacggcaagattcaagagaatacatttaagcagcaggaagagatctcaaagctggaggaacgggtgtacaatgtgtctgcagaaattatggccatgaaggaagaacaagtgcatctggaacaggaaatcaagggggaagtgaaagttctgaataatatcactaatgatctgaggctcaaagattgggaacatagccagacactgcgaaacatcacattgattcagggcccccccggaccccccggcgagaaaggtgatagaggcccaacgggagaatcaggccccagaggatttcccggcccaattgggccccctggtcttaaaggtgatagaggcgccattggatttcccggctccagagggcttcccgggtacgctggcagaccaggcaatagtggtcccaaaggacagaaaggagagaaaggatcgggaaatacactgaccccttttactaaggtacgtctggtggggggatctggaccgcatgaaggccgagttgaaattttacatagtggccaatggggcactatctgcgacgatcgctgggaggtcagagtgggccaggtcgtttgtaggtctctggggtatccaggagttcaggccgtacataaggccgcccattttggacagggaaccggacctatatggctgaacgaagtgttttgcttcgggagagaatcttctattgaggaatgtaaaatcagacaatggggtactcgggcatgcagtcattcagaagatgccggagttacgtgtactctctag

SEQ ID NO: 237087 - DNA, 1410 bp, Artificial Sequence
  derived and/or modified sequence
atgtgctatctttccgcaatcatttcgatatccctgctgaataagaaaccgtccatggaacaatgggaccacttccataatcaacaggaagacactgatagttgttccgagtcagtcaagtttgatgcaagatctatgaccgccctactgccacctaatccaaagaattcaccgtccctgcaggagaaactgaaatcctttaaggccgctctgatcgctttatacctgctggtgttcgccgtcttaataccactcatcggaattgtcgctgcgcagctcctgaagtgggagaccaagaactgctcagtgtcatccacaaacgctaatgatatcacccaatcactgaccggcaaagggaacgattcagaggaggagatgcgctttcaagaggtgttcatggaacatatgagtaatatggaaaagagaatacagcatatactggacatggaagcaaacctgatggataccgaacactttcagaatttttcaatgacaactgatcaacggttcaatgacatcctgctgcagctgtcaacactcttttcgtctgtacagggtcacggaaacgccatcgacgagatttctaagagtttaatctccctgaacacgacattactcgacctgcaactcaatatcgagaatttaaatggaaagatacaggaaaacacttttaaacaacaggaggagatttccaaactcgaagaaagagtttacaacgttagtgctgagatcatggcaatgaaagaagagcaagttcacttggaacaagagatcaaaggagaagtgaaagtgttaaacaatataactaacgacctgcggcttaaagattgggaacatagtcagactctgagaaatataacgctcattcagggtccccccggcccaccgggcgagaaaggggacagaggccctacgggagaatccggcccccgaggattccccggtcctatcggccctccaggcttaaagggggatagaggcgcaattggtttccctgggtcacgcggtttgccagggtatgccggaagaccaggtaatagcggtcccaaagggcagaagggagagaaggggtctggtaatactctcactccttttacaaaagtgcgcctggtgggaggtagtggacctcacgagggtcgcgtggaaattctgcacagtggtcagtggggaacaatttgtgacgaccgatgggaggttagggtgggccaagtggtttgccggtctctcggttaccccggagttcaggctgttcataaggctgctcacttcggtcagggtacaggacccatttggctgaatgaagtgttctgtttcggaagagagtcaagtatcgaagaatgcaaaataagacagtggggcacaagagcttgttcccactccgaagacgctggagtcacatgtactctatag

SEQ ID NO: 237088 - DNA, 1356 bp, Artificial Sequence
  derived and/or modified sequence
atggagcagtgggaccacttccacaaccagcaggaggacaccgacagctgcagcgagagcgtgaagttcgacgccagaagcatgaccgccctgctgccccccaaccccaagaacagccccagcctgcaggagaagctgaagagcttcaaggccgccctgatcgccctgtacctgctggtgttcgccgtgctgatccccctgatcggcatcgtggccgcccagctgctgaagtgggagaccaagaactgcagcgtgagcagcaccaacgccaacgacatcacccagagcctgaccggcaagggcaacgacagcgaggaggagatgagattccaggaggtgttcatggagcacatgagcaacatggagaagagaatccagcacatcctggacatggaggccaacctgatggacaccgagcacttccagaacttcagcatgaccaccgaccagagattcaacgacatcctgctgcagctgagcaccctgttcagcagcgtgcagggccacggcaacgccatcgacgagatcagcaagagcctgatcagcctgaacaccaccctgctggacctgcagctgaacatcgagaacctgaacggcaagatccaggagaacaccttcaagcagcaggaggagatcagcaagctggaggagagagtgtacaacgtgagcgccgagatcatggccatgaaggaggagcaggtgcacctggagcaggagatcaagggcgaggtgaaggtgctgaacaacatcaccaacgacctgagactgaaggactgggagcacagccagaccctgagaaacatcaccctgatccagggcccccccggcccccccggcgagaagggcgacagaggccccaccggcgagagcggccccagaggcttccccggccccatcggcccccccggcctgaagggcgacagaggcgccatcggcttccccggcagcagaggcctgcccggctacgccggcagacccggcaacagcggccccaagggccagaagggcgagaagggcagcggcaacaccctgacccccttcaccaaggtgagactggtgggcggcagcggcccccacgagggcagagtggagatcctgcacagcggccagtggggcaccatctgcgacgacagatgggaggtgagagtgggccaggtggtgtgcagaagcctgggctaccccggcgtgcaggccgtgcacaaggccgcccacttcggccagggcaccggccccatctggctgaacgaggtgttctgcttcggcagagagagcagcatcgaggagtgcaagatcagacagtggggcaccagagcctgcagccacagcgaggacgccggcgtgacctgcaccctgtag

SEQ ID NO: 237089 - DNA, 1410 bp, Artificial Sequence
  derived and/or modified sequence
atgtgctacctgagcgccatcatcagcatcagcctgctgaacaagaagcccagcatggagcagtgggaccacttccacaaccagcaggaggacaccgacagctgcagcgagagcgtgaagttcgacgccagaagcatgaccgccctgctgccccccaaccccaagaacagccccagcctgcaggagaagctgaagagcttcaaggccgccctgatcgccctgtacctgctggtgttcgccgtgctgatccccctgatcggcatcgtggccgcccagctgctgaagtgggagaccaagaactgcagcgtgagcagcaccaacgccaacgacatcacccagagcctgaccggcaagggcaacgacagcgaggaggagatgagattccaggaggtgttcatggagcacatgagcaacatggagaagagaatccagcacatcctggacatggaggccaacctgatggacaccgagcacttccagaacttcagcatgaccaccgaccagagattcaacgacatcctgctgcagctgagcaccctgttcagcagcgtgcagggccacggcaacgccatcgacgagatcagcaagagcctgatcagcctgaacaccaccctgctggacctgcagctgaacatcgagaacctgaacggcaagatccaggagaacaccttcaagcagcaggaggagatcagcaagctggaggagagagtgtacaacgtgagcgccgagatcatggccatgaaggaggagcaggtgcacctggagcaggagatcaagggcgaggtgaaggtgctgaacaacatcaccaacgacctgagactgaaggactgggagcacagccagaccctgagaaacatcaccctgatccagggcccccccggcccccccggcgagaagggcgacagaggccccaccggcgagagcggccccagaggcttccccggccccatcggcccccccggcctgaagggcgacagaggcgccatcggcttccccggcagcagaggcctgcccggctacgccggcagacccggcaacagcggccccaagggccagaagggcgagaagggcagcggcaacaccctgacccccttcaccaaggtgagactggtgggcggcagcggcccccacgagggcagagtggagatcctgcacagcggccagtggggcaccatctgcgacgacagatgggaggtgagagtgggccaggtggtgtgcagaagcctgggctaccccggcgtgcaggccgtgcacaaggccgcccacttcggccagggcaccggccccatctggctgaacgaggtgttctgcttcggcagagagagcagcatcgaggagtgcaagatcagacagtggggcaccagagcctgcagccacagcgaggacgccggcgtgacctgcaccctgtag

SEQ ID NO: 237090 - protein, 388 aa, Artificial Sequence
  derived and/or modified sequence
MEQWDHFHNQQEDTDSCSESVKFDARSMTALLPPNPKNSPSLQEKLKSFKAALIALYLLVFAVLIPLIGIVAAQLLKWETKNCSVSSTNANDITQSLTGKGNDSEEEMRFQEVFMEHMSNMEKRIQHILDMEANLMDTEHFQNFSMTTDQRFNDILLQLSTLFSSVQGHGNAIDEISKSLISLNTTLLDLQLNIENLNGKIQENTFKQQEEISKLEERVYNVSAEIMAMKEEQVHLEQEIKGEVKVLNNITNDLRLKDWEHSQTLRNITLIQGPPGPPGEKGDRGPTGESGPRGFPGPIGPPGLKGDRGAIGFPGSRGLPGYAGRPGNSGPKGQKGEKGSGNTLSTGPIWLNEVFCFGRESSIEECKIRQWGTRACSHSEDAGVTCTL

SEQ ID NO: 237091 - DNA, 1167 bp, Artificial Sequence
  derived and/or modified sequence
atggaacagtgggaccacttccacaatcagcaggaagacaccgacagttgctcagaaagtgttaagttcgacgcccgctccatgaccgccctgttgcctcctaaccctaaaaatagcccgagcttacaagagaagctgaaatcttttaaagcagctctgattgcgttatatctgctcgtgttcgcagtgctcattcccctgattggcatcgtcgctgcacagttgttgaagtgggagacaaaaaattgttctgtctcctcgactaacgcgaatgatatcacccagtcacttacagggaagggtaatgactcggaggaggagatgagattccaagaggtgttcatggagcatatgtccaacatggagaaacggatccagcatatcctggatatggaagctaatctcatggacaccgaacactttcagaatttcagtatgactactgatcagcgttttaatgacattctgctgcaactcagcaccctctttagcagtgtgcagggccacggaaacgccattgacgagatctctaaatctttgatctcacttaataccacgcttctggatctgcagttgaacatcgaaaatctgaacggcaagatccaggagaacacatttaagcaacaggaggagatcagtaagctcgaggagcgcgtctacaatgtgtccgccgaaatcatggccatgaaagaggagcaggtgcatctggaacaagaaatcaagggggaggtgaaagttctgaataatatcaccaacgacctgcgtcttaaggactgggagcactcacagaccctcaggaacatcactcttatccaggggcctcccggaccccccggggagaaaggcgatcgtggccctacaggggagagcggtccacggggatttccagggcccattggcccgcctggcttgaaaggcgaccgtggcgccattgggttccctggctccagagggctgcctggatacgctggacgtcctggcaattctggaccaaaggggcagaaaggtgaaaaaggtagcggcaatactttatctaccggaccaatctggttgaacgaggttttctgctttggccgggagtcttcaatagaggagtgcaaaatccgccagtggggcacaagggcttgctctcactctgaagatgccggcgtgacgtgcacactctag

SEQ ID NO: 237092 - DNA, 1167 bp, Artificial Sequence
  derived and/or modified sequence
atggaacagtgggaccactttcacaatcaacaggaagacacagattcctgctctgagagcgtaaagtttgacgcacggtcaatgaccgccctgctgccgcccaatccaaagaacagtccctctctccaggaaaagctgaaaagttttaaggccgctctcatcgccttgtatctcttagtgttcgccgttctaattcctctgattggaattgttgccgcacaattgctgaaatgggaaaccaagaattgcagcgttagctctaccaacgcaaatgatatcacccaatccttaactggaaaaggcaacgactccgaggaggagatgcgatttcaggaagtgtttatggaacatatgagcaatatggaaaaacggattcagcacattctggatatggaggctaacctgatggacactgaacattttcagaacttcagtatgactaccgaccagcgatttaacgatatattgctccagctctccaccctgttctctagtgtgcagggccatggtaacgccatcgacgagatcagcaaaagtctgatatcgctgaacaccactctcttggacttgcaattgaatatcgagaatctgaacggaaagatccaggagaatacttttaagcagcaggaggagatctcaaagttagaagagagggtgtacaatgtgagcgccgaaattatggctatgaaagaggagcaggtgcacctagagcaggagataaagggtgaggtcaaggtcttaaacaatattaccaacgacttgcgtctgaaggactgggaacattctcagacgctgagaaatatcacgctaattcaggggcctccgggaccgccaggggagaaaggtgaccgcgggccgacaggcgagtcgggcccacggggattccctggccccattggccccccaggcctgaaaggggacaggggcgccattggctttcctggcagcaggggcctgcctggatatgccggtcgtccaggcaactctggaccgaaaggccaaaagggagaaaagggatctgggaacactctctctactggaccaatatggctgaacgaggtattctgtttcgggcgggaaagctctatagaggagtgtaagatccgccagtggggaacccgcgcatgctcccattctgaggacgccggggtgacctgcactctgtag

SEQ ID NO: 237093 - DNA, 1167 bp, Artificial Sequence
  derived and/or modified sequence
atggagcagtgggaccacttccacaaccagcaggaggacacagacagctgcagcgagagcgtgaagtttgatgcccgctccatgacagccctgctgccccccaaccccaagaacagccccagcctgcaggagaagctgaagagcttcaaggccgccctgattgccctgtacctgctggtgtttgctgtgctgatccccctcatcggcatcgtggccgcccagctgctgaagtgggagaccaagaactgcagcgtgagcagcaccaatgccaatgacatcacccagagcctgactggaaaaggaaatgacagcgaggaggagatgaggttccaggaggtgttcatggagcacatgagcaacatggagaagaggatccagcacatcctggacatggaggccaacctgatggacacagagcacttccagaacttctccatgaccacagaccagcgcttcaatgacatcctgctgcagctgagcaccctcttcagctctgtgcagggccatggaaatgccattgatgagatcagcaagagcctcatcagcctgaacaccaccctgctggacctgcagctgaacatcgagaacctgaatggcaagatccaggagaacaccttcaagcagcaggaggagatcagcaagctggaggagcgggtgtacaacgtgtctgctgagatcatggccatgaaggaggagcaggtgcacctggagcaggagatcaagggggaggtgaaggtgctgaacaacatcaccaatgacctgcggctgaaggactgggagcacagccagaccctgaggaacatcaccctcatccagggccccccaggccccccaggagagaagggggaccggggccccactggagagagcggcccccggggcttccctggccccatcggccccccaggcctgaagggggacagaggagccatcggcttccctggcagccggggcctgcccggctacgccggccggcccggcaacagcggccccaagggccagaagggggagaagggcagcggcaacaccctgagcacaggccccatctggctgaatgaggtgttctgcttcggccgggagagcagcattgaggagtgcaagatccggcagtggggcacccgggcctgcagccacagtgaagatgctggggtgacctgcaccctgtag

SEQ ID NO: 237094 - DNA, 3572 bp, Artificial Sequence
  derived and/or modified sequence
aaatttagattttgcaaacctgtgcattgatgagagtgctattgaaacacattaagaaagattttcaacgcaggaatgtgtcatttcctttcttcatgtaccagatgctgaaatactatgagataaagattttaggtttcaattgtaaagagagagaagtggataaatcagtgctgctttctttaggacgaaagaagtatggagcagtgggatcactttcacaatcaacaggaggacactgatagctgctccgaatctgtgaaatttgatgctcgctcaatgacagctttgcttcctccgaatcctaaaaacagcccttcccttcaagagaaactgaagtccttcaaagctgcactgattgccctttacctcctcgtgtttgcagttctcatccctctcattggaatagtggcagctcaactcctgaagtgggaaacgaagaattgctcagttagttcaactaatgcaaatgatataactcaaagtctcacgggaaaaggaaatgacagcgaagaggaaatgagatttcaagaagtctttatggaacacatgagcaacatggagaagagaatccagcatattttagacatggaagccaacctcatggacacagagcatttccaaaatttcagcatgacaactgatcaaagatttaatgacattcttctgcagctaagtaccttgttttcctcagtccagggacatgggaatgcaatagatgaaatctccaagtccttaataagtttgaataccacattgcttgatttgcagctcaacatagaaaatctgaatggcaaaatccaagagaataccttcaaacaacaagaggaaatcagtaaattagaggagcgtgtttacaatgtatcagcagaaattatggctatgaaagaagaacaagtgcatttggaacaggaaataaaaggagaagtgaaagtactgaataacatcactaatgatctcagactgaaagattgggaacattctcagaccttgagaaatatcactttaattcaaggtcctcctggacccccgggtgaaaaaggagatcgaggtcccactggagaaagtggtccacgaggatttccaggtccaataggtcctccgggtcttaaaggtgatcggggagcaattggctttcctggaagtcgaggactcccaggatatgccggaaggccaggaaattctggaccaaaaggccagaaaggggaaaaggggagtggaaacacattaagtactggtccaatatggctgaatgaagtgttttgttttgggagagaatcatctattgaagaatgtaaaattcggcaatgggggacaagagcctgttcacattctgaagatgctggagtcacttgcactttataatgcatcatattttcattcacaactatgaaatcgctgctcaaaaatgattttattaccttgttcctgtaaaatccatttaatcaatatttaagagattaagaatattgcccaaataatattttagattacaggattaatatattgaacaccttcatgcttactattttatgtctatatttaaatcattttaacttctataggtttttaaatggaattttctaatataatgacttatatgctgaattgaacattttgaagtttatagcttccagattacaaaggccaagggtaatagaaatgcataccagtaattggctccaattcataatatgttcaccaggagattacaattttttgctcttcttgtctttgtaatctatttagttgattttaattactttctgaataacggaagggatcagaagatatcttttgtgcctagattgcaaaatctccaatccacacatattgttttaaaataagaatgttatccaactattaagatatctcaatgtgcaataacttgtgtattagatatcaatgttaatgatatgtcttggccactatggaccagggagcttatttttcttgtcatgtactgacaactgtttaattgaatcatgaagtaaattgaaagcaggacatatgagaaaactgaccatcagtatatttgtccagataattggtggatcaaaaatgccacttaacaggaagtttagtttgttatgcactttaaatggaataattagcttgttacaattctaggacatggtgtttaaaatttaaatctgattaatccattttaacaaacaatgcaaacatcttcagtgcagaaggaagagtggtttcaactgtttggagtcttttatgaagtcagtcaacatttacaaccaaagggcgggggggggggtggggggtgcgtctttagtcctaaagggacaataactctgagcatgccccaaaaaagtagtttagcaaccttttgttggtagtcaacccatccccagggccatagtgtagagtgtgaaaagctaccctgaaacccagtaattctaccctgaaagtgactgcctgcagaaagaccagcagttgatattaaagcgcaaatgaattcaacctcagccctgaaaataacagaattctgaagtttcctatgactaattcacaaaaaaagtaattgtaaactagtactattatggaattactctactgttctttctttaatagtggcaaatgaaagcataagcttaagcattttttcatattctgaagtctcaccacacataataaccaagtggtagactcacagccgtccaacttaaaaaggcaaaaccttaccttggaattggaattactgtaaacagcctactgaaaatgcatttttatcatgtaacattcttctacttgtttaacattgctgattttctctggcagcataattttgtggttaagagaatgaattctgaatgtacactttctgtctcaaaccctggctgtaatttcagctagttaataattctttgtgttcagttccactatctaggtattttcttcaaaaggtaaatacaatggtttctgaaagaatcatttgcattatcagcctgtttgggatgtctgagatcagtgcctctgggttgttaatactgtattgctgtatggtatatgtatgctgatttactacttatgcgtaagtggtatgcatgggatgtctgaaatcagtgcctatgggttgtcaatagtattaactattagtgttaactgttagtattaactattagtattattaacactaataatagtactattactattactatttttattttaaaataaaatttacctttaaaataataatagtactattgctagtactagtactattgctattactagtactattactagtactagtactatgacactgttaatagtactattaacaacccataggcacttgggatgtctgagatcagtgcctatgggttgttaatactatattgctgtatggtatatgcatgctgatttaccacttatgcatagatatatctttaataagtaatctaaaaatcctttttgtatttgagagaatctactaagttcagtccagtcaagaaaagaacctaatagcaccaatacaaattgaggacttaatttactttggaatgttgaattgcatttgttccattaaaaaaaacagaaatttgcga

SEQ ID NO: 237095 - DNA, 1167 bp, Artificial Sequence
  derived and/or modified sequence
atggagcagtgggatcactttcacaatcaacaggaggacactgatagctgctccgaatctgtgaaatttgatgctcgctcaatgacagctttgcttcctccgaatcctaaaaacagcccttcccttcaagagaaactgaagtccttcaaagctgcactgattgccctttacctcctcgtgtttgcagttctcatccctctcattggaatagtggcagctcaactcctgaagtgggaaacgaagaattgctcagttagttcaactaatgcaaatgatataactcaaagtctcacgggaaaaggaaatgacagcgaagaggaaatgagatttcaagaagtctttatggaacacatgagcaacatggagaagagaatccagcatattttagacatggaagccaacctcatggacacagagcatttccaaaatttcagcatgacaactgatcaaagatttaatgacattcttctgcagctaagtaccttgttttcctcagtccagggacatgggaatgcaatagatgaaatctccaagtccttaataagtttgaataccacattgcttgatttgcagctcaacatagaaaatctgaatggcaaaatccaagagaataccttcaaacaacaagaggaaatcagtaaattagaggagcgtgtttacaatgtatcagcagaaattatggctatgaaagaagaacaagtgcatttggaacaggaaataaaaggagaagtgaaagtactgaataacatcactaatgatctcagactgaaagattgggaacattctcagaccttgagaaatatcactttaattcaaggtcctcctggacccccgggtgaaaaaggagatcgaggtcccactggagaaagtggtccacgaggatttccaggtccaataggtcctccgggtcttaaaggtgatcggggagcaattggctttcctggaagtcgaggactcccaggatatgccggaaggccaggaaattctggaccaaaaggccagaaaggggaaaaggggagtggaaacacattaagtactggtccaatatggctgaatgaagtgttttgttttgggagagaatcatctattgaagaatgtaaaattcggcaatgggggacaagagcctgttcacattctgaagatgctggagtcacttgcactttataa

SEQ ID NO: 237096 - DNA, 1167 bp, Artificial Sequence
  derived and/or modified sequence
atggagcagtgggaccacttccacaaccagcaggaggacaccgacagctgttccgagtcggtcaaatttgacgcacgctcgatgacagcccttctgcccccaaaccccaagaatagcccatcgctacaggaaaaactcaagtccttcaaggcagcacttattgcgttatacctgcttgtcttcgcagtgctcattcctctgatcggcatagttgctgcccagctgcttaagtgggagaccaaaaactgttctgtatcgtccacaaacgcaaacgatatcactcagtccttgaccggtaagggaaacgactcagaagaggaaatgcggttccaggaagtctttatggagcacatgagcaacatggagaaaagaatacagcacatcctggatatggaggccaatttgatggatacagagcatttccaaaacttctccatgactactgaccagcggttcaacgatatcttactgcaattaagtacccttttcagctctgtacaaggccatggtaacgctatagacgaaatttctaaatctctgatcagtctgaacacaacccttctggacctccaattgaatatcgaaaacctgaacggcaaaattcaagaaaacaccttcaagcaacaggaggagatctccaaacttgaggaaagggtgtataacgtatctgccgaaataatggccatgaaggaagagcaagttcacttagagcaggaaatcaagggcgaggtcaaggttctcaacaacataacaaatgacctcagactgaaagactgggagcactctcagaccctgaggaatatcactctcatacagggcccacccggaccacctggagagaagggagatagaggccctacaggcgagagcgggccacgcgggttcccagggcccatcggtcctcctggactgaagggcgacagaggcgcaatcgggtttcccggcagcagagggctgcccggatatgccggcaggcctgggaattctggcccaaaggggcagaaaggagagaagggtagcggcaatactctgagtaccggaccgatctggcttaacgaggtgttttgcttcggccgggagagtagcatcgaagagtgtaagattcgacagtggggcacaagagcgtgttctcacagcgaggacgccggcgttacgtgtaccctgtag

SEQ ID NO: 237097 - DNA, 1167 bp, Artificial Sequence
  derived and/or modified sequence
atggagcagtgggaccacttccacaaccagcaggaggacaccgactcatgttctgagtcagtgaagtttgatgcccggagcatgaccgcgctcctgcctccaaacccaaagaactccccgtcattacaggagaaactcaagagctttaaagccgccctgatcgccctgtacctgctggtctttgccgtgctgattcccctgattgggatagtagcggcgcaactcttgaaatgggaaaccaagaactgtagcgtaagctccactaatgccaacgatattacacagtctttaacaggaaagggcaacgactctgaggaggaaatgcgctttcaggaagtttttatggagcatatgagtaatatggaaaagagaattcagcatatccttgacatggaggcgaacctgatggacacggagcattttcagaatttcagtatgactacggatcagcgcttcaatgacattctgcttcaattatcgactctctttagctctgtgcagggtcacgggaatgccatcgacgagataagtaaatcactcatctccctgaacaccactcttctggatctgcaattgaacatagagaacctcaacggcaagatacaggagaacacatttaaacagcaagaggaaattagcaaactcgaagaacgcgtctataatgtttcagctgagatcatggcaatgaaggaggaacaggtacacctcgagcaggaaattaagggagaagttaaagtgctgaataacatcacaaacgatctgaggctgaaagattgggagcattctcaaaccctgagaaacattacactgattcagggccccccgggtcctcctggggagaaaggggacagaggcccaacaggtgagtctggccccagggggtttccaggacctatcggtcctcctgggttgaagggggatcggggggcaattgggtttcccgggtctcggggattgcccggctatgccgggcggcccgggaatagtggtcctaaagggcagaaaggtgagaagggctctggaaatactctaagtaccggccccatctggttaaacgaggtattctgcttcggccgcgaatccagcatcgaggagtgcaaaatccgacagtggggcacaagagcctgctcccacagtgaggacgcgggagtcacgtgcacactgtag

SEQ ID NO: 237098 - DNA, 1167 bp, Artificial Sequence
  derived and/or modified sequence
atggagcagtgggatcatttccacaaccagcaggaggatacagatagttgttcagagagtgtgaaatttgatgcgcgttccatgacggcactcttgccaccaaaccccaagaacagcccgtctctacaggaaaagctgaagagttttaaggctgcactaattgccttgtacctgctggttttcgctgtactgatccctttgattggcatcgttgctgcacagctgctcaaatgggagacgaagaactgctcggtgagtagtacgaacgctaatgatattacgcagtccttgaccggaaaaggcaatgacagcgaagaggagatgcgttttcaagaggtgtttatggagcatatgtctaacatggaaaaacgcatccaacacatcctggacatggaggctaacctgatggacaccgaacacttccaaaatttctctatgaccaccgatcagaggttcaatgatattttactacagctcagtactcttttttcttccgttcagggccatggtaatgcaatcgatgaaatctctaagagcctaatatccctgaatactaccctcctcgatcttcaactgaatatagagaatttgaacggaaaaattcaggagaatacctttaagcaacaggaggagatttcaaaactggaggaaagggtgtacaacgtatctgcagagatcatggccatgaaggaggagcaggtccatctggaacaggaaatcaagggcgaggttaaggtgttgaacaatattaccaacgacttgagactcaaagattgggagcactcgcagactctaaggaacataacgttaatccagggccctcccggtcctcctggggagaagggagacagggggccaactggggaatctggacccaggggttttccagggccaatcgggcctccgggtcttaaaggggaccggggagctattggctttcctggctcccgcggtctacctggctatgctgggcgacccggtaactccggccctaaggggcagaagggagaaaaggggagtggcaacacactgtcaaccggcccaatctggttgaacgaggtcttctgctttggccgagagtccagcattgaggagtgcaagattaggcaatggggaactcgggcatgttctcactctgaagatgctggagtgacctgtactctatag

SEQ ID NO: 237099 - DNA, 1167 bp, Artificial Sequence
  derived and/or modified sequence
atggagcagtgggaccatttccataatcagcaggaggacaccgactcctgctctgaatctgtaaaattcgacgcccgtagcatgacagctctcctcccaccgaaccctaagaacagcccctccttgcaagaaaaacttaagagtttcaaagctgcccttattgccctgtacctgctcgtattcgctgtgcttattcctctgattggtattgtcgctgcccagcttcttaaatgggagactaagaactgtagcgtcagttcgacgaacgctaatgatatcacgcagtcgctgactgggaaaggcaacgattctgaagaggaaatgcgttttcaggaagtgttcatggaacatatgtccaatatggagaagaggatacagcacattcttgatatggaagccaatctcatggatacagaacacttccagaattttagtatgacaaccgatcagaggttcaacgacattctgttacaactgtccaccctgttctcatcggtgcaggggcatggaaacgcgattgacgagatttccaagtctctgatctctttgaacactacgctgctcgatctgcagttgaacattgaaaacctgaatgggaaaatacaggagaatacttttaagcaacaggaagaaatcagtaaactggaggaacgtgtgtacaacgtatcagctgagataatggcgatgaaagaggaacaggtccacctggaacaggagattaagggcgaagtgaaggtgctgaataatatcacaaacgacctgagactcaaagactgggagcacagccagacactgcgtaatattactttaatccagggaccgccagggcctccaggcgagaaaggagacagggggcctactggcgagtcagggcctcggggatttcctggacctatcggcccacccggacttaaaggcgacaggggcgcaatcgggtttccgggaagcagaggattacctggatatgcaggtcggcctggcaatagtggccctaaggggcaaaaaggtgagaaagggtccgggaatacactatctacagggccaatctggctcaatgaagttttctgtttcgggagagagtcatctatcgaggagtgcaaaatacgacaatggggaacaagggcatgctcacacagcgaggacgccggtgtgacctgtaccctttag

SEQ ID NO: 237100 - DNA, 1167 bp, Artificial Sequence
  derived and/or modified sequence
atggagcaatgggaccacttccacaaccagcaagaagacaccgacagctgttcagagtctgtcaaatttgacgctagatcaatgactgcattgctccctccgaacccgaagaactctccctctttgcaagaaaagctgaaatctttcaaagctgcactgatcgctctttatttactggtgttcgcagtgctgattcctcttattggcattgtggctgcccaactgcttaagtgggagaccaaaaactgttcggtgagctccaccaacgccaacgatataacccagtctcttaccggaaagggtaatgattcagaggaggaaatgcgcttccaagaagtattcatggaacacatgtcgaatatggaaaagagaatacagcatatactggacatggaggcaaacctcatggacacagagcacttccaaaacttcagtatgactacagatcaaagattcaatgacatcctgctgcagctgtcaacactgtttagctcagtgcagggacacggtaatgccatcgatgagatttctaaaagcctgatatccctcaacactactctgctggacctccaattgaatattgaaaacctgaatggaaagatacaggaaaataccttcaagcagcaggaagaaatatctaaacttgaggagcgggtgtacaacgtaagcgccgagattatggcgatgaaggaagagcaagtccatctagagcaggagattaagggcgaggtgaaagtactcaacaatatcaccaacgacctgaggttgaaagactgggaacactcacaaactctcaggaacattacattgatccagggccctcccggcccgccgggcgaaaaaggcgaccgcggtcccacgggtgagtctggtcctagggggtttcccggacccatcgggccgcccggcctcaagggagacaggggtgcgataggattcccgggcagtagggggctgcccggatacgccggcagacccggcaatagtggtcctaaaggtcagaagggagaaaaaggaagcggcaataccctgagcactgggccaatttggcttaatgaagtcttctgttttggacgcgagtcatcaattgaagaatgcaagatccgccagtgggggacccgtgcctgttcccattcagaagacgctggggtcacgtgcacactgtag

SEQ ID NO: 237101 - DNA, 1167 bp, Artificial Sequence
  derived and/or modified sequence
atggagcagtgggatcatttccataatcagcaagaagataccgactcatgtagtgaaagtgtgaagttcgacgccaggagcatgaccgcccttctgccacctaacccaaaaaactcacctagtctacaagagaagctgaaatcatttaaggccgcgttgatcgccttgtacttattggtgttcgctgtgctgattcccctaattggcattgtcgccgctcagctgctgaaatgggaaacaaaaaactgtagtgtttcatcaactaatgctaacgacataacccaaagtttgaccggaaagggcaatgactcagaagaggagatgagattccaagaggtctttatggagcacatgagcaacatggagaaacgcatacagcacatcctggacatggaagccaatctcatggataccgaacacttccagaacttttcgatgaccaccgatcagcggtttaatgatatcctattacaactatctactctcttttcctcagttcaaggtcacggaaacgcaatagacgaaatttccaaaagccttatttcacttaataccacactcttagatctgcagcttaatatcgagaatctgaatggcaaaattcaggaaaacacgtttaagcagcaggaggaaatcagcaaattagaggagcgggtgtataatgttagtgctgagattatggcaatgaaggaagagcaagtgcacctcgaacaggaaatcaaaggtgaagttaaagtgctgaacaacattaccaatgacttgaggcttaaagactgggagcacagccaaactcttaggaacattaccctgatccagggaccaccagggccacctggagagaagggcgacaggggtcctacgggcgagagtggaccccgaggtttcccaggcccaataggcccaccaggactgaagggagataggggggccatcggatttccggggtcacgagggttacctgggtacgccggaaggcctggcaactctggtcctaaagggcagaagggggaaaaagggtccggcaataccctatccactggccccatttggctcaacgaagttttctgtttcggtagagagtcctctattgaggaatgcaaaatccgacagtggggcacaagggcctgcagtcatagcgaggacgccggggtcacgtgcacgctgtag

SEQ ID NO: 237102 - DNA, 1167 bp, Artificial Sequence
  derived and/or modified sequence
atggagcaatgggatcattttcataaccagcaagaagacaccgacagctgttccgagagtgtcaaatttgatgctcgatctatgaccgcgctactcccccccaatcctaagaattcaccctccctccaggagaagctcaagtcatttaaggccgctctgatcgccttgtacctcctcgtttttgccgtgctaatccccctgatcggtatagtcgccgcacaacttctcaagtgggaaaccaagaactgctctgtaagcagcacaaacgctaatgacatcacacagtccttgacgggcaaaggcaacgattctgaggaagagatgcggtttcaagaggtattcatggagcacatgtctaacatggaaaaaagaatccagcacatactagatatggaagcaaatctgatggacaccgaacacttccaaaatttttcgatgaccactgatcagaggttcaacgacattctcttacagctatccaccctcttcagctctgtccagggacatggcaacgctatcgacgaaatctcaaaaagcctgatttccctaaatactacgttactggatctccaattgaatattgaaaatctcaatggtaaaattcaggagaatacattcaaacaacaggaggaaattagtaaactagaagagagggtctataacgtgtcagcagagatcatggctatgaaagaagagcaagttcacctagagcaggagattaaaggggaagtaaaggtcttaaataacatcactaacgacctccgcttaaaagattgggaacattcgcagactctgagaaacattaccctgattcagggcccacccgggcctccaggcgagaaaggggacagggggcccacaggcgaatctggaccccgcggattccctggacccatcggcccgcccggcctgaaaggcgatagaggggcaattggattccccggatccagaggattgcccggatatgctggtcgcccagggaacagtgggcctaaaggccagaagggagagaaggggagtggcaacacactgtctacggggccaatctggctgaatgaagtgttttgttttggaagagagagtagcattgaggaatgtaaaatccggcagtggggcaccagagcctgtagccatagcgaagatgctggcgtcacctgtacattatag

SEQ ID NO: 237103 - DNA, 1167 bp, Artificial Sequence
  derived and/or modified sequence
atggagcagtgggatcatttccataatcagcaagaagataccgactcatgtagtgaaagtgtgaagttcgacgccaggagcatgaccgcccttctgccacctaacccaaaaaactcacctagtctacaagagaagctgaaatcatttaaggccgcgttgatcgccttgtacttattggtgttcgctgtgctgattcccctaattggcattgtcgccgctcagctgctgaaatgggaaacaaaaaactgtagtgtttcatcaactaatgctaacgacataacccaaagtttgaccggaaagggcaatgactcagaagaggagatgagattccaagaggtctttatggagcacatgagcaacatggagaaacgcatacagcacatcctggacatggaagccaatctcatggataccgaacacttccagaacttttcgatgaccaccgatcagcggtttaatgatatcctattacaactatctactctcttttcctcagttcaaggtcacggaaacgcaatagacgaaatttccaaaagccttatttcacttaataccacactcttagatctgcagcttaatatcgagaatctgaatggcaaaatacaggagaacacatttaaacaacaggaggagatatctaagctcgaggaaagggtgtacaacgtgagcgcagagatcatggcaatgaaggaagaacaggtccatctggagcaggaaattaagggagaagtgaaagtcctaaacaatattacaaatgatctgagacttaaggactgggaacatagccaaaccctgagaaatattaccctgatccagggtccacccggccccccaggtgagaaaggcgatcgcgggcctactggggaatccggacctagggggtttccagggcccatcggccctccagggttgaaaggggatcggggcgcaattggttttcccggctctcgcggtctccccggatatgctgggcggcctggaaattccggtccaaagggccagaagggcgagaaaggaagtggaaataccttgagcactggtccgatttggttgaacgaagtcttttgtttcggacgcgagagttctatcgaagaatgcaagataagacagtggggaacacgagcatgttcacactcagaagatgctggggtgacctgtactttgtag

SEQ ID NO: 237104 - DNA, 1167 bp, Artificial Sequence
  derived and/or modified sequence
atggagcagtgggaccacttccacaaccagcaggaggacaccgacagctgcagcgagagcgtgaagttcgacgccagaagcatgaccgccctgctgccccccaaccccaagaacagccccagcctgcaggagaagctgaagagcttcaaggccgccctgatcgccctgtacctgctggtgttcgccgtgctgatccccctgatcggcatcgtggccgcccagctgctgaagtgggagaccaagaactgcagcgtgagcagcaccaacgccaacgacatcacccagagcctgaccggcaagggcaacgacagcgaggaggagatgagattccaggaggtgttcatggagcacatgagcaacatggagaagagaatccagcacatcctggacatggaggccaacctgatggacaccgagcacttccagaacttcagcatgaccaccgaccagagattcaacgacatcctgctgcagctgagcaccctgttcagcagcgtgcagggccacggcaacgccatcgacgagatcagcaagagcctgatcagcctgaacaccaccctgctggacctgcagctgaacatcgagaacctgaacggcaagatccaggagaacaccttcaagcagcaggaggagatcagcaagctggaggagagagtgtacaacgtgagcgccgagatcatggccatgaaggaggagcaggtgcacctggagcaggagatcaagggcgaggtgaaggtgctgaacaacatcaccaacgacctgagactgaaggactgggagcacagccagaccctgagaaacatcaccctgatccagggcccccccggcccccccggcgagaagggcgacagaggccccaccggcgagagcggccccagaggcttccccggccccatcggcccccccggcctgaagggcgacagaggcgccatcggcttccccggcagcagaggcctgcccggctacgccggcagacccggcaacagcggccccaagggccagaagggcgagaagggcagcggcaacaccctgagcaccggccccatctggctgaacgaggtgttctgcttcggcagagagagcagcatcgaggagtgcaagatcagacagtggggcaccagagcctgcagccacagcgaggacgccggcgtgacctgcaccctgtag

SEQ ID NO: 237105 - protein, 302 aa, Artificial Sequence
  derived and/or modified sequence
MLGLCGQRLPAAWVLLLLPFLPLLLLAAPAPHRASYKPVIVVHGLFDSSYSFRHLLEYINETHPGTVVTVLDLFDGRESLRPLWEQVQGFREAVVPIMAKAPQGVHLICYSQGGLVCRALLSVMDDHNVDSFISLSSPQMGQYGDTDYLKWLFPTSMRSNLYRICYSPWGQEFSICNYWHDPHHDDLYLNASSFLALINGERDHPNATVWRKNFLRVGHLVLIGGPDDGVITPWQSSFFGFYDANETVLEMEEQLVYLRDSFGLKTLLARGAIVRCPMAGISHTAWHSNRTLYETCIEPWLS

SEQ ID NO: 237106 - protein, 308 aa, Artificial Sequence
  derived and/or modified sequence
MKSCGSMLGLCGQRLPAAWVLLLLPFLPLLLLAAPAPHRASYKPVIVVHGLFDSSYSFRHLLEYINETHPGTVVTVLDLFDGRESLRPLWEQVQGFREAVVPIMAKAPQGVHLICYSQGGLVCRALLSVMDDHNVDSFISLSSPQMGQYGDTDYLKWLFPTSMRSNLYRICYSPWGQEFSICNYWHDPHHDDLYLNASSFLALINGERDHPNATVWRKNFLRVGHLVLIGGPDDGVITPWQSSFFGFYDANETVLEMEEQLVYLRDSFGLKTLLARGAIVRCPMAGISHTAWHSNRTLYETCIEPWLS

SEQ ID NO: 237107 - protein, 308 aa, Artificial Sequence
  derived and/or modified sequence
MKSCGSMLGLWGQRLPAAWVLLLLPFLPLLLLAAPAPHRESYKPVIVVHGLFDSSYSFRHLLEYINETHPGTVVTVLDLFDGRESLRPLWEQVQGFREAVVPIMAKAPQGVHLICYSQGGLVCRALLSVMDDHNVDSFISLSSPQMGQYGDTDYLKWLFPTSMRSNLYRICYSPWGQEFSICNYWHDPHHDDLYLNASSFLALINGERDHPNATVWRKNFLRVGHLVLIGGPDDGVITPWQSSFFGFYDANETVLEMEEQLVYLRDSFGLKTLLARGAIVRCPMAGISHTAWHSNRTLYETCIEPWLS

SEQ ID NO: 237108 - protein, 308 aa, Artificial Sequence
  derived and/or modified sequence
MKSCGSMLGLWGQRLPAAWVLLLLPFLPLLLLAAPAPHRASYKPVIVVHGLFDSSYSFRHLLEYINETHPGTVVTVLDLFDGRESLRPLWEQVQGFREAVVPIMAKAPQGVHLICYSQGGLVCRALLSVMDDHNVDSFISLSSPQMGQYGDTDYLKWLFPTSMRSNLYRICYSPWGQEFSICNYWHDPHHDDLYLNASSFLALINGERDHPNATVWRKNFLRVGHLVLIGGPDDGVITPWQSSFFGFYDANETVLEMEEQLVYLRDSFGLKTLLARGAIVRCPMAGISHTAWHSNRTLYETCIEPWLS

SEQ ID NO: 237109 - protein, 302 aa, Artificial Sequence
  derived and/or modified sequence
MLGLWGQRLPAAWVLLLLPFLPLLLLAAPAPHRESYKPVIVVHGLFDSSYSFRHLLEYINETHPGTVVTVLDLFDGRESLRPLWEQVQGFREAVVPIMAKAPQGVHLICYSQGGLVCRALLSVMDDHNVDSFISLSSPQMGQYGDTDYLKWLFPTSMRSNLYRICYSPWGQEFSICNYWHDPHHDDLYLNASSFLALINGERDHPNATVWRKNFLRVGHLVLIGGPDDGVITPWQSSFFGFYDANETVLEMEEQLVYLRDSFGLKTLLARGAIVRCPMAGISHTAWHSNRTLYETCIEPWLS

SEQ ID NO: 237110 - protein, 302 aa, Artificial Sequence
  derived and/or modified sequence
MLGLWGQRLPAAWVLLLLPFLPLLLLAAPAPHRASYKPVIVVHGLFDSSYSFRHLLEYINETHPGTVVTVLDLFDGRESLRPLWEQVQGFREAVVPIMAKAPQGVHLICYSQGGLVCRALLSVMDDHNVDSFISLSSPQMGQYGDTDYLKWLFPTSMRSNLYRICYSPWGQEFSICNYWHDPHHDDLYLNASSFLALINGERDHPNATVWRKNFLRVGHLVLIGGPDDGVITPWQSSFFGFYDANETVLEMEEQLVYLRDSFGLKTLLARGAIVRCPMAGISHTAWHSNRTLYETCIEPWLS

SEQ ID NO: 237111 - protein, 93 aa, Artificial Sequence
  derived and/or modified sequence
MLGLWGQRLPAAWVLLLLPFLPLLLLAAPAPHRASYKPVIVVHGLFDSSYSFRHLLEYINEGALCAGLCFLSWMITTWILSSPSPLHRWDSME

SEQ ID NO: 237112 - protein, 200 aa, Artificial Sequence
  derived and/or modified sequence
MLGLWGQRLPAAWVLLLLPFLPLLLLAAPAPHRESYKPVIVVHGLFDSSYSFRHLLEYINETHPGTVVTVLDLFDGRESLRPLWEQVQGFREAVVPIMAKAPQGVHLICYSQGGLVCRALLSVMDDHNVDSFISLSSPQMGQYGDTDYLKWLFPTSMRSNLYRICYSPWGQEFSICNYWHDPHHDDLYLNASSFLALING

SEQ ID NO: 237113 - protein, 158 aa, Artificial Sequence
  derived and/or modified sequence
MLGLWGQRLPAAWVLLLLPFLPLLLLAAPAPHRESYKPVIVVHGLFDSSYSFRHLLEYINEMGQYGDTDYLKWLFPTSMRSNLYRICYSPWGQEFSICNYWHDPHHDDLYLNASSFLALINGERDHPNATVWRKNFLRVGHLVLIGGPDDGVITPWQS

SEQ ID NO: 237114 - protein, 158 aa, Artificial Sequence
  derived and/or modified sequence
MLGLWGQRLPAAWVLLLLPFLPLLLLAAPAPHRASYKPVIVVHGLFDSSYSFRHLLEYINEMGQYGDTDYLKWLFPTSMRSNLYRICYSPWGQEFSICNYWHDPHHDDLYLNASSFLALINGERDHPNATVWRKNFLRVGHLVLIGGPDDGVITPWQS

SEQ ID NO: 237115 - protein, 158 aa, Artificial Sequence
  derived and/or modified sequence
MLGLCGQRLPAAWVLLLLPFLPLLLLAAPAPHRASYKPVIVVHGLFDSSYSFRHLLEYINEMGQYGDTDYLKWLFPTSMRSNLYRICYSPWGQEFSICNYWHDPHHDDLYLNASSFLALINGERDHPNATVWRKNFLRVGHLVLIGGPDDGVITPWQS

SEQ ID NO: 237116 - protein, 236 aa, Artificial Sequence
  derived and/or modified sequence
MLGLWGQRLPAAWVLLLLPFLPLLLLAAPAPHRESYKPVIVVHGLFDSSYSFRHLLEYINETHPGTVVTVLDLFDGRESLRPLWEQVQGFREAVVPIMAKAPQGVHLICYSQGGLVCRALLSVMDDHNVDSFISLSSPQMGQYGDTDYLKWLFPTSMRSNLYRICYSPWGQEFSICNYWHDPHHDDLYLNASSFLALINGERDHPNATVWRKNFLRVGHLVLIGGPDDGVITPWQS

SEQ ID NO: 237117 - protein, 200 aa, Artificial Sequence
  derived and/or modified sequence
MLGLWGQRLPAAWVLLLLPFLPLLLLAAPAPHRASYKPVIVVHGLFDSSYSFRHLLEYINETHPGTVVTVLDLFDGRESLRPLWEQVQGFREAVVPIMAKAPQGVHLICYSQGGLVCRALLSVMDDHNVDSFISLSSPQMGQYGDTDYLKWLFPTSMRSNLYRICYSPWGQEFSICNYWHDPHHDDLYLNASSFLALING

SEQ ID NO: 237118 - protein, 242 aa, Artificial Sequence
  derived and/or modified sequence
MKSCGSMLGLWGQRLPAAWVLLLLPFLPLLLLAAPAPHRESYKPVIVVHGLFDSSYSFRHLLEYINETHPGTVVTVLDLFDGRESLRPLWEQVQGFREAVVPIMAKAPQGVHLICYSQGGLVCRALLSVMDDHNVDSFISLSSPQMGQYGDTDYLKWLFPTSMRSNLYRICYSPWGQEFSICNYWHDPHHDDLYLNASSFLALINGERDHPNATVWRKNFLRVGHLVLIGGPDDGVITPWQS

SEQ ID NO: 237119 - protein, 200 aa, Artificial Sequence
  derived and/or modified sequence
MLGLCGQRLPAAWVLLLLPFLPLLLLAAPAPHRASYKPVIVVHGLFDSSYSFRHLLEYINETHPGTVVTVLDLFDGRESLRPLWEQVQGFREAVVPIMAKAPQGVHLICYSQGGLVCRALLSVMDDHNVDSFISLSSPQMGQYGDTDYLKWLFPTSMRSNLYRICYSPWGQEFSICNYWHDPHHDDLYLNASSFLALING

SEQ ID NO: 237120 - protein, 146 aa, Artificial Sequence
  derived and/or modified sequence
MDDHNVDSFISLSSPQMGQYGDTDYLKWLFPTSMRSNLYRICYSPWGQEFSICNYWHDPHHDDLYLNASSFLALINGERDHPNATVWRKNFLRVGHLVLIGGPDDGVITPWQSSFFGFYDANETVLEMEEQLPVGSSVKANHGVQG

SEQ ID NO: 237121 - protein, 93 aa, Artificial Sequence
  derived and/or modified sequence
MLGLWGQRLPAAWVLLLLPFLPLLLLAAPAPHRESYKPVIVVHGLFDSSYSFRHLLEYINEGALCAGLCFLSWMITTWILSSPSPLHRWDSME

SEQ ID NO: 237122 - protein, 301 aa, Artificial Sequence
  derived and/or modified sequence
MLGLCGQRLPAAWVLLLLPFLPLLLLAAPAPHRASYKPVIVVHGLFDSSYSFRHLLEYINETHPGTVVTVLDLFDGRESLRPLWEQVQGFREAVVPIMAKAPQGVHLICYSQGGLVCRALLSVMDDHNVDSFISLSSPQMGQYGDTDYLKWLFPTSMRSNLYRICYSPWGQEFSICNYWHDPHHDDLYLNASSFLALINGERDHPNATVWRKNFLRVGHLVLIGGPDDGVITPWQSSFFGFYDANETVLEMEEQLPARPTHQSELLLLRLVCLKPPRRKKPACRVQRQSESWGPGLSCALS

SEQ ID NO: 237123 - protein, 54 aa, Artificial Sequence
  derived and/or modified sequence
  misc_feature (1)..(1): Xaa can be any naturally occurring amino acid
XHDDLYLNASSFLALINGERDHPNATVWRKNFLRVGHLVLIGGPDDGVITPWQS

SEQ ID NO: 237124 - protein, 301 aa, Artificial Sequence
  derived and/or modified sequence
MLGLWGQRLPAAWVLLLLPFLPLLLLAAPAPHRASYKPVIVVHGLFDSSYSFRHLLEYINETHPGTVVTVLDLFDGRESLRPLWEQVQGFREAVVPIMAKAPQGVHLICYSQGGLVCRALLSVMDDHNVDSFISLSSPQMGQYGDTDYLKWLFPTSMRSNLYRICYSPWGQEFSICNYWHDPHHDDLYLNASSFLALINGERDHPNATVWRKNFLRVGHLVLIGGPDDGVITPWQSSFFGFYDANETVLEMEEQLPARPTHQSELLLLRLVCLKPPRRKKPACRVQRQSESWGPGLSCALS

SEQ ID NO: 237125 - protein, 301 aa, Artificial Sequence
  derived and/or modified sequence
MLGLWGQRLPAAWVLLLLPFLPLLLLAAPAPHRESYKPVIVVHGLFDSSYSFRHLLEYINETHPGTVVTVLDLFDGRESLRPLWEQVQGFREAVVPIMAKAPQGVHLICYSQGGLVCRALLSVMDDHNVDSFISLSSPQMGQYGDTDYLKWLFPTSMRSNLYRICYSPWGQEFSICNYWHDPHHDDLYLNASSFLALINGERDHPNATVWRKNFLRVGHLVLIGGPDDGVITPWQSSFFGFYDANETVLEMEEQLPARPTHQSELLLLRLVCLKPPRRKKPACRVQRQSESWGPGLSCALS

SEQ ID NO: 237126 - DNA, 927 bp, Artificial Sequence
  derived and/or modified sequence
atgaagtcttgcggctccatgcttgggctatgcggccaacgcctaccagccgcctgggtgttactgcttctgccctttctgccgctgttgctgttggctgcccctgcccctcatagagctagctataagcctgtaatcgtggtgcatggactgttcgacagctcctatagctttcgccatctcctggaatacatcaatgagacacacccgggaactgtggtcacagtactcgacctgtttgatggaagagagagcctgcggcccttatgggagcaagtgcagggattcagagaggcagtggtgcccattatggctaaggccccacagggggtccacctgatctgttactcccaaggggggcttgtgtgtcgggcgttgctgagtgtgatggatgaccacaatgtcgactctttcatcagcttaagctcaccgcagatgggtcagtacggtgatacggactatttgaagtggctgtttcctacatcaatgagaagtaatctgtacaggatatgctactctccctggggccaagaattctccatctgcaattactggcatgaccctcatcatgatgatctctacctaaatgcttcctccttcctggcactgatcaatggcgaacgcgatcaccctaatgccaccgtgtggcgcaagaattttctccgtgtcgggcacctggtcctgataggcggccccgatgatggcgtcattaccccctggcagtcctccttcttcggtttctacgatgctaacgaaacagtgctcgaaatggaagaacagctagtgtatttgagagattcatttggactcaaaacactcctggctcgaggcgcaatcgtcaggtgccccatggccggcatatcacatacagcctggcactcaaatcgaaccctctacgaaacttgtatcgagccatggctgagctag

SEQ ID NO: 237127 - DNA, 927 bp, Artificial Sequence
  derived and/or modified sequence
atgaaatcatgtggctcaatgctcggcttgtggggccagaggctccccgctgcttgggttttgcttttgctcccattcctcccactgctcttgcttgccgcccctgctcctcacagggagtcctataagcccgtgattgttgtgcatgggttgttcgactcttcatactcttttaggcatctgctcgagtatattaatgaaacgcaccctggcacggtcgtgacagtgctggatctatttgatgggagagagtccctgaggcccctgtgggaacaggttcaggggtttagagaggctgtggtgccgatcatggccaaggccccccagggagtccacctcatttgctacagccagggggggctcgtttgccgggccctgctttccgtcatggatgatcacaacgtggacagctttattagcctcagctcccctcagatgggacagtacggcgatacagattatctcaagtggttgttcccaacttccatgaggagtaatttgtacagaatctgttacagtccatggggccaagagttctctatctgcaattactggcacgacccccatcatgatgatttgtatctcaacgcctcctctttcctggcgctgattaacggggagagggaccaccccaacgccacagtttggcgaaagaactttctgagggtgggccacctggttctcattggcggcccggacgacggggttattaccccttggcaatcgagcttttttggtttctacgacgccaatgagacagtcctggagatggaggagcagctggtttacctaagggacagctttgggctcaaaaccctgctggcaagaggagccatcgtccgctgtcccatggcaggaattagccataccgcatggcactctaacagaacattgtatgaaacttgcatcgagccctggctatcctag

SEQ ID NO: 237128 - DNA, 927 bp, Artificial Sequence
  derived and/or modified sequence
atgaagtcctgtgggtccatgttgggactgtggggacagaggctgccggctgcctgggtgcttcttctgctcccatttcttccactactactgctagcggccccagccccacatagagcatcttacaagcctgtcattgtcgtccacggcttatttgacagctcctactctttcaggcaccttttggaatatattaacgaaacccaccccggaacagtggtcacagtgctcgacctgttcgatggacgcgagagtttacgcccactgtgggaacaggtgcagggcttcagagaggccgttgtgccgatcatggccaaggccccgcaaggcgtccatctaatatgctatagtcagggcggcttggtttgccgagccctgctgagcgttatggacgaccacaacgtggattcttttatttccttgtcaagcccgcaaatgggccagtacggagacacagactacttaaagtggctgttcccgacgtcaatgagaagcaacctgtatcgcatctgttactcaccgtggggccaggaatttagtatctgcaattactggcacgatccacaccatgatgacttgtacctaaatgcttcgagcttccttgctctcatcaacggtgagcgcgaccaccccaatgcgaccgtctggagaaaaaactttctgagagtggggcatcttgtgttgattggaggcccggatgacggagtcatcaccccttggcagagttctttttttggattctatgacgctaatgagaccgtgctagagatggaggagcaactggtgtatctgcgcgacagctttggactgaaaacacttctggcccgcggggcgatcgtgcgatgtccaatggccggtatctcacacaccgcctggcactccaataggactctgtacgaaacatgtattgaaccttggctcagctag

SEQ ID NO: 237129 - DNA, 927 bp, Artificial Sequence
  derived and/or modified sequence
atgaagagctgcggctcaatgctcggcctgtggggccaaaggctcccagccgcttgggtgctattgttactgccattcttgcctttactgcttctagcagcacctgctccccaccgggcaagttataaacccgtgatcgttgtgcacggactctttgattcttcttactccttccgccaccttctggaatacattaacgagacacatccaggcactgtggtgactgttctcgacctgttcgatggccgggagtctcttcgcccgttatgggagcaggtgcagggttttagggaagccgtggtccctattatggctaaagccccccagggggtgcaccttatctgctattcccagggcggccttgtatgccgagctctcctgtcagttatggacgaccataacgtggatagctttatatcactgtcgtcccctcagatgggacagtacggagacacagattacctgaaatggttgttcccgacttctatgcggagcaacctctaccgcatctgttattcaccatggggccaggagttttccatctgcaactattggcacgaccctcatcacgacgatttatatttaaatgcctcttcctttttagcactgattaacggtgagagagatcaccctaacgctaccgtatggcgaaagaacttcctcagagtgggccatctcgtgctgattggtggacccgacgatggcgttatcacaccctggcagtctagctttttcggcttctacgacgccaacgaaactgtgctggagatggaagagcagctcgtctatttaagagactcattcgggctgaagacacttctcgcgagaggcgcaattgtgcgatgcccaatggcgggcattagccacaccgcctggcacagcaacagaacactgtacgagacttgcatagagccctggctgtcgtag

SEQ ID NO: 237130 - DNA, 927 bp, Artificial Sequence
  derived and/or modified sequence
atgaagagctgtggcagcatgctcggtctgtgggggcagaggctgccggccgcttgggtgcttctcctcctgccctttctccctctgctattgctagccgccccggctccccatcgcgccagttacaagcctgtgatagtcgtacacggtctctttgatagctcgtattctttccgccatcttctagaatacatcaatgagacacaccccgggacagtggtgaccgtgctcgatcttttcgatgggcgcgaaagcttgcgaccactctgggagcaggtgcagggatttagagaagcagtagtgcctataatggccaaagccccgcagggagtgcacctgatctgctatagccagggtggcctagtctgccgggccctgctttctgtgatggatgaccacaatgttgacagctttatttcactgtcttcaccccagatgggacaatatggggacaccgactacttgaagtggctgtttcctacctctatgagatccaacctgtatagaatttgctatagtccctggggtcaggagttcagcatttgcaattattggcacgacccacaccatgatgacctgtacttaaacgcttcttccttcttggccctcattaacggcgaaagagaccatcccaatgcaactgtatggcggaagaatttcttgcgtgtgggccacctagtattaatcggagggccggacgacggcgttatcacaccttggcagtcctcttttttcggcttctacgacgcaaatgagactgtgttggagatggaagaacagttagtctacttgcgggactcgtttgggttgaaaacactcctggcccgtggggctatagtgaggtgtccaatggccggtatctctcacacagcttggcattctaatcgcacactgtacgaaacttgcatagagccctggcttagctag

SEQ ID NO: 237131 - DNA, 927 bp, Artificial Sequence
  derived and/or modified sequence
atgaaatcatgtgggagtatgctcgggctgtggggccaacgcctcccagcggcgtgggtcttgctgcttctccccttcttgcctcttctgctcctggccgcaccagcccctcacagagcgagttacaagccagtcatagtggttcacgggctctttgactcctcatacagctttcggcatctgttggagtacattaacgagacccaccccggtaccgtcgtcacagttctcgatctgttcgatggtcgagaatcacttcgccctctatgggagcaggtccagggctttcgggaagccgtcgttcccataatggctaaggccccacagggcgtgcacttgatttgttatagtcaaggtggcttagtgtgcagggcgctactttccgtgatggatgaccacaatgtggacagctttatcagtctcagttccccgcaaatgggccagtacggagatacagactacctgaagtggttgtttcccaccagtatgcgctctaacctgtaccgaatctgttattctccttgggggcaggagttttccatttgcaattattggcatgatccccatcacgatgatctctacctgaacgcctccagttttctggctttgattaatggtgagagagatcacccaaatgcgactgtgtggaggaaaaattttctacgagttggccacctagtgctcatcggtggccccgacgatggtgtgattaccccatggcaaagctcgttttttggcttctatgatgcaaatgagaccgtgctggagatggaagaacagctggtgtacctcagggattcctttggactgaagactcttctggcccgcggtgctattgtgcgatgtccaatggccggtatttctcacacagcctggcatagcaacaggacactctacgaaacttgcatagagccctggttatcctag

SEQ ID NO: 237132 - DNA, 729 bp, Artificial Sequence
  derived and/or modified sequence
atgaagagttgtggctctatgctcggcttatgggggcagcggctacccgccgcctgggtactcctcctgttgcctttcctgccccttctgctccttgctgcccctgcacctcatcgggaaagctacaagcccgtcattgtggtgcacggcctgttcgacagttcttattctttccggcacttactggagtacatcaacgaaacccaccccggcactgtggttactgtcttggacttattcgatggacgtgaaagtcttcggcctctgtgggagcaggttcagggcttcagggaggctgtggtccccattatggccaaggcccctcagggagtgcaccttatatgctattctcaaggcggcctagtatgtcgtgccttgctttcggtgatggatgatcacaacgtcgactcttttatctccctgagctcacctcagatgggtcagtacggtgacactgattatctcaagtggctgtttcccactagtatgcggtcaaacctgtaccgcatttgctactccccttggggacaggagttcagcatctgtaactactggcatgatccacatcacgacgacctgtatctcaacgccagctccttcctggccctgattaatggggaacgcgatcatcccaatgctactgtttggaggaagaacttcctgagagtggggcaccttgtgctgattggcgggcccgacgatggcgtaatcaccccatggcagtcttag

SEQ ID NO: 237133 - DNA, 927 bp, Artificial Sequence
  derived and/or modified sequence
atgaaaagctgcggttccatgctgggcctgtgggggcaaagacttcccgccgcgtgggtcctgcttctgctcccgttcctacccctgttattactggctgcaccagcaccccacagggcctcctacaagccagtcatagtcgtgcatggtctattcgatagctcctactcatttcgtcaccttttggagtacataaacgagacacatcccgggactgtggtgactgtactggaccttttcgacgggagggaaagtctgagaccactgtgggaacaggtgcaggggtttcgagaggccgtggtgccgattatggcaaaagccccacaaggggtgcatttgatatgctactcccagggaggattggtttgtcgcgccttgttgagcgtgatggatgaccacaatgttgactccttcataagcctgtcttctcctcagatggggcaatacggtgatacagactatttaaaatggttgttcccaacctcaatgcggagcaacctatatcgcatctgctacagcccctggggtcaggagtttagcatctgcaattactggcacgacccgcatcacgacgacctgtacctgaatgccagcagctttctagcgctcatcaacggggagcgagatcacccgaacgctactgtgtggcgcaagaatttcctccgggttggccatttagtgttaataggtggcccagacgatggggtcatcacgccctggcagtcttccttcttcggcttttacgacgccaatgaaacagtgctggaaatggaggagcagttggtttacctgagagattccttcggtttaaaaactcttttagctcggggtgccattgtccggtgcccgatggccggcatctcacacactgcgtggcattcaaaccgtactctgtatgagacctgcattgagccctggctatcctag

SEQ ID NO: 237134 - DNA, 927 bp, Artificial Sequence
  derived and/or modified sequence
atgaagagctgtggctccatgctgggcctgtgtggccagaggctgcctgctgcctgggtgctgctgctgctgcccttcctgcccctgctgctgctggccgccccagccccccaccgggccagctacaagcctgtgattgtggtgcacggcctgtttgacagcagctacagcttccgccacctgctggagtacatcaatgagacccaccctggcaccgtggtgacagtgctggacctgtttgatggccgggagagcctgcggcccctgtgggagcaggtgcagggcttccgggaggccgtggtgcccatcatggccaaggccccccagggcgtgcacctgatctgctacagccagggcggcctggtgtgccgggccctgctgtctgtgatggatgaccacaacgtggacagcttcatcagcctgagcagcccccagatgggccagtatggagacacagactacctgaagtggctgttccccacctccatgaggagcaacctgtaccgcatctgctacagcccctggggccaggagttcagcatctgcaactactggcatgacccccaccatgatgacctgtacctgaatgccagcagcttcctggccctgatcaatggagagcgggaccaccccaatgccaccgtgtggaggaagaacttcctgcgggtgggccacctggtgctgattggaggcccagatgatggagtcatcaccccctggcagagcagcttcttcggcttctatgatgccaatgaaacagtgctggagatggaggagcagctggtgtacctgcgggacagctttggcctgaagaccctgctggcccggggggccatcgtgcgctgccccatggccggcatcagccacacagcctggcacagcaacagaaccctgtatgagacctgcatcgagccctggctgtcctag

SEQ ID NO: 237135 - DNA, 927 bp, Artificial Sequence
  derived and/or modified sequence
atgaagagctgtggctccatgctgggcctgtggggccagaggctgcctgctgcctgggtgctgctgctgctgcccttcctgcccctgctgctgctggccgccccagccccccaccgggagagctacaagcctgtgattgtggtgcacggcctgtttgacagcagctacagcttccgccacctgctggagtacatcaatgagacccaccctggcaccgtggtgacagtgctggacctgtttgatggccgggagagcctgcggcccctgtgggagcaggtgcagggcttccgggaggccgtggtgcccatcatggccaaggccccccagggcgtgcacctgatctgctacagccagggcggcctggtgtgccgggccctgctgtctgtgatggatgaccacaacgtggacagcttcatcagcctgagcagcccccagatgggccagtatggagacacagactacctgaagtggctgttccccacctccatgaggagcaacctgtaccgcatctgctacagcccctggggccaggagttcagcatctgcaactactggcatgacccccaccatgatgacctgtacctgaatgccagcagcttcctggccctgatcaatggagagcgggaccaccccaatgccaccgtgtggaggaagaacttcctgcgggtgggccacctggtgctgattggaggcccagatgatggagtcatcaccccctggcagagcagcttcttcggcttctatgatgccaatgaaacagtgctggagatggaggagcagctggtgtacctgcgggacagctttggcctgaagaccctgctggcccggggggccatcgtgcgctgccccatggccggcatcagccacacagcctggcacagcaacagaaccctgtatgagacctgcatcgagccctggctgtcctag

SEQ ID NO: 237136 - DNA, 927 bp, Artificial Sequence
  derived and/or modified sequence
atgaagagctgtggctccatgctgggcctgtggggccagaggctgcctgctgcctgggtgctgctgctgctgcccttcctgcccctgctgctgctggccgccccagccccccaccgggccagctacaagcctgtgattgtggtgcacggcctgtttgacagcagctacagcttccgccacctgctggagtacatcaatgagacccaccctggcaccgtggtgacagtgctggacctgtttgatggccgggagagcctgcggcccctgtgggagcaggtgcagggcttccgggaggccgtggtgcccatcatggccaaggccccccagggcgtgcacctgatctgctacagccagggcggcctggtgtgccgggccctgctgtctgtgatggatgaccacaacgtggacagcttcatcagcctgagcagcccccagatgggccagtatggagacacagactacctgaagtggctgttccccacctccatgaggagcaacctgtaccgcatctgctacagcccctggggccaggagttcagcatctgcaactactggcatgacccccaccatgatgacctgtacctgaatgccagcagcttcctggccctgatcaatggagagcgggaccaccccaatgccaccgtgtggaggaagaacttcctgcgggtgggccacctggtgctgattggaggcccagatgatggagtcatcaccccctggcagagcagcttcttcggcttctatgatgccaatgaaacagtgctggagatggaggagcagctggtgtacctgcgggacagctttggcctgaagaccctgctggcccggggggccatcgtgcgctgccccatggccggcatcagccacacagcctggcacagcaacagaaccctgtatgagacctgcatcgagccctggctgtcctag

SEQ ID NO: 237137 - DNA, 729 bp, Artificial Sequence
  derived and/or modified sequence
atgaagagctgtggctccatgctgggcctgtggggccagaggctgcctgctgcctgggtgctgctgctgctgcccttcctgcccctgctgctgctggccgccccagccccccaccgggagagctacaagcctgtgattgtggtgcacggcctgtttgacagcagctacagcttccgccacctgctggagtacatcaatgagacccaccctggcaccgtggtgacagtgctggacctgtttgatggccgggagagcctgcggcccctgtgggagcaggtgcagggcttccgggaggccgtggtgcccatcatggccaaggccccccagggcgtgcacctgatctgctacagccagggcggcctggtgtgccgggccctgctgtctgtgatggatgaccacaacgtggacagcttcatcagcctgagcagcccccagatgggccagtatggagacacagactacctgaagtggctgttccccacctccatgaggagcaacctgtaccgcatctgctacagcccctggggccaggagttcagcatctgcaactactggcatgacccccaccatgatgacctgtacctgaatgccagcagcttcctggccctgatcaatggagagcgggaccaccccaatgccaccgtgtggaggaagaacttcctgcgggtgggccacctggtgctgattggaggcccagatgatggagtcatcaccccctggcagagctag

SEQ ID NO: 237138 - DNA, 927 bp, Artificial Sequence
  derived and/or modified sequence
atgaagagctgcggcagcatgctgggcctgtgcggccagcggctgcctgctgcgtgggtgctcctgctgctgccatttcttccactgctgctccttgctgcccctgctccccacagggccagttacaagcctgtaattgtagtgcatggactatttgacagttcttacagctttagacacctgctcgagtacattaacgagacacacccggggaccgtagtcacggtcctggacctgttcgatggccgagagagtctcagaccactgtgggagcaggtccaaggtttccgggaagccgtagtccctatcatggcaaaagcaccacagggagtgcacctgatctgctatagccagggcggtctggtctgccgcgccctcctcagcgtaatggatgaccataatgttgactcttttatctccctctccagccctcagatgggccaatatggggacacggactatcttaagtggctgtttcccacaagcatgcgcagtaacttataccgcatttgctacagtccgtggggtcaggaattttctatctgtaattactggcacgatccacatcacgacgacctgtacctcaatgctagctcctttctcgcactgatcaacggcgaacgagaccacccgaatgctactgtttggagaaagaattttctgagagtaggacatttggttcttataggggggcctgatgacggggtgatcacgccttggcagtcctctttcttcggattttacgatgccaacgaaactgtgcttgaaatggaagagcaacttgtgtacctgcgagactcttttgggctgaagacgctgttagcaaggggtgcgattgtcaggtgcccaatggccgggatctctcacacagcttggcattctaacagaaccctgtacgaaacatgcatagaaccatggctgtcttag

SEQ ID NO: 237139 - DNA, 927 bp, Artificial Sequence
  derived and/or modified sequence
atgaagagctgcggcagcatgctgggcctgtggggccagcggctgcccgcagcgtgggtcctactcctgctaccattcctgccattgttactgttggctgccccagcccctcacagggagtcatataagccagtgattgtggtgcacggattatttgattcatcttattctttcaggcatcttctcgagtacatcaacgaaactcatcctggcacagttgtgaccgtgctggatctgttcgacgggcgagaatctctgcggccattgtgggaacaggtgcagggtttccgggaggccgtggttccaattatggcaaaggctccccagggagtccatctgatttgttactcacaagggggactggtgtgtagagcactcctctctgttatggacgaccataatgtcgacagctttatcagtctatcttccccacagatgggccagtacggcgataccgattatcttaagtggctattcccaactagtatgcgaagcaatctctatagaatttgctactctccatggggacaggaattctctatctgcaactattggcatgacccacaccacgacgatctgtacctgaacgcgagctcctttctggccctcatcaacggagagagggatcatccaaacgctacagtctggaggaagaatttcctgagagtgggtcatctagtgttgatcggaggccccgacgatggcgtgataacaccctggcaaagtagtttcttcgggttttacgacgcgaatgaaaccgtgctggaaatggaggagcaactcgtctacctgagagactcatttggcctgaagactttgttagctagaggggccattgtcaggtgcccaatggcagggataagtcatacggcatggcactccaatagaactctctatgagacatgtattgaaccctggctgtcttag

SEQ ID NO: 237140 - DNA, 927 bp, Artificial Sequence
  derived and/or modified sequence
atgaagagctgcggcagcatgctgggcctgtggggccagcggctgcccgctgcttgggtccttctcctgctaccgtttctgccgctcttgctgctggcagcgcccgctcctcatcgagcaagctacaaacccgttattgttgttcatggtctatttgattcttcctattcgtttcgccatctgttagagtatatcaacgaaacacacccgggcacagtggtcactgtcctcgatctcttcgacggtagggagtccctccggcccctgtgggaacaggtgcaggggttcagggaggccgtcgtacccatcatggcgaaagcaccacagggagttcatttgatatgctattcccaaggtggtctggtttgccgcgctctgctgtctgtcatggacgaccacaatgttgactctttcatctcccttagtagcccccagatggggcagtatggcgatacagactatctcaagtggctctttcccacctcaatgaggagtaacctgtatcgaatctgctattccccatggggccaagaattttcaatatgcaactactggcacgatccacaccatgacgacctgtatttaaatgcctcttctttcctcgccctcattaacggcgagagggatcaccctaatgctacggtgtggaggaagaactttttgagggttgggcacctcgtgctgattggcggccccgacgacggcgtcatcactccatggcagagtagcttttttgggttctacgacgccaacgaaactgtcctcgaaatggaagaacagctcgtgtacttgagagacagtttcgggttgaagacacttctggctcgtggagcaatcgtgagatgccctatggcggggatctctcataccgcgtggcattcaaacagaacactgtacgagacgtgtatagaaccttggctttcttag

SEQ ID NO: 237141 - DNA, 927 bp, Artificial Sequence
  derived and/or modified sequence
atgaagagctgcggcagcatgctgggcctgtggggccagcggctgcccgccgcttgggtgctgcttctgttgccctttctgcctctgttgttactggcggcccccgctccacacagggccagttataagcctgtgatcgttgtccacggactcttcgattcttcatacagttttaggcacctgctggaatatatcaatgaaactcatcccggaaccgttgttactgtgctggacctgttcgacggccgggaaagccttcggccactgtgggagcaagtgcaggggttccgggaggccgtggtgcccattatggctaaggcaccgcagggcgtgcatctgatctgctactctcagggaggactcgtgtgcagggcactgctgagcgtcatggacgaccacaatgttgatagtttcatatcactgtcaagtccacagatgggccagtatggcgacacggactatttaaagtggctgtttcctaccagcatgcgtagcaatctgtaccggatttgttactccccatgggggcaggagttctctatttgcaactactggcacgatccacatcatgacgacctttacttgaatgcgagctctttcctggccctgatcaacggtgaacgagatcaccccaacgcaaccgtgtggcgaaaaaactttctcagagtcggacatcttgtgctgatcggcgggccggatgacggcgtcatcaccccatggcagagcagctttttcggcttttatgatgcaaatgaaaccgtcctcgaaatggaagaacaactagtgtatctccgggatagttttggcctgaaaaccctcctggcccggggagctattgtgcgatgccccatggctggaatctctcatacggcttggcattctaaccggacgttgtacgagacttgtatcgaaccttggcttagctag

SEQ ID NO: 237142 - DNA, 927 bp, Artificial Sequence
  derived and/or modified sequence
atgaagagctgcggcagcatgctgggcctgtggggccagcggctgcccgccgcctgggtgctcctgcttttgccctttctcccactgctgttgttggccgcaccagccccccatcgggctagctataagcctgtgattgtagtgcacggtctcttcgatagctcctattccttccgccatctgctggaatacatcaacgagacccatcctggaacagtggtgactgtcctggacttatttgatgggcgagaaagtctgcgcccactatgggaacaggttcagggatttcgagaggctgtggtgcccattatggctaaagccccccagggcgtccatctgatctgctattctcaggggggtctcgtatgtcgagccctactatccgttatggatgaccacaacgtggatagtttcatttccctcagctcccctcaaatgggccagtatggagacacagattatctcaagtggctttttccgaccagcatgaggtcaaacctgtatagaatctgctatagcccctggggccaggagttctccatctgtaattactggcatgatccacaccatgatgatctatacctaaatgccagctcttttctggccttaatcaatggtgaacgggaccaccctaacgcaactgtatggagaaagaactttctgagagtgggccatctggtgttgatcgggggtcctgacgacggcgtgataactccctggcaaagttcattcttcggcttttatgacgccaatgaaacagtgttggagatggaagagcagctcgtttatttaagggattcattcggactgaagacattgttagcacgcggcgcaattgtaagatgcccgatggccggcatctctcacaccgcctggcattcaaatcgcacattgtacgaaacctgcatcgaaccatggctgtcctag

SEQ ID NO: 237143 - DNA, 927 bp, Artificial Sequence
  derived and/or modified sequence
atgaagagctgcggcagcatgctgggcctgtggggccagcggctgcccgcagcatgggtactcctgctgctgcccttcctccccctgctcttactcgcggcccctgcccctcatcgagcctcctacaaacctgtgatagtcgtccatggattgtttgatagttcctactctttccggcatctgctggaatatatcaatgagacacatccagggacagtcgtcaccgtactcgacctctttgatggcagggagagcttacggcctctatgggagcaagttcaggggttcagagaggccgttgttcctataatggccaaggcaccacagggagtgcatctgatctgttactcgcagggcggcttagtctgccgtgctctcttaagcgtcatggatgatcacaatgtggactcttttatcagtctttccagtcctcagatgggccaatacggtgacaccgactacctgaagtggctgtttccaacaagcatgaggtccaatctgtaccggatatgttacagcccctgggggcaggagttcagcatctgcaattattggcatgatccccatcacgacgatttgtacctgaatgcgtcatcttttctcgccctaattaacggcgagcgtgaccatcccaacgcaaccgtttggcggaagaacttccttcgcgtggggcacttggtcctgatcggtggtccagacgacggggttattacaccatggcagtcatcgttcttcgggttctacgacgcgaacgagaccgtgttagaaatggaggagcagctggtctatttacgcgattcctttggactgaaaaccctgctggctcggggggctatagtgcgctgcccgatggcagggatctcccatactgcatggcactctaaccggaccctatatgaaacctgtatcgaaccctggctgtcctag

SEQ ID NO: 237144 - DNA, 729 bp, Artificial Sequence
  derived and/or modified sequence
atgaagagctgcggcagcatgctgggcctgtggggccagcggctgccagccgcctgggtcctcttgctcctgcctttcctccccctcctcctgttggcagcaccagcgccccatcgggaaagttacaagcccgttattgtggtccacggtctgttcgatagctcatatagctttcgacacctgctcgaatatatcaacgaaactcatccaggaacggtggtcaccgtcctggatttgtttgatggacgcgagtccctgcggccactttgggaacaggttcagggattcagggaagctgtcgtaccaattatggcaaaggcacctcaaggggtacatcttatctgctactcacagggagggctcgtatgtcgagctctgctgtccgttatggatgatcataacgtagacagctttatttcgctgtccagcccccagatgggccaatatggcgacaccgactatcttaaatggctgtttccgactagtatgaggagcaacttgtaccgtatatgctattccccatggggtcaggagtttagcatatgtaactactggcacgatccgcaccacgatgatctttacctgaacgccagctccttccttgctttaattaatggtgagagagaccaccccaatgcaaccgtctggaggaagaacttcctgcgtgttgggcatctcgttcttataggaggccctgatgacggcgttataactccgtggcagtcctag

SEQ ID NO: 237145 - DNA, 927 bp, Artificial Sequence
  derived and/or modified sequence
atgaagagctgcggcagcatgctgggcctgtggggccagcggctgcccgccgcctgggtgctgctgctactacctttcctgccattgctcctgctggcagcccctgcgccccacagggccagctataagccagtgattgtggtacacggcttgttcgatagctcttactcattccgccatttattagaatatattaacgagacccatcctgggactgtggtgactgtgctggacttattcgacggcagggagagcttacgaccgctctgggagcaggtgcagggcttccgggaagcggtggtaccaatcatggccaaggcgccacagggtgtgcacctgatctgctactcacagggcgggctcgtgtgtcgagcgctgctgagcgtcatggacgaccacaatgtggattcattcatcagcttgtcttctccacagatgggacagtacggtgatactgactacctgaaatggctgttccccactagcatgagaagcaacctgtataggatttgttactccccatggggccaagagttttctatctgtaactactggcatgatccgcaccacgacgacctctacctgaacgcctctagttttctggctctgatcaacggggagcgggaccatccgaacgcgacagtatggcgaaaaaacttcttgcgggtgggacatcttgtgctgattggtgggcctgacgatggcgtgatcacgccctggcagagcagtttcttcggcttttacgacgccaatgagacagtgttggagatggaggaacagctggtttaccttagggacagttttggcctcaagacccttcttgcaagaggcgccatcgttagatgtcccatggccggtattagccatacagcatggcatagtaataggaccctttacgaaacctgtattgagccatggctttcctag

SEQ ID NO: 237146 - DNA, 2202 bp, Artificial Sequence
  derived and/or modified sequence
ggaagtggggagaatcaaggcggggaaatcggacttttgggtcgctgggggcaacgaagcctggagaggccttctttccattcccagaatatgtttgctgctttttcctctccccactggcctaaatggatcgctccgcctgtttcctccccagcacctagggcgcaatggaatattccattgcccctcctgtcctgggtctgtgttgcggggaacgctcgcgcggttgccagagaaagccccggacgtgacggatttgcgcgaccccaagcagcccgcccttccccctcccatccgtcattcccctgcgctctctttcctcacccttccccccgccaccgtgggttccagacttgggataagtaaacagcgggtggagcgaggcctacggacccaggccaggtgggagtctgcactcttcaaggggcctgggctgctgctcacgggtattaaagaactccgcgttgttcatggctgaggcgatgcattaggaagatcctggacctagagaacaagtcccccgaacgctgagttggaggcgggacttcgggtgcgcgttggcgggagcatgctggggctctgcgggcagcggctccccgcggcgtgggtcctgcttctgttgcctttcctgccgctgctgctgcttgcagcccccgcgccccaccgcgcgtcctacaagccggtcatcgtggtgcatgggctcttcgacagctcgtacagcttccgccacctgctggaatacatcaatgagacacaccccgggactgtggtgacagtgctcgatctcttcgatgggagagagagcttgcgacccctgtgggaacaggtgcaagggttccgagaggctgtggtccccatcatggcaaaggcccctcaaggggtgcatctcatctgctactcgcaggggggccttgtgtgccgggctctgctttctgtcatggatgatcacaacgtggattctttcatctccctctcctctccacagatgggacagtatggagacacggactacttgaagtggctgttccccacctccatgcggtctaacctctatcggatctgctatagcccctggggccaggaattctccatctgcaactactggcatgatccccaccacgatgacttgtacctcaatgccagcagcttcctggccctgatcaatggggaaagagaccatcccaatgccacagtatggcggaagaactttctgcgtgtgggccacctggtgctgattgggggccctgatgatggtgttattactccctggcagtccagcttctttggtttctatgatgcaaatgagaccgtcctggagatggaggagcaactggtttatctgcgggattcttttgggttgaagactctattggcccggggggccatagtgaggtgtccaatggccggtatctcccacacagcctggcactccaaccgtaccctttatgagacctgcattgaaccttggctctcctgaggatatattcaggggtccccaggaactcctcggtccagagaccaagtggtggccttggaaagcagatgtcaggctttggtgtgcctgtgaccacctcattgctcccatattatcccccatttttagtagagacggggttttagtagagacttggcctcccagaacccccttcctctgctcctccatgaatgacaattccaggcctcccctacctcatgtcctctcatttgggggattgctccgtgctgtccctttctctcaaggccgaagttgggaagtgagaaaccatgtttttaacttgtggctgcttttgctgctgctgctcctccgtatctggctgtatgggtggagaacccaccccctgcccaccacaggggtctccttccaggccactcaggacatttttagcttctctcctccccatgttcccttttttctctaaagtcccctgacatcagccctcccaactcctaagagggactacccatgagagtggggttctgaggctcccctatggggacagttccgttcttgaagtgtcagtgttggggaatatctgtggcctatgaggcccatctcaggtttggggatcccccagtccctatgatcagtgttggagtacccccctgggagagcctagtttctttgaggccccaggccctcttttaactacctttgaataggtgttatccctgtatttatggaaataaagttccatttcctca

SEQ ID NO: 237147 - DNA, 1759 bp, Artificial Sequence
  derived and/or modified sequence
ggagtagagtagggcaggagaaactgggccaggctgcacttagctcaaggggcctcgaggactctctgcgtctctggagacaagggcactacacgcacttcagaatgaagagttgcgggagcatgctggggctctgcgggcagcggctccccgcggcgtgggtcctgcttctgttgcctttcctgccgctgctgctgcttgcagcccccgcgccccaccgcgcgtcctacaagccggtcatcgtggtgcatgggctcttcgacagctcgtacagcttccgccacctgctggaatacatcaatgagacacaccccgggactgtggtgacagtgctcgatctcttcgatgggagagagagcttgcgacccctgtgggaacaggtgcaagggttccgagaggctgtggtccccatcatggcaaaggcccctcaaggggtgcatctcatctgctactcgcaggggggccttgtgtgccgggctctgctttctgtcatggatgatcacaacgtggattctttcatctccctctcctctccacagatgggacagtatggagacacggactacttgaagtggctgttccccacctccatgcggtctaacctctatcggatctgctatagcccctggggccaggaattctccatctgcaactactggcatgatccccaccacgatgacttgtacctcaatgccagcagcttcctggccctgatcaatggggaaagagaccatcccaatgccacagtatggcggaagaactttctgcgtgtgggccacctggtgctgattgggggccctgatgatggtgttattactccctggcagtccagcttctttggtttctatgatgcaaatgagaccgtcctggagatggaggagcaactggtttatctgcgggattcttttgggttgaagactctattggcccggggggccatagtgaggtgtccaatggccggtatctcccacacagcctggcactccaaccgtaccctttatgagacctgcattgaaccttggctctcctgaggatatattcaggggtccccaggaactcctcggtccagagaccaagtggtggccttggaaagcagatgtcaggctttggtgtgcctgtgaccacctcattgctcccatattatcccccatttttagtagagacggggttttagtagagacttggcctcccagaacccccttcctctgctcctccatgaatgacaattccaggcctcccctacctcatgtcctctcatttgggggattgctccgtgctgtccctttctctcaaggccgaagttgggaagtgagaaaccatgtttttaacttgtggctgcttttgctgctgctgctcctccgtatctggctgtatgggtggagaacccaccccctgcccaccacaggggtctccttccaggccactcaggacatttttagcttctctcctccccatgttcccttttttctctaaagtcccctgacatcagccctcccaactcctaagagggactacccatgagagtggggttctgaggctcccctatggggacagttccgttcttgaagtgtcagtgttggggaatatctgtggcctatgaggcccatctcaggtttggggatcccccagtccctatgatcagtgttggagtacccccctgggagagcctagtttctttgaggccccaggccctcttttaactacctttgaataggtgttatccctgtatttatggaaataaagttccatttcctcagtg

SEQ ID NO: 237148 - DNA, 1754 bp, Artificial Sequence
  derived and/or modified sequence
tccgtcattcccctgcgctctctttcctcacccttccccccgccaccgtgggttccagacttgggataagtaaacagcgggtggagcgaggcctacggacccaggccaggcgggagcatgctggggctctgcgggcagcggctccccgcggcgtgggtcctgcttctgttgcctttcctgccgctgctgctgcttgcagcccccgcgccccaccgcgcgtcctacaagccggtcatcgtggtgcatgggctcttcgacagctcgtacagcttccgccacctgctggaatacatcaatgagacacaccccgggactgtggtgacagtgctcgatctcttcgatgggagagagagcttgcgacccctgtgggaacaggtgcaagggttccgagaggctgtggtccccatcatggcaaaggcccctcaaggggtgcatctcatctgctactcgcaggggggccttgtgtgccgggctctgctttctgtcatggatgatcacaacgtggattctttcatctccctctcctctccacagatgggacagtatggagacacggactacttgaagtggctgttccccacctccatgcggtctaacctctatcggatctgctatagcccctggggccaggaattctccatctgcaactactggcatgatccccaccacgatgacttgtacctcaatgccagcagcttcctggccctgatcaatggggaaagagaccatcccaatgccacagtatggcggaagaactttctgcgtgtgggccacctggtgctgattgggggccctgatgatggtgttattactccctggcagtccagcttctttggtttctatgatgcaaatgagaccgtcctggagatggaggagcaactggtttatctgcgggattcttttgggttgaagactctattggcccggggggccatagtgaggtgtccaatggccggtatctcccacacagcctggcactccaaccgtaccctttatgagacctgcattgaaccttggctctcctgaggatatattcaggggtccccaggaactcctcggtccagagaccaagtggtggccttggaaagcagatgtcaggctttggtgtgcctgtgaccacctcattgctcccatattatcccccatttttagtagagacggggttttagtagagacttggcctcccagaacccccttcctctgctcctccatgaatgacaattccaggcctcccctacctcatgtcctctcatttgggggattgctccgtgctgtccctttctctcaaggccgaagttgggaagtgagaaaccatgtttttaacttgtggctgcttttgctgctgctgctcctccgtatctggctgtatgggtggagaacccaccccctgcccaccacaggggtctccttccaggccactcaggacatttttagcttctctcctccccatgttcccttttttctctaaagtcccctgacatcagccctcccaactcctaagagggactacccatgagagtggggttctgaggctcccctatggggacagttccgttcttgaagtgtcagtgttggggaatatctgtggcctatgaggcccatctcaggtttggggatcccccagtccctatgatcagtgttggagtacccccctgggagagcctagtttctttgaggccccaggccctcttttaactacctttgaataggtgttatccctgtatttatggaaataaagttccatttcctcagtg

SEQ ID NO: 237149 - DNA, 1759 bp, Artificial Sequence
  derived and/or modified sequence
ggagtagagtagggcaggagaaactgggccaggctgcacttagctcaaggggcctcgaggactctctgcgtctctggagacaagggcactacacgcacttcagaatgaagagttgcgggagcatgctggggctctgggggcagcggctccccgcggcgtgggtcctgcttctgttgcctttcctgccgctgctgctgcttgcagcccccgcgccccaccgcgagtcctacaagccggtcatcgtggtgcatgggctcttcgacagctcgtacagcttccgccacctgctggaatacatcaatgagacacaccccgggactgtggtgacagtgctcgatctcttcgatgggagagagagcttgcgacccctgtgggaacaggtgcaagggttccgagaggctgtggtccccatcatggcaaaggcccctcaaggggtgcatctcatctgctactcgcaggggggccttgtgtgccgggctctgctttctgtcatggatgatcacaacgtggattctttcatctccctctcctctccacagatgggacagtatggagacacggactacttgaagtggctgttccccacctccatgcggtctaacctctatcggatctgctatagcccctggggccaggaattctccatctgcaactactggcatgatccccaccacgatgacttgtacctcaatgccagcagcttcctggccctgatcaatggggaaagagaccatcccaatgccacagtatggcggaagaactttctgcgtgtgggccacctggtgctgattgggggccctgatgatggtgttattactccctggcagtccagcttctttggtttctatgatgcaaatgagaccgtcctggagatggaggagcaactggtttatctgcgggattcttttgggttgaagactctattggcccggggggccatagtgaggtgtccaatggccggtatctcccacacagcctggcactccaaccgtaccctttatgagacctgcattgaaccttggctctcctgaggatatattcaggggtccccaggaactcctcggtccagagaccaagtggtggccttggaaagcagatgtcaggctttggtgtgcctgtgaccacctcattgctcccatattatcccccatttttagtagagacggggttttagtagagacttggcctcccagaacccccttcctctgctcctccatgaatgacaattccaggcctcccctacctcatgtcctctcatttgggggattgctccgtgctgtccctttctctcaaggccgaagttgggaagtgagaaaccatgtttttaacttgtggctgcttttgctgctgctgctcctccgtatctggctgtatgggtggagaacccaccccctgcccaccacaggggtctccttccaggccactcaggacatttttagcttctctcctccccatgttcccttttttctctaaagtcccctgacatcagccctcccaactcctaagagggactacccatgagagtggggttctgaggctcccctatggggacagttccgttcttgaagtgtcagtgttggggaatatctgtggcctatgaggcccatctcaggtttggggatcccccagtccctatgatcagtgttggagtacccccctgggagagcctagtttctttgaggccccaggccctcttttaactacctttgaataggtgttatccctgtatttatggaaataaagttccatttcctcagtg

SEQ ID NO: 237150 - DNA, 1759 bp, Artificial Sequence
  derived and/or modified sequence
ggagtagagtagggcaggagaaactgggccaggctgcacttagctcaaggggcctcgaggactctctgcgtctctggagacaagggcactacacgcacttcagaatgaagagttgcgggagcatgctggggctctgggggcagcggctccccgcggcgtgggtcctgcttctgttgcctttcctgccgctgctgctgcttgcagcccccgcgccccaccgcgcgtcctacaagccggtcatcgtggtgcatgggctcttcgacagctcgtacagcttccgccacctgctggaatacatcaatgagacacaccccgggactgtggtgacagtgctcgatctcttcgatgggagagagagcttgcgacccctgtgggaacaggtgcaagggttccgagaggctgtggtccccatcatggcaaaggcccctcaaggggtgcatctcatctgctactcgcaggggggccttgtgtgccgggctctgctttctgtcatggatgatcacaacgtggattctttcatctccctctcctctccacagatgggacagtatggagacacggactacttgaagtggctgttccccacctccatgcggtctaacctctatcggatctgctatagcccctggggccaggaattctccatctgcaactactggcatgatccccaccacgatgacttgtacctcaatgccagcagcttcctggccctgatcaatggggaaagagaccatcccaatgccacagtatggcggaagaactttctgcgtgtgggccacctggtgctgattgggggccctgatgatggtgttattactccctggcagtccagcttctttggtttctatgatgcaaatgagaccgtcctggagatggaggagcaactggtttatctgcgggattcttttgggttgaagactctattggcccggggggccatagtgaggtgtccaatggccggtatctcccacacagcctggcactccaaccgtaccctttatgagacctgcattgaaccttggctctcctgaggatatattcaggggtccccaggaactcctcggtccagagaccaagtggtggccttggaaagcagatgtcaggctttggtgtgcctgtgaccacctcattgctcccatattatcccccatttttagtagagacggggttttagtagagacttggcctcccagaacccccttcctctgctcctccatgaatgacaattccaggcctcccctacctcatgtcctctcatttgggggattgctccgtgctgtccctttctctcaaggccgaagttgggaagtgagaaaccatgtttttaacttgtggctgcttttgctgctgctgctcctccgtatctggctgtatgggtggagaacccaccccctgcccaccacaggggtctccttccaggccactcaggacatttttagcttctctcctccccatgttcccttttttctctaaagtcccctgacatcagccctcccaactcctaagagggactacccatgagagtggggttctgaggctcccctatggggacagttccgttcttgaagtgtcagtgttggggaatatctgtggcctatgaggcccatctcaggtttggggatcccccagtccctatgatcagtgttggagtacccccctgggagagcctagtttctttgaggccccaggccctcttttaactacctttgaataggtgttatccctgtatttatggaaataaagttccatttcctcagtg

SEQ ID NO: 237151 - DNA, 2111 bp, Artificial Sequence
  derived and/or modified sequence
tcgaggactctctgcgtctctggagacaagggcactacacgcacttcagaatgaagagttcacctagggcgcaatggaatattccattgcccctcctgtcctgggtctgtgttgcggggaacgctcgcgcggttgccagagaaagccccggacgtgacggatttgcgcgaccccaagcagcccgcccttccccctcccatccgtcattcccctgcgctctctttcctcacccttccccccgccaccgtgggttccagacttgggataagtaaacagcgggtggagcgaggcctacggacccaggccaggtgggagtctgcactcttcaaggggcctgggctgctgctcacgggtattaaagaactccgcgttgttcatggctgaggcgatgcattaggaagatcctggacctagagaacaagtcccccgaacgctgagttggaggcgggacttcgggtgcgcgttggcgggagcatgctggggctctgcgggcagcggctccccgcggcgtgggtcctgcttctgttgcctttcctgccgctgctgctgcttgcagcccccgcgccccaccgcgcgtcctacaagccggtcatcgtggtgcatgggctcttcgacagctcgtacagcttccgccacctgctggaatacatcaatgagacacaccccgggactgtggtgacagtgctcgatctcttcgatgggagagagagcttgcgacccctgtgggaacaggtgcaagggttccgagaggctgtggtccccatcatggcaaaggcccctcaaggggtgcatctcatctgctactcgcaggggggccttgtgtgccgggctctgctttctgtcatggatgatcacaacgtggattctttcatctccctctcctctccacagatgggacagtatggagacacggactacttgaagtggctgttccccacctccatgcggtctaacctctatcggatctgctatagcccctggggccaggaattctccatctgcaactactggcatgatccccaccacgatgacttgtacctcaatgccagcagcttcctggccctgatcaatggggaaagagaccatcccaatgccacagtatggcggaagaactttctgcgtgtgggccacctggtgctgattgggggccctgatgatggtgttattactccctggcagtccagcttctttggtttctatgatgcaaatgagaccgtcctggagatggaggagcaactggtttatctgcgggattcttttgggttgaagactctattggcccggggggccatagtgaggtgtccaatggccggtatctcccacacagcctggcactccaaccgtaccctttatgagacctgcattgaaccttggctctcctgaggatatattcaggggtccccaggaactcctcggtccagagaccaagtggtggccttggaaagcagatgtcaggctttggtgtgcctgtgaccacctcattgctcccatattatcccccatttttagtagagacggggttttagtagagacttggcctcccagaacccccttcctctgctcctccatgaatgacaattccaggcctcccctacctcatgtcctctcatttgggggattgctccgtgctgtccctttctctcaaggccgaagttgggaagtgagaaaccatgtttttaacttgtggctgcttttgctgctgctgctcctccgtatctggctgtatgggtggagaacccaccccctgcccaccacaggggtctccttccaggccactcaggacatttttagcttctctcctccccatgttcccttttttctctaaagtcccctgacatcagccctcccaactcctaagagggactacccatgagagtggggttctgaggctcccctatggggacagttccgttcttgaagtgtcagtgttggggaatatctgtggcctatgaggcccatctcaggtttggggatcccccagtccctatgatcagtgttggagtacccccctgggagagcctagtttctttgaggccccaggccctcttttaactacctttgaataggtgttatccctgtatttatggaaataaagttccatttcctcagtg

SEQ ID NO: 237152 - DNA, 1754 bp, Artificial Sequence
  derived and/or modified sequence
tccgtcattcccctgcgctctctttcctcacccttccccccgccaccgtgggttccagacttgggataagtaaacagcgggtggagcgaggcctacggacccaggccaggcgggagcatgctggggctctgggggcagcggctccccgcggcgtgggtcctgcttctgttgcctttcctgccgctgctgctgcttgcagcccccgcgccccaccgcgagtcctacaagccggtcatcgtggtgcatgggctcttcgacagctcgtacagcttccgccacctgctggaatacatcaatgagacacaccccgggactgtggtgacagtgctcgatctcttcgatgggagagagagcttgcgacccctgtgggaacaggtgcaagggttccgagaggctgtggtccccatcatggcaaaggcccctcaaggggtgcatctcatctgctactcgcaggggggccttgtgtgccgggctctgctttctgtcatggatgatcacaacgtggattctttcatctccctctcctctccacagatgggacagtatggagacacggactacttgaagtggctgttccccacctccatgcggtctaacctctatcggatctgctatagcccctggggccaggaattctccatctgcaactactggcatgatccccaccacgatgacttgtacctcaatgccagcagcttcctggccctgatcaatggggaaagagaccatcccaatgccacagtatggcggaagaactttctgcgtgtgggccacctggtgctgattgggggccctgatgatggtgttattactccctggcagtccagcttctttggtttctatgatgcaaatgagaccgtcctggagatggaggagcaactggtttatctgcgggattcttttgggttgaagactctattggcccggggggccatagtgaggtgtccaatggccggtatctcccacacagcctggcactccaaccgtaccctttatgagacctgcattgaaccttggctctcctgaggatatattcaggggtccccaggaactcctcggtccagagaccaagtggtggccttggaaagcagatgtcaggctttggtgtgcctgtgaccacctcattgctcccatattatcccccatttttagtagagacggggttttagtagagacttggcctcccagaacccccttcctctgctcctccatgaatgacaattccaggcctcccctacctcatgtcctctcatttgggggattgctccgtgctgtccctttctctcaaggccgaagttgggaagtgagaaaccatgtttttaacttgtggctgcttttgctgctgctgctcctccgtatctggctgtatgggtggagaacccaccccctgcccaccacaggggtctccttccaggccactcaggacatttttagcttctctcctccccatgttcccttttttctctaaagtcccctgacatcagccctcccaactcctaagagggactacccatgagagtggggttctgaggctcccctatggggacagttccgttcttgaagtgtcagtgttggggaatatctgtggcctatgaggcccatctcaggtttggggatcccccagtccctatgatcagtgttggagtacccccctgggagagcctagtttctttgaggccccaggccctcttttaactacctttgaataggtgttatccctgtatttatggaaataaagttccatttcctcagtg

SEQ ID NO: 237153 - DNA, 2111 bp, Artificial Sequence
  derived and/or modified sequence
tcgaggactctctgcgtctctggagacaagggcactacacgcacttcagaatgaagagttcacctagggcgcaatggaatattccattgcccctcctgtcctgggtctgtgttgcggggaacgctcgcgcggttgccagagaaagccccggacgtgacggatttgcgcgaccccaagcagcccgcccttccccctcccatccgtcattcccctgcgctctctttcctcacccttccccccgccaccgtgggttccagacttgggataagtaaacagcgggtggagcgaggcctacggacccaggccaggtgggagtctgcactcttcaaggggcctgggctgctgctcacgggtattaaagaactccgcgttgttcatggctgaggcgatgcattaggaagatcctggacctagagaacaagtcccccgaacgctgagttggaggcgggacttcgggtgcgcgttggcgggagcatgctggggctctgggggcagcggctccccgcggcgtgggtcctgcttctgttgcctttcctgccgctgctgctgcttgcagcccccgcgccccaccgcgagtcctacaagccggtcatcgtggtgcatgggctcttcgacagctcgtacagcttccgccacctgctggaatacatcaatgagacacaccccgggactgtggtgacagtgctcgatctcttcgatgggagagagagcttgcgacccctgtgggaacaggtgcaagggttccgagaggctgtggtccccatcatggcaaaggcccctcaaggggtgcatctcatctgctactcgcaggggggccttgtgtgccgggctctgctttctgtcatggatgatcacaacgtggattctttcatctccctctcctctccacagatgggacagtatggagacacggactacttgaagtggctgttccccacctccatgcggtctaacctctatcggatctgctatagcccctggggccaggaattctccatctgcaactactggcatgatccccaccacgatgacttgtacctcaatgccagcagcttcctggccctgatcaatggggaaagagaccatcccaatgccacagtatggcggaagaactttctgcgtgtgggccacctggtgctgattgggggccctgatgatggtgttattactccctggcagtccagcttctttggtttctatgatgcaaatgagaccgtcctggagatggaggagcaactggtttatctgcgggattcttttgggttgaagactctattggcccggggggccatagtgaggtgtccaatggccggtatctcccacacagcctggcactccaaccgtaccctttatgagacctgcattgaaccttggctctcctgaggatatattcaggggtccccaggaactcctcggtccagagaccaagtggtggccttggaaagcagatgtcaggctttggtgtgcctgtgaccacctcattgctcccatattatcccccatttttagtagagacggggttttagtagagacttggcctcccagaacccccttcctctgctcctccatgaatgacaattccaggcctcccctacctcatgtcctctcatttgggggattgctccgtgctgtccctttctctcaaggccgaagttgggaagtgagaaaccatgtttttaacttgtggctgcttttgctgctgctgctcctccgtatctggctgtatgggtggagaacccaccccctgcccaccacaggggtctccttccaggccactcaggacatttttagcttctctcctccccatgttcccttttttctctaaagtcccctgacatcagccctcccaactcctaagagggactacccatgagagtggggttctgaggctcccctatggggacagttccgttcttgaagtgtcagtgttggggaatatctgtggcctatgaggcccatctcaggtttggggatcccccagtccctatgatcagtgttggagtacccccctgggagagcctagtttctttgaggccccaggccctcttttaactacctttgaataggtgttatccctgtatttatggaaataaagttccatttcctcagtg

SEQ ID NO: 237154 - DNA, 1754 bp, Artificial Sequence
  derived and/or modified sequence
tccgtcattcccctgcgctctctttcctcacccttccccccgccaccgtgggttccagacttgggataagtaaacagcgggtggagcgaggcctacggacccaggccaggcgggagcatgctggggctctgggggcagcggctccccgcggcgtgggtcctgcttctgttgcctttcctgccgctgctgctgcttgcagcccccgcgccccaccgcgcgtcctacaagccggtcatcgtggtgcatgggctcttcgacagctcgtacagcttccgccacctgctggaatacatcaatgagacacaccccgggactgtggtgacagtgctcgatctcttcgatgggagagagagcttgcgacccctgtgggaacaggtgcaagggttccgagaggctgtggtccccatcatggcaaaggcccctcaaggggtgcatctcatctgctactcgcaggggggccttgtgtgccgggctctgctttctgtcatggatgatcacaacgtggattctttcatctccctctcctctccacagatgggacagtatggagacacggactacttgaagtggctgttccccacctccatgcggtctaacctctatcggatctgctatagcccctggggccaggaattctccatctgcaactactggcatgatccccaccacgatgacttgtacctcaatgccagcagcttcctggccctgatcaatggggaaagagaccatcccaatgccacagtatggcggaagaactttctgcgtgtgggccacctggtgctgattgggggccctgatgatggtgttattactccctggcagtccagcttctttggtttctatgatgcaaatgagaccgtcctggagatggaggagcaactggtttatctgcgggattcttttgggttgaagactctattggcccggggggccatagtgaggtgtccaatggccggtatctcccacacagcctggcactccaaccgtaccctttatgagacctgcattgaaccttggctctcctgaggatatattcaggggtccccaggaactcctcggtccagagaccaagtggtggccttggaaagcagatgtcaggctttggtgtgcctgtgaccacctcattgctcccatattatcccccatttttagtagagacggggttttagtagagacttggcctcccagaacccccttcctctgctcctccatgaatgacaattccaggcctcccctacctcatgtcctctcatttgggggattgctccgtgctgtccctttctctcaaggccgaagttgggaagtgagaaaccatgtttttaacttgtggctgcttttgctgctgctgctcctccgtatctggctgtatgggtggagaacccaccccctgcccaccacaggggtctccttccaggccactcaggacatttttagcttctctcctccccatgttcccttttttctctaaagtcccctgacatcagccctcccaactcctaagagggactacccatgagagtggggttctgaggctcccctatggggacagttccgttcttgaagtgtcagtgttggggaatatctgtggcctatgaggcccatctcaggtttggggatcccccagtccctatgatcagtgttggagtacccccctgggagagcctagtttctttgaggccccaggccctcttttaactacctttgaataggtgttatccctgtatttatggaaataaagttccatttcctcagtg

SEQ ID NO: 237155 - DNA, 2111 bp, Artificial Sequence
  derived and/or modified sequence
tcgaggactctctgcgtctctggagacaagggcactacacgcacttcagaatgaagagttcacctagggcgcaatggaatattccattgcccctcctgtcctgggtctgtgttgcggggaacgctcgcgcggttgccagagaaagccccggacgtgacggatttgcgcgaccccaagcagcccgcccttccccctcccatccgtcattcccctgcgctctctttcctcacccttccccccgccaccgtgggttccagacttgggataagtaaacagcgggtggagcgaggcctacggacccaggccaggtgggagtctgcactcttcaaggggcctgggctgctgctcacgggtattaaagaactccgcgttgttcatggctgaggcgatgcattaggaagatcctggacctagagaacaagtcccccgaacgctgagttggaggcgggacttcgggtgcgcgttggcgggagcatgctggggctctgggggcagcggctccccgcggcgtgggtcctgcttctgttgcctttcctgccgctgctgctgcttgcagcccccgcgccccaccgcgcgtcctacaagccggtcatcgtggtgcatgggctcttcgacagctcgtacagcttccgccacctgctggaatacatcaatgagacacaccccgggactgtggtgacagtgctcgatctcttcgatgggagagagagcttgcgacccctgtgggaacaggtgcaagggttccgagaggctgtggtccccatcatggcaaaggcccctcaaggggtgcatctcatctgctactcgcaggggggccttgtgtgccgggctctgctttctgtcatggatgatcacaacgtggattctttcatctccctctcctctccacagatgggacagtatggagacacggactacttgaagtggctgttccccacctccatgcggtctaacctctatcggatctgctatagcccctggggccaggaattctccatctgcaactactggcatgatccccaccacgatgacttgtacctcaatgccagcagcttcctggccctgatcaatggggaaagagaccatcccaatgccacagtatggcggaagaactttctgcgtgtgggccacctggtgctgattgggggccctgatgatggtgttattactccctggcagtccagcttctttggtttctatgatgcaaatgagaccgtcctggagatggaggagcaactggtttatctgcgggattcttttgggttgaagactctattggcccggggggccatagtgaggtgtccaatggccggtatctcccacacagcctggcactccaaccgtaccctttatgagacctgcattgaaccttggctctcctgaggatatattcaggggtccccaggaactcctcggtccagagaccaagtggtggccttggaaagcagatgtcaggctttggtgtgcctgtgaccacctcattgctcccatattatcccccatttttagtagagacggggttttagtagagacttggcctcccagaacccccttcctctgctcctccatgaatgacaattccaggcctcccctacctcatgtcctctcatttgggggattgctccgtgctgtccctttctctcaaggccgaagttgggaagtgagaaaccatgtttttaacttgtggctgcttttgctgctgctgctcctccgtatctggctgtatgggtggagaacccaccccctgcccaccacaggggtctccttccaggccactcaggacatttttagcttctctcctccccatgttcccttttttctctaaagtcccctgacatcagccctcccaactcctaagagggactacccatgagagtggggttctgaggctcccctatggggacagttccgttcttgaagtgtcagtgttggggaatatctgtggcctatgaggcccatctcaggtttggggatcccccagtccctatgatcagtgttggagtacccccctgggagagcctagtttctttgaggccccaggccctcttttaactacctttgaataggtgttatccctgtatttatggaaataaagttccatttcctcagtg

SEQ ID NO: 237156 - DNA, 396 bp, Artificial Sequence
  derived and/or modified sequence
cacggacctggtgtgggagcgagaggaggtggcttgattgccgggcgtctgttccgagggaggagggtgttgccatctccctcacatgcccttatcacccctttctcaggcgggagcatgctggggctctgggggcagcggctccccgcggcgtgggtcctgcttctgttgcctttcctgccgctgctgctgcttgcagcccccgcgccccaccgcgcgtcctacaagccggtcatcgtggtgcatgggctcttcgacagctcgtacagcttccgccacctgctggaatacatcaatgagggggccttgtgtgccgggctctgctttctgtcatggatgatcacaacgtggattctttcatctccctctcctctccacagatgggacagtatggag

SEQ ID NO: 237157 - DNA, 954 bp, Artificial Sequence
  derived and/or modified sequence
gactggtcgaaattacgcgggcatgagtcagcgcatccctacgcgccctccgccccttgagggtgggtcgcttatagggaggggagtagagtagggcaggagaaactgggccaggctgcacttagctcaaggggcctcgaggactctctgcgtctctggagacaagggcactacacgcacttcagaatgaagagttacttgggataagtaaacagcgggtggagcgaggcctacggacccaggccaggtgggagtctgcactcttcaaggggcctgggctgctgctcacgggtattaaagaactccgcgttgttcatggctgaggcgatgcattaggaagatcctggacctagagaacaagtcccccgaacgctgagttggaggcgggacttcgggtgcgcgttggcgggagcatgctggggctctgcgggcagcggctccccgcggcgtgggtcctgcttctgttgcctttcctgccgctgctgctgcttgcagcccccgcgccccaccgcgcgtcctacaagccggtcatcgtggtgcatgggctcttcgacagctcgtacagcttccgccacctgctggaatacatcaatgagacacaccccgggactgtggtgacagtgctcgatctcttcgatgggagagagagcttgcgacccctgtgggaacaggtgcaagggttccgagaggctgtggtccccatcatggcaaaggcccctcaaggggtgcatctcatctgctactcgcaggggggccttgtgtgccgggctctgctttctgtcatggatgatcacaacgtggattctttcatctccctctcctctccacagatgggacagtatggagacacggactacttgaagtggctgttccccacctccatgcggtctaacctctatcggatctgctatagcccctggggccaggaattctccatctgcaactactggcatg

SEQ ID NO: 237158 - DNA, 730 bp, Artificial Sequence
  derived and/or modified sequence
gctattttgtgacacggacctggtgtgggagcgagaggaggtggcttgattgccgggcgtctgttccgagggaggagggtgttgccatctccctcacatgcccttatcacccctttctcaggcgggagcatgctggggctctgggggcagcggctccccgcggcgtgggtcctgcttctgttgcctttcctgccgctgctgctgcttgcagcccccgcgccccaccgcgagtcctacaagccggtcatcgtggtgcatgggctcttcgacagctcgtacagcttccgccacctgctggaatacatcaatgagacacaccccgggactgtggtgacagtgctcgatctcttcgatgggagagagagcttgcgacccctgtgggaacaggtgcaagggttccgagaggctgtggtccccatcatggcaaaggcccctcaaggggtgcatctcatctgctactcgcaggggggccttgtgtgccgggctctgctttctgtcatggatgatcacaacgtggattctttcatctccctctcctctccacagatgggacagtatggagacacggactacttgaagtggctgttccccacctccatgcggtctaacctctatcggatctgctatagcccctggggccaggaattctccatctgcaactactggcatgatccccaccacgatgacttgtacctcaatgccagcagcttcctggccctgatcaatgggg

SEQ ID NO: 237159 - DNA, 954 bp, Artificial Sequence
  derived and/or modified sequence
gactggtcgaaattacgcgggcatgagtcagcgcatccctacgcgccctccgccccttgagggtgggtcgcttatagggaggggagtagagtagggcaggagaaactgggccaggctgcacttagctcaaggggcctcgaggactctctgcgtctctggagacaagggcactacacgcacttcagaatgaagagttacttgggataagtaaacagcgggtggagcgaggcctacggacccaggccaggtgggagtctgcactcttcaaggggcctgggctgctgctcacgggtattaaagaactccgcgttgttcatggctgaggcgatgcattaggaagatcctggacctagagaacaagtcccccgaacgctgagttggaggcgggacttcgggtgcgcgttggcgggagcatgctggggctctgggggcagcggctccccgcggcgtgggtcctgcttctgttgcctttcctgccgctgctgctgcttgcagcccccgcgccccaccgcgcgtcctacaagccggtcatcgtggtgcatgggctcttcgacagctcgtacagcttccgccacctgctggaatacatcaatgagacacaccccgggactgtggtgacagtgctcgatctcttcgatgggagagagagcttgcgacccctgtgggaacaggtgcaagggttccgagaggctgtggtccccatcatggcaaaggcccctcaaggggtgcatctcatctgctactcgcaggggggccttgtgtgccgggctctgctttctgtcatggatgatcacaacgtggattctttcatctccctctcctctccacagatgggacagtatggagacacggactacttgaagtggctgttccccacctccatgcggtctaacctctatcggatctgctatagcccctggggccaggaattctccatctgcaactactggcatg

SEQ ID NO: 237160 - DNA, 2128 bp, Artificial Sequence
  derived and/or modified sequence
acttagctcaaggggcctcgaggactctctgcgtctctggagacaagggcactacacgcacttcagaatgaagagttcacctagggcgcaatggaatattccattgcccctcctgtcctgggtctgtgttgcggggaacgctcgcgcggttgccagagaaagccccggacgtgacggatttgcgcgaccccaagcagcccgcccttccccctcccatccgtcattcccctgcgctctctttcctcacccttccccccgccaccgtgggttccagacttgggataagtaaacagcgggtggagcgaggcctacggacccaggccaggtgggagtctgcactcttcaaggggcctgggctgctgctcacgggtattaaagaactccgcgttgttcatggctgaggcgatgcattaggaagatcctggacctagagaacaagtcccccgaacgctgagttggaggcgggacttcgggtgcgcgttggcgggagcatgctggggctctgggggcagcggctccccgcggcgtgggtcctgcttctgttgcctttcctgccgctgctgctgcttgcagcccccgcgccccaccgcgcgtcctacaagccggtcatcgtggtgcatgggctcttcgacagctcgtacagcttccgccacctgctggaatacatcaatgagacacaccccgggactgtggtgacagtgctcgatctcttcgatgggagagagagcttgcgacccctgtgggaacaggtgcaagggttccgagaggctgtggtccccatcatggcaaaggcccctcaaggggtgcatctcatctgctactcgcaggggggccttgtgtgccgggctctgctttctgtcatggatgatcacaacgtggattctttcatctccctctcctctccacagatgggacagtatggagacacggactacttgaagtggctgttccccacctccatgcggtctaacctctatcggatctgctatagcccctggggccaggaattctccatctgcaactactggcatgatccccaccacgatgacttgtacctcaatgccagcagcttcctggccctgatcaatggggaaagagaccatcccaatgccacagtatggcggaagaactttctgcgtgtgggccacctggtgctgattgggggccctgatgatggtgttattactccctggcagtccagcttctttggtttctatgatgcaaatgagaccgtcctggagatggaggagcaactggtttatctgcgggattcttttgggttgaagactctattggcccggggggccatagtgaggtgtccaatggccggtatctcccacacagcctggcactccaaccgtaccctttatgagacctgcattgaaccttggctctcctgaggatatattcaggggtccccaggaactcctcggtccagagaccaagtggtggccttggaaagcagatgtcaggctttggtgtgcctgtgaccacctcattgctcccatattatcccccatttttagtagagacggggttttagtagagacttggcctcccagaacccccttcctctgctcctccatgaatgacaattccaggcctcccctacctcatgtcctctcatttgggggattgctccgtgctgtccctttctctcaaggccgaagttgggaagtgagaaaccatgtttttaacttgtggctgcttttgctgctgctgctcctccgtatctggctgtatgggtggagaacccaccccctgcccaccacaggggtctccttccaggccactcaggacatttttagcttctctcctccccatgttcccttttttctctaaagtcccctgacatcagccctcccaactcctaagagggactacccatgagagtggggttctgaggctcccctatggggacagttccgttcttgaagtgtcagtgttggggaatatctgtggcctatgaggcccatctcaggtttggggatcccccagtccctatgatcagtgttggagtacccccctgggagagcctagtttctttgaggccccaggccctcttttaactacctttgaataggtgttatccctgtatttatggaaataaagttccatttcctcagtg

SEQ ID NO: 237161 - DNA, 722 bp, Artificial Sequence
  derived and/or modified sequence
acccttccccccgccaccgtgggttccagacttgggataagtaaacagcgggtggagcgaggcctacggacccaggccaggtgggagtctgcactcttcaaggggcctgggctgctgctcacgggtattaaagaactccgcgttgttcatggctgaggcgatgcattaggaagatcctggacctagagaacaagtcccccgaacgctgagttggaggcgggacttcgggtgcgcgttggcgggagcatgctggggctctgcgggcagcggctccccgcggcgtgggtcctgcttctgttgcctttcctgccgctgctgctgcttgcagcccccgcgccccaccgcgcgtcctacaagccggtcatcgtggtgcatgggctcttcgacagctcgtacagcttccgccacctgctggaatacatcaatgagatgggacagtatggagacacggactacttgaagtggctgttccccacctccatgcggtctaacctctatcggatctgctatagcccctggggccaggaattctccatctgcaactactggcatgatccccaccacgatgacttgtacctcaatgccagcagcttcctggccctgatcaatggggaaagagaccatcccaatgccacagtatggcggaagaactttctgcgtgtgggccacctggtgctgattgggggccctgatgatggtgttattactccctggcagtccag

SEQ ID NO: 237162 - DNA, 827 bp, Artificial Sequence
  derived and/or modified sequence
tccgtcattcccctgcgctctctttcctcacccttccccccgccaccgtgggttccagacttgggataagtaaacagcgggtggagcgaggcctacggacccaggccaggcgggagcatgctggggctctgggggcagcggctccccgcggcgtgggtcctgcttctgttgcctttcctgccgctgctgctgcttgcagcccccgcgccccaccgcgagtcctacaagccggtcatcgtggtgcatgggctcttcgacagctcgtacagcttccgccacctgctggaatacatcaatgagacacaccccgggactgtggtgacagtgctcgatctcttcgatgggagagagagcttgcgacccctgtgggaacaggtgcaagggttccgagaggctgtggtccccatcatggcaaaggcccctcaaggggtgcatctcatctgctactcgcaggggggccttgtgtgccgggctctgctttctgtcatggatgatcacaacgtggattctttcatctccctctcctctccacagatgggacagtatggagacacggactacttgaagtggctgttccccacctccatgcggtctaacctctatcggatctgctatagcccctggggccaggaattctccatctgcaactactggcatgatccccaccacgatgacttgtacctcaatgccagcagcttcctggccctgatcaatggggaaagagaccatcccaatgccacagtatggcggaagaactttctgcgtgtgggccacctggtgctgattgggggccctgatgatggtgttattactccctggcagtccag

SEQ ID NO: 237163 - DNA, 730 bp, Artificial Sequence
  derived and/or modified sequence
gctattttgtgacacggacctggtgtgggagcgagaggaggtggcttgattgccgggcgtctgttccgagggaggagggtgttgccatctccctcacatgcccttatcacccctttctcaggcgggagcatgctggggctctgggggcagcggctccccgcggcgtgggtcctgcttctgttgcctttcctgccgctgctgctgcttgcagcccccgcgccccaccgcgcgtcctacaagccggtcatcgtggtgcatgggctcttcgacagctcgtacagcttccgccacctgctggaatacatcaatgagacacaccccgggactgtggtgacagtgctcgatctcttcgatgggagagagagcttgcgacccctgtgggaacaggtgcaagggttccgagaggctgtggtccccatcatggcaaaggcccctcaaggggtgcatctcatctgctactcgcaggggggccttgtgtgccgggctctgctttctgtcatggatgatcacaacgtggattctttcatctccctctcctctccacagatgggacagtatggagacacggactacttgaagtggctgttccccacctccatgcggtctaacctctatcggatctgctatagcccctggggccaggaattctccatctgcaactactggcatgatccccaccacgatgacttgtacctcaatgccagcagcttcctggccctgatcaatgggg

SEQ ID NO: 237164 - DNA, 1754 bp, Artificial Sequence
  derived and/or modified sequence
tccgtcattcccctgcgttctctttcctcacccttccccccgccaccgtgggttccagacttgggataagtaaacagcgggtggagcgaggcctacggacccaggccaggcgggagcatgctggggctctgggggcagcggctccccgcggcgtgggtcctgcttctgttgcctttcctgccgctgctgctgcttgcagcccccgcgccccaccgcgcgtcctacaagccggtcatcgtggtgcatgggctcttcgacagctcgtacagcttccgccacctgctggaatacatcaatgagacacaccccgggactgtggtgacagtgctcgatctcttcgatgggagagagagcttgcgacccctgtgggaacaggtgcaagggttccgagaggctgtggtccccatcatggcaaaggcccctcaaggggtgcatctcatctgctactcgcaggggggccttgtgtgccgggctctgctttctgtcatggatgatcacaacgtggattctttcatctccctctcctctccacagatgggacagtatggagacacggactacttgaagtggctgttccccacctccatgcggtctaacctctatcggatctgctatagcccctggggccaggaattctccatctgcaactactggcatgatccccaccacgatgacttgtacctcaatgccagcagcttcctggccctgatcaatggggaaagagaccatcccaatgccacagtatggcggaagaactttctgcgtgtgggccacctggtgctgattgggggccctgatgatggtgttattactccctggcagtccagcttctttggtttctatgatgcaaatgagaccgtcctggagatggaggagcaactggtttatctgcgggattcttttgggttgaagactctattggcccggggggccatagtgaggtgtccaatggccggtatctcccacacagcctggcactccaaccgtaccctttatgagacctgcattgaaccttggctctcctgaggatatattcaggggtccccaggaactcctcggtccagagaccaagtggtggccttggaaagcagatgtcaggctttggtgtgcctgtgaccacctcattgctcccatattatcccccatttttagtagagacggggttttagtagagacttggcctcccagaacccccttcctctgctcctccatgaatgacaattccaggcctcccctacctcatgtcctctcatttgggggattgctccgtgctgtccctttctctcaaggccgaagttgggaagtgagaaaccatgtttttaacttgtggctgcttttgctgctgctgctcctccgtatctggctgtatgggtggagaacccaccccctgcccaccacaggggtctccttccaggccactcaggacatttttagcttctctcctccccatgttcccttttttctctaaagtcccctgacatcagccctcccaactcctaagagggactacccatgagagtggggttctgaggctcccctatggggacagttccgttcttgaagtgtcagtgttggggaatatctgtggcctatgaggcccatctcaggtttggggatcccccagtccctatgatcagtgttggagtacccccctgggagagcctagtttctttgaggccccaggccctcttttaactacctttgaataggtgttatccctgtatttatggaaataaagttccatttcctcagtg

SEQ ID NO: 237165 - DNA, 832 bp, Artificial Sequence
  derived and/or modified sequence
ggagtagagtagggcaggagaaactgggccaggctgcacttagctcaaggggcctcgaggactctctgcgtctctggagacaagggcactacacgcacttcagaatgaagagttgcgggagcatgctggggctctgggggcagcggctccccgcggcgtgggtcctgcttctgttgcctttcctgccgctgctgctgcttgcagcccccgcgccccaccgcgagtcctacaagccggtcatcgtggtgcatgggctcttcgacagctcgtacagcttccgccacctgctggaatacatcaatgagacacaccccgggactgtggtgacagtgctcgatctcttcgatgggagagagagcttgcgacccctgtgggaacaggtgcaagggttccgagaggctgtggtccccatcatggcaaaggcccctcaaggggtgcatctcatctgctactcgcaggggggccttgtgtgccgggctctgctttctgtcatggatgatcacaacgtggattctttcatctccctctcctctccacagatgggacagtatggagacacggactacttgaagtggctgttccccacctccatgcggtctaacctctatcggatctgctatagcccctggggccaggaattctccatctgcaactactggcatgatccccaccacgatgacttgtacctcaatgccagcagcttcctggccctgatcaatggggaaagagaccatcccaatgccacagtatggcggaagaactttctgcgtgtgggccacctggtgctgattgggggccctgatgatggtgttattactccctggcagtccag

SEQ ID NO: 237166 - DNA, 1184 bp, Artificial Sequence
  derived and/or modified sequence
tcgaggactctctgcgtctctggagacaagggcactacacgcacttcagaatgaagagttcacctagggcgcaatggaatattccattgcccctcctgtcctgggtctgtgttgcggggaacgctcgcgcggttgccagagaaagccccggacgtgacggatttgcgcgaccccaagcagcccgcccttccccctcccatccgtcattcccctgcgctctctttcctcacccttccccccgccaccgtgggttccagacttgggataagtaaacagcgggtggagcgaggcctacggacccaggccaggtgggagtctgcactcttcaaggggcctgggctgctgctcacgggtattaaagaactccgcgttgttcatggctgaggcgatgcattaggaagatcctggacctagagaacaagtcccccgaacgctgagttggaggcgggacttcgggtgcgcgttggcgggagcatgctggggctctgggggcagcggctccccgcggcgtgggtcctgcttctgttgcctttcctgccgctgctgctgcttgcagcccccgcgccccaccgcgagtcctacaagccggtcatcgtggtgcatgggctcttcgacagctcgtacagcttccgccacctgctggaatacatcaatgagacacaccccgggactgtggtgacagtgctcgatctcttcgatgggagagagagcttgcgacccctgtgggaacaggtgcaagggttccgagaggctgtggtccccatcatggcaaaggcccctcaaggggtgcatctcatctgctactcgcaggggggccttgtgtgccgggctctgctttctgtcatggatgatcacaacgtggattctttcatctccctctcctctccacagatgggacagtatggagacacggactacttgaagtggctgttccccacctccatgcggtctaacctctatcggatctgctatagcccctggggccaggaattctccatctgcaactactggcatgatccccaccacgatgacttgtacctcaatgccagcagcttcctggccctgatcaatggggaaagagaccatcccaatgccacagtatggcggaagaactttctgcgtgtgggccacctggtgctgattgggggccctgatgatggtgttattactccctggcagtccag

SEQ ID NO: 237167 - DNA, 730 bp, Artificial Sequence
  derived and/or modified sequence
gctattttgtgacacggacctggtgtgggagcgagaggaggtggcttgattgccgggcgtctgttccgagggaggagggtgttgccatctccctcacatgcccttatcacccctttctcaggcgggagcatgctggggctctgcgggcagcggctccccgcggcgtgggtcctgcttctgttgcctttcctgccgctgctgctgcttgcagcccccgcgccccaccgcgcgtcctacaagccggtcatcgtggtgcatgggctcttcgacagctcgtacagcttccgccacctgctggaatacatcaatgagacacaccccgggactgtggtgacagtgctcgatctcttcgatgggagagagagcttgcgacccctgtgggaacaggtgcaagggttccgagaggctgtggtccccatcatggcaaaggcccctcaaggggtgcatctcatctgctactcgcaggggggccttgtgtgccgggctctgctttctgtcatggatgatcacaacgtggattctttcatctccctctcctctccacagatgggacagtatggagacacggactacttgaagtggctgttccccacctccatgcggtctaacctctatcggatctgctatagcccctggggccaggaattctccatctgcaactactggcatgatccccaccacgatgacttgtacctcaatgccagcagcttcctggccctgatcaatgggg

SEQ ID NO: 237168 - DNA, 1874 bp, Artificial Sequence
  derived and/or modified sequence
tattccattgcccctcctgtcctgggtctgtgttgcggggaacgctcgcgcggttgccagagaaagccccggacgtgacggatttgcgcgaccccaagcagcccgcccttccccctcccatccgtcattcccctgcgctctctttcctcacccttccccccgccaccgtgggttccagacttgggataagtaaacagcgggtggagcgaggcctacggacccaggccaggcgggagcatgctggggctctgggggcagcggctccccgcggcgtgggtcctgcttctgttgcctttcctgccgctgctgctgcttgcagcccccgcgccccaccgcgcgtcctacaagccggtcatcgtggtgcatgggctcttcgacagctcgtacagcttccgccacctgctggaatacatcaatgagacacaccccgggactgtggtgacagtgctcgatctcttcgatgggagagagagcttgcgacccctgtgggaacaggtgcaagggttccgagaggctgtggtccccatcatggcaaaggcccctcaaggggtgcatctcatctgctactcgcaggggggccttgtgtgccgggctctgctttctgtcatggatgatcacaacgtggattctttcatctccctctcctctccacagatgggacagtatggagacacggactacttgaagtggctgttccccacctccatgcggtctaacctctatcggatctgctatagcccctggggccaggaattctccatctgcaactactggcatgatccccaccacgatgacttgtacctcaatgccagcagcttcctggccctgatcaatggggaaagagaccatcccaatgccacagtatggcggaagaactttctgcgtgtgggccacctggtgctgattgggggccctgatgatggtgttattactccctggcagtccagcttctttggtttctatgatgcaaatgagaccgtcctggagatggaggagcaactggtttatctgcgggattcttttgggttgaagactctattggcccggggggccatagtgaggtgtccaatggccggtatctcccacacagcctggcactccaaccgtaccctttatgagacctgcattgaaccttggctctcctgaggatatattcaggggtccccaggaactcctcggtccagagaccaagtggtggccttggaaagcagatgtcaggctttggtgtgcctgtgaccacctcattgctcccatattatcccccatttttagtagagacggggttttagtagagacttggcctcccagaacccccttcctctgctcctccatgaatgacaattccaggcctcccctacctcatgtcctctcatttgggggattgctccgtgctgtccctttctctcaaggccgaagttgggaagtgagaaaccatgtttttaacttgtggctgcttttgctgctgctgctcctccgtatctggctgtatgggtggagaacccaccccctgcccaccacaggggtctccttccaggccactcaggacatttttagcttctctcctccccatgttcccttttttctctaaagtcccctgacatcagccctcccaactcctaagagggactacccatgagagtggggttctgaggctcccctatggggacagttccgttcttgaagtgtcagtgttggggaatatctgtggcctatgaggcccatctcaggtttggggatcccccagtccctatgatcagtgttggagtacccccctgggagagcctagtttctttgaggccccaggccctcttttaactacctttgaataggtgttatccctgtatttatggaaataaagttccatttcctcagtg

SEQ ID NO: 237169 - DNA, 396 bp, Artificial Sequence
  derived and/or modified sequence
cacggacctggtgtgggagcgagaggaggtggcttgattgccgggcgtctgttccgagggaggagggtgttgccatctccctcacatgcccttatcacccctttctcaggcgggagcatgctggggctctgggggcagcggctccccgcggcgtgggtcctgcttctgttgcctttcctgccgctgctgctgcttgcagcccccgcgccccaccgcgagtcctacaagccggtcatcgtggtgcatgggctcttcgacagctcgtacagcttccgccacctgctggaatacatcaatgagggggccttgtgtgccgggctctgctttctgtcatggatgatcacaacgtggattctttcatctccctctcctctccacagatgggacagtatggag

SEQ ID NO: 237170 - DNA, 1474 bp, Artificial Sequence
  derived and/or modified sequence
ggaagtggggagaatcaaggcggggaaatcggacttttgggtcgctgggggcaacgaagcctggagaggccttctttccattcccagaatatgtttgctgctttttcctctccccactggcctaaatggatcgctccgcctgtttcctccccagcacctagggcgcaatggaatattccattgcccctcctgtcctgggtctgtgttgcggggaacgctcgcgcggttgccagagaaagccccggacgtgacggatttgcgcgaccccaagcagcccgcccttccccctcccatccgtcattcccctgcgctctctttcctcacccttccccccgccaccgtgggttccagacttgggataagtaaacagcgggtggagcgaggcctacggacccaggccaggtgggagtctgcactcttcaaggggcctgggctgctgctcacgggtattaaagaactccgcgttgttcatggctgaggcgatgcattaggaagatcctggacctagagaacaagtcccccgaacgctgagttggaggcgggacttcgggtgcgcgttggcgggagcatgctggggctctgcgggcagcggctccccgcggcgtgggtcctgcttctgttgcctttcctgccgctgctgctgcttgcagcccccgcgccccaccgcgcgtcctacaagccggtcatcgtggtgcatgggctcttcgacagctcgtacagcttccgccacctgctggaatacatcaatgagacacaccccgggactgtggtgacagtgctcgatctcttcgatgggagagagagcttgcgacccctgtgggaacaggtgcaagggttccgagaggctgtggtccccatcatggcaaaggcccctcaaggggtgcatctcatctgctactcgcaggggggccttgtgtgccgggctctgctttctgtcatggatgatcacaacgtggattctttcatctccctctcctctccacagatgggacagtatggagacacggactacttgaagtggctgttccccacctccatgcggtctaacctctatcggatctgctatagcccctggggccaggaattctccatctgcaactactggcatgatccccaccacgatgacttgtacctcaatgccagcagcttcctggccctgatcaatggggaaagagaccatcccaatgccacagtatggcggaagaactttctgcgtgtgggccacctggtgctgattgggggccctgatgatggtgttattactccctggcagtccagcttctttggtttctatgatgcaaatgagaccgtcctggagatggaggagcaactgcctgccaggcccacccaccagtctgagctgcttctgctgaggctggtctgcttgaagcctcccaggagaaagaagccagcctgtagggtccagcgtcaaagcgaatcatggggtccagggctgagctgtgcactctcttag

SEQ ID NO: 237171 - DNA, 2111 bp, Artificial Sequence
  derived and/or modified sequence
tcgaggactctctgcgtctctggagacaagggcactacacgcacttcagaatgaagagttcacctagggcgcaatggaatattccattgcccctcctgtcctgggtctgtgttgcggggaacgctcgcgcggttgccagagaaagccccggacgtgacggatttgcgcgaccccaagcagcccgcccttccccctcccatccgtcattcccctgcgttctctttcctcacccttccccccgccaccgtgggttccagacttgggataagtaaacagcgggtggagcgaggcctacggacccaggccaggtgggagtctgcactcttcaaggggcctgggctgctgctcacgggtattaaagaactccgcgttgttcatggctgaggcgatgcattaggaagatcctggacctagagaacaagtcccccgaacgctgagttggaggcgggacttcgggtgcgcgttggcgggagcatgctggggctctgggggcagcggctccccgcggcgtgggtcctgcttctgttgcctttcctgccgctgctgctgcttgcagcccccgcgccccaccgcgcgtcctacaagccggtcatcgtggtgcatgggctcttcgacagctcgtacagcttccgccacctgctggaatacatcaatgagacacaccccgggactgtggtgacagtgctcgatctcttcgatgggagagagagcttgcgacccctgtgggaacaggtgcaagggttccgagaggctgtggtccccatcatggcaaaggcccctcaaggggtgcatctcatctgctactcgcaggggggccttgtgtgccgggctctgctttctgtcatggatgatcacaacgtggattctttcatctccctctcctctccacagatgggacagtatggagacacggactacttgaagtggctgttccccacctccatgcggtctaacctctatcggatctgctatagcccctggggccaggaattctccatctgcaactactggcatgatccccaccacgatgacttgtacctcaatgccagcagcttcctggccctgatcaatggggaaagagaccatcccaatgccacagtatggcggaagaactttctgcgtgtgggccacctggtgctgattgggggccctgatgatggtgttattactccctggcagtccagcttctttggtttctatgatgcaaatgagaccgtcctggagatggaggagcaactggtttatctgcgggattcttttgggttgaagactctattggcccggggggccatagtgaggtgtccaatggccggtatctcccacacagcctggcactccaaccgtaccctttatgagacctgcattgaaccttggctctcctgaggatatattcaggggtccccaggaactcctcggtccagagaccaagtggtggccttggaaagcagatgtcaggctttggtgtgcctgtgaccacctcattgctcccatattatcccccatttttagtagagacggggttttagtagagacttggcctcccagaacccccttcctctgctcctccatgaatgacaattccaggcctcccctacctcatgtcctctcatttgggggattgctccgtgctgtccctttctctcaaggccgaagttgggaagtgagaaaccatgtttttaacttgtggctgcttttgctgctgctgctcctccgtatctggctgtatgggtggagaacccaccccctgcccaccacaggggtctccttccaggccactcaggacatttttagcttctctcctccccatgttcccttttttctctaaagtcccctgacatcagccctcccaactcctaagagggactacccatgagagtggggttctgaggctcccctatggggacagttccgttcttgaagtgtcagtgttggggaatatctgtggcctatgaggcccatctcaggtttggggatcccccagtccctatgatcagtgttggagtacccccctgggagagcctagtttctttgaggccccaggccctcttttaactacctttgaataggtgttatccctgtatttatggaaataaagttccatttcctcagtg

SEQ ID NO: 237172 - DNA, 396 bp, Artificial Sequence
  derived and/or modified sequence
cacggacctggtgtgggagcgagaggaggtggcttgattgccgggcgtctgttccgagggaggagggtgttgccatctccctcacatgcccttatcacccctttctcaggcgggagcatgctggggctctgcgggcagcggctccccgcggcgtgggtcctgcttctgttgcctttcctgccgctgctgctgcttgcagcccccgcgccccaccgcgcgtcctacaagccggtcatcgtggtgcatgggctcttcgacagctcgtacagcttccgccacctgctggaatacatcaatgagggggccttgtgtgccgggctctgctttctgtcatggatgatcacaacgtggattctttcatctccctctcctctccacagatgggacagtatggag

SEQ ID NO: 237173 - DNA, 954 bp, Artificial Sequence
  derived and/or modified sequence
gactggtcgaaattacgcgggcatgagtcagcgcatccctacgcgccctccgccccttgagggtgggtcgcttatagggaggggagtagagtagggcaggagaaactgggccaggctgcacttagctcaaggggcctcgaggactctctgcgtctctggagacaagggcactacacgcacttcagaatgaagagttacttgggataagtaaacagcgggtggagcgaggcctacggacccaggccaggtgggagtctgcactcttcaaggggcctgggctgctgctcacgggtattaaagaactccgcgttgttcatggctgaggcgatgcattaggaagatcctggacctagagaacaagtcccccgaacgctgagttggaggcgggacttcgggtgcgcgttggcgggagcatgctggggctctgggggcagcggctccccgcggcgtgggtcctgcttctgttgcctttcctgccgctgctgctgcttgcagcccccgcgccccaccgcgagtcctacaagccggtcatcgtggtgcatgggctcttcgacagctcgtacagcttccgccacctgctggaatacatcaatgagacacaccccgggactgtggtgacagtgctcgatctcttcgatgggagagagagcttgcgacccctgtgggaacaggtgcaagggttccgagaggctgtggtccccatcatggcaaaggcccctcaaggggtgcatctcatctgctactcgcaggggggccttgtgtgccgggctctgctttctgtcatggatgatcacaacgtggattctttcatctccctctcctctccacagatgggacagtatggagacacggactacttgaagtggctgttccccacctccatgcggtctaacctctatcggatctgctatagcccctggggccaggaattctccatctgcaactactggcatg

SEQ ID NO: 237174 - DNA, 1278 bp, Artificial Sequence
  derived and/or modified sequence
ggaagtggggagaatcaaggcggggaaatcggacttttgggtcgctgggggcaacgaagcctggagaggccttctttccattcccagaatatgtttgctgctttttcctctccccactggcctaaatggatcgctccgcctgtttcctccccagcacctagggcgcaatggaatattccattgcccctcctgtcctgggtctgtgttgcggggaacgctcgcgcggttgccagagaaagccccggacgtgacggatttgcgcgaccccaagcagcccgcccttccccctcccatccgtcattcccctgcgctctctttcctcacccttccccccgccaccgtgggttccagacttgggataagtaaacagcgggtggagcgaggcctacggacccaggccaggtgggagtctgcactcttcaaggggcctgggctgctgctcacgggtattaaagaactccgcgttgttcatggctgaggcgatgcattaggaagatcctggacctagagaacaagtcccccgaacgctgagttggaggcgggacttcgggtgcgcgttggcgggagcatgctggggctctgggggcagcggctccccgcggcgtgggtcctgcttctgttgcctttcctgccgctgctgctgcttgcagcccccgcgccccaccgcgagtcctacaagccggtcatcgtggtgcatgggctcttcgacagctcgtacagcttccgccacctgctggaatacatcaatgagacacaccccgggactgtggtgacagtgctcgatctcttcgatgggagagagagcttgcgacccctgtgggaacaggtgcaagggttccgagaggctgtggtccccatcatggcaaaggcccctcaaggggtgcatctcatctgctactcgcaggggggccttgtgtgccgggctctgctttctgtcatggatgatcacaacgtggattctttcatctccctctcctctccacagatgggacagtatggagacacggactacttgaagtggctgttccccacctccatgcggtctaacctctatcggatctgctatagcccctggggccaggaattctccatctgcaactactggcatgatccccaccacgatgacttgtacctcaatgccagcagcttcctggccctgatcaatggggaaagagaccatcccaatgccacagtatggcggaagaactttctgcgtgtgggccacctggtgctgattgggggccctgatgatggtgttattactccctggcagtccag

SEQ ID NO: 237175 - DNA, 901 bp, Artificial Sequence
  derived and/or modified sequence
agcgaggcctacggacccaggccaggtgggagtctgcactcttcaaggggcctgggctgctgctcacgggtattaaagaactccgcgttgttcatggctgaggcgatgcattaggaagatcctggacctagagaacaagtcccccgaacgctgagttggaggcgggacttcgggtgcgcgttggcgggagcatgctggggctctgggggcagcggctccccgcggcgtgggtcctgcttctgttgcctttcctgccgctgctgctgcttgcagcccccgcgccccaccgcgagtcctacaagccggtcatcgtggtgcatgggctcttcgacagctcgtacagcttccgccacctgctggaatacatcaatgagacacaccccgggactgtggtgacagtgctcgatctcttcgatgggagagagagcttgcgacccctgtgggaacaggtgcaagggttccgagaggctgtggtccccatcatggcaaaggcccctcaaggggtgcatctcatctgctactcgcaggggggccttgtgtgccgggctctgctttctgtcatggatgatcacaacgtggattctttcatctccctctcctctccacagatgggacagtatggagacacggactacttgaagtggctgttccccacctccatgcggtctaacctctatcggatctgctatagcccctggggccaggaattctccatctgcaactactggcatgatccccaccacgatgacttgtacctcaatgccagcagcttcctggccctgatcaatggggaaagagaccatcccaatgccacagtatggcggaagaactttctgcgtgtgggccacctggtgctgattgggggccctgatgatggtgttattactccctggcagtccag

SEQ ID NO: 237176 - DNA, 2382 bp, Artificial Sequence
  derived and/or modified sequence
tttttttttttttttaaacaaaaacacagccagataatcattattcttcccttacgtccccccagcccccacctggggcagtcgctctcccggctgcgtcccttttcgtccatgtcctagcagagactacagagcagtacagaggctctcgctgaaaccagtcccaggctccacagagtcagatcacggcttcacaccagtcgttctggtcacttaggcgttcgcgtgagcgctcaaccccttaccgccacctcatcgtcactctacaccattctgagcgcaaaaatgttttgattgagacaaatttagaccaagcaatgaccttgtaaacagagagaggggctcagacatgctgagaaatccttatctctagagaaacgtctttaaatgctaagtaaaagccctagcaagtaaaagccctgaggcactagggtgtcggttaggggtcacaggcggagaggtggggcgcctgggggtttcggtagggagccacccacagataactcagacagccagattctgggggtcgttcaggttgaaagactggtcgaaattacgcgggcatgagtcagcgcatccctacgcgccctccgccccttgagggtgggtcgcttatagggaggggagtagagtagggcaggagaaactgggccaggctgcacttagctcaaggggcctcgaggactctctgcgtctctggagacaagggcactacacgcacttcagaatgaagagttgcgggagcatgctggggctctgggggcagcggctccccgcggcgtgggtcctgcttctgttgcctttcctgccgctgctgctgcttgcagcccccgcgccccaccgcgcgtcctacaagccggtcatcgtggtgcatgggctcttcgacagctcgtacagcttccgccacctgctggaatacatcaatgagacacaccccgggactgtggtgacagtgctcgatctcttcgatgggagagagagcttgcgacccctgtgggaacaggtgcaagggttccgagaggctgtggtccccatcatggcaaaggcccctcaaggggtgcatctcatctgctactcgcaggggggccttgtgtgccgggctctgctttctgtcatggatgatcacaacgtggattctttcatctccctctcctctccacagatgggacagtatggagacacggactacttgaagtggctgttccccacctccatgcggtctaacctctatcggatctgctatagcccctggggccaggaattctccatctgcaactactggcatgatccccaccacgatgacttgtacctcaatgccagcagcttcctggccctgatcaatggggaaagagaccatcccaatgccacagtatggcggaagaactttctgcgtgtgggccacctggtgctgattgggggccctgatgatggtgttattactccctggcagtccagcttctttggtttctatgatgcaaatgagaccgtcctggagatggaggagcaactggtttatctgcgggattcttttgggttgaagactctattggcccggggggccatagtgaggtgtccaatggccggtatctcccacacagcctggcactccaaccgtaccctttatgagacctgcattgaaccttggctctcctgaggatatattcaggggtccccaggaactcctcggtccagagaccaagtggtggccttggaaagcagatgtcaggctttggtgtgcctgtgaccacctcattgctcccatattatcccccatttttagtagagacggggttttagtagagacttggcctcccagaacccccttcctctgctcctccatgaatgacaattccaggcctcccctacctcatgtcctctcatttgggggattgctccgtgctgtccctttctctcaaggccgaagttgggaagtgagaaaccatgtttttaacttgtggctgcttttgctgctgctgctcctccgtatctggctgtatgggtggagaacccaccccctgcccaccacaggggtctccttccaggccactcaggacatttttagcttctctcctccccatgttcccttttttctctaaagtcccctgacatcagccctcccaactcctaagagggactacccatgagagtggggttctgaggctcccctatggggacagttccgttcttgaagtgtcagtgttggggaatatctgtggcctatgaggcccatctcaggtttggggatcccccagtccctatgatcagtgttggagtacccccctgggagagcctagtttctttgaggccccaggccctcttttaactacctttgaataggtgttatccctgtatttatggaaataaagttccatttcctcagtg

SEQ ID NO: 237177 - DNA, 2202 bp, Artificial Sequence
  derived and/or modified sequence
ggaagtggggagaatcaaggcggggaaatcggacttttgggtcgctgggggcaacgaagcctggagaggccttctttccattcccagaatatgtttgctgctttttcctctccccactggcctaaatggatcgctccgcctgtttcctccccagcacctagggcgcaatggaatattccattgcccctcctgtcctgggtctgtgttgcggggaacgctcgcgcggttgccagagaaagccccggacgtgacggatttgcgcgaccccaagcagcccgcccttccccctcccatccgtcattcccctgcgctctctttcctcacccttccccccgccaccgtgggttccagacttgggataagtaaacagcgggtggagcgaggcctacggacccaggccaggtgggagtctgcactcttcaaggggcctgggctgctgctcacgggtattaaagaactccgcgttgttcatggctgaggcgatgcattaggaagatcctggacctagagaacaagtcccccgaacgctgagttggaggcgggacttcgggtgcgcgttggcgggagcatgctggggctctgggggcagcggctccccgcggcgtgggtcctgcttctgttgcctttcctgccgctgctgctgcttgcagcccccgcgccccaccgcgcgtcctacaagccggtcatcgtggtgcatgggctcttcgacagctcgtacagcttccgccacctgctggaatacatcaatgagacacaccccgggactgtggtgacagtgctcgatctcttcgatgggagagagagcttgcgacccctgtgggaacaggtgcaagggttccgagaggctgtggtccccatcatggcaaaggcccctcaaggggtgcatctcatctgctactcgcaggggggccttgtgtgccgggctctgctttctgtcatggatgatcacaacgtggattctttcatctccctctcctctccacagatgggacagtatggagacacggactacttgaagtggctgttccccacctccatgcggtctaacctctatcggatctgctatagcccctggggccaggaattctccatctgcaactactggcatgatccccaccacgatgacttgtacctcaatgccagcagcttcctggccctgatcaatggggaaagagaccatcccaatgccacagtatggcggaagaactttctgcgtgtgggccacctggtgctgattgggggccctgatgatggtgttattactccctggcagtccagcttctttggtttctatgatgcaaatgagaccgtcctggagatggaggagcaactggtttatctgcgggattcttttgggttgaagactctattggcccggggggccatagtgaggtgtccaatggccggtatctcccacacagcctggcactccaaccgtaccctttatgagacctgcattgaaccttggctctcctgaggatatattcaggggtccccaggaactcctcggtccagagaccaagtggtggccttggaaagcagatgtcaggctttggtgtgcctgtgaccacctcattgctcccatattatcccccatttttagtagagacggggttttagtagagacttggcctcccagaacccccttcctctgctcctccatgaatgacaattccaggcctcccctacctcatgtcctctcatttgggggattgctccgtgctgtccctttctctcaaggccgaagttgggaagtgagaaaccatgtttttaacttgtggctgcttttgctgctgctgctcctccgtatctggctgtatgggtggagaacccaccccctgcccaccacaggggtctccttccaggccactcaggacatttttagcttctctcctccccatgttcccttttttctctaaagtcccctgacatcagccctcccaactcctaagagggactacccatgagagtggggttctgaggctcccctatggggacagttccgttcttgaagtgtcagtgttggggaatatctgtggcctatgaggcccatctcaggtttggggatcccccagtccctatgatcagtgttggagtacccccctgggagagcctagtttctttgaggccccaggccctcttttaactacctttgaataggtgttatccctgtatttatggaaataaagttccatttcctca

SEQ ID NO: 237178 - DNA, 1754 bp, Artificial Sequence
  derived and/or modified sequence
gagtagagtagggcaggagaaactgggccaggctgcacttagctcaaggggcctcgaggactctctgcgtctctggagacaagggcactacacgcacttcagaatgaagagttgcgggagcatgctggggctctgggggcagcggctccccgcggcgtgggtcctgcttctgttgcctttcctgccgctgctgctgcttgcagcccccgcgccccaccgcgcgtcctacaagccggtcatcgtggtgcatgggctcttcgacagctcgtacagcttccgccacctgctggaatacatcaatgagacacaccccgggactgtggtgacagtgctcgatctcttcgatgggagagagagcttgcgacccctgtgggaacaggtgcaagggttccgagaggctgtggtccccatcatggcaaaggcccctcaaggggtgcatctcatctgctactcgcaggggggccttgtgtgccgggctctgctttctgtcatggatgatcacaacgtggattctttcatctccctctcctctccacagatgggacagtatggagacacggactacttgaagtggctgttccccacctccatgcggtctaacctctatcggatctgctatagcccctggggccaggaattctccatctgcaactactggcatgatccccaccacgatgacttgtacctcaatgccagcagcttcctggccctgatcaatggggaaagagaccatcccaatgccacagtatggcggaagaactttctgcgtgtgggccacctggtgctgattgggggccctgatgatggtgttattactccctggcagtccagcttctttggtttctatgatgcaaatgagaccgtcctggagatggaggagcaactggtttatctgcgggattcttttgggttgaagactctattggcccggggggccatagtgaggtgtccaatggccggtatctcccacacagcctggcactccaaccgtaccctttatgagacctgcattgaaccttggctctcctgaggatatattcaggggtccccaggaactcctcggtccagagaccaagtggtggccttggaaagcagatgtcaggctttggtgtgcctgtgaccacctcattgctcccatattatcccccatttttagtagagacggggttttagtagagacttggcctcccagaacccccttcctctgctcctccatgaatgacaattccaggcctcccctacctcatgtcctctcatttgggggattgctccgtgctgtccctttctctcaaggccgaagttgggaagtgagaaaccatgtttttaacttgtggctgcttttgctgctgctgctcctccgtatctggctgtatgggtggagaacccaccccctgcccaccacaggggtctccttccaggccactcaggacatttttagcttctctcctccccatgttcccttttttctctaaagtcccctgacatcagccctcccaactcctaagagggactacccatgagagtggggttctgaggctcccctatggggacagttccgttcttgaagtgtcagtgttggggaatatctgtggcctatgaggcccatctcaggtttggggatcccccagtccctatgatcagtgttggagtacccccctgggagagcctagtttctttgaggccccaggccctcttttaactacctttgaataggtgttatccctgtatttatggaaataaagttccatttcctc

SEQ ID NO: 237179 - DNA, 1474 bp, Artificial Sequence
  derived and/or modified sequence
ggaagtggggagaatcaaggcggggaaatcggacttttgggtcgctgggggcaacgaagcctggagaggccttctttccattcccagaatatgtttgctgctttttcctctccccactggcctaaatggatcgctccgcctgtttcctccccagcacctagggcgcaatggaatattccattgcccctcctgtcctgggtctgtgttgcggggaacgctcgcgcggttgccagagaaagccccggacgtgacggatttgcgcgaccccaagcagcccgcccttccccctcccatccgtcattcccctgcgctctctttcctcacccttccccccgccaccgtgggttccagacttgggataagtaaacagcgggtggagcgaggcctacggacccaggccaggtgggagtctgcactcttcaaggggcctgggctgctgctcacgggtattaaagaactccgcgttgttcatggctgaggcgatgcattaggaagatcctggacctagagaacaagtcccccgaacgctgagttggaggcgggacttcgggtgcgcgttggcgggagcatgctggggctctgggggcagcggctccccgcggcgtgggtcctgcttctgttgcctttcctgccgctgctgctgcttgcagcccccgcgccccaccgcgcgtcctacaagccggtcatcgtggtgcatgggctcttcgacagctcgtacagcttccgccacctgctggaatacatcaatgagacacaccccgggactgtggtgacagtgctcgatctcttcgatgggagagagagcttgcgacccctgtgggaacaggtgcaagggttccgagaggctgtggtccccatcatggcaaaggcccctcaaggggtgcatctcatctgctactcgcaggggggccttgtgtgccgggctctgctttctgtcatggatgatcacaacgtggattctttcatctccctctcctctccacagatgggacagtatggagacacggactacttgaagtggctgttccccacctccatgcggtctaacctctatcggatctgctatagcccctggggccaggaattctccatctgcaactactggcatgatccccaccacgatgacttgtacctcaatgccagcagcttcctggccctgatcaatggggaaagagaccatcccaatgccacagtatggcggaagaactttctgcgtgtgggccacctggtgctgattgggggccctgatgatggtgttattactccctggcagtccagcttctttggtttctatgatgcaaatgagaccgtcctggagatggaggagcaactgcctgccaggcccacccaccagtctgagctgcttctgctgaggctggtctgcttgaagcctcccaggagaaagaagccagcctgtagggtccagcgtcaaagcgaatcatggggtccagggctgagctgtgcactctcttag

SEQ ID NO: 237180 - DNA, 2202 bp, Artificial Sequence
  derived and/or modified sequence
ggaagtggggagaatcaaggcggggaaatcggacttttgggtcgctgggggcaacgaagcctggagaggccttctttccattcccagaatatgtttgctgctttttcctctccccactggcctaaatggatcgctccgcctgtttcctccccagcacctagggcgcaatggaatattccattgcccctcctgtcctgggtctgtgttgcggggaacgctcgcgcggttgccagagaaagccccggacgtgacggatttgcgcgaccccaagcagcccgcccttccccctcccatccgtcattcccctgcgctctctttcctcacccttccccccgccaccgtgggttccagacttgggataagtaaacagcgggtggagcgaggcctacggacccaggccaggtgggagtctgcactcttcaaggggcctgggctgctgctcacgggtattaaagaactccgcgttgttcatggctgaggcgatgcattaggaagatcctggacctagagaacaagtcccccgaacgctgagttggaggcgggacttcgggtgcgcgttggcgggagcatgctggggctctgggggcagcggctccccgcggcgtgggtcctgcttctgttgcctttcctgccgctgctgctgcttgcagcccccgcgccccaccgcgagtcctacaagccggtcatcgtggtgcatgggctcttcgacagctcgtacagcttccgccacctgctggaatacatcaatgagacacaccccgggactgtggtgacagtgctcgatctcttcgatgggagagagagcttgcgacccctgtgggaacaggtgcaagggttccgagaggctgtggtccccatcatggcaaaggcccctcaaggggtgcatctcatctgctactcgcaggggggccttgtgtgccgggctctgctttctgtcatggatgatcacaacgtggattctttcatctccctctcctctccacagatgggacagtatggagacacggactacttgaagtggctgttccccacctccatgcggtctaacctctatcggatctgctatagcccctggggccaggaattctccatctgcaactactggcatgatccccaccacgatgacttgtacctcaatgccagcagcttcctggccctgatcaatggggaaagagaccatcccaatgccacagtatggcggaagaactttctgcgtgtgggccacctggtgctgattgggggccctgatgatggtgttattactccctggcagtccagcttctttggtttctatgatgcaaatgagaccgtcctggagatggaggagcaactggtttatctgcgggattcttttgggttgaagactctattggcccggggggccatagtgaggtgtccaatggccggtatctcccacacagcctggcactccaaccgtaccctttatgagacctgcattgaaccttggctctcctgaggatatattcaggggtccccaggaactcctcggtccagagaccaagtggtggccttggaaagcagatgtcaggctttggtgtgcctgtgaccacctcattgctcccatattatcccccatttttagtagagacggggttttagtagagacttggcctcccagaacccccttcctctgctcctccatgaatgacaattccaggcctcccctacctcatgtcctctcatttgggggattgctccgtgctgtccctttctctcaaggccgaagttgggaagtgagaaaccatgtttttaacttgtggctgcttttgctgctgctgctcctccgtatctggctgtatgggtggagaacccaccccctgcccaccacaggggtctccttccaggccactcaggacatttttagcttctctcctccccatgttcccttttttctctaaagtcccctgacatcagccctcccaactcctaagagggactacccatgagagtggggttctgaggctcccctatggggacagttccgttcttgaagtgtcagtgttggggaatatctgtggcctatgaggcccatctcaggtttggggatcccccagtccctatgatcagtgttggagtacccccctgggagagcctagtttctttgaggccccaggccctcttttaactacctttgaataggtgttatccctgtatttatggaaataaagttccatttcctca

SEQ ID NO: 237181 - DNA, 1474 bp, Artificial Sequence
  derived and/or modified sequence
ggaagtggggagaatcaaggcggggaaatcggactttcgggtcgctgggggcaacgaagcctggagaggccttctttccattcccagaatatgtttgctgctttttcctctccccactggcctaaatggatcgctccgcctgtttcctccccagcacctagggcgcaatggaatattccattgcccctcctgtcctgggtctgtgttgcggggaacgctcgcgcggttgccagagaaagccccggacgtgacggatttgcgcgaccccaagcagcccgcccttccccctcccatccgtcattcccctgcgttctctttcctcacccttccccccgccaccgtgggttccagacttgggataagtaaacagcgggtggagcgaggcctacggacccaggccaggtgggagtctgcactcttcaaggggcctgggctgctgctcacgggtattaaagaactccgcgttgttcatggctgaggcgatgcattaggaagatcctggacctagagaacaagtcccccgaacgctgagttggaggcgggacttcgggtgcgcgttggcgggagcatgctggggctctgggggcagcggctccccgcggcgtgggtcctgcttctgttgcctttcctgccgctgctgctgcttgcagcccccgcgccccaccgcgcgtcctacaagccggtcatcgtggtgcatgggctcttcgacagctcgtacagcttccgccacctgctggaatacatcaatgagacacaccccgggactgtggtgacagtgctcgatctcttcgatgggagagagagcttgcgacccctgtgggaacaggtgcaagggttccgagaggctgtggtccccatcatggcaaaggcccctcaaggggtgcatctcatctgctactcgcaggggggccttgtgtgccgggctctgctttctgtcatggatgatcacaacgtggattctttcatctccctctcctctccacagatgggacagtatggagacacggactacttgaagtggctgttccccacctccatgcggtctaacctctatcggatctgctatagcccctggggccaggaattctccatctgcaactactggcatgatccccaccacgatgacttgtacctcaatgccagcagcttcctggccctgatcaatggggaaagagaccatcccaatgccacagtatggcggaagaactttctgcgtgtgggccacctggtgctgattgggggccctgatgatggtgttattactccctggcagtccagcttctttggtttctatgatgcaaatgagaccgtcctggagatggaggagcaactgcctgccaggcccacccaccagtctgagctgcttctgctgaggctggtctgcttgaagcctcccaggagaaagaagccagcctgtagggtccagcgtcaaagcgaatcatggggtccagggctgagctgtgcactctcttag

SEQ ID NO: 237182 - DNA, 1474 bp, Artificial Sequence
  derived and/or modified sequence
ggaagtggggagaatcaaggcggggaaatcggacttttgggtcgctgggggcaacgaagcctggagaggccttctttccattcccagaatatgtttgctgctttttcctctccccactggcctaaatggatcgctccgcctgtttcctccccagcacctagggcgcaatggaatattccattgcccctcctgtcctgggtctgtgttgcggggaacgctcgcgcggttgccagagaaagccccggacgtgacggatttgcgcgaccccaagcagcccgcccttccccctcccatccgtcattcccctgcgctctctttcctcacccttccccccgccaccgtgggttccagacttgggataagtaaacagcgggtggagcgaggcctacggacccaggccaggtgggagtctgcactcttcaaggggcctgggctgctgctcacgggtattaaagaactccgcgttgttcatggctgaggcgatgcattaggaagatcctggacctagagaacaagtcccccgaacgctgagttggaggcgggacttcgggtgcgcgttggcgggagcatgctggggctctgggggcagcggctccccgcggcgtgggtcctgcttctgttgcctttcctgccgctgctgctgcttgcagcccccgcgccccaccgcgagtcctacaagccggtcatcgtggtgcatgggctcttcgacagctcgtacagcttccgccacctgctggaatacatcaatgagacacaccccgggactgtggtgacagtgctcgatctcttcgatgggagagagagcttgcgacccctgtgggaacaggtgcaagggttccgagaggctgtggtccccatcatggcaaaggcccctcaaggggtgcatctcatctgctactcgcaggggggccttgtgtgccgggctctgctttctgtcatggatgatcacaacgtggattctttcatctccctctcctctccacagatgggacagtatggagacacggactacttgaagtggctgttccccacctccatgcggtctaacctctatcggatctgctatagcccctggggccaggaattctccatctgcaactactggcatgatccccaccacgatgacttgtacctcaatgccagcagcttcctggccctgatcaatggggaaagagaccatcccaatgccacagtatggcggaagaactttctgcgtgtgggccacctggtgctgattgggggccctgatgatggtgttattactccctggcagtccagcttctttggtttctatgatgcaaatgagaccgtcctggagatggaggagcaactgcctgccaggcccacccaccagtctgagctgcttctgctgaggctggtctgcttgaagcctcccaggagaaagaagccagcctgtagggtccagcgtcaaagcgaatcatggggtccagggctgagctgtgcactctcttag

SEQ ID NO: 237183 - DNA, 2202 bp, Artificial Sequence
  derived and/or modified sequence
ggaagtggggagaatcaaggcggggaaatcggactttcgggtcgctgggggcaacgaagcctggagaggccttctttccattcccagaatatgtttgctgctttttcctctccccactggcctaaatggatcgctccgcctgtttcctccccagcacctagggcgcaatggaatattccattgcccctcctgtcctgggtctgtgttgcggggaacgctcgcgcggttgccagagaaagccccggacgtgacggatttgcgcgaccccaagcagcccgcccttccccctcccatccgtcattcccctgcgttctctttcctcacccttccccccgccaccgtgggttccagacttgggataagtaaacagcgggtggagcgaggcctacggacccaggccaggtgggagtctgcactcttcaaggggcctgggctgctgctcacgggtattaaagaactccgcgttgttcatggctgaggcgatgcattaggaagatcctggacctagagaacaagtcccccgaacgctgagttggaggcgggacttcgggtgcgcgttggcgggagcatgctggggctctgggggcagcggctccccgcggcgtgggtcctgcttctgttgcctttcctgccgctgctgctgcttgcagcccccgcgccccaccgcgcgtcctacaagccggtcatcgtggtgcatgggctcttcgacagctcgtacagcttccgccacctgctggaatacatcaatgagacacaccccgggactgtggtgacagtgctcgatctcttcgatgggagagagagcttgcgacccctgtgggaacaggtgcaagggttccgagaggctgtggtccccatcatggcaaaggcccctcaaggggtgcatctcatctgctactcgcaggggggccttgtgtgccgggctctgctttctgtcatggatgatcacaacgtggattctttcatctccctctcctctccacagatgggacagtatggagacacggactacttgaagtggctgttccccacctccatgcggtctaacctctatcggatctgctatagcccctggggccaggaattctccatctgcaactactggcatgatccccaccacgatgacttgtacctcaatgccagcagcttcctggccctgatcaatggggaaagagaccatcccaatgccacagtatggcggaagaactttctgcgtgtgggccacctggtgctgattgggggccctgatgatggtgttattactccctggcagtccagcttctttggtttctatgatgcaaatgagaccgtcctggagatggaggagcaactggtttatctgcgggattcttttgggttgaagactctattggcccggggggccatagtgaggtgtccaatggccggtatctcccacacagcctggcactccaaccgtaccctttatgagacctgcattgaaccttggctctcctgaggatatattcaggggtccccaggaactcctcggtccagagaccaagtggtggccttggaaagcagatgtcaggctttggtgtgcctgtgaccacctcattgctcccatattatcccccatttttagtagagacggggttttagtagagacttggcctcccagaacccccttcctctgctcctccatgaatgacaattccaggcctcccctacctcatgtcctctcatttgggggattgctccgtgctgtccctttctctcaaggccgaagttgggaagtgagaaaccatgtttttaacttgtggctgcttttgctgctgctgctcctccgtatctggctgtatgggtggagaacccaccccctgcccaccacaggggtctccttccaggccactcaggacatttttagcttctctcctccccatgttcccttttttctctaaagtcccctgacatcagccctcccaactcctaagagggactacccatgagagtggggttctgaggctcccctatggggacagttccgttcttgaagtgtcagtgttggggaatatctgtggcctatgaggcccatctcaggtttggggatcccccagtccctatgatcagtgttggagtacccccctgggagagcctagtttctttgaggccccaggccctcttttaactacctttgaataggtgttatccctgtatttatggaaataaagttccatttcctca

SEQ ID NO: 237184 - DNA, 927 bp, Artificial Sequence
  derived and/or modified sequence
atgaagtcttgtggcagcatgttgggcctatgtggccaaagactgcccgcagcttgggtcctcctcttattgccatttctgcctctgctgctgctggccgctcccgcaccgcatagagccagttacaagcccgttatagtcgtccatggtttgttcgattctagctatagttttcggcaccttcttgagtatatcaacgagacccatcccggaactgtcgtcaccgtccttgacctctttgatgggcgagaaagcctgagaccactatgggagcaggtccaggggtttagagaggccgtcgttccaatcatggccaaagctccccagggggtgcatctgatatgttattctcaagggggactggtttgccgggcactgttatcagtcatggatgaccataatgtcgatagcttcataagcctgtcaagtccacaaatgggacagtatggagataccgattacctcaagtggcttttccccacaagcatgcgatcaaatctgtatcggatttgttattcaccgtggggacaagaattttcaatttgcaattattggcacgaccctcaccatgatgatctctacctgaatgcgtcctcttttctggctctcattaatggggaacgggatcaccctaacgcgaccgtctggaggaagaatttcttaagggttggacacctcgtcctgataggaggacccgacgacggcgtcatcacgccgtggcagagctccttctttgggttttacgatgccaatgagaccgtactggagatggaggagcagttagtttatctgcgcgattcttttggattgaaaaccctgctggcgagaggggctattgtccgttgcccgatggctggaataagccacacagcttggcactctaaccggacactgtatgaaacctgtatcgagccatggctgagctag

SEQ ID NO: 237185 - DNA, 927 bp, Artificial Sequence
  derived and/or modified sequence
atgaaatcgtgcgggagcatgctcggcttatgggggcagcggctgccagcagcgtgggtgttactccttctcccgtttttgccattgttactgttagctgcgcctgctcctcatcgggagagctacaaacccgtgattgttgttcatggattgtttgatagcagctactcctttcgtcacctgctggagtacattaacgagacgcatcctggaaccgtagtgaccgtcctcgatctttttgatggtcgagagtccctgaggcccctgtgggaacaggtgcaggggttccgggaggccgtggtcccaatcatggccaaagccccacagggtgttcatctgatttgttattcacaaggcggtctggtctgcagagctttgcttagcgtgatggatgatcacaatgtcgacagttttatctcattgagtagccctcagatgggccagtatggcgacaccgattacttgaaatggctgttccctacatcaatgagatctaatctctataggatttgctactctccctgggggcaggaattctcgatctgtaattactggcacgaccctcaccacgatgatttgtatcttaatgcaagcagctttctggccctaattaatggagaaagagaccatcccaacgctactgtttggcgaaagaacttcttgcgcgtgggtcacctggtgctgatcggtggcccagatgatggagtgattacgccctggcagagctcattttttggattctacgatgctaacgagacagtgttggagatggaagagcagctcgtgtatttgcgagattccttcggcctgaagacccttttggcgcgaggggctatagtacgctgtccaatggccggtattagtcacaccgcatggcattctaacagaaccctttatgaaacttgtattgagccctggctctcctag

SEQ ID NO: 237186 - DNA, 927 bp, Artificial Sequence
  derived and/or modified sequence
atgaaatcctgtggctcaatgcttggcctgtggggtcagagactccccgctgcgtgggtcttgctgctgctgcccttcctgcccctcctgcttctggccgctcctgcgccacaccgggcaagctacaaacctgtcatagtggtccacggcctatttgatagttcctacagcttccggcatcttcttgagtacatcaatgagactcatcctgggacagtggttaccgtgcttgacctctttgacggccgagaatccctccgaccgctgtgggaacaagtgcagggatttagggaggctgttgtccccatcatggctaaggctccccagggcgtccacttaatttgttattcccagggtggcctagtctgcagagcattattgagcgtgatggacgaccacaatgtcgactctttcatttctttatcatcccctcagatgggacagtatggtgacactgactaccttaagtggctttttcctacgagtatgcgcagtaatctgtatcgcatttgctacagcccatgggggcaggagttctctatctgcaactactggcacgatcctcaccatgatgacctgtacttgaacgcttcctcttttctcgctctcataaacggcgaacgcgaccatccaaatgcgaccgtttggagaaaaaactttctgcgcgtgggtcatctcgtcctcattggaggtccagatgacggcgtgataacaccatggcagagctcatttttcggtttttacgatgcaaatgagaccgtattggagatggaggaacagttagtatatctgcgggactcatttggtttgaagaccctgttagctcgcggagccatcgtgagatgcccaatggcgggaatatctcacaccgcctggcattcgaaccgaactttatatgaaacctgtatagaaccctggctttcctag

SEQ ID NO: 237187 - DNA, 927 bp, Artificial Sequence
  derived and/or modified sequence
atgaagtcctgcggcagcatgttgggcctgtggggccagcggcttcctgcagcttgggtactgctgcttcttcccttcctacctttattgctcctggcagcacccgctcctcatcgggcatcctataaacccgtaattgtggtccatggtctgtttgattcaagctatagctttaggcatctcctcgaatacattaacgaaactcatcccggtaccgtagtcacagtcctggacctgttcgatggccgtgaaagtctgagaccactctgggagcaggtccaggggttccgcgaagccgtcgttcctattatggccaaggcaccccaaggcgtacacctgatatgctacagccaggggggactcgtgtgtcgtgcattactgtcagtgatggacgaccacaacgtcgattcattcatctcactgtcttccccgcaaatgggacagtacggggatactgattatcttaaatggctgttccctacctctatgagaagtaatctgtatcggatttgctactcaccctgggggcaagagtttagcatttgcaattattggcatgatccacatcacgatgacttatacctgaatgcctcgagctttctggccttgataaatggggagagggaccaccctaacgcaacagtgtggaggaagaattttcttcgggtggggcacttggttttaattggaggccctgacgacggcgttatcactccatggcaaagctccttttttggcttctatgatgctaatgagaccgttctggagatggaagagcaattagtgtacctgcgcgattccttcggcctcaagactttgctagctcggggagcaatagtcaggtgtcccatggccggaatttcccataccgcctggcattccaacaggacactgtacgagacgtgcatagaaccctggctgtcatag

SEQ ID NO: 237188 - DNA, 927 bp, Artificial Sequence
  derived and/or modified sequence
atgaaaagttgtgggtccatgctaggtctatggggacagcggttgcctgcagcttgggtgctcctactgctcccatttctgcccctgctgctactggccgctcccgcaccacaccgagcatcgtacaaaccggtaatcgtggtccacggattatttgatagttcctattcatttcgtcatcttctggagtacatcaacgaaacccaccccggtacggttgttaccgtgctggatcttttcgacgggcgtgaatctttgcggcctctctgggaacaggtgcaaggatttcgggaggccgtcgtgcctataatggcaaaagcccctcagggtgtgcacctcatctgttactcacaagggggactggtgtgtagagccctgcttagcgtgatggatgatcataacgtggattcctttatctctctctcttcccctcaaatgggtcagtatggtgataccgactacctgaagtggcttttccctactagcatgcgcagcaatctctacagaatctgctatagcccatggggccaggaattctctatctgcaattactggcacgaccctcatcacgatgatctgtatctgaatgcctctagctttcttgccctcattaatggagagagggatcaccccaacgccacagtgtggcgcaagaattttctgagggtcggacatcttgtgctgattggaggcccagacgacggcgttattaccccatggcagtcatctttctttggtttctacgacgcgaacgaaacagtcctggagatggaggagcagctggtgtatctgcgagactcattcggccttaaaaccctgctcgcccgaggagcaatagtgcgctgccctatggccggaatctcgcataccgcatggcactccaatagaactctgtatgagacatgcatagaaccgtggttatcatag

SEQ ID NO: 237189 - DNA, 927 bp, Artificial Sequence
  derived and/or modified sequence
atgaagagctgcgggtctatgttgggactgtggggtcaaagattacctgccgcttgggtcttgctcttattaccattcctacccctactgctgttggccgctcccgcacctcatagggcctcctacaaaccagtgatcgtcgttcacggcttgttcgactcctcatacagctttcggcatctcctggagtatataaacgagactcacccaggaactgttgttaccgtcttagatttgttcgacggaagagaatctctgcggcctctttgggagcaggtgcagggcttccgcgaggcagtcgtccctatcatggcgaaagcccctcagggtgtgcacctcatttgctacagccagggtggattagtctgccgcgctcttctcagcgtgatggacgaccacaacgtcgattcctttatcagcctgagttcaccccagatgggtcagtatggggacacggactacttaaagtggttgttcccaaccagtatgcgtagcaacctctatcgaatatgttactctccttggggccaggaattttctatttgcaattactggcatgatcctcaccacgatgacttgtacttgaacgcaagctcctttctggctctgattaacggggaaagggaccatcccaacgctaccgtttggcgcaaaaatttccttcgcgtgggtcacttggtgctaattggaggcccagacgacggtgtgatcacaccgtggcaatcttctttttttggattctatgatgcgaacgagactgtcctggagatggaagagcagctggtttacctaagggattcgtttggactcaagacactgctggcgaggggagctatcgtcagatgtccgatggctggtatatcccacaccgcatggcatagcaatagaacgttgtatgagacatgcatagagccatggctctcctag

SEQ ID NO: 237190 - DNA, 729 bp, Artificial Sequence
  derived and/or modified sequence
atgaaaagctgcggctccatgctggggctgtgggggcagagactgccagcagcctgggtgctcttattactcccttttctgcctcttctgttgctagccgctcccgcacctcaccgggaatcttacaaacccgtcatcgtagtccatggtttgtttgattcatcatacagttttcgacatcttcttgaatatattaatgaaacacacccgggaaccgtggtcactgtgctggatctcttcgacggacgggagtcactgcggccattatgggagcaagtccaagggtttcgtgaagcagttgtgccaattatggcaaaggcccctcagggggtgcatctgatctgttattcacaaggagggttggtctgccgggctctgctgtccgtgatggacgaccataacgttgattcctttatcagcctttcctctccgcagatgggacaatacggagacaccgactatcttaagtggctcttccccacctctatgcgttccaacctatacagaatctgctactctccatggggacaggagttctcgatttgcaactactggcatgatcctcaccatgatgatctgtacctgaatgcgagtagcttcctggcactcatcaacggcgaaagagatcatccaaacgctactgtatggcgcaaaaattttctgagagttggacatttggtgctgatcggcggacccgacgacggggtgattacgccctggcagtcatag

SEQ ID NO: 237191 - DNA, 927 bp, Artificial Sequence
  derived and/or modified sequence
atgaaatcatgtggatctatgcttggcctgtggggacagaggctccctgctgcttgggtcctcctcctgctcccattcctcccactcctcttgctcgcggctcccgcaccacaccgggctagctacaaaccggtgattgtggttcacggcctgttcgatagttcttatagctttagacacctactcgagtacatcaacgaaacccaccccggtacggtcgttaccgtcctggatctgtttgacggccgtgagagtctccggcctctttgggagcaagtgcagggtttcagagaggccgtcgtgccaatcatggccaaagctccacaaggcgtgcacctgatctgttattcacagggcggactggtttgtcgggcacttctcagcgttatggatgaccacaatgttgacagctttatttcgctgtcctcccctcagatgggacaatacggggatactgactatctgaagtggctgtttccaacgagtatgaggtctaacttataccggatctgttacagcccctgggggcaggaattcagcatttgcaattattggcacgacccccatcatgatgacctctatcttaatgcttcctcattcttggcgctgataaatggcgaaagagatcaccctaatgcaaccgtgtggcgaaagaactttctgcgcgtgggccatctcgtgttaatcggagggcctgacgatggcgttatcaccccctggcagagcagctttttcggattttatgatgcgaacgaaacagtattggaaatggaggaacagcttgtgtatttgagagacagcttcggactgaagaccctcctcgcccgaggagcaattgtgaggtgcccaatggctggaatcagccatactgcttggcactccaaccgaactttatatgaaacctgtatcgagccttggctatcttag

SEQ ID NO: 237192 - DNA, 927 bp, Artificial Sequence
  derived and/or modified sequence
atgaagagctgcggcagcatgctgggcctgtgcggccagagactgcccgccgcctgggtgctgctgctgctgcccttcctgcccctgctgctgctggccgcccccgccccccacagagccagctacaagcccgtgatcgtggtgcacggcctgttcgacagcagctacagcttcagacacctgctggagtacatcaacgagacccaccccggcaccgtggtgaccgtgctggacctgttcgacggcagagagagcctgagacccctgtgggagcaggtgcagggcttcagagaggccgtggtgcccatcatggccaaggccccccagggcgtgcacctgatctgctacagccagggcggcctggtgtgcagagccctgctgagcgtgatggacgaccacaacgtggacagcttcatcagcctgagcagcccccagatgggccagtacggcgacaccgactacctgaagtggctgttccccaccagcatgagaagcaacctgtacagaatctgctacagcccctggggccaggagttcagcatctgcaactactggcacgacccccaccacgacgacctgtacctgaacgccagcagcttcctggccctgatcaacggcgagagagaccaccccaacgccaccgtgtggagaaagaacttcctgagagtgggccacctggtgctgatcggcggccccgacgacggcgtgatcaccccctggcagagcagcttcttcggcttctacgacgccaacgagaccgtgctggagatggaggagcagctggtgtacctgagagacagcttcggcctgaagaccctgctggccagaggcgccatcgtgagatgccccatggccggcatcagccacaccgcctggcacagcaacagaaccctgtacgagacctgcatcgagccctggctgagctag

SEQ ID NO: 237193 - DNA, 927 bp, Artificial Sequence
  derived and/or modified sequence
atgaagagctgcggcagcatgctgggcctgtggggccagagactgcccgccgcctgggtgctgctgctgctgcccttcctgcccctgctgctgctggccgcccccgccccccacagagagagctacaagcccgtgatcgtggtgcacggcctgttcgacagcagctacagcttcagacacctgctggagtacatcaacgagacccaccccggcaccgtggtgaccgtgctggacctgttcgacggcagagagagcctgagacccctgtgggagcaggtgcagggcttcagagaggccgtggtgcccatcatggccaaggccccccagggcgtgcacctgatctgctacagccagggcggcctggtgtgcagagccctgctgagcgtgatggacgaccacaacgtggacagcttcatcagcctgagcagcccccagatgggccagtacggcgacaccgactacctgaagtggctgttccccaccagcatgagaagcaacctgtacagaatctgctacagcccctggggccaggagttcagcatctgcaactactggcacgacccccaccacgacgacctgtacctgaacgccagcagcttcctggccctgatcaacggcgagagagaccaccccaacgccaccgtgtggagaaagaacttcctgagagtgggccacctggtgctgatcggcggccccgacgacggcgtgatcaccccctggcagagcagcttcttcggcttctacgacgccaacgagaccgtgctggagatggaggagcagctggtgtacctgagagacagcttcggcctgaagaccctgctggccagaggcgccatcgtgagatgccccatggccggcatcagccacaccgcctggcacagcaacagaaccctgtacgagacctgcatcgagccctggctgagctag

SEQ ID NO: 237194 - DNA, 927 bp, Artificial Sequence
  derived and/or modified sequence
atgaagagctgcggcagcatgctgggcctgtggggccagagactgcccgccgcctgggtgctgctgctgctgcccttcctgcccctgctgctgctggccgcccccgccccccacagagccagctacaagcccgtgatcgtggtgcacggcctgttcgacagcagctacagcttcagacacctgctggagtacatcaacgagacccaccccggcaccgtggtgaccgtgctggacctgttcgacggcagagagagcctgagacccctgtgggagcaggtgcagggcttcagagaggccgtggtgcccatcatggccaaggccccccagggcgtgcacctgatctgctacagccagggcggcctggtgtgcagagccctgctgagcgtgatggacgaccacaacgtggacagcttcatcagcctgagcagcccccagatgggccagtacggcgacaccgactacctgaagtggctgttccccaccagcatgagaagcaacctgtacagaatctgctacagcccctggggccaggagttcagcatctgcaactactggcacgacccccaccacgacgacctgtacctgaacgccagcagcttcctggccctgatcaacggcgagagagaccaccccaacgccaccgtgtggagaaagaacttcctgagagtgggccacctggtgctgatcggcggccccgacgacggcgtgatcaccccctggcagagcagcttcttcggcttctacgacgccaacgagaccgtgctggagatggaggagcagctggtgtacctgagagacagcttcggcctgaagaccctgctggccagaggcgccatcgtgagatgccccatggccggcatcagccacaccgcctggcacagcaacagaaccctgtacgagacctgcatcgagccctggctgagctag

SEQ ID NO: 237195 - DNA, 729 bp, Artificial Sequence
  derived and/or modified sequence
atgaagagctgcggcagcatgctgggcctgtggggccagagactgcccgccgcctgggtgctgctgctgctgcccttcctgcccctgctgctgctggccgcccccgccccccacagagagagctacaagcccgtgatcgtggtgcacggcctgttcgacagcagctacagcttcagacacctgctggagtacatcaacgagacccaccccggcaccgtggtgaccgtgctggacctgttcgacggcagagagagcctgagacccctgtgggagcaggtgcagggcttcagagaggccgtggtgcccatcatggccaaggccccccagggcgtgcacctgatctgctacagccagggcggcctggtgtgcagagccctgctgagcgtgatggacgaccacaacgtggacagcttcatcagcctgagcagcccccagatgggccagtacggcgacaccgactacctgaagtggctgttccccaccagcatgagaagcaacctgtacagaatctgctacagcccctggggccaggagttcagcatctgcaactactggcacgacccccaccacgacgacctgtacctgaacgccagcagcttcctggccctgatcaacggcgagagagaccaccccaacgccaccgtgtggagaaagaacttcctgagagtgggccacctggtgctgatcggcggccccgacgacggcgtgatcaccccctggcagagctag

SEQ ID NO: 237196 - protein, 865 aa, Artificial Sequence
  derived and/or modified sequence
MAQLERSAISGFSSKSRRNSFAYDVKREVYNEETFQQEHKRKASSSGNMNINITTFRHHVQCRCSWHRFLRCVLTIFPFLEWMCMYRLKDWLLGDLLAGISVGLVQVPQGLTLSLLARQLIPPLNIAYAAFCSSVIYVIFGSCHQMSIGSFFLVSALLINVLKVSPFNNGQLVMGSFVKNEFSAPSYLMGYNKSLSVVATTTFLTGIIQIIGFTVIANKISMATETSQTLIDMIPYSFLLPVTPDFSLLPKIILQAFSLSLVSSFLLIFLGKKIASLHNYSVNSNQDLIAIGLCNVVSSFFRSCVFTGAIARTIIQDKSGGRQQFASLVGAGVMLLLMVKMGHFFYTLPNAVLAGIILSNVIPYLETISNLPSLWRQDQYDCALWMMTFSSSIFLGLDIGLIISVVSAFFITTVRSHRAKILLLGQIPNTNIYRSINDYREIITIPGVKIFQCCSSITFVNVYYLKHKLLKEVDMVKVPLKEEEIFSLFNSSDTNLQGGKICRCFCNCDDLEPLPRILYTERFENKLDPEASSINLIHCSHFESMNTSQTASEDQVPYTVSSVSQKNQGQQYEEVEEVWLPNNSSRNSSPGLPDVAESQGRRSLIPYSDASLLPSVHTIILDFSMVHYVDSRGLVVLRQICNAFQNANILILIAGCHSSIVRAFERNDFFDAGITKTQLFLSVHDAVLFALSRKVIGSSELSIDESETVIRETYSETDKNDNSRYKMSSSFLGSQKNVSPGFIKIQQPVEEESELDLELESEQEAGLGLDLDLDRELEPEMEPKAETETKTQTEMEPQPETEPEMEPNPKSRPRAHTFPQQRYWPMYHPSMASTQSQTQTRTWSVERRRHPMDSYSPEGNSNEDV

SEQ ID NO: 237197 - DNA, 2598 bp, Artificial Sequence
  derived and/or modified sequence
atggcccagctggagagaagcgccatcagcggcttcagcagcaagagcagaagaaacagcttcgcctacgacgtgaagagagaggtgtacaacgaggagaccttccagcaggagcacaagagaaaggccagcagcagcggcaacatgaacatcaacatcaccaccttcagacaccacgtgcagtgcagatgcagctggcacagattcctgagatgcgtgctgaccatcttccccttcctggagtggatgtgcatgtacagactgaaggactggctgctgggcgacctgctggccggcatcagcgtgggcctggtgcaggtgccccagggcctgaccctgagcctgctggccagacagctgatcccccccctgaacatcgcctacgccgccttctgcagcagcgtgatctacgtgatcttcggcagctgccaccagatgagcatcggcagcttcttcctggtgagcgccctgctgatcaacgtgctgaaggtgagccccttcaacaacggccagctggtgatgggcagcttcgtgaagaacgagttcagcgcccccagctacctgatgggctacaacaagagcctgagcgtggtggccaccaccaccttcctgaccggcatcatccagatcatcggcttcaccgtgatcgccaacaagatcagcatggccaccgagaccagccagaccctgatcgacatgatcccctacagcttcctgctgcccgtgacccccgacttcagcctgctgcccaagatcatcctgcaggccttcagcctgagcctggtgagcagcttcctgctgatcttcctgggcaagaagatcgccagcctgcacaactacagcgtgaacagcaaccaggacctgatcgccatcggcctgtgcaacgtggtgagcagcttcttcagaagctgcgtgttcaccggcgccatcgccagaaccatcatccaggacaagagcggcggcagacagcagttcgccagcctggtgggcgccggcgtgatgctgctgctgatggtgaagatgggccacttcttctacaccctgcccaacgccgtgctggccggcatcatcctgagcaacgtgatcccctacctggagaccatcagcaacctgcccagcctgtggagacaggaccagtacgactgcgccctgtggatgatgaccttcagcagcagcatcttcctgggcctggacatcggcctgatcatcagcgtggtgagcgccttcttcatcaccaccgtgagaagccacagagccaagatcctgctgctgggccagatccccaacaccaacatctacagaagcatcaacgactacagagagatcatcaccatccccggcgtgaagatcttccagtgctgcagcagcatcaccttcgtgaacgtgtactacctgaagcacaagctgctgaaggaggtggacatggtgaaggtgcccctgaaggaggaggagatcttcagcctgttcaacagcagcgacaccaacctgcagggcggcaagatctgcagatgcttctgcaactgcgacgacctggagcccctgcccagaatcctgtacaccgagagattcgagaacaagctggaccccgaggccagcagcatcaacctgatccactgcagccacttcgagagcatgaacaccagccagaccgccagcgaggaccaggtgccctacaccgtgagcagcgtgagccagaagaaccagggccagcagtacgaggaggtggaggaggtgtggctgcccaacaacagcagcagaaacagcagccccggcctgcccgacgtggccgagagccagggcagaagaagcctgatcccctacagcgacgccagcctgctgcccagcgtgcacaccatcatcctggacttcagcatggtgcactacgtggacagcagaggcctggtggtgctgagacagatctgcaacgccttccagaacgccaacatcctgatcctgatcgccggctgccacagcagcatcgtgagagccttcgagagaaacgacttcttcgacgccggcatcaccaagacccagctgttcctgagcgtgcacgacgccgtgctgttcgccctgagcagaaaggtgatcggcagcagcgagctgagcatcgacgagagcgagaccgtgatcagagagacctacagcgagaccgacaagaacgacaacagcagatacaagatgagcagcagcttcctgggcagccagaagaacgtgagccccggcttcatcaagatccagcagcccgtggaggaggagagcgagctggacctggagctggagagcgagcaggaggccggcctgggcctggacctggacctggacagagagctggagcccgagatggagcccaaggccgagaccgagaccaagacccagaccgagatggagccccagcccgagaccgagcccgagatggagcccaaccccaagagcagacccagagcccacaccttcccccagcagagatactggcccatgtaccaccccagcatggccagcacccagagccagacccagaccagaacctggagcgtggagagaagaagacaccccatggacagctacagccccgagggcaacagcaacgaggacgtgtag

SEQ ID NO: 237198 - DNA, 2598 bp, Artificial Sequence
  derived and/or modified sequence
atggctcagctcgagaggtctgccatatctggttttagctccaaaagcagacgaaattcattcgcatatgacgtgaagagggaggtgtacaacgaggaaaccttccaacaggagcataaacggaaagcttcatcctcggggaacatgaacatcaacattactactttccgccatcatgtgcagtgtcggtgcagctggcaccgcttccttagatgcgtattaacgatcttcccattcctcgaatggatgtgcatgtaccgtctgaaagactggttgctgggcgatctgcttgccggtatcagcgtcggtcttgtccaggtgccccagggactgaccttatcgctcctggcgcgccagttaatccccccactaaatatcgcatacgctgctttctgctcaagcgtgatatacgtgattttcggaagctgccaccagatgtccatcgggagtttcttcctggtgagcgccttactgatcaacgtcctgaaggttagcccattcaacaatggccaattggttatggggagtttcgtgaaaaacgaatttagcgcgccaagctaccttatggggtataataagtcattatcagtggtcgctacgacgacctttctcaccggtattattcaaattatcggctttaccgtgatcgccaacaagatctctatggccaccgaaaccagtcaaacactgattgacatgattccctatagttttctcctccccgtgacgcccgattttagtcttttgcccaagattattctccaggctttttctctgtcgctggtgagtagttttcttctgatcttcctagggaagaaaattgcctctctgcacaattattctgtgaacagcaatcaggatttgatagcgatcggcttgtgcaacgtggtgagtagcttctttagaagctgtgtctttacaggcgcaatagcccgaacgataatccaagataagtcaggaggacgacaacagttcgcttcgctagtaggtgccggtgtgatgcttttgcttatggtgaagatgggacacttcttttacactctgcccaatgctgtgctggcggggataatcttaagcaatgtaatcccatacctggaaacaatctcaaacctgccttcactctggaggcaagaccagtatgactgcgccctgtggatgatgacgttttctagcagcatctttctaggactagacataggcttgatcatttcagtcgtgagcgccttttttatcacaacagtgcggtcccatagagctaagatccttcttttgggacagatccctaatacgaacatctatcgatccataaatgactatagggaaatcattacgataccaggcgtcaaaatattccagtgttgctcaagtataaccttcgtcaatgtgtattatctgaagcacaaactcctcaaggaggtggacatggtgaaggtccctttgaaggaggaggagatttttagcttattcaattcttccgacactaatctgcagggaggcaagatttgtcgttgcttctgcaattgcgacgatctggagccgctgccgcgcatcctgtataccgagagattcgagaacaagctcgatcccgaggcttctagcattaacctgatccattgcagccactttgaatccatgaatacatcacagacagcttcagaggatcaagtgccatacaccgtgagcagcgtcagccagaaaaatcaaggccagcagtatgaggaggtcgaggaggtatggctgcccaataacagcagccgtaacagctcccctggcctgcctgacgtagctgaatcgcaaggtcggcgtagtctgattccttatagtgacgcctccttactcccgtccgtacacacgatcatcttggacttttcaatggtacactatgtggactccaggggactagtagtgctccggcaaatttgtaacgctttccagaacgccaacattctgattctcattgctgggtgccactcatcaatcgtccgggccttcgaaaggaatgatttcttcgatgccggtattaccaaaacccagttgttcctgagcgtgcacgatgccgtgctgtttgcactctctcgcaaggttattggctcgtccgagctgtctatcgacgagtccgagacggttattcgcgagacatactctgagaccgataagaacgataacagcagatacaaaatgtcctcgtcctttctgggatcacaaaaaaatgtgtctcctggattcatcaaaatccagcagcctgttgaagaagaaagtgaactggacctggagctcgaatcagagcaggaggccggcctgggcctggacctggacctggaccgcgagctcgagcccgagatggaacctaaggccgaaacagagaccaaaacccagactgaaatggaacctcaaccagaaaccgaacccgagatggagcccaaccccaagagcaggcctcgcgcacacacattccctcagcagcggtattggcccatgtaccacccatcaatggcgtcgactcaatcacagactcagacgcgtacgtggtcagttgaaaggcgaagacatcctatggattcatactcacctgaggggaattctaacgaggacgtgtag

SEQ ID NO: 237199 - DNA, 2598 bp, Artificial Sequence
  derived and/or modified sequence
atggcccagctggagaggtctgccatcagcggcttcagcagcaagagcagaagaaacagctttgcctatgatgtgaagcgggaggtgtacaatgaggagaccttccagcaggagcacaagaggaaggccagcagcagcggcaacatgaacatcaacatcaccaccttccgccaccacgtgcagtgccgctgctcctggcaccgcttcctgcgctgtgtgctgaccatcttccccttcctggagtggatgtgcatgtaccgcctgaaggactggctgctgggggacctgctggccggcatctctgtgggcctggtgcaggtgccccagggcctgaccctgagcctgctggcccggcagctgatcccccccctgaacatcgcctatgctgccttctgcagcagcgtcatctacgtgatcttcggcagctgccaccagatgagcatcggcagcttcttcctggtgtctgccctgctgatcaacgtgctgaaggtgagccccttcaacaacggccagctggtgatgggcagctttgtgaagaatgagttcagcgcccccagctacctgatgggctacaacaagagcctgtctgtggtggccaccaccaccttcctgaccggcatcatccagatcatcggcttcaccgtcatcgccaacaagatctccatggccacagagaccagccagaccctgattgacatgatcccctacagcttcctgctgcctgtgaccccagacttcagcctgctgcccaagatcatcctgcaggccttcagcctgagcctggtgagcagcttcctgctgatcttcctgggcaagaagatcgccagcctgcacaactacagcgtgaacagcaaccaggacctgattgccatcggcctgtgcaatgtggtgtcctccttcttccgcagctgtgtgttcaccggggccatcgcccggaccatcatccaggacaagagcggcggccggcagcagtttgccagcctggtgggcgccggcgtgatgctgctgctgatggtgaagatgggccacttcttctacaccctgcccaatgctgtgctggccggcatcatcctgagcaatgtcatcccctacctggagaccatcagcaacctgcccagcctgtggaggcaggaccagtatgactgtgccctgtggatgatgaccttcagcagcagcatcttcctgggcctggacatcggcctcatcatctctgtggtgtctgccttcttcatcaccaccgtgcgcagccaccgggccaagatcctgctgctgggccagatccccaacaccaacatctaccgcagcatcaatgactaccgggagatcatcaccatccctggggtgaagatcttccagtgctgcagcagcatcacctttgtgaatgtgtactacctgaagcacaagctgctgaaggaggtggacatggtgaaggtgcccctgaaggaggaggagatcttcagcctcttcaacagcagtgacaccaacctgcagggcggcaagatctgccgctgcttctgcaactgtgatgacctggagcccctgccccgcatcctgtacacagaaagatttgagaacaagctggaccctgaggccagcagcatcaacctgatccactgcagccactttgagagcatgaacaccagccagacagccagcgaggaccaggtgccctacacagtgtcctctgtgtcccagaagaaccagggccagcagtatgaggaggtggaggaggtgtggctgcccaacaacagcagcaggaacagcagccctggcctgcctgatgtggccgagagccagggcagaagaagcctcatcccctacagtgatgccagcctgctgcccagcgtgcacaccatcatcctggacttctccatggtgcactacgtggacagccggggcctggtggtgctgcggcagatctgcaatgccttccagaatgccaacatcctgatcctgattgctggctgccacagcagcatcgtgcgggcctttgaaagaaatgacttctttgatgctggcatcaccaagacccagctgttcctgtctgtgcatgatgctgtgctgtttgccctgagcaggaaggtgattggcagcagcgagctgagcattgatgagagcgagaccgtcatccgggagacctacagcgagacagacaagaatgacaacagccgctacaagatgagcagcagcttcctgggcagccagaagaatgtgtccccaggcttcatcaagatccagcagcctgtggaggaggagagcgagctggacctggagctggagagcgagcaggaggccggcctgggcctggacctggacctggaccgggagctggagcctgagatggagcccaaggccgagacagagaccaagacccagacagagatggagccccagcctgagacagagcctgagatggagcccaaccccaagagccggccccgggcccacaccttcccccagcagcgctactggcccatgtaccaccccagcatggccagcacccagagccagacccagaccaggacctggagcgtggagcggcggcggcaccccatggacagctacagccctgagggcaacagcaatgaagatgtgtag

SEQ ID NO: 237200 - DNA, 2598 bp, Artificial Sequence
  derived and/or modified sequence
atggcccagctggagcggagcgccatcagcggcttcagcagcaagtcccgccgaaactcgttcgcatacgacgtgaagagggaagtttacaatgaagaaacatttcaacaggagcacaaaaggaaggctagcagcagtggtaatatgaatattaatattaccacttttcggcatcatgtgcagtgcaggtgcagttggcataggttcctccgatgcgtgctcaccatcttcccatttttggaatggatgtgcatgtatcggctgaaggattggcttctcggggacttactcgccggcatcagtgtgggcctcgtccaggtgccccagggcctcaccctgtctcttctggcaaggcagttaatccctccactgaatattgcctacgccgcattctgtagttccgttatctacgtgattttcggaagttgtcatcagatgtcaatcgggagctttttcctcgtgtcagcactgctaatcaacgttctcaaggtttcaccgtttaataatggtcaattagtgatgggatcattcgtgaagaacgagttcagtgcgccttcctacttgatggggtacaataaatcactcagcgtggtagccacaactaccttcctgaccggcatcatccagattatcggttttactgtaattgccaacaaaataagcatggctaccgaaacttcccagactttgattgatatgatcccatattccttcctcttgccagtgactccggacttttctctcctgccaaagatcatactccaggccttctcactgagcctcgtcagtagttttctccttatctttctggggaagaaaattgcatcccttcacaattactctgttaatagcaatcaagacctaattgccattggtctgtgtaatgtggtgagttctttctttcgttcatgtgtattcactggagctattgcccggaccatcatccaggataagagtggagggcggcagcagtttgcaagcttggttggagcaggagtgatgctcttacttatggtgaagatgggacattttttttataccctacctaacgcggtgttagccggaatcattctttcgaatgtcataccataccttgagacaatcagcaacctcccttccctgtggcggcaagaccaatatgactgtgccctgtggatgatgaccttttcttcaagtatctttctaggtttagacattggcctaattatctccgttgtgagcgcttttttcattactaccgtgagatctcacagagctaagatcttgctgctggggcagatccccaatactaacatctaccggtctatcaacgactaccgcgaaataatcaccattcccggcgttaagattttccagtgttgcagctccatcactttcgtgaatgtgtattatctgaaacacaagctcctcaaagaagtggatatggtgaaggtgccactcaaggaagaagaaatttttagtttgttcaattcaagcgatactaatttgcagggtggaaaaatttgcaggtgcttctgtaactgcgacgatctggaacctctgccccggatactgtacacggagaggttcgagaacaaactggacccagaagcctcttcgattaatctcatacattgtagccactttgaatctatgaacacgagccagacagcttccgaggaccaggtcccctatacggtatccagcgtctcccaaaaaaaccagggccagcagtacgaggaagtggaagaagtgtggctgcccaataattctagccgaaatagctctccaggacttcccgacgttgcggagagccaggggcggagaagtctaatcccatatagtgatgcatccctgctcccaagcgtccacaccataatcttagatttctcgatggtgcactatgtcgacagccgcgggcttgtcgttctcaggcaaatttgcaacgcttttcagaacgctaacattctgatcctgattgcgggttgtcattccagcatcgtgagagcctttgagcggaatgactttttcgacgcagggatcactaagacccagctctttctgtctgtgcacgacgccgtgctgttcgccttgtcaaggaaggtgatcggatcaagcgagcttagtatagatgaatctgaaacggtcatacgggagacctacagcgagacagacaagaatgataactcccggtacaagatgtcctccagctttctgggaagtcagaaaaacgtttccccaggtttcataaaaattcaacagcccgtcgaagaggaaagcgagcttgacctagagcttgagtccgagcaggaggcgggactgggccttgatctggacttggaccgtgaacttgagccagagatggagccgaaagccgagaccgaaacaaaaacgcagaccgagatggaaccccagcctgagacggaacctgagatggagcctaaccctaaatcccgcccccgcgcccacaccttcccacaacagcgctattggccaatgtaccatccgtccatggcttcaacccagagccagactcagacccgcacctggtctgtggaaagaagacggcaccccatggacagctattcacccgaggggaacagcaacgaagatgtgtag

SEQ ID NO: 237201 - DNA, 2598 bp, Artificial Sequence
  derived and/or modified sequence
atggcccagttggagaggagcgccatctccggattctccagcaagtcgagaagaaactcatttgcctacgatgtcaagcgagaggtgtataacgaggagacattccagcaagaacacaagcgaaaggctagtagttccggcaacatgaatattaacatcacaactttccgtcatcatgtccaatgcaggtgctcatggcatcggttcctgagatgtgtactgacaatcttcccgtttctggagtggatgtgcatgtatagattgaaagactggctcttaggagatctcttggcgggaatttctgttggcctcgtgcaggttccgcagggcctgacattgtcgttgctagcacggcagctgatcccgcctctaaatatcgcttatgcggcattctgtagcagcgttatctacgtgatctttggctcctgccaccaaatgtctatcggatccttctttctagtgagtgcccttcttatcaacgtgttaaaggtgagtcctttcaataacggacaacttgtcatgggttcttttgtaaaaaacgagttttctgcaccgagttatttaatgggctataacaaatctttaagtgtggtagccaccacaacctttctcactggaattatacagattatcggctttactgtgatcgccaacaagatttctatggccactgaaactagccaaaccctaatcgacatgatcccatacagtttcctcctgcctgtcacccctgacttcagtctgctgcccaagattatcctgcaggccttcagtctgtcgcttgtttccagctttcttctgatcttcctgggaaagaaaatcgcatctctacataactactctgttaacagcaatcaagatttaatcgcaattggactgtgcaatgtcgtttctagcttctttaggtcctgtgttttcacaggcgctatcgcgcgtacaatcatccaggacaagagtggcggacgtcagcagttcgcatcactagtgggcgctggggttatgctgctgttgatggtcaagatgggccatttcttttacacactacctaatgccgtgctcgccggtatcattctgagcaatgtcataccatacctcgagactatctcgaatctgccttccctgtggagacaagaccagtatgactgcgcgctgtggatgatgaccttcagctccagtatctttctggggttggatataggactaattatatccgtcgtttcagcgttcttcattacgactgtccgatctcaccgcgctaagatacttctcctcggacagatcccgaatacgaatatctataggagtattaacgactatcgagaaattataaccatccctggcgtcaaaatttttcagtgttgttcctcaataacatttgtgaatgtgtattacctgaagcacaaactgctgaaggaagtggacatggtgaaggtgcccctcaaagaagaggagatcttctcgctcttcaacagctctgatactaatctccagggcggtaagatttgtaggtgtttttgcaattgcgatgacctggaacccctaccccgaatcttgtataccgagcgtttcgagaacaaactggaccctgaggccagctccatcaatctgattcactgtagccacttcgagtctatgaacacgagccagacagcttcggaggaccaggtgccctacaccgtatcaagcgtttcccagaaaaatcagggccagcaatacgaagaagttgaggaagtgtggttgcctaacaactcgtccaggaatagttccccaggactgccagacgtggcagagtctcagggacgtcggtctctgataccatactcagacgctagcttactgccttccgttcataccataattctcgattttagtatggtccactatgtggattcgcggggactcgtagtgctgcgccagatttgcaacgcttttcagaatgccaacattttaatcttgattgccggttgccattcaagtatcgtgcgggcattcgaacggaatgactttttcgacgctggaatcacaaagacccagctgttcctttccgtgcacgacgcagtgctttttgctctgtcccggaaggtgattggctccagcgaactgtcaattgatgagagcgaaaccgtgatccgtgagacatacagtgaaaccgacaaaaatgacaactccagatacaagatgtcatcctcatttctgggcagtcagaagaacgtctctccagggttcatcaagatccagcaacccgtcgaggaagagtctgagctggatctagaactcgaatccgaacaggaggcgggacttgggctggacctcgatttagatagagaactggaaccagagatggaaccaaaagctgagaccgaaacgaagacccagacggaaatggagccgcagccagagacagagcccgagatggagcccaatccaaagtctcggccaagggcccacaccttcccccaacagagatattggcccatgtaccatccatctatggccagcacccaaagtcagacgcagaccagaacttggtccgtggagcgcagacgccacccaatggactcatacagccctgagggaaattccaacgaagacgtatag

SEQ ID NO: 237202 - DNA, 3144 bp, Artificial Sequence
  derived and/or modified sequence
gctgggagacgcctgggcgccgggggctgcaggtcccagggcgggggctgcgtccgtcaccggcaggtacccaggtatgccgcagagccaggcacgccgtgggcactcagtcagtatctgtggaatgaatgaatgatggtcgtccctgggagcttatctctgaggaatggcacaactagagaggagcgccatctctggcttcagctctaagtccaggcgaaactcattcgcatatgatgttaagcgtgaagtatacaatgaggagacctttcaacaggaacacaaaaggaaggcctcctcttctgggaacatgaacatcaacatcaccaccttcagacaccacgtccagtgccgctgctcatggcacaggttcctacgatgcgtgcttacaatctttcccttcctagaatggatgtgtatgtatcgattaaaggattggcttctgggagacttacttgctggtataagtgttggccttgtgcaagttccccaaggcctgacacttagtttgctggcaaggcaactgattcctcctctcaacatcgcttatgcagctttctgttcttcggtaatctatgtaatttttggatcgtgtcatcaaatgtccattggttccttcttcctggtgagtgctctgctgatcaacgttctgaaagtgagcccattcaacaacggtcaactggtcatgggatctttcgtcaagaatgagttttcggccccctcctaccttatgggctataataaatccttgagtgtggtggcaaccacaacttttctgactgggattattcagattattggcttcactgtgattgcaaacaagataagcatggccacagaaaccagccagacgcttattgacatgattccttatagctttctgcttcctgtaacaccagatttcagccttcttcccaagataattttacaagccttctccttatctttggtgagctcctttctgctcatatttctgggcaagaagattgccagtcttcacaattacagtgtcaattccaaccaggatttaatagccatcggcctttgcaatgtcgtcagttcatttttcagatcttgtgtgtttactggtgctattgctaggactattatccaggataaatctggaggaagacaacagtttgcatctctggtaggcgcaggtgtgatgctgctcctgatggtgaagatgggacactttttctacacactgccaaatgctgtgctggctggtattattctgagcaacgtcattccctaccttgaaaccatttctaacctacccagcctgtggaggcaggaccaatatgactgtgctctttggatgatgacattctcatcttcaattttcctgggactggacattggactaattatctcagtagtttctgctttcttcatcaccactgttcgttcacacagagctaagattcttctcctgggtcaaatccctaacaccaacatttatagaagcatcaatgattatcgggagatcatcaccattcctggggtgaaaatcttccagtgctgcagctcaattacatttgtaaatgtttactacctaaagcataagctgttaaaagaggttgatatggtaaaggtgcctcttaaagaagaagaaattttcagcttgtttaattcaagtgacaccaatctacaaggaggaaagatttgcaggtgtttctgcaactgtgatgatctggagccgctgcccaggattctttacacagagcgatttgaaaataaactggatcccgaagcatcctccattaacctgattcactgctcacattttgagagcatgaacacaagccaaactgcatccgaagaccaagtgccatacacagtatcgtccgtgtctcagaaaaatcaagggcaacagtatgaggaggtggaggaagtttggcttcctaataactcatcaagaaacagctcaccaggactgcctgatgtggcggaaagccaggggaggagatcactcatcccttactcagatgcgtctctactgcccagtgtccacaccatcatcctggatttctccatggtacactacgtggattcacgggggttagtcgtattaagacagatatgcaatgcctttcaaaacgccaacattttgatactcattgcagggtgtcactcttccatagtcagggcatttgagaggaatgatttctttgacgctggcatcaccaagacccagctgttcctcagcgttcacgacgccgtgctgtttgccttgtcaaggaaggtcataggctcctctgagttaagcatcgatgaatccgagacagtgatacgggaaacctactcagaaacagacaagaatgacaattcaagatataaaatgagcagcagttttctaggaagccaaaaaaatgtaagtccaggcttcatcaagatccaacagcctgtagaagaggagtcggagttggatttggagctggaatcagaacaagaggctgggctgggtctggacctagacctggatcgggagctggagcctgaaatggagcccaaggctgagaccgagaccaagacccagaccgagatggagccccagcctgagactgagcctgagatggagcccaaccccaaatctaggccaagagctcacacttttcctcagcagcgttactggcctatgtatcatccgtctatggcttccacccagtctcagactcagactcggacatggtcagtggagaggagacgccatcctatggattcatactcaccagagggcaacagcaatgaagatgtctaggagatgaactagaaataaggggtcagataatgctggcaaatcctcctacccaaaaaggggtcaattgtccagagacctagactggatacgaactagcagtacttccttcctgactgtgactcctactacctgccagccttcttccttgctctgcgctgggatcatactcccaaatcacattactaaatgccaacaattatctctgaattccctatccaggctcccctcatttcaccttcagcatatattctagtcatgaatttccttcttcacacaccccacatctctgggctttgtgccagaccatctctaacttaatcctctcatccctgttcccctttctccaaagagatgaagctcaaataaaatgtataactcta

SEQ ID NO: 237203 - protein, 442 aa, Artificial Sequence
  derived and/or modified sequence
MENWSKDITHSYLEQETTGINKSTQPDEQLTMNSEKSMHRKSTELVNEITCENTEWPGQRSTNFQIISSYPDDESVYCTTEKYNVMEHRHNDMHYECMTPCQVTSDSDKEKTIAFLLKELDILRTSNKKLQQKLAKEDKEQRKLKFKLELQEKETEAKIAEKTAALVEEVYFAQKERDEAVMSRLQLAIEERDEAIARAKHMEMSLKVLENINPEENDMTLQELLNRINNADTGIAIQKNGAIIVDRIYKTKECKMRITAEEMSALIEERDAALSKCKRLEQELHHVKEQNQTSANNMRHLTAENNQERALKAKLLSMQQARETAVQQYKKLEEEIQTLRVYYSLHKSLSQEENLKDQFNYTLSTYEEALKNRENIVSITQQQNEELATQLQQALTERANMELQLQHAREASQVANEKVQKLERLVDVLRKKVGTGTMRTVI

SEQ ID NO: 237204 - protein, 261 aa, Artificial Sequence
  derived and/or modified sequence
MSRLQLAIEERDEAIARAKHMEMSLKVLENINPEENDMTLQELLNRINNADTGIAIQKNGAIIVDRIYKTKECKMRITAEEMSALIEERDAALSKCKRLEQELHHVKEQNQTSANNMRHLTAENNQERALKAKLLSMQQARETAVQQYKKLEEEIQTLRVYYSLHKSLSQEENLKDQFNYTLSTYEEALKNRENIVSITQQQNEELATQLQQALTERANMELQLQHAREASQVANEKVQKLERLVDVLRKKVGTGTMRTVI

SEQ ID NO: 237205 - protein, 424 aa, Artificial Sequence
  derived and/or modified sequence
MNSEKSMHRKSTELVNEITCENTEWPGQRSTNFQIISSYPDDESVYCTTEKYNVMEHRHNDMHYECMTPCQVTSDSDKEKTIAFLLKELDILRTSNKKLQQKLAKEDKEQRKLKFKLELQEKETEAKIAEKTAALVEEVYFAQKERDEAVMSRLQLAIEERDEAIARAKHMEMSLKVLENINPEENDMTLQELLNRINNADTGIAIQKNGAIIVDRIYKTKECKMRITAEEMSALIEERDAALSKCKRLEQELHHVKEQNQTSANNMRHLTAENNQERALKAKLLSMQQARETAVQQYKKLEEEIQTLRVYYSLHKSLSQEENLKDQFNYTLSTYEEALKNRENIVSITQQQNEELATQLQQALTERANMELQLQHAREASQVANEKVQKSQIQIYFIPNKKDEREKFLMDKRRKIVAHSKQNS

SEQ ID NO: 237206 - DNA, 1329 bp, Artificial Sequence
  derived and/or modified sequence
atggaaaattggagcaaagatatcacgcactcctatttggaacaggaaacaaccggaattaataaatccacacagcctgacgaacagctgaccatgaacagcgagaagtccatgcatagaaagtccacagaattggtgaacgaaatcacctgcgagaacacagagtggccaggacagaggtcaaccaattttcagattatctcaagctaccccgacgatgagagcgtgtactgtaccacggagaagtataatgtgatggagcacaggcacaatgacatgcattacgagtgtatgaccccctgccaggttacatctgactctgataaagaaaaaactattgcgtttctgctgaaggaactggatattctgcgcacttctaacaaaaaattacaacagaaactagccaaagaggacaaggaacagcgtaaattgaagttcaaattagagctgcaggagaaagaaactgaagctaagatcgccgagaaaaccgctgccctggtcgaagaggtgtacttcgcccagaaggagagggacgaagccgtcatgagtcggctccagctcgcaatcgaggaacgggatgaagctatcgcacgcgccaagcacatggagatgtcactgaaagtccttgaaaacattaaccctgaggagaatgacatgacactacaggagcttctgaaccgcatcaataatgctgataccggaattgctatacagaagaacggggcaattatagttgaccgcatttataagaccaaggaatgtaaaatgaggattacagctgaagagatgtctgctctcatcgaggaacgggatgccgcactctctaaatgcaagagactcgaacaggagctgcaccacgtgaaagagcagaatcagacatccgccaacaacatgcggcatttaactgctgagaataatcaggaacgcgcgttaaaggctaagctgctgagcatgcaacaggcgagagagacagcagtgcagcagtataagaagctggaggaggagatccagaccttacgggtgtattactccctgcataagagcctatctcaagaagagaacctgaaggatcagtttaactacacattgagcacatatgaagaagccctgaaaaacagggagaacatagtgagtatcacccaacagcagaacgaggagctggcgacccagttgcagcaggccctgaccgagcgcgcaaacatggaactccaattgcaacacgccagggaagcctctcaggttgccaatgagaaggtgcaaaagctggaacggttggtggacgttctcagaaagaaggtgggaaccgggaccatgcgcacggtaatctag

SEQ ID NO: 237207 - DNA, 1329 bp, Artificial Sequence
  derived and/or modified sequence
atggagaactggtcaaaggatattactcactcctatcttgagcaggaaaccacagggataaacaagtctacccagccagatgagcagctgacaatgaacagtgagaaatctatgcaccgcaagtccacggagttggtgaatgaaatcacttgcgagaacacagaatggcccgggcaacgatccaccaatttccagattatctctagctacccggatgacgagtcggtttattgtactacagagaaatataatgtgatggaacacagacacaatgacatgcactatgagtgtatgacaccctgtcaggtgaccagcgatagcgataaagaaaagacaatagccttcctgcttaaggaacttgacatccttcgcacttccaataagaaactacagcaaaagctggccaaagaggataaggaacagaggaagctaaaattcaagctggagttgcaggaaaaagagacggaagcaaagatcgccgagaagacagccgcactagtggaagaagtatactttgcacaaaaagagagagacgaggctgtgatgtcaaggctgcaactggctatcgaggaacgggatgaggccattgcacgcgctaaacacatggaaatgagcctgaaagtgctggaaaatataaatccggaggagaacgacatgacgctgcaggaattgctgaatcggattaacaacgccgacaccggcattgctatccagaaaaatggcgccattatcgtggatagaatttataaaacaaaagagtgcaagatgcgtattaccgctgaggagatgtctgctcttatagaggagcgggacgccgcgttatctaagtgtaaacgacttgagcaggagctgcaccacgtcaaggagcagaaccagacatccgcaaacaacatgcgccacctgaccgccgaaaacaaccaagagcgggcactgaaggcaaaactactgagcatgcagcaagccagagagacggcagtgcaacaatacaaaaagctcgaagaggaaatccagaccttaagggtctactactccctgcacaaatctttgagccaggaagaaaacctcaaagatcagttcaactatactctgtcaacttatgaagaggcactgaagaatagagagaacattgtgagcatcacacagcaacagaacgaggagctggcgactcagctgcagcaggccctcacagagcgcgctaatatggagctgcagctgcagcacgctcgcgaggcgagccaagtggccaacgagaaagtccagaaacttgaaagattggttgatgtgctgcgcaaaaaggttgggacgggaaccatgcgaacagtgatatag

SEQ ID NO: 237208 - DNA, 786 bp, Artificial Sequence
  derived and/or modified sequence
atgtccagactccagcttgctatcgaggaacgggacgaggctatcgccagagcaaaacatatggagatgtcactcaaagtactagaaaacataaaccccgaggagaacgatatgacattacaggaattactcaacaggataaataacgccgatactggcatcgctatacaaaagaatggggccatcattgtggaccgaatctataagactaaggagtgtaagatgcggatcactgcagaggagatgtctgcccttatagaggagcgggatgccgcactgagcaagtgcaaacgcctggagcaagagctgcaccatgttaaagagcaaaaccagacttctgctaacaatatgaggcatctcacagccgagaacaaccaggaaagagccttgaaggccaagctgctgtccatgcaacaggccagggagacagcagttcaacagtataaaaaactggaagaggagatacagactctgagagtctattatagcctgcataaatctctatctcaagaagaaaatctgaaagaccagttcaactacactttgtcaacttacgaggaggctctgaagaatcgcgagaacatagtgtccatcacacaacaacagaatgaggagctggccacccaactgcaacaggccctgacagagcgagcaaatatggaactccagctccagcatgctcgggaggcctcccaggtggctaacgaaaaagtgcaaaagttggagaggctagttgatgtgctacgtaaaaaagtcggtacagggactatgaggacagttatctag

SEQ ID NO: 237209 - DNA, 1329 bp, Artificial Sequence
  derived and/or modified sequence
atggagaattggtcaaaggacataacccatagttacctcgagcaggagaccacagggatcaataaaagcacgcagcccgacgaacagctcaccatgaacagcgagaaaagtatgcatcgcaaatccactgagctggtcaatgagattacctgtgaaaataccgagtggccaggacagcgctcgaccaatttccagattatatcgagctaccctgatgatgaaagcgtctactgcaccaccgaaaaatacaacgtgatggaacaccgtcataatgacatgcactacgagtgcatgaccccgtgtcaggtgacatctgatagcgataaagagaaaactatcgcattcctccttaaggagctcgacatccttcggactagcaacaaaaagctgcagcagaaattggcaaaggaggataaggaacagagaaagctaaaattcaaacttgagctgcaggagaaggaaaccgaggccaagattgctgagaagacggccgccctcgtggaggaggtgtacttcgcccagaaggaaagggatgaggcagtgatgtcaagactgcagttggccattgaagagcgcgatgaagcaattgcgcgagctaaacacatggaaatgtcactgaaggtactggaaaatattaatcctgaagagaacgacatgactctgcaggagttactcaacagaataaacaacgccgatacaggtatcgcgatccaaaaaaatggcgcaatcatcgtagatcggatctacaagactaaagagtgtaaaatgaggataacagctgaagaaatgtcagccctcatcgaggagagagatgcagcactatccaagtgcaaaagacttgaacaggagctccatcacgtcaaggagcagaatcaaacgtccgcaaacaacatgcgccatctaactgcagaaaataaccaggagcgggccctgaaagctaagttgcttagcatgcagcaggcccgcgaaaccgccgtgcagcagtacaagaagctggaggaggaaatccagacgctccgggtatactactcactgcacaagagtttgtcacaagaagagaatctcaaggaccagtttaattacacgctgagtacttacgaagaagcgctcaaaaatagagagaatatcgtgagcataactcagcagcagaacgaagaactggccacacaactacaacaggcactgactgagcgagccaacatggaactgcaattacagcacgcacgtgaggcctcacaggtagcaaatgagaaagtgcagaagctggaaaggctggtggatgtgctccgaaaaaaggtggggacggggactatgcgcacggtgatttag

SEQ ID NO: 237210 - DNA, 1329 bp, Artificial Sequence
  derived and/or modified sequence
atggagaactggagcaaggacatcacccacagctacctggagcaggagaccaccggcatcaacaagagcacccagccagatgagcagctgaccatgaacagcgagaagtccatgcacaggaagagcacagagctggtgaatgagatcacctgtgagaacacagagtggccaggccagaggagcaccaacttccagatcatcagcagctacccagatgatgaatctgtgtactgcaccacagagaagtacaacgtgatggagcaccgccacaatgacatgcactatgagtgcatgaccccctgccaggtgaccagtgacagcgacaaggagaagaccatcgccttcctgctgaaggagctggacatcctgcggaccagcaacaagaagctgcagcagaagctggccaaggaggacaaggagcagaggaagctgaagttcaagctggagctgcaggagaaggagacagaggccaagattgctgagaagacagctgccctggtggaggaggtgtactttgcccagaaggagagagatgaggccgtgatgagccggctgcagctggccatcgaggagagagatgaggccatcgcccgggccaagcacatggagatgagcctgaaggtgctggagaacatcaaccctgaggagaatgacatgaccctgcaggagctgctgaaccgcatcaacaatgctgacacaggaattgccatccagaagaatggagccatcatcgtggaccgcatctacaagaccaaggagtgcaagatgaggatcacagctgaggagatgtctgccctgattgaggagagagatgctgccctgagcaagtgcaagaggctggagcaggagctgcaccacgtgaaggagcagaaccagaccagcgccaacaacatgaggcacctgacagctgagaacaaccaggagcgggccctgaaggccaagctgctgtccatgcagcaggcccgggagacagctgtgcagcagtacaagaagctggaggaggagatccagaccctgcgggtgtactacagcctgcacaagagcctgagccaggaggagaacctgaaggaccagttcaactacaccctgagcacctatgaggaggccctgaagaaccgggagaacatcgtgtccatcacccagcagcagaatgaggagctggccacccagctgcagcaggccctgacagagcgggccaacatggagctgcagctgcagcacgcccgggaggccagccaggtggccaatgagaaggtgcagaagctggagcggctggtggatgtgctgaggaagaaggtgggcaccggcaccatgaggacagtcatctag

SEQ ID NO: 237211 - DNA, 786 bp, Artificial Sequence
  derived and/or modified sequence
atgagccggctgcagctggccatcgaggagagagatgaggccatcgcccgggccaagcacatggagatgagcctgaaggtgctggagaacatcaacccagaagaaaatgacatgaccctgcaggagctgctgaaccgcatcaacaatgctgacaccggcatcgccatccagaagaatggagccatcatcgtggaccgcatctacaagaccaaggagtgcaagatgaggatcacagctgaggagatgtctgccctgattgaggagagagatgctgccctgagcaagtgcaagaggctggagcaggagctgcaccacgtgaaggagcagaaccagaccagcgccaacaacatgaggcacctgacagctgagaacaaccaggagcgggccctgaaggccaagctgctgtccatgcagcaggcccgggagacagctgtgcagcagtacaagaagctggaggaggagatccagaccctgcgggtgtactacagcctgcacaagagcctgagccaggaggagaacctgaaggaccagttcaactacaccctgagcacctatgaggaggccctgaagaacagagaaaatattgtgtccatcacccagcagcagaatgaggagctggccacccagctgcagcaggccctgacagagcgggccaacatggagctgcagctgcagcacgcccgggaggccagccaggtggccaatgagaaggtgcagaagctggagcggctggtggatgtgctgaggaagaaggtgggcaccggcaccatgaggacagtcatctag

SEQ ID NO: 237212 - DNA, 7185 bp, Artificial Sequence
  derived and/or modified sequence
cgccccgctcctccgccggatcgtctgtgggtgagtctcgagccaggaggctctgagccagtggcgattggctgacgcggtggctgcgcactcggcctgagaaactcggcaagcgcgcagtgtcgactccccggtctatgccaggcgcatctcagagtttggcttagagattaaagctccttctatcttgtgatgccaccatcgcaaggttctcaaggttgttgtgggagaagagaaggctaaaggagctcatagaatgcctttaatgctaatccaaaagtaaatgagaaacttagaaaaagattgccaattccaaatcaacatatttagagaaaattggaaaaggagaagcttactacagctttatttgaggactttttaaagaacgctgggttctatctgtgagctgcaaatcttggagcaaaaaccagagacattgccagagcaaacaagaacagaaatacaaatggagaactggtcaaaagacataacccacagttatcttgaacaagaaactacggggataaataaaagtacgcagccagatgagcaactgactatgaattctgagaaaagtatgcatcggaaatccactgaattagttaatgaaataacatgtgagaacacagaatggccagggcagagatcaacgaattttcagatcatcagttcttatccagatgatgagtctgtttactgcactactgaaaaatacaacgttatggaacatagacataatgatatgcattatgaatgtatgactccttgtcaagttacttcagactcagataaagagaagacaatagcatttcttctaaaagaattggatattctcagaacaagcaataaaaagcttcagcagaaattggctaaagaagataaagaacagagaaaactaaagtttaagctggaactccaagagaaagaaacagaagctaaaattgctgaaaagacagcagctctggttgaagaagtgtattttgcgcagaaggaacgtgatgaagctgttatgtctagactgcaattagccattgaggagagagatgaagcaattgcacgagccaagcatatggaaatgtctctaaaagtgctagaaaatattaaccctgaagaaaatgacatgacattacaggaattactgaacagaataaacaatgcagacacagggatagctattcagaagaatggagctataattgtggatagaatctacaagaccaaggaatgtaaaatgagaataactgcagaagaaatgagtgcactaatagaagaacgggatgctgccttgtctaagtgcaaacggttagagcaggagcttcatcatgtgaaagagcagaaccagacttcagcaaacaacatgagacatctgactgctgaaaacaatcaagaacgtgctctgaaggcaaagttgttatctatgcaacaagccagagaaactgcagttcaacagtacaaaaaactggaagaggaaatccagacccttcgagtttactacagtttacacaaatctttatctcaagaagaaaatctgaaggatcagtttaactatacccttagtacatatgaagaagctttaaaaaacagagagaacattgtttccatcactcaacaacaaaatgaggaactggctactcaactgcaacaagctctgacagagcgagcaaatatggaattacaacttcaacatgccagagaggcctcccaagtggccaatgaaaaagttcaaaagttggaaaggctggtggatgtactgaggaagaaggttggaaccgggaccatgaggacagtgatctgattgaaaaaaaacgacagtctggggaagcgatcacatctggtgaccaggctgcttcattcaacactgtgtaaacaccaaagccttaacttagcaaacagttgttagaagtgggacactccaaccacattccaagctgagataaaatcaaatcacaaatgtttaaccactttgctgctgacttgagttatttatccaaatatattaactatagacttttaccaatgggtagctataaggttacagcttattttgtaactattttatatctcaatatctttaatataaatctttttactgagagatcattatagaaacatgttaaagttggttaggatcatatcttcacatatggccctttctgaatcaaagtgcggcaaagtaaatattgtctaagctttaatccactgtgttaggtcaaaacttcaaatacatgcatttttcaatatagggtatatttcttaactgatgagagaggcttagacatgagtgtgtagtcttccttcaatgcgtgtatgtaatctttgttagtataaaagatattaaatataggtgccaagaattaaatgtataatttgtttaataagagatggatatattaaaattacattcatcaaggcatgatttttgtttcactacaaataatgcaaactgttttcaataaaaagaggagactgttaatgtgtacttataaattcacattgtcagtattttttaatattgggtctgaataattatctgaattctacttaagctataagtctctgtcatttttgcttgaaaattagcatgcctctgtcttaaaagagaccatcaaacctattaagtattcttattgtttatctttttttaattgccatttgatttttattgtggaggaggaggatctaatatataatattcaatacaattgtaatgtagaaatataagaatttagaaaaaagtaaacttgccatttggttaaggttacctgctttttattttattccagaaataagatagttacagcatagcagtcatatgaagttatgaatagaactgagatttttatgtaattagttataggcaaaatactttcatatttttagattagacagacgaaagaccaagaggaaatgactgtgcctggaacaggatgaaatagacaagtagagatttaattagcaaaaattttgtagggaagtaaaattttttctaagtctatacgtttttaattcatctttaagattgagctaaattatctaccattgcctatttacaggataagtacattcaggacaatttattgtaccattctttcatataccatagcagattatccatttcaatttttttttactccacaggaaaatgtaagctactttgtcatagatcacaaaagaatcataatgctaacaaactctatttcttccttattaaatctgtatccattaaagtaacttttttaactatgagaattagaaaataagggacaacaggggttaaaaataaactgatttaatttgctctatagtcctaaagagaattatatcctctcatagaccaatgactctataatagagaaatatgtaatgatttggtcatgcatggagtcttgtctctgggctctatttgaaacgtgtaacagctccctatgtgaagaaacattatctttaaagtcatctgggaggtgcaggtaagtaaagagaaacaatttttgtcacaaagtagtccattcctgatctcacttaaaataaatcacaagtaaatttgaattttcggtttaatgttgaaagcagatgaacttttcttgagttattttgtcttttagaatacacaaaatatagtataaagacatttcacaatttccaaacaaatctttctacgcttaaatgatcaaattagaaaaaccaattcctataattaatatgcagaacttttatagaatatgatattataaagttaaatttgcaaaataattctaacatccactattgttcagtataggtaatctcccaaaaatatcacatcctcttgaaaatgaattgtctacaaaatttcaaatgcaaagtattacagccaaatattatcttaattaatttcttacacttaaaagtgtccatcaacagtgtgtcagatggtctttatatattttttctgtatgaaggaatagccttgcctactgaagataggttctctatgtattcaacaataatgcaactttagaagtattccacactgctgagaaatgttgctttgagtttgctttacacatcatcaactctaaatcctatagtaacatgagaattcacttcttcttgtaaaaataagtaatttacaggaaaggcaaaatgctaatactaacatttgtagcacttgatgatttacaaagtccttttacatctgttttttcatttgatcctatcgacaatcataataataataaattatatatataacccatataataacgatggtgatgataattttagtattactgtcattataattattattatattcattctacagatgaggaaacagactcagtaagccttggaatttgccaaggactggctaggacctagaactaagatcttataaccacactccatgcaactatgagtctctaaatctctctgtaagaaaaaaatttcaaagtaaagattttactcttgcaatttctgttgtgatagtaccatctctttcacatactacatacaaattccctaataatcaaaagattgtacacatttttttcaatgaagtacaataatgtgaactgcatgtgtaaacagcatcacattattaccacctctctatggtattatagtggcagtatgctttgcctcagccttcactaattaggaatattgtgacaattcattgctaataaaacataacatgagtctctttgtactgtttttaatttggcctgatgctaaaacctatcagcttagttttttaacatggtagtctaaacttcaaggcttgctctatctcctagagcaatttagagctaaaaccagtaataagcaaagttattggttataagcaaggtataagcagttaaagcaaagttattaattattaatatatgagaatttaaaattttataaataagttagaaattattaatgtattttaaatatggagtaaaatattttgctaatttttttcaatgataaagttgatcctttgtatatttccttattcaaataaattcagtcatcttcttatcaggttgcttatttatataatttgtttattttattaaaaatctagaatattaaagatttatacttttaatattgaatatagtttcgtagaaaaacattttatatgtactattcttaaagatcacaattatttttaaactttctattttcaaatacttgtgattaataaggcattctatgatgaaatagccatggcttatatatttttgtcttttcacatatgatgtgtttggaacccaaattttttactgattttattgtgttgttggtaactagtatttacagctaacctatctattcatattttacatatatatatatatatatacatgcacacacaccgatacatttaccttttaaaaaaatgatttataagtgaactgttaggctccagtgatttcagtgttttgttcatgttttattggaaatgcacgtggtttcttaggcttttaaacaaatacatggaatggttgaaagatttattttgctcgtgcttagctaaatatgtcatctctagaaaagatgtggtttgttttggcactgttttaaaaactcaaatattttaaacatttgttaagttggagcttgcacatttaaaccagcagcatacgttccagaagagcatctcaagttaccaaattttttgtaatccttttactagaaaaatcttttttgaagagtttttcttgtgcttgcttcggcagcatatatactgaaattagaaaaagaaaacttttcttttttattatatattttagtgtaagttaagttaaacttctaaaagttgaattatttaatgtaggacttcataaatagtatttgacaatgataaatgtgtatttttgagaatcattaaaatgtatacaatgatattcctttgcagaagtcttaatatgcataatttttaatctaattgtcttctaaatatagttttggtgtatgctggtattttagaagccaccaatttctggactatctgattattaacaaagatgtattttaatgcacaaactcaaatgtttaaaatatatatttactttgtactcaaataaaatcccctattgcaaatcctatacatatttcaatgcaattcttatacatcgatcttaatcaaatttataaatgtacaatcctgaagacagtgtactagatatgcactataaaatatattgcagtaaggaaacagattaagttcactgtcaaactgtctgacttccttaacaaatttaataaagataaatgtcaatatgaacaaatttgttaggtaccttaggaatctttcaaaactatttagatataaaataaaattatagtaataaaatattgaagagaaatatcatttttagtgaatatggttagaaagaacataagaagtgagatcaaattattttaattaaaaaaataggccaggtgcgatggctcacgcctgtaatcccagcattttgggaggccgaggcgggcggatcacaaggtcaggagattgagaccatcctggctaacacggtgaaaccccgtctctactaaaaaaagtacaaaaaagaagttagccgggcgtggtggcgggcgcctgtagtcccagctacttgggaggctgaggcaggagaatggcgtgaacccggaaggcagagcttgcagtgagccgagatcacgccattgcactccagcctgggtgacagagtgagactgtctcaaataataataataataataataataataataataataataatagactgactcaaatctaccataaagcacctctactcattttggaatatgtacgtggaattttgcttcaatagctgaaatctaaaaacactctttctgttgcatttgattattcaatcatgataaggtaaatgtaaacagactgtgtagcactctatcacctggagtgaacttagaatttacagcttagagtacatgactaaaagaggaatggagtggaagtgggcagtaggtgtctttggggcaaaaattctataaactggtgttatctaaactatcacattactttgttaaattattgtttcatcacgtatgacctttgtgatttgtcacacattttacttctacatatgcacataattgtaatttttttaactttaaaaagtcaattatgtttaagaaaatttttaaaataagaatgaacgtatgtgatatttactgtga

SEQ ID NO: 237213 - DNA, 1957 bp, Artificial Sequence
  derived and/or modified sequence
tgccaggcgcatctcaggaacgaggtctcactatattgcccagactggtctcgaactcctgggctcaaacagtccccctgcgttggcctcccaaagtgatggaattacaggtgtgaatcactgcatctgactatggcaaggatctctgtcactgagagtttggcttagagattaaagctccttctatcttgtgatgccaccatcgcaaggttctcaaggttgttgtgggagaagagaaggctaaaggagctcatagaatgcctttaatgctaatccaaaagtaaatgagaaacttagaaaaagattgccaattccaaatcaacatatttagagaaaattggaaaaggagaagcttactacagctttatttgaggactttttaaagaacgctgggttctatctgtgagctgcaaatcttggagcaaaaaccagagacattgccagagcaaacaagaacagaaatacaaatggagaactggtcaaaagacataacccacagttatcttgaacaagaaactacggggataaataaaagtacgcagccagatgagcaactgactatgaattctgagaaaagtatgcatcggaaatccactgaattagttaatgaaataacatgtgagaacacagaatggccagggcagagatcaacgaattttcagatcatcagttcttatccagatgatgagtctgtttactgcactactgaaaaatacaacgttatggaacatagacataatgatatgcattatgaatgtatgactccttgtcaagttacttcagactcagataaagagaagacaatagcatttcttctaaaagaattggatattctcagaacaagcaataaaaagcttcagcagaaattggctaaagaagataaagaacagagaaaactaaagtttaagctggaactccaagagaaagaaacagaagctaaaattgctgaaaagacagcagctctggttgaagaagtgtattttgcgcagaaggaacgtgatgaagctgttatgtctagactgcaattagccattgaggagagagatgaagcaattgcacgagccaagcatatggaaatgtctctaaaagtgctagaaaatattaaccctgaagaaaatgacatgacattacaggaattactgaacagaataaacaatgcagacacagggatagctattcagaagaatggagctataattgtggatagaatctacaagaccaaggaatgtaaaatgagaataactgcagaagaaatgagtgcactaatagaagaacgggatgctgccttgtctaagtgcaaacggttagagcaggagcttcatcatgtgaaagagcagaaccagacttcagcaaacaacatgagacatctgactgctgaaaacaatcaagaacgtgctctgaaggcaaagttgttatctatgcaacaagccagagaaactgcagttcaacagtacaaaaaactggaagaggaaatccagacccttcgagtttactacagtttacacaaatctttatctcaagaagaaaatctgaaggatcagtttaactatacccttagtacatatgaagaagctttaaaaaacagagagaacattgtttccatcactcaacaacaaaatgaggaactggctactcaactgcaacaagctctgacagagcgagcaaatatggaattacaacttcaacatgccagagaggcctcccaagtggccaatgaaaaagttcaaaagttggaaaggctggtggatgtactgaggaagaaggttggaaccgggaccatgaggacagtgatctgattgaaaaaaaacgacagtctggggaagcgatcacatctggtgaccaggctgcttcattcaacactgtgtaaacaccaaagccttaacttagcaaacagttgttagaagtgggacactccaaccacattccaagctgagataaaatcaaatcacaaatgttt

SEQ ID NO: 237214 - DNA, 1674 bp, Artificial Sequence
  derived and/or modified sequence
cgccccgctcctccgccggatcgtctgtgggtgagtctcgagccaggaggctctgagccagtggcgattggctgacgcggtggctgcgcactcggcctgagaaactcggcaagcgcgcagtgtcgactccccggtctatgccaggcgcatctcagctctggttgaagaagtgtattttgcgcagaaggaacgtgatgaagctgttatgtctagactgcaattagccattgaggagagagatgaagcaattgcacgagccaagcatatggaaatgtctctaaaagtgctagaaaatattaaccctgaagaaaatgacatgacattacaggaattactgaacagaataaacaatgcagacacagggatagctattcagaagaatggagctataattgtggatagaatctacaagaccaaggaatgtaaaatgagaataactgcagaagaaatgagtgcactaatagaagaacgggatgctgccttgtctaagtgcaaacggttagagcaggagcttcatcatgtgaaagagcagaaccagacttcagcaaacaacatgagacatctgactgctgaaaacaatcaagaacgtgctctgaaggcaaagttgttatctatgcaacaagccagagaaactgcagttcaacagtacaaaaaactggaagaggaaatccagacccttcgagtttactacagtttacacaaatctttatctcaagaagaaaatctgaaggatcagtttaactatacccttagtacatatgaagaagctttaaaaaacagagagaacattgtttccatcactcaacaacaaaatgaggaactggctactcaactgcaacaagctctgacagagcgagcaaatatggaattacaacttcaacatgccagagaggcctcccaagtggccaatgaaaaagttcaaaagttggaaaggctggtggatgtactgaggaagaaggttggaaccgggaccatgaggacagtgatctgattgaaaaaaaacgacagtctggggaagcgatcacatctggtgaccaggctgcttcattcaacactgtgtaaacaccaaagccttaacttagcaaacagttgttagaagtgggacactccaaccacattccaagctgagataaaatcaaatcacaaatgtttaaccactttgctgctgacttgagttatttatccaaatatattaactatagacttttaccaatgggtagctataaggttacagcttattttgtaactattttatatctcaatatctttaatataaatctttttactgagagatcattatagaaacatgttaaagttggttaggatcatatcttcacatatggccctttctgaatcaaagtgcggcaaagtaaatattgtctaagctttaatccactgtgttaggtcaaaacttcaaatacatgcatttttcaatatagggtatatttcttaactgatgagagaggcttagacatgagtgtgtagtcttccttcaatgcgtgtatgtaatctttgttagtataaaagatattaaatataggtgccaagaattaaatgtataatttgtttaataagagatggatatattaaaattacattcatcaaggcatgatttttgtttcactacaaataatgcaaactgttttcaataaaaagaggagactgttaatgtgt

SEQ ID NO: 237215 - DNA, 2183 bp, Artificial Sequence
  derived and/or modified sequence
ggaacgaggtctcactatattgcccagactggtctcgaactcctgggctcaaacagtccccctgcgttggcctcccaaagtgatggaattacaggtgtgaatcactgcatctgactatggcaaggatctctgtcactgagctaatccaaaagtaaatgagaaacttagaaaaagattgccaattccaaatcaacatatttagagaaaattggaaaaggagaagcttactacagctttatttgaggactttttaaagaacgctgggttctatctgtgagctgcaaatcttggagcaaaaaccagagacattgccagagcaaacaagaacagaaatacaaatggagaactggtcaaaagacataacccacagttatcttgaacaagaaactacggggataaataaaagtacgcagccagatgagcaactgactatgaattctgagaaaagtatgcatcggaaatccactgaattagttaatgaaataacatgtgagaacacagaatggccagggcagagatcaacgaattttcagatcatcagttcttatccagatgatgagtctgtttactgcactactgaaaaatacaacgttatggaacatagacataatgatatgcattatgaatgtatgactccttgtcaagttacttcagactcagataaagagaagacaatagcatttcttctaaaagaattggatattctcagaacaagcaataaaaagcttcagcagaaattggctaaagaagataaagaacagagaaaactaaagtttaagctggaactccaagagaaagaaacagaagctaaaattgctgaaaagacagcagctctggttgaagaagtgtattttgcgcagaaggaacgtgatgaagctgttatgtctagactgcaattagccattgaggagagagatgaagcaattgcacgagccaagcatatggaaatgtctctaaaagtgctagaaaatattaaccctgaagaaaatgacatgacattacaggaattactgaacagaataaacaatgcagacacagggatagctattcagaagaatggagctataattgtggatagaatctacaagaccaaggaatgtaaaatgagaataactgcagaagaaatgagtgcactaatagaagaacgggatgctgccttgtctaagtgcaaacggttagagcaggagcttcatcatgtgaaagagcagaaccagacttcagcaaacaacatgagacatctgactgctgaaaacaatcaagaacgtgctctgaaggcaaagttgttatctatgcaacaagccagagaaactgcagttcaacagtacaaaaaactggaagaggaaatccagacccttcgagtttactacagtttacacaaatctttatctcaagaagaaaatctgaaggatcagtttaactatacccttagtacatatgaagaagctttaaaaaacagagagaacattgtttccatcactcaacaacaaaatgaggaactggctactcaactgcaacaagctctgacagagcgagcaaatatggaattacaacttcaacatgccagagaggcctcccaagtggccaatgaaaaagttcaaaagttggaaaggctggtggatgtactgaggaagaaggttggaaccgggaccatgaggacagtgatctgattgaaaaaaaacgacagtctggggaagcgatcacatctggtgaccaggctgcttcattcaacactgtgtaaacaccaaagccttaacttagcaaacagttgttagaagtgggacactccaaccacattccaagctgagataaaatcaaatcacaaatgtttaaccactttgctgctgacttgagttatttatccaaatatattaactatagacttttaccaatgggtagctataaggttacagcttattttgtaactattttatatctcaatatctttaatataaatctttttactgagagatcattatagaaacatgttaaagttggttaggatcatatcttcacatatggccctttctgaatcaaagtgcggcaaagtaaatattgtctaagctttaatccactgtgttaggtcaaaacttcaaatacatgcatttttcaatatagggtatatttcttaactgatgagagaggcttagacatgagtgtgtagtcttccttcaatgcgtgtatgt

SEQ ID NO: 237216 - DNA, 1329 bp, Artificial Sequence
  derived and/or modified sequence
atggagaactggagcaaggacatcacccacagctacctggagcaggaaaccaccggaattaacaagtcaacccagcctgacgaacagctcacaatgaattccgaaaaaagcatgcatagaaagtctactgagctggttaacgagattacttgtgagaatacggagtggcctggtcagcggagtacaaatttccagattatttcctcatatcctgatgacgaatccgtttactgcaccactgagaagtataacgtgatggaacatcgccacaacgatatgcactacgagtgcatgactccatgccaggtcacctccgattccgataaagaaaagaccatcgcttttctcctgaaagagctcgacatcctccggaccagcaataaaaagcttcaacagaaactagccaaggaagataaagaacagcgaaaactgaaatttaaactcgaactgcaggagaaggagaccgaggctaagatcgccgaaaaaacggccgcattagttgaggaagtgtatttcgcccagaaggagcgcgacgaggctgtgatgtcccgcttgcaacttgccattgaagagcgggacgaagccatcgcccgggcaaagcacatggaaatgagcctaaaagtcctggagaatatcaatcctgaggagaatgatatgactttgcaggagctgttgaataggatcaacaatgcggacaccgggatagccatccaaaaaaacggcgcaatcattgttgatagaatctacaaaacgaaggagtgcaagatgcgcatcaccgccgaggagatgtccgctctcatcgaagaacgagacgctgctttgtcaaagtgtaagcgactcgagcaggagctgcatcacgttaaggagcagaatcagacatccgccaataacatgagacatctgaccgctgagaacaatcaagaacgggctctcaaagccaagctgctgagcatgcagcaggctcgggagacagctgtgcagcagtacaagaagctggaagaggaaatccagactttacgcgtgtactatagcctgcacaagtctctgtcccaggaggagaacctaaaggatcagtttaattacaccctgagtacgtacgaagaagctcttaagaatcgagagaacatcgtgtctattacgcagcagcagaacgaagagcttgccacacaactccagcaagcactcaccgaacgggctaatatggagctgcagctacagcacgcccgggaagcgtcgcaggtggcaaacgagaaggtgcagaagctagaaagacttgttgatgtgctgaggaagaaagtgggaacgggcacgatgagaactgtgatttag

SEQ ID NO: 237217 - DNA, 1329 bp, Artificial Sequence
  derived and/or modified sequence
atggagaactggagcaaggacatcacccacagctacctggagcaggaaactacaggcatcaataagtctacccagccagacgaacagctgactatgaactcagagaagagcatgcaccggaagtcaactgagcttgtgaatgagattacttgtgagaatacagagtggcctggacagaggtctaccaactttcagatcatctcctcctatcccgatgatgagagcgtatactgcaccaccgagaagtacaacgtgatggagcaccgtcataatgatatgcactacgagtgtatgactccctgtcaggtcacttctgactctgataaagagaagactatagcctttttgctgaaggaacttgatattctccgcacttccaataaaaaactgcagcagaaacttgccaaggaagataaggagcaaagaaaactcaagttcaaattggagctccaggagaaggagactgaggccaagatcgctgaaaagaccgccgcccttgtcgaggaggtttattttgcacagaaggagagagacgaagccgtgatgagccggctgcagttggcaatcgaggagagagacgaggccatcgcacgtgctaagcacatggagatgagtttaaaggtgctagagaatataaatcctgaggagaacgacatgactctgcaggagctgttaaatagaataaataatgctgacacagggatcgcaattcagaaaaacggcgctatcatagtggatcgaatatataaaacaaaggaatgtaaaatgcgcatcaccgccgaagagatgagcgccttgatcgaggaacgtgacgccgctctgagcaagtgtaaacgcctcgagcaagagttacatcatgtcaaggaacagaatcagaccagcgcaaacaacatgcggcatctgacagcggaaaataaccaagagcgggccttgaaggctaagctgctatccatgcagcaggctcgagaaaccgctgttcagcagtataagaagctagaagaagaaatacaaactctcagagtttactacagcctccacaagtccctgtcgcaggaagagaacctgaaggatcagttcaattacactcttagtacatacgaggaagctctcaagaaccgcgagaacattgtgtctatcactcagcagcagaatgaggagctggctacgcagctacagcaggccctgacagagcgagccaacatggaactccaactgcagcacgcaagggaggcttcgcaggtggcaaacgaaaaagttcagaagctcgaaaggctcgtcgatgtgctccgaaagaaagtcggaacaggaacaatgagaacggttatctag

SEQ ID NO: 237218 - DNA, 786 bp, Artificial Sequence
  derived and/or modified sequence
atgagccggctgcagctggccatcgaggagcgggacgaggccatcgcacgcgccaagcacatggagatgtcgttgaaggtgcttgagaatattaaccccgaggagaacgatatgaccctccaggaattgttgaaccgcatcaataatgctgacactggcattgcaatccagaagaatggagctatcatagtggatagaatctacaagacaaaagagtgtaagatgaggatcacagcagaggaaatgagcgcccttatcgaggagagagacgcggcactgagcaagtgtaagcgactggaacaagaactccatcacgttaaggaacagaaccaaacttccgctaacaatatgagacaccttactgctgagaacaaccaggaaagagccttgaaggctaaactgctgtcgatgcagcaggctagggaaaccgcagtgcagcagtacaaaaaactcgaggaggaaatccagaccctcagagtctactattctttgcataaatctctttctcaggaagagaatctgaaagatcagtttaattacacgctgtctacttatgaagaggctctcaagaatagagaaaatattgtgagcattacacaacagcagaacgaagagctggctacacagttgcagcaggctcttacagagagagcgaatatggagctacagctccagcacgctcgtgaagcttctcaggtggccaatgaaaaagtccagaaactggaaagacttgtggatgtccttcgcaagaaggtgggcacaggcaccatgcggacagtgatttag

SEQ ID NO: 237219 - DNA, 1329 bp, Artificial Sequence
  derived and/or modified sequence
atggagaactggagcaaggacatcacccacagctacctggagcaggagactactgggattaacaaatccacacagcccgacgagcagctgaccatgaacagcgaaaagtctatgcataggaagtcaaccgagttggttaatgagattacctgtgaaaataccgaatggccggggcaaagaagcacgaactttcagataattagctcatatccggacgatgagtccgtgtactgcactacagaaaaatacaacgtaatggagcatagacataatgacatgcactatgagtgcatgacaccttgccaggtaacgtctgactccgacaaggagaagaccatcgcattcctgctgaaagaacttgatatcttgcgcactagcaataagaagctgcagcaaaagttggccaaagaggataaggagcaacggaagctcaaatttaagctcgaactgcaggagaaggagacagaggccaaaatcgccgagaaaaccgctgcgctagtcgaagaagtgtacttcgcacaaaaggagcgtgacgaggcggtgatgagcaggttacagttggccattgaggagcgggatgaagccattgctcgcgcgaagcacatggaaatgagcctgaaagtcctggaaaacatcaacccggaagagaacgatatgacccttcaggagttgctcaatcgcattaataatgctgacacgggaatagcaatccaaaagaacggtgccatcatcgtggatcgcatctacaagacaaaggagtgcaaaatgcgcatcacggccgaggaaatgtcagccctaatcgaagagcgcgatgctgccctgagtaagtgcaagagactggagcaagaactgcatcatgtcaaggaacagaatcagaccagcgcaaacaatatgaggcacctcacagcagaaaacaaccaggaacgggcattaaaggccaagcttctgtctatgcagcaggccagggaaacggccgtgcagcagtacaagaagctggaagaggagatccagacactgcgggtgtactacagtctccacaagagcctaagtcaggaggaaaaccttaaagaccagtttaattacaccctgtcaacgtatgaagaagcactgaagaatcgcgagaacatagtttcgatcacccagcagcagaacgaagaattggctactcagctccagcaggctctgaccgagcgggccaacatggaactacaactgcaacatgcaagggaagcatcccaggtagccaacgagaaggtgcagaagctggaacgcctggtagacgtcttgaggaagaaagtgggcacaggcaccatgcgcacagtgatctag

SEQ ID NO: 237220 - DNA, 1329 bp, Artificial Sequence
  derived and/or modified sequence
atggagaattggtccaaggacattacgcattcttatctggaacaggaaactacgggcattaacaagtctactcaacctgatgagcagctcactatgaactcagagaagtccatgcatcgcaagagtacagaactggtcaacgagatcacatgcgaaaacaccgagtggcccggacagcggtctactaatttccagattatctccagttaccctgatgatgagtccgtgtattgtaccacagaaaagtacaatgtgatggaacaccggcacaacgacatgcactatgagtgcatgaccccctgtcaagtgaccagtgactctgataaggagaaaacaattgcgtttctcctgaaggagttggatatcctccggacctccaacaaaaagctgcagcaaaaactggctaaagaggataaagagcagcgaaagctgaaattcaagttggaactgcaagaaaaagagacggaggctaagattgccgagaagaccgccgctctcgtcgaggaggtgtactttgcccagaaggaaagagatgaggccgtgatgtctcgcctccagctggcgatcgaggagagggatgaagcaattgcaagggcgaagcatatggagatgagcctgaaagtactggagaacattaatcctgaagagaacgatatgaccttacaggaactgctaaatcgcatcaacaatgcagacacaggaatagcgatccaaaagaacggagcaatcatagtcgacagaatctataagacaaaagaatgcaaaatgcgtattaccgccgaggagatgtcggcgttgatcgaagagcgcgatgccgcattgtccaagtgtaaaagattggagcaggagctgcaccacgtgaaggagcagaatcagacatcagccaataacatgaggcacttaaccgcagagaataatcaagaacgtgctctaaaggctaagctcctgagtatgcagcaggccagagaaaccgcagtgcagcagtataaaaagctggaggaagagatccagacccttagggtgtattactcgctccataaatcactttcgcaagaggagaacttgaaggaccaatttaattacacactctctacctacgaagaagctctgaaaaaccgggaaaatatcgtgtccattacacagcaacagaacgaagaactggcgacccagctgcagcaggccctcacagaacgcgctaacatggaacttcaactccagcacgcacgagaagccagtcaggtcgccaatgagaaagtccaaaagctggagcggctggtcgacgtactacggaagaaagtcgggacaggcactatgagaaccgtgatctag

SEQ ID NO: 237221 - DNA, 1329 bp, Artificial Sequence
  derived and/or modified sequence
atggagaactggagtaaggatattacacatagctatctggagcaggagacaaccggcatcaataagagtacacagccggacgaacagctgactatgaatagcgaaaaaagcatgcataggaaatctacggaattagtaaatgaaataacatgtgagaatactgagtggccgggtcaacggtccaccaatttccagatcatctcatcctaccccgacgacgaatcggtttactgtacaactgaaaaatacaacgtaatggaacaccgccataatgatatgcactatgagtgcatgacgccatgtcaggtaacaagcgattccgacaaagagaagaccattgcattcctgcttaaagagcttgacatacttcggacatcgaacaaaaagctgcagcagaagttagccaaggaggataaagagcagagaaagctgaagttcaaactagaactgcaggaaaaggaaaccgaagcaaagatcgcggaaaagaccgctgctctggtggaggaggtgtatttcgctcagaaggagcgggatgaagcggtcatgagccgtctgcagcttgcaattgaagagcgcgacgaagccatagccagggccaagcatatggaaatgagcctgaaggtgctggaaaatattaaccccgaagagaacgacatgacactgcaggaactgcttaatcgaatcaacaatgcagataccggcattgccatccagaagaatggggctattatcgtcgaccgcatttacaagacaaaggagtgtaaaatgcggatcacagcagaggaaatgtctgcgctgatcgaagaaagagacgctgcattgtctaaatgcaaacgactggaacaggaactccaccatgtgaaggagcagaaccagaccagtgctaataacatgaggcatcttactgctgagaacaaccaggagagggcactgaaagccaagctgctgtctatgcagcaagctagggaaacagctgttcagcagtataagaaactcgaggaggagattcagactctccgtgtgtattatagtctccacaaaagcctgtctcaggaggaaaacctgaaggatcagttcaactacacactgtccacatacgaggaagcgctgaagaacagagaaaacattgtgagcattacccaacagcagaatgaggaactcgcgactcaactgcagcaggctcttactgagagagcaaacatggaattacaactgcaacacgctagagaggcttcccaagtggcaaatgaaaaggtgcagaagctggaacggctagttgatgtgctgagaaagaaggtgggcaccgggaccatgcgaaccgtaatttag

SEQ ID NO: 237222 - DNA, 786 bp, Artificial Sequence
  derived and/or modified sequence
atgagcagactgcagctcgccattgaggagcgggatgaggccatcgccagggccaaacacatggagatgagtctgaaggtcttggaaaatattaatcccgaagagaacgacatgactcttcaggaacttttgaacaggatcaacaacgccgataccggaatcgcaatccagaaaaacggcgctatcatcgtggaccgcatttacaaaacaaaggaatgcaagatgcgcatcaccgcagaagaaatgtctgcccttatcgaagagcgggacgccgcattgtctaaatgtaaaaggctcgaacaggaattacaccatgtcaaggaacaaaaccagacgtccgctaataacatgcggcaccttacagctgagaataaccaggagagggccctaaaggcaaagctcctatctatgcagcaggccagggagacagccgtccagcagtataaaaaactggaagaagaaattcagactctacgagtgtattactccctgcacaaaagtctgtctcaggaggagaacctcaaggatcaattcaattacaccctaagtacctatgaagaggctctcaagaatcgcgaaaatatcgtatctattacacagcagcaaaacgaggagctcgcgacccagcttcagcaggccttgacagagcgcgcaaatatggaactgcagttgcagcacgcacgggaagctagtcaggtagcaaatgaaaaggtccagaagttggagcgactggttgacgtgctcagaaagaaagtcggcacaggcacgatgcgaaccgtcatttag

SEQ ID NO: 237223 - DNA, 1329 bp, Artificial Sequence
  derived and/or modified sequence
atggagaattggagtaaagacatcacccactcctacctcgagcaggagactaccggaataaacaaaagcacgcagccagatgaacagctcacaatgaattctgagaagagcatgcatcgcaagtccacagagctggttaacgagataacttgcgagaatactgaatggcccggacaaaggagtaccaattttcagatcatctcttcctaccccgacgatgaaagcgtctactgtactactgaaaagtacaatgtgatggagcatcggcataacgatatgcattacgagtgcatgactccctgccaggtcacctctgactcagataaagagaagacgatcgctttccttttgaaagagctcgatattcttcggacctccaataagaagcttcaacaaaagctggccaaggaagacaaggagcagaggaaactcaagtttaaattagagctgcaggaaaaagaaaccgaagccaagatcgccgaaaagactgcagccttggtggaggaagtgtatttcgcccagaaggagcgcgatgaggcagtgatgagcagacttcagcttgccatcgaggaacgggatgaggccattgcgagggctaagcacatggaaatgtcgctgaaagtgttggaaaacattaacccagaagagaacgacatgactctgcaggagctgctgaaccggattaacaatgctgacaccggaattgccatacagaagaacggggcaattattgttgacagaatttataagactaaggagtgtaagatgagaattaccgcagaggaaatgtctgccttgatagaggaaagggatgccgctttgtctaaatgtaaacggcttgaacaggagctgcaccacgtgaaagaacagaaccagacctccgcaaacaacatgaggcacctcactgccgaaaataatcaggagcgtgcactgaaggctaagttgttaagtatgcagcaagccagggagacagcggtgcagcagtataaaaagctcgaggaagagatccagacactccgcgtatactatagcctacacaagtctttaagccaagaagagaacctgaaggatcagtttaactatactctctcaacctacgaggaagctttgaaaaatagggagaatatagtttcaattacccagcagcagaatgaagagctggcaacacagctgcaacaggcgttaaccgaacgggctaatatggagttacaactgcagcacgccagagaggctagccaggtggccaatgagaaagtgcagaagctggaacgcctggtcgatgtgctgcggaagaaagtaggaacaggaactatgcgaactgtgatttag

SEQ ID NO: 237224 - DNA, 1329 bp, Artificial Sequence
  derived and/or modified sequence
atggagaactggagcaaggacatcacccacagctacctggagcaggagaccaccggcatcaacaagagcacccagcccgacgagcagctgaccatgaacagcgagaagagcatgcacagaaagagcaccgagctggtgaacgagatcacctgcgagaacaccgagtggcccggccagagaagcaccaacttccagatcatcagcagctaccccgacgacgagagcgtgtactgcaccaccgagaagtacaacgtgatggagcacagacacaacgacatgcactacgagtgcatgaccccctgccaggtgaccagcgacagcgacaaggagaagaccatcgccttcctgctgaaggagctggacatcctgagaaccagcaacaagaagctgcagcagaagctggccaaggaggacaaggagcagagaaagctgaagttcaagctggagctgcaggagaaggagaccgaggccaagatcgccgagaagaccgccgccctggtggaggaggtgtacttcgcccagaaggagagagacgaggccgtgatgagcagactgcagctggccatcgaggagagagacgaggccatcgccagagccaagcacatggagatgagcctgaaggtgctggagaacatcaaccccgaggagaacgacatgaccctgcaggagctgctgaacagaatcaacaacgccgacaccggcatcgccatccagaagaacggcgccatcatcgtggacagaatctacaagaccaaggagtgcaagatgagaatcaccgccgaggagatgagcgccctgatcgaggagagagacgccgccctgagcaagtgcaagagactggagcaggagctgcaccacgtgaaggagcagaaccagaccagcgccaacaacatgagacacctgaccgccgagaacaaccaggagagagccctgaaggccaagctgctgagcatgcagcaggccagagagaccgccgtgcagcagtacaagaagctggaggaggagatccagaccctgagagtgtactacagcctgcacaagagcctgagccaggaggagaacctgaaggaccagttcaactacaccctgagcacctacgaggaggccctgaagaacagagagaacatcgtgagcatcacccagcagcagaacgaggagctggccacccagctgcagcaggccctgaccgagagagccaacatggagctgcagctgcagcacgccagagaggccagccaggtggccaacgagaaggtgcagaagctggagagactggtggacgtgctgagaaagaaggtgggcaccggcaccatgagaaccgtgatctag

SEQ ID NO: 237225 - DNA, 786 bp, Artificial Sequence
  derived and/or modified sequence
atgagcagactgcagctggccatcgaggagagagacgaggccatcgccagagccaagcacatggagatgagcctgaaggtgctggagaacatcaaccccgaggagaacgacatgaccctgcaggagctgctgaacagaatcaacaacgccgacaccggcatcgccatccagaagaacggcgccatcatcgtggacagaatctacaagaccaaggagtgcaagatgagaatcaccgccgaggagatgagcgccctgatcgaggagagagacgccgccctgagcaagtgcaagagactggagcaggagctgcaccacgtgaaggagcagaaccagaccagcgccaacaacatgagacacctgaccgccgagaacaaccaggagagagccctgaaggccaagctgctgagcatgcagcaggccagagagaccgccgtgcagcagtacaagaagctggaggaggagatccagaccctgagagtgtactacagcctgcacaagagcctgagccaggaggagaacctgaaggaccagttcaactacaccctgagcacctacgaggaggccctgaagaacagagagaacatcgtgagcatcacccagcagcagaacgaggagctggccacccagctgcagcaggccctgaccgagagagccaacatggagctgcagctgcagcacgccagagaggccagccaggtggccaacgagaaggtgcagaagctggagagactggtggacgtgctgagaaagaaggtgggcaccggcaccatgagaaccgtgatctag

SEQ ID NO: 237226 - protein, 1642 aa, Artificial Sequence
  derived and/or modified sequence
MASGSRWRPTPPPLLLLLLLALAARADGLEFGGGPGQWARYARWAGAASSGELSFSLRTNATRALLLYLDDGGDCDFLELLLVDGRLRLRFTLSCAEPATLQLDTPVADDRWHMVLLTRDARRTALAVDGEARAAEVRSKRREMQVASDLFVGGIPPDVRLSALTLSTVKYEPPFRGLLANLKLGERPPALLGSQGLRGATADPLCAPARNPCANGGLCTVLAPGEVGCDCSHTGFGGKFCSEAPSPFQGPAHLTLNSEGKEEFVATFKGNEFFCYDLSHNPIQSSTDEITLAFRTLQRNGLMLHTGKSADYVNLSLKSGAVWLVINLGSGAFEALVEPVNGKFNDNAWHDVRVTRNLRQHAGIGHAMVTISVDGILTTTGYTQEDYTMLGSDDFFYIGGSPNTADLPGSPVSNNFMGCLKDVVYKNNDFKLELSRLAKEGDPKMKLQGDLSFRCEDVAALDPVTFESPEAFVALPRWSAKRTGSISLDFRTTEPNGLLLFSQGRRAGGGAGSHSSAQRADYFAMELLDGHLYLLLDMGSGGIKLRASSRKVNDGEWCHVDFQRDGRKGSISVNSRSTPFLATGDSEILDLESELYLGGLPEGGRVDLPLPPEVWTAALRAGYVGCVRDLFIDGRSRDLRGLAEAQGAVGVAPFCSRETLKQCASAPCRNGGVCREGWNRFICDCIGTGFLGRVCEREATVLSYDGSMYMKIMLPNAMHTEAEDVSLRFMSQRAYGLMMATTSRESADTLRLELDGGQMKLTVNLGKGPETLFAGHKLNDNEWHTVRVVRRGKSLQLSVDNVTVEGQMAGAHMRLEFHNIETGIMTERRFISVVPSNFIGHLSGLVFNGQPYMDQCKDGDITYCELNARFGLRAIVADPVTFKSRSSYLALATLQAYASMHLFFQFKTTAPDGLLLFNSGNGNDFIVIELVKGYIHYVFDLGNGPSLMKGNSDKPVNDNQWHNVVVSRDPGNVHTLKIDSRTVTQHSNGARNLDLKGELYIGGLSKNMFSNLPKLVASRDGFQGCLASVDLNGRLPDLIADALHRIGQVERGCDGPSTTCTEESCANQGVCLQQWDGFTCDCTMTSYGGPVCNDPGTTYIFGKGGALITYTWPPNDRPSTRMDRLAVGFSTHQRSAVLVRVDSASGLGDYLQLHIDQGTVGVIFNVGTDDITIDEPNAIVSDGKYHVVRFTRSGGNATLQVDSWPVNERYPAGRQLTIFNSQAAIKIGGRDQGRPFQGQVSGLYYNGLKVLALAAESDPNVRTEGHLRLVGEGPSVLLSAETTATTLLADMATTIMETTTTMATTTTRRGRSPTLRDSTTQNTDDLLVASAECPSDDEDLEECEPSTGGELILPIITEDSLDPPPVATRSPFVPPPPTFYPFLTGVGATQDTLPPPAARRPPSGGPCQAERDDSDCEEPIEASGFASGEVFDSSLPPTDDEDFYTTFPLVTDRTTLLSPRKPAPRPNLRTDGATGAPGVLFAPSAPAPNLPAGKMNHRDPLQPLLENPPLGPGAPTSFEPRRPPPLRPGVTSAPGFPHLPTANPTGPGERGPPGAVEVIRESSSTTGMVVGIVAAAALCILILLYAMYKYRNRDEGSYQVDQSRNYISNSAQSNGAVVKEKAPAAPKTPSKAKKNKDKEYYV

SEQ ID NO: 237227 - protein, 1642 aa, Artificial Sequence
  derived and/or modified sequence
MASGSRWRPTPPPLLLLLLLALAARADGLEFGGGPGQWARYARWAGAASSGELSFSLRTNATRALLLYLDDGGDCDFLELLLVDGRLRLRFTLSCAEPATLQLDTPVADDRWHMVLLTRDARRTALAVDGEARAAEVRSKRREMQVASDLFVGGIPPDVRLSALTLSTVKYEPPFRGLLANLKLGERPPALLGSQGLRGATADPLCAPARNPCANGGLCTVLAPGEVGCDCSHTGFGGKFCSEEEHPMEGPAHLTLNSEGKEEFVATFKGNEFFCYDLSHNPIQSSTDEITLAFRTLQRNGLMLHTGKSADYVNLSLKSGAVWLVINLGSGAFEALVEPVNGKFNDNAWHDVRVTRNLRQHAGIGHAMVTISVDGILTTTGYTQEDYTMLGSDDFFYIGGSPNTADLPGSPVSNNFMGCLKDVVYKNNDFKLELSRLAKEGDPKMKLQGDLSFRCEDVAALDPVTFESPEAFVALPRWSAKRTGSISLDFRTTEPNGLLLFSQGRRAGGGAGSHSSAQRADYFAMELLDGHLYLLLDMGSGGIKLRASSRKVNDGEWCHVDFQRDGRKGSISVNSRSTPFLATGDSEILDLESELYLGGLPEGGRVDLPLPPEVWTAALRAGYVGCVRDLFIDGRSRDLRGLAEAQGAVGVAPFCSRETLKQCASAPCRNGGVCREGWNRFICDCIGTGFLGRVCEREATVLSYDGSMYMKIMLPNAMHTEAEDVSLRFMSQRAYGLMMATTSRESADTLRLELDGGQMKLTVNLGKGPETLFAGHKLNDNEWHTVRVVRRGKSLQLSVDNVTVEGQMAGAHMRLEFHNIETGIMTERRFISVVPSNFIGHLSGLVFNGQPYMDQCKDGDITYCELNARFGLRAIVADPVTFKSRSSYLALATLQAYASMHLFFQFKTTAPDGLLLFNSGNGNDFIVIELVKGYIHYVFDLGNGPSLMKGNSDKPVNDNQWHNVVVSRDPGNVHTLKIDSRTVTQHSNGARNLDLKGELYIGGLSKNMFSNLPKLVASRDGFQGCLASVDLNGRLPDLIADALHRIGQVERGCDGPSTTCTEESCANQGVCLQQWDGFTCDCTMTSYGGPVCNDPGTTYIFGKGGALITYTWPPNDRPSTRMDRLAVGFSTHQRSAVLVRVDSASGLGDYLQLHIDQGTVGVIFNVGTDDITIDEPNAIVSDGKYHVVRFTRSGGNATLQVDSWPVNERYPAGRQLTIFNSQAAIKIGGRDQGRPFQGQVSGLYYNGLKVLALAAESDPNVRTEGHLRLVGEGPSVLLSAETTATTLLADMATTIMETTTTMATTTTRRGRSPTLRDSTTQNTDDLLVASAECPSDDEDLEECEPSTGGELILPIITEDSLDPPPVATRSPFVPPPPTFYPFLTGVGATQDTLPPPAARRPPSGGPCQAERDDSDCEEPIEASGFASGEVFDSSLPPTDDEDFYTTFPLVTDRTTLLSPRKPAPRPNLRTDGATGAPGVLFAPSAPAPNLPAGKMNHRDPLQPLLENPPLGPGAPTSFEPRRPPPLRPGVTSAPGFPHLPTANPTGPGERGPPGAVEVIRESSSTTGMVVGIVAAAALCILILLYAMYKYRNRDEGSYQVDQSRNYISNSAQSNGAVVKEKAPAAPKTPSKAKKNKDKEYYV

SEQ ID NO: 237228 - DNA, 4929 bp, Artificial Sequence
  derived and/or modified sequence
atggcctccggatctcgctggaggcccacccctcctcctctgttgctgctcctgctactcgcattggccgcaagagcagacgggctagagtttggaggcggccccggccagtgggccagatatgcccgatgggcaggggcagcttcctctggggagcttagttttagcctccggacaaatgcaacaagggctctgctgctgtacctggatgatgggggtgattgcgacttcctggagctgcttctggtggacggaaggctgcggctgcgctttacgctcagttgtgctgaaccagccacattgcaactcgatacacctgttgcagacgataggtggcatatggtgctgctgacgagagatgctcgacgcacggccctggctgtggatggcgaagcaagggctgcggaagtgagatccaaaaggagggagatgcaggttgcttctgaccttttcgtgggaggtatccccccagatgtgcgcctgtcagcgctcaccctgagcaccgtgaagtacgagccaccatttagagggcttctcgccaacctcaaactgggagagagacccccagctcttttaggatctcagggcctgagaggggctacagcagatccactttgcgcaccagccagaaatccatgtgccaacggggggctgtgcaccgtcttagctccgggggaagttggatgcgattgcagtcatacaggatttggaggtaaattctgcagtgaggctccaagcccttttcaggggcctgcacatctcaccctgaattccgaaggaaaggaagaattcgtcgcgacatttaagggcaatgagttcttctgctacgacctgagtcataatcccatccagtcgtccacggacgaaataacattggccttccgcacactacagagaaacggactgatgttacatacaggcaaatcggccgattacgtaaatctgtctctgaagagcggcgccgtctggcttgtgatcaacctgggatctggagcattcgaagctcttgtggagcccgtaaatggcaaatttaatgataatgcctggcatgatgtgcgcgtgacgcggaatcttagacaacatgcgggaattgggcacgcgatggttaccatctcagtggatggtattctgactactacgggatacacccaagaggattatacaatgctgggatcagatgactttttctacattggggggagtccaaacacagccgacctgcccggaagcccggttagtaacaatttcatgggctgtttgaaggacgtggtttataaaaacaatgatttcaaactggagctgtctagacttgctaaagaaggtgaccccaagatgaaactgcagggcgacctatccttccggtgtgaggacgtggcggcattggacccggtcacatttgaaagcccagaggcttttgtggcactcccccggtggtccgctaagagaaccggatctatttcccttgactttcggaccactgaacccaatggactattgttgttttcacagggtaggcgagcaggcggcggggcaggaagtcactcaagcgcccagagagccgattattttgcaatggagctgttagacggacacctgtacctgctgctggatatggggagtgggggtattaagctcagagcctcatctagaaaagtaaacgatggggagtggtgtcacgtagactttcagagagacgggaggaagggatctatcagtgtgaacagccgatccaccccatttctcgcaacaggcgattcggagatcttggacctcgagtcagagctgtatctgggcgggttgccagaaggggggagggtcgacctgcctctacccccagaagtctggaccgccgccttgagggccgggtatgtgggctgcgtccgggatcttttcatcgatggtcgctcgcgagatctgcgagggctggcagaagcacagggagctgtgggagtcgctccgttctgctctcgggagacgcttaagcagtgtgcaagtgcgccatgccgaaacggcggcgtgtgccgggagggatggaatcggtttatctgcgactgcatcggtactgggtttcttggaagggtgtgtgaacgtgaagctacggtgctgagttacgatggatctatgtatatgaaaatcatgcttccaaatgcgatgcataccgaggccgaagacgtctcactgcgatttatgtcacagcgagcttacggtctgatgatggccactacgtccagagaaagcgctgatactttgagactggagctggatggaggacagatgaaactcactgtcaatttgggaaagggcccggaaacactgtttgctggacacaagttgaatgataatgagtggcacacagtcagagtggtaaggcgggggaagagtttgcagcttagtgtcgacaacgtgaccgtggaagggcaaatggccggagcgcatatgagactcgagtttcacaacattgagaccggtatcatgaccgagaggcgctttattagcgttgtgccatctaacttcattggtcacctgtcaggattggtgttcaacggacagccttatatggaccagtgcaaggacggagacattacctactgcgaactaaacgcacgatttgggcttcgagcgatagtggccgatcctgtaacctttaaaagcaggagctcctacttggctctggcaactcttcaagcctacgcaagtatgcacttgttcttccagtttaagaccacagcacccgatgggctcctgttgtttaattccggcaacggcaacgatttcattgtgatagaattggtgaagggatacattcactacgtctttgacctgggcaatggacccagtctgatgaaaggaaactccgataagccagtgaatgacaaccagtggcataacgtggtggtcagcagggatccaggaaacgttcacacactcaaaattgattcgcgcaccgtaacccaacactcaaatggagccaggaatctcgatctcaagggggagctctacataggcggcctttccaagaacatgttctccaatctcccaaagcttgttgcttctcgcgatggattccaaggctgcctcgcatccgtcgacctgaatggccgcctgcccgatcttatcgccgacgccttgcaccgcattggccaggtggagcgcggttgtgatggcccgtcaacaacgtgtacagaggaaagctgtgcaaatcagggcgtctgcctccagcagtgggatggattcacgtgtgactgtactatgacaagctacggcggccctgtgtgcaacgatcctggaacaacatacatcttcggcaagggcggcgccctcatcacgtatacttggccaccaaacgatcggccctccacacgcatggacagattagccgtgggcttttcgacccaccagaggagcgcagttttagtgcgcgtggattcagctagcggtctgggggactatctacaactgcacatcgatcagggcaccgttggagtcatctttaacgtggggactgatgatatcaccatagacgagccaaacgcaatagtaagcgatgggaaataccacgtcgttcggtttacccgtagcggcgggaacgctaccctgcaggtggattcctggcctgtcaacgagcgctacccggctggccggcagctgacaatttttaactcccaggccgcaatcaagataggcggccgagatcagggtaggcctttccagggacaggtgagcgggttatattacaacggactgaaagttcttgccctggcagcagagtcagaccctaatgtgcggactgaggggcatctccgactggtgggagaaggtccctcagtacttctgtcagccgagacaaccgccacgacccttctggctgatatggctaccaccatcatggagacgaccactaccatggctaccaccaccacacgcagaggcagaagcccaacactgcgcgacagtacaacccagaacacagatgacttgctggtggcatctgcagagtgcccctcagatgatgaggatctggaagaatgcgaaccctcaactggaggggagctcatcttaccaattatcaccgaagattctttagacccgccccccgtggccacgagatcccctttcgtcccaccacccccaactttctacccctttctcacaggagtcggtgcaacacaagatacactaccccctccagccgcccggcggccaccaagtgggggaccctgccaggccgaaagggacgacagtgattgtgaagagcctattgaagcttccggatttgcctctggggaggtgttcgacagctccctgcctcccactgatgacgaagatttctatacaacctttccactggttaccgatagaactactctcctgtcacctcgcaaacctgcccctcggcctaatctcagaaccgatggcgctacaggagctcccggggtacttttcgcccctagcgcccccgcccctaatttgcctgctgggaagatgaaccatcgcgaccctctgcaaccattattggagaacccacctctgggccctggcgccccgacctcctttgagcctcgacgccctccgcccttgcggccaggggttaccagcgccccagggtttccccatctaccaaccgcgaatccaacagggcctggcgaacgaggccctcccggggccgtagaagtgatccgggaatctagctccaccaccggcatggttgtgggcatcgtggcagcagccgcactgtgtattcttatcctgctatatgccatgtacaaataccgtaaccgcgatgaaggatcataccaggttgaccagagtcggaattacatttcaaattcagcccagtcaaacggggcggttgtcaaagagaaagcccccgccgctcctaaaacgccaagcaaagctaagaagaacaaggacaaggaatactacgtgtag

SEQ ID NO: 237229 - DNA, 4929 bp, Artificial Sequence
  derived and/or modified sequence
atggcaagcgggtccaggtggcggcctacacccccccctctcctcctgctgctgctgctggctctggcggcacgtgcagatggcctcgaatttggtggaggaccaggtcagtgggctaggtacgcccgatgggcaggggctgcaagctctggcgagctctcattctctcttagaacaaacgccactagagcactgctgctgtaccttgacgatggtggtgattgcgactttctggaactcttactggtggatggacggctacggctccggttcaccttgtcctgcgctgaaccagcaacactgcagcttgacacaccggtcgcggatgatcgctggcacatggttctgctgacgcgcgatgctcggaggaccgcgttagccgtcgacggagaagctcgagctgccgaggtgcgttcaaaacgaagggaaatgcaggtggcctcggatctgttcgtgggcgggatcccacccgacgtccggctcagcgctttaaccttatccactgtaaaatacgagcccccatttcgcgggctactggccaatctcaagctgggggagaggcctccggccctgctgggatcacagggactccgaggcgccaccgctgaccctttatgtgctcccgcaaggaatccttgtgccaacgggggcctctgcaccgttctggcacctggagaagtcggttgcgattgctctcacaccggcttcgggggaaagttttgtagtgaggaggagcacccaatggaaggtccggcccatcttactctgaacagcgaagggaaggaggagttcgtggccacgttcaagggtaatgagttcttctgctatgatctgagccacaaccccatccaaagtagtactgacgagataactcttgcttttagaacactccaacggaatggcctgatgcttcacacgggcaagtctgctgactatgttaacctaagcctcaagtccggcgctgtttggctagtgatcaacctgggatcgggtgcatttgaggccttagttgaacctgttaatggaaagttcaatgacaacgcttggcatgatgtgcgcgtgacacgtaatctcagacagcacgccgggatcggccacgcaatggtgactataagcgtagacggcatcctaactacgactggctacacccaggaagactatacaatgctgggaagcgatgacttcttttacataggaggctcccccaatacagcagacctgcccggttcccccgtatcaaataattttatggggtgtttgaaagatgttgtgtacaaaaacaacgattttaagctggaactgagccggctggcaaaggaaggggaccccaagatgaagctgcagggtgacctaagctttaggtgcgaggacgtagccgcactagacccggtgacctttgaatcacccgaggcctttgtggccctccccaggtggtctgcgaaacgaacaggctccataagcctcgattttcgcactactgagcctaatgggctcttgctgttctcgcagggccgccgcgcgggcggtggcgctggcagccatagctctgcacagcgggcagattatttcgccatggagttgctcgacgggcacctctaccttctgctggatatgggttccgggggtataaaactacgcgcgtcttcacgcaaagtgaatgacggagagtggtgccacgtagactttcagcgagatggcagaaagggctccatttctgtgaacagcaggagcacgcccttccttgcaaccggcgacagcgaaatcttggacctagaaagtgagctttacctcgggggtttaccggagggcggccgcgtagatcttccgctgccgccagaagtgtggacagctgcactgcgcgctggctacgtggggtgtgtccgggacctgttcatcgacggaagatcaagagatcttcgcggactcgctgaggctcagggtgccgtcggcgttgccccattttgctccagagaaaccctgaaacagtgtgcaagcgcaccttgccgcaatggaggcgtgtgtcgcgagggttggaatcgtttcatctgtgactgtatcggaaccggctttctgggacgggtttgcgagcgcgaggctacagtgttatcctacgatggctctatgtacatgaagatcatgcttccgaacgcaatgcacaccgaggctgaagacgtcagcctgcgattcatgtctcagcgagcttacgggctgatgatggctacgactagccgggagagcgcagatacgctcagactggagctggacggaggccagatgaaactgactgtgaacttgggaaaaggcccggagacgctgtttgccggacataagctgaacgacaatgaatggcatactgtccgtgtggtgcggcggggaaaatccctccaactttccgtggacaacgtgaccgttgagggccaaatggccggagctcacatgcgtctcgagttccacaacattgagactggaattatgactgagcgccgtttcatctcagtggtgcctagcaacttcattggacatctaagtggcctggtgttcaacggccagccctatatggaccagtgtaaggacggagatattacttactgcgaactgaacgctcggttcggattgcgcgctatcgtcgccgacccggtgacattcaaaagccgcagcagctatctggccctggccaccctgcaggcatacgcttctatgcatctgttcttccaattcaaaacgaccgcccctgacggccttctgctgttcaattcaggaaacggaaacgatttcatcgtgatcgagttagttaaggggtacattcactatgtatttgatttgggcaatggtcctagcctgatgaaaggcaactcggataagccagttaacgacaaccagtggcacaatgtcgtcgtgagccgcgatcctggtaacgtccatacactgaaaattgactcccgcacagtgacacagcacagtaatggagccaggaacctagaccttaaaggtgagttgtacatcggcggtttgtcaaagaatatgttcagcaatctccctaagctggtggcctcgagagatggcttccaggggtgcctggcctccgtggacctcaacggaagactgcccgacctcatcgcagacgctctccacaggataggccaagtggagaggggctgcgatggaccatctacgacctgtaccgaagagagctgcgcaaatcagggggtctgcctgcagcaatgggatgggtttacttgcgattgtacaatgacttcctacggtgggcctgtttgcaatgaccccggcactacatacattttcggcaagggcggagccctgatcacatatacgtggcccccgaatgatcgcccaagtacccgtatggatcgtctggcagtaggtttttctacgcatcagagatcagccgtgctcgtaagggtagactccgctagtggtttaggggactacctgcagcttcacatcgatcagggcacggtgggcgtgatattcaatgtaggcactgatgacattactattgatgagccaaacgccattgtgagtgatggaaagtaccatgtggtgcgatttactcgctccggaggcaatgccactctgcaagtggacagctggcccgtaaacgagaggtaccccgccggccggcagctcacgatctttaattcacaggccgctattaaaattggcggcagggatcagggaaggccgttccagggtcaagtctccggcttgtactataacggcttaaaggtcctcgctttggccgccgaatctgatccaaacgtacgaactgaggggcacctccgacttgtaggagaaggcccttccgtgctactctctgctgaaacaaccgcaacgacattactcgccgatatggcgacaacaatcatggaaacgacaactactatggctaccacaacaactcgcagaggacggtcccctactctgagggacagcactacccaaaatacagacgatctgctagtcgctagtgccgagtgcccttctgatgatgaggatttggaggagtgtgagccttctacgggtggtgaactaatcctccctatcatcaccgaggattccctcgatccccctcctgttgcgacacgctcaccattcgtgccgcccccccccactttctacccttttcttacaggtgttggggccacccaggatacactgcctccacccgctgcgcggcggcctccttctggcggcccttgccaagctgaacgagatgattccgactgtgaggagcctatcgaagccagcggatttgccagcggagaggtctttgatagctctctgccccctacagatgacgaagacttttacaccactttcccattggtgacagatcggactacactcctatcacctcgcaaaccagcccccagacccaacctccggactgacggcgccacaggggcgcccggcgtgctcttcgcaccctccgcccccgcacccaacctgcctgcaggaaagatgaatcaccgtgaccctctgcagccacttctggagaatccacccttgggacctggcgcaccaacttcgttcgagccccgccgcccgccaccactgcggccaggcgtgacaagcgcccctggctttccgcacctaccaactgctaatccgaccggaccaggggaacgaggacccccaggagcggtggaggtaattagagaatcttcctctacaacaggcatggtggttggtatcgttgcagcggcagccctgtgcattctgatactgctctacgcgatgtataagtatagaaatcgggacgaggggagctatcaagtggatcagtctagaaactatatcagcaacagtgcccaatcaaacggggccgtcgtgaaggaaaaggccccagctgctcctaagaccccatctaaagccaaaaagaacaaagataaggagtactacgtctag

SEQ ID NO: 237230 - DNA, 4929 bp, Artificial Sequence
  derived and/or modified sequence
atggccagcggcagccgctggaggcccaccccaccacccctgctgctgctgctgctgctggccctggccgcccgggcagatggcctggagtttggaggcggccctggccagtgggcccgctatgcccgctgggccggggccgccagcagcggggagctgtccttcagcctgcggaccaatgccacccgggccctgctgctgtacctggatgatggaggagactgtgacttcctggagctgctgctggtggatggccgcctgcggctgcgcttcaccctgagctgtgccgagcccgccaccctgcagctggacacccctgtggctgatgaccgctggcacatggtgctgctgaccagagatgcccggaggacagccctggccgtggatggagaggcccgggctgctgaggtgcgcagcaagagaagagagatgcaggtggccagtgacctgtttgtgggcggcatccccccagatgtgcggctgagcgccctgaccctgagcacagtgaagtatgagccccccttccggggcctgctggccaacctgaagctgggggagcggcccccagccctgctgggcagccagggcctgcggggggccacagctgaccccctgtgtgccccagccaggaacccctgtgccaatggaggcctgtgcaccgtgctggcccctggagaggtgggctgtgactgcagccacacaggctttggaggcaagttctgcagcgaggcccccagccccttccagggccctgcccacctgaccctgaacagcgagggcaaggaggagtttgtggccaccttcaagggaaatgagttcttctgctatgacctgagccacaaccccatccagagcagcacagatgagatcaccctggccttccgcaccctgcagagaaatggcctgatgctgcacacaggcaagtctgctgactatgtgaacctgagcctgaagtctggagctgtgtggctggtgatcaacctgggcagcggggcctttgaggccctggtggagcctgtgaatggcaagttcaatgacaatgcctggcatgatgtgcgggtgaccaggaacctgcggcagcacgccggcatcggccacgccatggtgaccatctctgtggatggcatcctgaccaccaccggctacacccaggaggactacaccatgctgggcagtgatgacttcttctacatcggcggcagccccaacacagctgacctgcccggcagccctgtgagcaacaacttcatgggctgcctgaaggatgtggtgtacaagaacaatgacttcaagctggagctgagccggctggccaaggagggggaccccaagatgaagctgcagggcgacctgtccttccgctgtgaagatgtggccgccctggaccctgtgacctttgagagccctgaggcctttgtggccctgccccgctggagcgccaagaggacaggcagcatcagcctggacttccgcaccacagagcccaacggcctgctgctcttcagccagggcagaagagctgggggcggggccggcagccacagcagcgcccagagagctgactactttgccatggagctgctggatggccacctgtacctgctgctggacatgggcagcggcggcatcaagctgcgggccagcagcaggaaggtgaatgatggagagtggtgccacgtggacttccagagagatggcaggaagggcagcatctctgtgaacagccgcagcacccccttcctggccactggagacagcgagatcctggacctggagagcgagctgtacctgggcggcctgcctgagggcggccgggtggacctgcccctgcccccagaggtgtggacagctgccctgcgggccggctacgtgggctgtgtgcgggacctcttcattgatggccgcagccgggacctgcggggcctggccgaggcccagggcgctgtgggcgtggcccccttctgcagccgggagaccctgaagcagtgtgccagcgccccctgcagaaatggaggagtgtgccgggagggctggaaccgcttcatctgtgactgcatcggcaccggcttcctgggccgggtgtgtgagcgggaggccaccgtgctgtcctatgatggctccatgtacatgaagatcatgctgcccaatgccatgcacacagaagcagaagatgtgtccctgcgcttcatgagccagagggcctacggcctgatgatggccaccaccagccgggagagcgctgacaccctgcggctggagctggatggcggccagatgaagctgactgtgaacctgggcaaaggacctgagaccctgtttgctggccacaagctgaatgacaatgagtggcacacagtgcgggtggtgcggcggggcaagagcctgcagctgtctgtggacaacgtgacagtggagggccagatggccggggcccacatgaggctggagttccacaacatcgagaccggcatcatgacagagcggcgcttcatctctgtggtgcccagcaacttcatcggccacctgagcggcctggtgttcaacggccagccctacatggaccagtgcaaggatggagacatcacctactgtgagctgaatgcccgcttcggcctgcgggccatcgtggccgaccctgtgaccttcaagagccgcagcagctacctggccctggccaccctgcaggcctatgcctccatgcacctgttcttccagttcaagaccacagccccagatggcctgctgctcttcaacagcggaaatggaaatgacttcatcgtcatcgagctggtgaagggctacatccactacgtgtttgacctgggcaatggccccagcctgatgaagggcaacagcgacaagcctgtgaatgacaaccagtggcacaacgtggtggtgtcccgggaccctggaaatgtgcacaccctgaagattgacagcaggacagtgacccagcacagcaatggagccaggaacctggacctgaagggggagctgtacatcggcggcctgagcaagaacatgttcagcaacctgcccaagctggtggccagcagagatggcttccagggctgcctggcctctgtggacctgaatggccgcctgcctgacctgattgctgatgccctgcaccgcatcggccaggtggagcggggctgtgatggccccagcaccacctgcacagaggagagctgtgccaaccagggcgtgtgcctgcagcagtgggatggcttcacctgtgactgcaccatgaccagctatggaggccctgtgtgcaatgaccccggcaccacctacatctttggaaaaggaggagccctgatcacctacacctggcccccaaatgaccggcccagcaccaggatggaccggctggccgtgggcttcagcacccaccagaggtctgctgtgctggtgcgggtggacagcgccagcggcctgggggactacctgcagctgcacatcgaccagggcaccgtgggcgtcatcttcaacgtgggcacagatgacatcaccattgatgagcccaatgccatcgtgtctgatggcaagtaccacgtggtgcgcttcaccaggtctggaggaaatgccaccctgcaggtggacagctggcctgtgaatgaaagatacccagctggccggcagctgaccatcttcaacagccaggccgccatcaagattggaggccgggaccagggccggcccttccagggccaggtgtctggcctgtactacaacggcctgaaggtgctggccctggccgctgagagtgaccccaacgtgaggacagagggccacctgcggctggtgggggagggccccagcgtgctgctgtctgctgagaccacagccaccaccctgctggccgacatggccaccaccatcatggagaccaccaccaccatggccaccaccaccacccggcggggccgcagccccaccctgcgggacagcaccacccagaacacagatgacctgctggtggccagcgctgagtgccccagtgatgatgaggacctggaggagtgtgagcccagcactggaggagagctgatcctgcccatcatcacagaggacagcctggaccccccacctgtggccaccaggagcccctttgtgcccccaccacccaccttctaccccttcctgactggagtgggcgccacccaggacaccctgcccccacctgctgcccggcggcccccatctgggggcccctgccaggccgagagagatgacagcgactgtgaggagcccatcgaggccagcggctttgccagcggggaggtgtttgacagcagcctgcccccaacagatgatgaggacttctacaccaccttccccctggtgacagacaggaccaccctgctgagccccaggaagccagccccccggcccaacctgaggacagatggagccaccggggcccctggggtgctgtttgcccccagcgccccagcccccaacctgcctgctgggaagatgaaccaccgggaccccctgcagcccctgctggagaacccccccctgggccctggggcccccaccagctttgagccccggcggcccccacccctgcggcctggggtgaccagcgcccctggcttcccccacctgcccacagccaaccccactggacctggagagcggggccccccaggagctgtggaggtgatccgggagagcagcagcaccaccggcatggtggtgggcatcgtggccgccgccgccctgtgcatcctgatcctgctgtatgccatgtacaagtacagaaacagagatgagggcagctaccaggtggaccagagcaggaactacatcagcaacagcgcccagagcaatggagctgtggtgaaggagaaggccccagctgcccccaagacccccagcaaggccaagaagaacaaggacaaggagtactacgtgtag

SEQ ID NO: 237231 - DNA, 4929 bp, Artificial Sequence
  derived and/or modified sequence
atggccagcggcagccgctggaggcccaccccaccacccctgctgctgctgctgctgctggccctggccgcccgggcagatggcctggagtttggaggcggccctggccagtgggcccgctatgcccgctgggccggggccgccagcagcggggagctgtccttcagcctgcggaccaatgccacccgggccctgctgctgtacctggatgatggaggagactgtgacttcctggagctgctgctggtggatggccgcctgcggctgcgcttcaccctgagctgtgccgagcccgccaccctgcagctggacacccctgtggctgatgaccgctggcacatggtgctgctgaccagagatgcccggaggacagccctggccgtggatggagaggcccgggctgctgaggtgcgcagcaagagaagagagatgcaggtggccagtgacctgtttgtgggcggcatccccccagatgtgcggctgagcgccctgaccctgagcacagtgaagtatgagccccccttccggggcctgctggccaacctgaagctgggggagcggcccccagccctgctgggcagccagggcctgcggggggccacagctgaccccctgtgtgccccagccaggaacccctgtgccaatggaggcctgtgcaccgtgctggcccctggagaggtgggctgtgactgcagccacacaggctttggaggcaagttctgcagcgaggaggagcaccccatggagggccctgcccacctgaccctgaacagcgagggcaaggaggagtttgtggccaccttcaagggaaatgagttcttctgctatgacctgagccacaaccccatccagagcagcacagatgagatcaccctggccttccgcaccctgcagagaaatggcctgatgctgcacacaggcaagtctgctgactatgtgaacctgagcctgaagtctggagctgtgtggctggtgatcaacctgggcagcggggcctttgaggccctggtggagcctgtgaatggcaagttcaatgacaatgcctggcatgatgtgcgggtgaccaggaacctgcggcagcacgccggcatcggccacgccatggtgaccatctctgtggatggcatcctgaccaccaccggctacacccaggaggactacaccatgctgggcagtgatgacttcttctacatcggcggcagccccaacacagctgacctgcccggcagccctgtgagcaacaacttcatgggctgcctgaaggatgtggtgtacaagaacaatgacttcaagctggagctgagccggctggccaaggagggggaccccaagatgaagctgcagggcgacctgtccttccgctgtgaagatgtggccgccctggaccctgtgacctttgagagccctgaggcctttgtggccctgccccgctggagcgccaagaggacaggcagcatcagcctggacttccgcaccacagagcccaacggcctgctgctcttcagccagggcagaagagctgggggcggggccggcagccacagcagcgcccagagagctgactactttgccatggagctgctggatggccacctgtacctgctgctggacatgggcagcggcggcatcaagctgcgggccagcagcaggaaggtgaatgatggagagtggtgccacgtggacttccagagagatggcaggaagggcagcatctctgtgaacagccgcagcacccccttcctggccactggagacagcgagatcctggacctggagagcgagctgtacctgggcggcctgcctgagggcggccgggtggacctgcccctgcccccagaggtgtggacagctgccctgcgggccggctacgtgggctgtgtgcgggacctcttcattgatggccgcagccgggacctgcggggcctggccgaggcccagggcgctgtgggcgtggcccccttctgcagccgggagaccctgaagcagtgtgccagcgccccctgcagaaatggaggagtgtgccgggagggctggaaccgcttcatctgtgactgcatcggcaccggcttcctgggccgggtgtgtgagcgggaggccaccgtgctgtcctatgatggctccatgtacatgaagatcatgctgcccaatgccatgcacacagaagcagaagatgtgtccctgcgcttcatgagccagagggcctacggcctgatgatggccaccaccagccgggagagcgctgacaccctgcggctggagctggatggcggccagatgaagctgactgtgaacctgggcaaaggacctgagaccctgtttgctggccacaagctgaatgacaatgagtggcacacagtgcgggtggtgcggcggggcaagagcctgcagctgtctgtggacaacgtgacagtggagggccagatggccggggcccacatgaggctggagttccacaacatcgagaccggcatcatgacagagcggcgcttcatctctgtggtgcccagcaacttcatcggccacctgagcggcctggtgttcaacggccagccctacatggaccagtgcaaggatggagacatcacctactgtgagctgaatgcccgcttcggcctgcgggccatcgtggccgaccctgtgaccttcaagagccgcagcagctacctggccctggccaccctgcaggcctatgcctccatgcacctgttcttccagttcaagaccacagccccagatggcctgctgctcttcaacagcggaaatggaaatgacttcatcgtcatcgagctggtgaagggctacatccactacgtgtttgacctgggcaatggccccagcctgatgaagggcaacagcgacaagcctgtgaatgacaaccagtggcacaacgtggtggtgtcccgggaccctggaaatgtgcacaccctgaagattgacagcaggacagtgacccagcacagcaatggagccaggaacctggacctgaagggggagctgtacatcggcggcctgagcaagaacatgttcagcaacctgcccaagctggtggccagcagagatggcttccagggctgcctggcctctgtggacctgaatggccgcctgcctgacctgattgctgatgccctgcaccgcatcggccaggtggagcggggctgtgatggccccagcaccacctgcacagaggagagctgtgccaaccagggcgtgtgcctgcagcagtgggatggcttcacctgtgactgcaccatgaccagctatggaggccctgtgtgcaatgaccccggcaccacctacatctttggaaaaggaggagccctgatcacctacacctggcccccaaatgaccggcccagcaccaggatggaccggctggccgtgggcttcagcacccaccagaggtctgctgtgctggtgcgggtggacagcgccagcggcctgggggactacctgcagctgcacatcgaccagggcaccgtgggcgtcatcttcaacgtgggcacagatgacatcaccattgatgagcccaatgccatcgtgtctgatggcaagtaccacgtggtgcgcttcaccaggtctggaggaaatgccaccctgcaggtggacagctggcctgtgaatgaaagatacccagctggccggcagctgaccatcttcaacagccaggccgccatcaagattggaggccgggaccagggccggcccttccagggccaggtgtctggcctgtactacaacggcctgaaggtgctggccctggccgctgagagtgaccccaacgtgaggacagagggccacctgcggctggtgggggagggccccagcgtgctgctgtctgctgagaccacagccaccaccctgctggccgacatggccaccaccatcatggagaccaccaccaccatggccaccaccaccacccggcggggccgcagccccaccctgcgggacagcaccacccagaacacagatgacctgctggtggccagcgctgagtgccccagtgatgatgaggacctggaggagtgtgagcccagcactggaggagagctgatcctgcccatcatcacagaggacagcctggaccccccacctgtggccaccaggagcccctttgtgcccccaccacccaccttctaccccttcctgactggagtgggcgccacccaggacaccctgcccccacctgctgcccggcggcccccatctgggggcccctgccaggccgagagagatgacagcgactgtgaggagcccatcgaggccagcggctttgccagcggggaggtgtttgacagcagcctgcccccaacagatgatgaggacttctacaccaccttccccctggtgacagacaggaccaccctgctgagccccaggaagccagccccccggcccaacctgaggacagatggagccaccggggcccctggggtgctgtttgcccccagcgccccagcccccaacctgcctgctgggaagatgaaccaccgggaccccctgcagcccctgctggagaacccccccctgggccctggggcccccaccagctttgagccccggcggcccccacccctgcggcctggggtgaccagcgcccctggcttcccccacctgcccacagccaaccccactggacctggagagcggggccccccaggagctgtggaggtgatccgggagagcagcagcaccaccggcatggtggtgggcatcgtggccgccgccgccctgtgcatcctgatcctgctgtatgccatgtacaagtacagaaacagagatgagggcagctaccaggtggaccagagcaggaactacatcagcaacagcgcccagagcaatggagctgtggtgaaggagaaggccccagctgcccccaagacccccagcaaggccaagaagaacaaggacaaggagtactacgtgtag

SEQ ID NO: 237232 - DNA, 4929 bp, Artificial Sequence
  derived and/or modified sequence
atggccagcggcagccggtggcggcccacccccccccccctgctgcttcttttgctgttagccctcgcagctagagccgacggacttgagttcggcggaggtcctggccagtgggccagatacgcacggtgggcaggagctgccagcagtggggagctgagcttctctctgcggactaacgcaactcgtgcactgctgttgtatctggacgacggtggcgactgcgattttctggagctacttctggttgacggacgactgaggctgcgtttcacccttagttgtgccgaaccagctaccctgcagcttgacactccagtggcagacgatcggtggcacatggtgctgctcacgcgggacgcgcgacgcacagccctggctgtggatggggaggcacgagcggccgaggttcgttcaaagagacgggagatgcaggtggcttcggatctcttcgtgggaggcattcctccagatgtccgcctgagtgctctgactctgtctactgtaaagtacgaacccccatttcgaggactgctggcaaacctgaagttgggggagcgacctcccgctctgcttggaagccaagggttaagaggtgctacagccgatccactttgcgcacccgcgcggaatccatgtgctaacggaggcctgtgtacagtgctcgctccaggtgaggtgggttgcgactgctcccataccggattcggcggcaagttttgctctgaagccccctcccccttccagggccctgcccatctgaccctcaatagtgaagggaaggaggagttcgtggccaccttcaaaggcaatgagtttttttgctacgacttgtcccataatccaatccagagcagtacagatgagatcacactggccttccgcaccctgcagcgtaatgggctcatgctccacaccgggaagtccgcggattatgtaaatcttagcctgaagtcaggggctgtgtggttagtgattaacttgggttctggcgcctttgaagcgttggttgagcccgtcaatggaaagttcaacgacaacgcctggcacgatgttagagttaccaggaacctgagacagcatgcaggcatcggccacgcgatggtgacgatcagcgttgacggaatcctcactacaacgggttatacccaagaagactatacaatgctgggttctgatgacttcttctatatcggaggctccccgaataccgctgacttgcccgggtcccctgtttctaacaattttatgggctgtcttaaagacgtggtttacaaaaacaacgatttcaagctcgaattgagtagactggcaaaggagggcgatcctaagatgaagctgcagggggacctgtctttccgttgtgaagacgtggcagctttagaccctgtcacatttgaaagccccgaagcttttgtggctctcccaaggtggagcgcaaagcggacgggcagtatttctcttgatttccggactacagagcccaatgggctgctcctgttcagtcagggcaggcgagctgggggcggagcagggagccactcctccgctcagcgggccgattacttcgccatggaactgttggacggccacctctacctcctgctcgacatgggatccggaggtatcaagctgagggcaagctctcggaaggtgaatgatggggagtggtgccacgtggactttcagagagacggacgaaagggctccatctcagtcaacagtcgttctacgcctttcctggctacgggggactccgagattttggatcttgaaagtgaactctacctgggagggctgcctgaaggtggccgggtggacctgcccttgcctcccgaagtttggacagcggccttgcgcgcaggttacgtcggctgtgtccgggacctctttatcgacggacggtccagggatttgagagggttggctgaggcccagggagccgtgggagtggccccattttgctcaagggaaaccctaaagcagtgcgctagcgcaccttgccgaaacggtggagtgtgcagagagggttggaatcggttcatctgtgactgcattggtaccggctttctcgggagggtgtgcgagcgggaagccactgtgctgtcatacgacgggagtatgtatatgaagataatgttgcctaacgctatgcatacagaggccgaagatgtcagtctcagattcatgagtcagagggcatacggcctcatgatggccacgacctccagggaaagtgccgataccctgaggctggaactggatggaggacaaatgaaattaacagtcaatctagggaagggcccggaaaccctgttcgctggtcacaagctgaacgacaatgaatggcatactgttagggtggttcgtcgcggcaagtcactgcagctaagcgttgacaatgtcaccgtcgaaggccagatggccggggcgcacatgagactcgaatttcacaatatcgagaccggcattatgaccgaacgcaggtttatatccgtggtgccgtccaatttcattggccaccttagtggtctggtgtttaacggacagccctacatggaccagtgcaaggacggtgacatcacttattgcgagcttaatgccaggttcggtctacgtgctattgtggccgaccccgttacattcaagtcccgtagcagctatctcgccctggcaacactgcaggcatacgcttctatgcatctgtttttccaattcaaaacgaccgcacccgatggactcttgctcttcaattctgggaatgggaacgatttcatagtcatcgaacttgtgaagggctacatccactacgtgttcgatctcggaaatggcccctccttaatgaagggtaatagtgacaagcccgttaatgataatcagtggcacaacgtcgtcgtatctagggatcctggcaacgtacacacactgaagatcgattcccggaccgttacgcaacacagcaacggcgcgcggaacttagatcttaagggggaactttatatcggaggactgagcaagaacatgttctccaacttgccgaaactcgtggcatcacgagatggatttcagggctgccttgcctcggtggacctcaacgggcgcctgcctgacctcattgctgatgcgcttcacagaatcggccaggtcgagcgaggatgcgacggaccatccaccacatgcactgaggagagttgtgcaaatcagggtgtgtgcctacagcagtgggacggatttacctgcgattgtaccatgaccagttacggaggaccagtgtgtaacgaccctggcaccacctacatctttggtaaagggggtgctctcatcacctatacctggccccccaacgacaggcccagcacccgaatggaccggctcgccgtgggtttctcgacccaccaacgttcagctgttttagttcgcgtcgactcagcgagtggactgggcgactatctgcaactccacatagaccagggaacagtgggcgtgatatttaacgtagggactgatgatattaccatcgacgaacctaatgctattgtgtccgacgggaagtaccacgtggtcagattcacccggagcggcggcaacgctacactacaggtggatagttggcccgtgaatgagcgctatcctgccggaagacagttgactattttcaacagccaagctgccataaagattggggggagagatcaaggaaggcccttccaagggcaagtatcgggtctgtactataatggcctcaaagtgttggccctagccgccgagagcgatcccaacgtacgaacagaaggccacctgagactcgtcggcgaggggccatcggtccttctgagcgcagagaccacagcaacaacactgctcgcggacatggcaactaccataatggaaactaccacaacaatggcaaccaccacaacgcgccggggacgtagtcccacactgcgcgactccaccacacaaaatactgatgacctgctggtcgcttctgccgagtgccccagcgacgacgaagaccttgaggagtgcgaaccaagtacaggaggggaactgatactacccataatcacagaagattctttggaccccccccctgtagcaacacgctcaccgttcgtgcctcccccccccacgttttacccgttcttgactggcgtcggcgccacgcaagatacactgcctccacccgccgccaggcggccgcctagcggaggaccgtgccaggcagagagagatgactctgattgcgaagagccgatagaagcatctggcttcgcttcaggcgaagtgttcgacagctcgctgcctcccaccgacgatgaagatttctacaccacattcccgctcgtgacggacaggacaaccctcctcagcccccggaagcctgcccctagacctaacctccgaacagacggtgcaactggcgctcctggagtgttatttgctccatctgctcccgcacccaacctgcctgccggcaaaatgaatcacagagaccctctacagcctttgctggaaaacccacccctgggacccggcgcccccacctctttcgaaccccggagaccaccacctctgagaccaggggtcacttctgcccctggcttcccacacctgcctaccgccaaccccacaggacctggagagagaggcccccctggggcagtggaagtaataagggagtccagcagcacaactggaatggtggtggggattgtggcagcagctgcactctgcatcctgattctgctgtacgctatgtataagtacaggaatagagacgaaggatcatatcaggtggaccagtccaggaactatatctccaactcagctcagagcaatggggcagtggtgaaggaaaaggctcctgcagcccccaagacacccagcaaagccaaaaagaataaggacaaggagtactatgtatag

SEQ ID NO: 237233 - DNA, 4929 bp, Artificial Sequence
  derived and/or modified sequence
atggccagcggcagccggtggcggcccacccccccccccctgctgctactactgttactggcacttgctgccagagccgacggcctggagttcggcggcggtccaggccagtgggcccgctacgcccgttgggctggcgccgcgtcctctggtgaactgagcttctcgctgcggacaaacgccacaagagccctgctgctttatctggatgacggaggcgactgtgattttctcgaactactgttggtcgatggtaggctccggctgcgcttcactttgtcctgcgcagaacctgctaccctgcagctggatacacccgttgccgacgacagatggcacatggtgctgttgacaagggacgcgagacgcaccgcacttgccgttgacggcgaagcccgcgcggctgaagtcaggtcaaaaaggagagagatgcaggtcgctagtgacctgttcgtaggcggcattcctcccgatgtaaggctcagcgcgctgaccctgtctactgtcaaatatgagcccccattccgaggcctgctggccaaccttaagctcggcgagaggccaccggccctgcttggatctcaaggcctgcggggggcgactgcagatccgctgtgcgcccctgcccgtaacccttgtgccaacgggggcctctgtaccgtgttggctccaggtgaggtgggatgtgattgctcccatacgggatttggcggcaagttttgtagtgaagaagagcacccaatggagggaccggcgcacctgaccttgaattccgagggcaaggaggagtttgtcgccacatttaagggaaacgagtttttctgttacgatctgtcccacaacccaatacagtcctctaccgacgaaattacacttgccttccggactctccagcgtaatggacttatgcttcacactggcaagtcggctgattatgtcaatctatcacttaagtctggggccgtgtggctagtcatcaacctgggttctggcgctttcgaagcactggttgagcctgttaatgggaagtttaacgacaacgcctggcatgatgttagagtcaccagaaacctgcgccagcatgctgggatcggacatgccatggttacaatctccgtggatgggattttaaccactacaggatacactcaggaggattacaccatgctgggttccgatgacttcttctacataggggggtcaccaaacaccgccgatttgccaggcagtccggtttccaacaactttatgggttgtttaaaggacgtggtgtacaaaaataacgatttcaagcttgagctctcacggctagccaaggaaggcgatcccaaaatgaaattacagggtgatctaagttttcgttgtgaggacgtcgcagccctggacccagtcaccttcgagtcacctgaagcttttgttgcccttccgcggtggtccgcgaagcgcacgggctccatatcgctggattttaggaccacagagcccaacggcctcctgctattttcccaaggaaggcgggcagggggcggcgccgggagccattcttccgcccagcgagcagattactttgcgatggaattactcgacggacatttgtaccttctcttggacatgggtagcggaggtataaagctgcgcgcgagttccagaaaggtgaacgatggcgagtggtgccacgtggatttccagagggacggacgaaagggatcaatttcggttaattcaaggagtaccccattcctggcaacaggcgactccgagattcttgatttggagagcgagctctatctgggtgggttaccagagggagggcgggtcgaccttccacttcctccagaagtgtggactgcagctctccgggcaggatatgtgggctgtgtaagagatctttttattgacggccgatcaagggacttacgaggactcgcagaggcccagggcgcagtaggagtagccccattttgctcgcgcgagactcttaaacaatgcgcctctgcaccatgtagaaatggtggggtttgcagagagggttggaataggttcatctgcgattgcatcggaaccggctttctaggccgtgtgtgtgagcgggaggccaccgtactgtcttacgatgggtctatgtacatgaagatcatgctacctaacgcaatgcatacagaagccgaggacgtgagcttgcgctttatgagtcagcgtgcttacgggcttatgatggcgacaacaagtagagagtcggccgatacactgagactcgagctagatggtggacaaatgaagctcacagtgaacctgggaaagggacccgagacactctttgccgggcataagctcaatgataacgagtggcataccgtacgggtggttagacgcggtaagtctctccagctcagcgtcgataatgtgactgttgaaggtcagatggccggagcccatatgcgcttggagtttcacaacatcgaaacaggcattatgacagaaagacgatttatttcagtagtaccgtcaaatttcatcggccacctgagcggcctggtgtttaacggccagccctacatggaccagtgcaaagacggggacattacctattgtgagctgaatgcccgctttggcctgcgtgccatagtggctgacccggtgacattcaagtccaggagctcctatctcgctctggcaactttacaggcttacgcgtccatgcacctgttctttcagttcaagaccaccgcaccggacggcttgcttcttttcaactctgggaacgggaatgattttatcgtgatcgaattagtcaaaggctatatacactatgttttcgacctcggtaacggacccagcctgatgaaaggaaattctgataagcccgtaaacgacaatcagtggcacaacgtggtagtgtcgcgggaccccgggaatgttcatactttgaaaattgactcacgaacggtgacacagcacagcaatggggcaaggaatctagatctgaagggagagctctatatcggaggactgtccaaaaacatgttcagcaatctgcccaagctggtcgcatcccgggatgggtttcagggctgcctggcatccgtcgacctgaacggacgcctccctgacttgatcgcggacgcactccatcggatcggacaggtggaaaggggatgtgacggaccctccaccacttgtacggaggagagctgtgcaaaccaaggggtctgtctccagcagtgggatggcttcacctgcgactgcacaatgactagttacggaggccctgtctgcaacgacccagggaccacatatatttttggcaagggaggtgctttgatcacctacacttggcctcccaatgaccgcccatctaccaggatggaccgtctagccgtcggcttctcaactcatcaaagatcagcagtcctggtcagggttgatagtgccagcgggctgggcgactatcttcagctacacatagaccaggggacggtgggtgtgatctttaatgtagggaccgacgatataacaattgacgagcctaacgccattgtaagtgacggcaaataccacgtggttcgcttcacaagatctggcgggaatgctaccctccaagtggacagctggcctgtgaacgagcggtaccccgccggcaggcaacttacgattttcaactctcaagccgcaatcaagataggcggtcgcgatcaagggagaccctttcaaggacaggtgagcggtctatactataatggtctgaaagtcctggctctggcagctgaatcagatcccaatgttagaaccgagggacacctgcgactagtcggggaaggaccctccgtgctgctctctgccgagactaccgccaccactttgttggcagacatggcaaccacaatcatggaaacgactacgacaatggccaccaccaccactcggagggggcgatcccccactctgagggactccacaacacaaaatactgatgacctgctcgtggcctccgctgaatgtccctctgatgatgaggacttagaagagtgcgaacctagcacaggcggggaactgatcttgccaataataaccgaggattctctggacccaccgcctgtggcgaccagatcaccttttgtccctccccctcctacattctatccctttctcaccggagtgggggccacccaggacaccctgcccccacccgcagcgaggaggcctccttcgggaggaccctgccaagccgagagggacgattccgactgcgaagaaccaatcgaggctagcggattcgcatccggggaagtattcgacagctcactgcctcccacagatgacgaggacttctacacaactttccctcttgtcacagatcgtaccactctcttatccccccgaaagccagctcctagacctaacctgcggactgatggggccaccggtgcccccggagtgctcttcgcaccgagcgctcctgcccctaacttgccagcaggtaagatgaatcatagggatccactgcagccactccttgagaaccctcccctgggccccggcgcccctacctctttcgagccaagaagacctccacccctgcgtccgggcgtcactagcgccccaggattcccccatctacccacagcgaatcccacagggcctggagagcgtggaccccctggcgccgtggaggttattagggaaagtagtagtacaacgggtatggtcgtcggtatagtcgcagctgcggcgctgtgcatactgatcctcctctatgctatgtacaagtaccgtaaccgcgacgaaggcagctaccaggtggatcagtccagaaactatatatctaacagtgctcagtccaatggcgctgtggttaaggagaaagcccctgccgctcctaagactcccagtaaggctaagaaaaataaagacaaggagtactacgtttag

SEQ ID NO: 237234 - DNA, 6411 bp, Artificial Sequence
  derived and/or modified sequence
tgcagggatgcggcggcgggagcagccgccctgactcgcggagcatcctcctcggagaggcaccgcggcggggcgggcgggcgggcggggacgcggcggggagggagagaggcgcgaggcggcagacaccgctagccctggctctgccacccgtcggagacggggcggccctgtagctctgctacccaccctccagcttctggcgccccgagaaccaggcatccctccctgctcttctgtcggagcccgcggcgggggaggggcgccgccgccgccgcctgagggaagccggcatctgggcctctgcgcgcctcgccccgcggccgggcccatggcactgtgagcctgcaagggagccccgctcagcgcggggagcgcccggccccctcccgccccatgcgcccgcggctctgaagcctgagcgggggccgggggccgggcggggccggggccgccgtaggcatggcgtccgggagccggtggcggccgacaccgccgccgctgctgttgctgctgctgctggcgctggcggcgcgcgcggacggcctggagttcggcggcggccccgggcagtgggctcgctacgcgcgctgggcgggcgcggcgagcagcggcgagctcagcttcagcctgcgcaccaacgccacgcgcgcgctgctgctctacctggacgacggcggcgactgcgacttcctggagctgctgctggtggacggccgcctgcggctgcgcttcacgctttcgtgcgccgagccggccacgctgcagctggacacgccggtggccgacgaccgctggcacatggtgctgctgacccgcgacgcgcgccgcacggcgctggcggtggacggcgaggcccgcgccgccgaggtgcgctccaagcggcgcgagatgcaggtggccagcgacctgttcgtgggcggcatcccgcccgacgtgcgcctctcggcgcttacgctgagcaccgtcaagtacgagccgcccttccgcggcctcttggccaacctgaagctgggcgagcggccccccgcgctgctgggcagccagggcctgcgcggcgccaccgccgacccgctgtgcgcgcccgcgcgcaacccctgcgccaacggcggcctctgcaccgtgctggcccccggcgaggtgggctgcgactgcagccacacgggcttcggcggcaagttctgcagcgaagctccttcccctttccaaggtccggctcacctgacgttaaacagcgaaggcaaggaggagtttgtggcgaccttcaaaggcaatgagttcttctgctacgacctgtcacacaaccccatccagagcagcactgatgagatcacactggccttccgcaccctgcaacgcaacggcctgatgctgcatacaggcaagtcggccgactacgtcaacctgtccctcaagtctggggctgtctggctggtcatcaacctaggctcaggtgccttcgaggcccttgtggaacccgtcaatggcaagttcaacgacaacgcctggcacgacgtccgggtcacccgaaacctgcgccagcacgcagggattggacacgctatggtgaccatctcggtggacgggatcctgaccaccacaggctacacgcaggaggattacaccatgctgggctctgatgacttcttctacattgggggcagccccaacacagctgacctgccgggctcgcccgtcagcaacaacttcatgggctgcctcaaggacgtggtctataagaacaatgacttcaaattggaactatcccgcctggcaaaggaaggggaccccaagatgaagctgcagggggacttgtcattccgctgtgaggatgtggctgccctggaccctgtgacctttgagagtcccgaggcctttgtggcgctgccccgctggagcgctaagcgcactggctccatctccctagacttccgcaccaccgagcccaatgggctgctgctcttcagccagggccggcgggctgggggtggagctggcagccacagctctgctcagcgggccgactactttgccatggagctattggacggccacctctatcttctgctggacatgggatctgggggcatcaagctgcgggcatccagccgcaaggtcaatgatggcgagtggtgtcacgtggacttccagagggatgggcgaaaaggctccatctcagtgaatagtcgcagcacgccgttcttggccactggagacagcgagattctggacctggagagtgagctgtacctgggcggtctccctgaggggggccgggtggacctgcccctgcccccagaggtgtggacagcagcactccgggcaggctacgtgggctgtgtgcgggacctcttcatagatgggcgtagccgagacctccggggcctggctgaggctcagggggctgtgggcgttgcccccttttgctcccgggagacgctgaagcagtgtgcatctgccccctgtcgcaatgggggcgtctgtcgagaaggctggaaccgcttcatctgtgactgcatcgggaccggctttcttgggcgggtctgtgagagagaggccacggtcctgagctacgatggctccatgtacatgaagatcatgctgcctaacgccatgcacacggaggcagaggatgtgtccctgcgtttcatgtcccagcgggcctacggactcatgatggccaccacttccagggagtctgccgacaccctacgcctggagctggatggggggcagatgaagctcactgtcaacctcggtaaaggccccgaaacgctgtttgcggggcacaagctcaatgacaatgagtggcacacggtgagggtggtccggcgtggcaagagcctgcagctgtctgtggacaacgtgactgtggagggacagatggcaggagcccatatgcggctggagttccacaacattgagacgggcatcatgacggagcggcggtttatctccgtggtgccctccaacttcatcgggcatctgagtgggctcgtgttcaatggccagccctacatggaccagtgcaaggatggtgacatcacctactgtgagctcaatgctcgctttggcctgcgtgccatcgtggccgatcccgtcaccttcaagagtcgcagcagctacctggcactcgccacgctccaagcctatgcttccatgcacctcttcttccagttcaagaccacggcccctgatgggcttcttctgttcaactcgggcaacggcaatgacttcattgtcatcgagctggtcaaggggtacatccactacgtgtttgacctggggaatggcccgtccttgatgaaggggaactcagacaaaccagtcaatgacaaccagtggcacaacgtggtggtgtccagggacccaggcaacgtgcacacgctcaagattgactcccgcactgtcacgcagcactccaatggcgcccgaaacctcgatctcaaaggggagttgtacattggcggtctgagcaagaatatgttcagcaacctgcccaagctggtggcctcccgggatggctttcagggctgcctggcctcagtggacctcaacggacgtctcccagacctcatcgccgacgccctgcaccgcattgggcaggtggagaggggctgtgatggccccagcaccacctgcactgaagagtcctgtgccaaccagggcgtctgcttgcagcagtgggatggcttcacctgcgactgcaccatgacttcctatggaggccctgtctgcaatgatcccgggaccacatacatctttgggaaggggggagcgctcatcacctacacgtggccccccaatgacaggcccagcacgaggatggatcgcctggccgtgggcttcagcacccaccagcggagcgctgtgctggtgcgggtggacagcgcctccggccttggagactacctgcagctgcacatcgaccagggcaccgtgggggtgatctttaacgtgggcacggacgacattaccatcgacgagcccaacgccatagtaagcgacggcaaataccacgtggtgcgcttcactcgaagcggcggcaacgccaccctgcaggtggacagctggccggtcaacgagcggtacccggcaggccgccagctgaccatcttcaacagccaggctgccatcaagatcgggggccgggatcagggccgccccttccagggccaggtgtccggcctctactacaatgggctcaaggtgctggcgctggccgccgagagcgaccccaatgtgcggactgagggtcacctgcgcctggtgggggaggggccgtccgtgctgctcagtgcggagaccacggccaccaccctgctggctgacatggccaccaccatcatggagactaccaccaccatggccactaccaccacgcgccggggccgctcccccacactgagggacagcaccacccagaacacagatgacctgctggtggcctctgctgagtgtccaagcgatgatgaggacctggaggagtgtgagcccagtactggaggagagttaatattgcccattatcacggaggactccttagacccccctcccgtggccacccgatcccccttcgtgcccccgccccctaccttctaccccttcctcacgggagtgggcgccacccaagacacgctgcccccgcccgccgcgcgccgcccgccctctgggggcccgtgccaggccgagcgggacgacagcgactgcgaggagcccatcgaggcctcgggcttcgcctccggggaggtctttgactccagcctcccccccacggacgacgaggacttttacaccacctttcccctggtcacggaccgcaccaccctcctgtcaccccgcaaacccgctccccggcccaacctcaggacagatggggccacgggcgcccctggggtgctgtttgccccctccgccccggcccccaacctgccggcgggcaaaatgaaccaccgagacccgcttcagcccttgctggagaacccgcccttggggcccggggcccccacgtcctttgagccgcggaggccccctcccctgcgccccggcgtgacctcagcccccggcttcccccatctgcccacagccaaccccacagggcctggggagcggggcccgccgggcgcagtggaggtgatccgggagtccagcagcaccacgggcatggtggtgggcattgtggcggcggcggcgctctgcatcctcatcctcctctacgccatgtataagtaccgcaatcgtgatgagggctcctaccaggtggaccagagccgaaactacatcagtaactcggcccagagcaatggggcggtggtgaaagagaaggccccggctgcccccaagacgcccagcaaggccaagaagaacaaagacaaggagtattatgtctgagcccccggcactgcgccccactgccagctgcccctcctgggagggcccgggaggagggtgccaccctctccctgccaggggcctggggaccctctccctggctgcctcaggcttctcttacgaagaggaaacgcaaaaaaagaaaaggaaaaaccccgtgctcgcccccttcctcctgccgtccactgcgcggcctcgtcagtcccggggctgactgtccctctcagctctgcgcctgccaggcagggcacgtgctcacagccctgggttgatttatttttttaagggggtagttttattttggtggggttgggtgggaaggaaggctgggggttttgtaaagtgtccactgctcgtcctgttaattttcctcaatttttcttcttcttccttctgtccctcctgccttccttctcttcccaagccctccaatccccatcccaggcttgctgtgtctcactgtccccaccctccttccctacttctttttttgtgtgtctggtttctcccttcctttcctccctttgggtttccagagtcggtgggagaagggcgggagggtgggcccgagtggcccagtgggtgggtggggtggggtggggcaagtgccccaactcccctcaccaggagaggcacctgcttggtgccgcccagggaaggggctcaggcctgacggaaggcctgttctgtgtgtgccgccgggcgacgtgcattgatggggaagctgctggaggagcaggggtggggggtgggagggaggggaaaggcaaatgcagatatatattacagacaaatactctagattccacgagcagcagcctgtggcacccgctgggcgcgggcagcagggaagagggagcaaggcattgtccacagactgctggggtcacttctttgcccacgggctccctgctcccccagttttttttctctctttgttaacaaatgtgtctgagtcttggaaaacaccccaaccccggaaatgtgtgggaaaaagaaaacaaaaactttccaaattcc

SEQ ID NO: 237235 - DNA, 6413 bp, Artificial Sequence
  derived and/or modified sequence
tgcagggatgcggcggcgggagcagccgccctgactcgcggagcatcctcctcggagaggcaccgcggcggggcgggcgggcgggcggggacgcggcggggagggagagaggcgcgaggcggcagacaccgctagccctggctctgccacccgtcggagacggggcggccctgtagctctgctacccaccctccagcttctggcgccccgagaaccaggcatccctccctgctcttctgtcggagcccgcggcgggggaggggcgccgccgccgccgcctgagggaagccggcatctgggcctctgcgcgcctcgccccgcggccgggcccatggcactgtgagcctgcaagggagccccgctcagcgcggggagcgcccggccccctcccgccccatgcgcccgcggctctgaagcctgagcgggggccgggggccgggcggggccggggccgccgtaggcatggcgtccgggagccggtggcggccgacaccgccgccgctgctgttgctgctgctgctggcgctggcggcgcgcgcggacggcctggagttcggcggcggccccgggcagtgggctcgctacgcgcgctgggcgggcgcggcgagcagcggcgagctcagcttcagcctgcgcaccaacgccacgcgcgcgctgctgctctacctggacgacggcggcgactgcgacttcctggagctgctgctggtggacggccgcctgcggctgcgcttcacgctttcgtgcgccgagccggccacgctgcagctggacacgccggtggccgacgaccgctggcacatggtgctgctgacccgcgacgcgcgccgcacggcgctggcggtggacggcgaggcccgcgccgccgaggtgcgctccaagcggcgcgagatgcaggtggccagcgacctgttcgtgggcggcatcccgcccgacgtgcgcctctcggcgcttacgctgagcaccgtcaagtacgagccgcccttccgcggcctcttggccaacctgaagctgggcgagcggccccccgcgctgctgggcagccagggcctgcgcggcgccaccgccgacccgctgtgcgcgcccgcgcgcaacccctgcgccaacggcggcctctgcaccgtgctggcccccggcgaggtgggctgcgactgcagccacacgggcttcggcggcaagttctgcagcgaagaggagcaccccatggaaggtccggctcacctgacgttaaacagcgaaggcaaggaggagtttgtggcgaccttcaaaggcaatgagttcttctgctacgacctgtcacacaaccccatccagagcagcactgatgagatcacactggccttccgcaccctgcaacgcaacggcctgatgctgcatacaggcaagtcggccgactacgtcaacctgtccctcaagtctggggctgtctggctggtcatcaacctaggctcaggtgccttcgaggcccttgtggaacccgtcaatggcaagttcaacgacaacgcctggcacgacgtccgggtcacccgaaacctgcgccagcacgcagggattggacacgctatggtgaccatctcggtggacgggatcctgaccaccacaggctacacgcaggaggattacaccatgctgggctctgatgacttcttctacattgggggcagccccaacacagctgacctgccgggctcgcccgtcagcaacaacttcatgggctgcctcaaggacgtggtctataagaacaatgacttcaaattggaactatcccgcctggcaaaggaaggggaccccaagatgaagctgcagggggacttgtcattccgctgtgaggatgtggctgccctggaccctgtgacctttgagagtcccgaggcctttgtggcgctgccccgctggagcgctaagcgcactggctccatctccctagacttccgcaccaccgagcccaatgggctgctgctcttcagccagggccggcgggctgggggtggagctggcagccacagctctgctcagcgggccgactactttgccatggagctattggacggccacctctatcttctgctggacatgggatctgggggcatcaagctgcgggcatccagccgcaaggtcaatgatggcgagtggtgtcacgtggacttccagagggatgggcgaaaaggctccatctcagtgaatagtcgcagcacgccgttcttggccactggagacagcgagattctggacctggagagtgagctgtacctgggcggtctccctgaggggggccgggtggacctgcccctgcccccagaggtgtggacagcagcactccgggcaggctacgtgggctgtgtgcgggacctcttcatagatgggcgtagccgagacctccggggcctggctgaggctcagggggctgtgggcgttgcccccttttgctcccgggagacgctgaagcagtgtgcatctgccccctgtcgcaatgggggcgtctgtcgagaaggctggaaccgcttcatctgtgactgcatcgggaccggctttcttgggcgggtctgtgagagagaggccacggtcctgagctacgatggctccatgtacatgaagatcatgctgcctaacgccatgcacacggaggcagaggatgtgtccctgcgtttcatgtcccagcgggcctacggactcatgatggccaccacttccagggagtctgccgacaccctacgcctggagctggatggggggcagatgaagctcactgtcaacctcggtaaaggccccgaaacgctgtttgcggggcacaagctcaatgacaatgagtggcacacggtgagggtggtccggcgtggcaagagcctgcagctgtctgtggacaacgtgactgtggagggacagatggcaggagcccatatgcggctggagttccacaacattgagacgggcatcatgacggagcggcggtttatctccgtggtgccctccaacttcatcgggcatctgagtgggctcgtgttcaatggccagccctacatggaccagtgcaaggatggtgacatcacctactgtgagctcaatgctcgctttggcctgcgtgccatcgtggccgatcccgtcaccttcaagagtcgcagcagctacctggcactcgccacgctccaagcctatgcttccatgcacctcttcttccagttcaagaccacggcccctgatgggcttcttctgttcaactcgggcaacggcaatgacttcattgtcatcgagctggtcaaggggtacatccactacgtgtttgacctggggaatggcccgtccttgatgaaggggaactcagacaaaccagtcaatgacaaccagtggcacaacgtggtggtgtccagggacccaggcaacgtgcacacgctcaagattgactcccgcactgtcacgcagcactccaatggcgcccgaaacctcgatctcaaaggggagttgtacattggcggtctgagcaagaatatgttcagcaacctgcccaagctggtggcctcccgggatggctttcagggctgcctggcctcagtggacctcaacggacgtctcccagacctcatcgccgacgccctgcaccgcattgggcaggtggagaggggctgtgatggccccagcaccacctgcactgaagagtcctgtgccaaccagggcgtctgcttgcagcagtgggatggcttcacctgcgactgcaccatgacttcctatggaggccctgtctgcaatgatcccgggaccacatacatctttgggaaggggggagcgctcatcacctacacgtggccccccaatgacaggcccagcacgaggatggatcgcctggccgtgggcttcagcacccaccagcggagcgctgtgctggtgcgggtggacagcgcctccggccttggagactacctgcagctgcacatcgaccagggcaccgtgggggtgatctttaacgtgggcacggacgacattaccatcgacgagcccaacgccatagtaagcgacggcaaataccacgtggtgcgcttcactcgaagcggcggcaacgccaccctgcaggtggacagctggccggtcaacgagcggtacccggcaggccgccagctgaccatcttcaacagccaggctgccatcaagatcgggggccgggatcagggccgccccttccagggccaggtgtccggcctctactacaatgggctcaaggtgctggcgctggccgccgagagcgaccccaatgtgcggactgagggtcacctgcgcctggtgggggaggggccgtccgtgctgctcagtgcggagaccacggccaccaccctgctggctgacatggccaccaccatcatggagactaccaccaccatggccactaccaccacgcgccggggccgctcccccacactgagggacagcaccacccagaacacagatgacctgctggtggcctctgctgagtgtccaagcgatgatgaggacctggaggagtgtgagcccagtactggaggagagttaatattgcccattatcacggaggactccttagacccccctcccgtggccacccgatcccccttcgtgcccccgccccctaccttctaccccttcctcacgggagtgggcgccacccaagacacgctgcccccgcccgccgcgcgccgcccgccctctgggggcccgtgccaggccgagcgggacgacagcgactgcgaggagcccatcgaggcctcgggcttcgcctccggggaggtctttgactccagcctcccccccacggacgacgaggacttttacaccacctttcccctggtcacggaccgcaccaccctcctgtcaccccgcaaacccgctccccggcccaacctcaggacagatggggccacgggcgcccctggggtgctgtttgccccctccgccccggcccccaacctgccggcgggcaaaatgaaccaccgagacccgcttcagcccttgctggagaacccgcccttggggcccggggcccccacgtcctttgagccgcggaggccccctcccctgcgccccggcgtgacctcagcccccggcttcccccatctgcccacagccaaccccacagggcctggggagcggggcccgccgggcgcagtggaggtgatccgggagtccagcagcaccacgggcatggtggtgggcattgtggcggcggcggcgctctgcatcctcatcctcctctacgccatgtataagtaccgcaatcgtgatgagggctcctaccaggtggaccagagccgaaactacatcagtaactcggcccagagcaatggggcggtggtgaaagagaaggccccggctgcccccaagacgcccagcaaggccaagaagaacaaagacaaggagtattatgtctgagcccccggcactgcgccccactgccagctgcccctcctgggagggcccgggaggagggtgccaccctctccctgccaggggcctggggaccctctccctggctgcctcaggcttctcttacgaagaggaaacgcaaaaaaagaaaaggaaaaaccccgtgctcgcccccttcctcctgccgtccactgcgcggcctcgtcagtcccggggctgactgtccctctcagctctgcgcctgccaggcagggcacgtgctcacagccctgggttgatttatttttttaagggggtagttttattttggtggggttgggtgggaaggaaggctgggggttttgtaaagtgtccactgctcgtcctgttaattttcctcaatttttcttcttcttccttctgtccctcctgccttccttctcttcccaagccctccaatccccatcccaggcttgctgtgtctcactgtccccaccctccttccctacttctttttttgtgtgtctggtttctcccttcctttcctccctttgggtttccagagtcggtgggagaagggcgggagggtgggcccgagtggcccagtgggtgggtggggtggggtggggcaagtgccccaactcccctcaccaggagaggcacctgcttggtgccgcccagggaaggggctcaggcctgacggaaggcctgttctgtgtgtgccgccgggcgacgtgcattgatggggaagctgctggaggagcaggggtggggggtgggagggaggggaaaggcaaatgcagatatatattacagacaaatactctagattccacgagcagcagcctgtggcacccgctgggcgcgggcagcagggaagagggagcaaggcattgtccacagactgctggggtcacttctttgcccacgggctccctgctcccccagttttttttctctctttgttaacaaatgtgtctgagtcttggaaaacaccccaaccccggaaatgtgtgggaaaaagaaaacaaaaactttccaaattccaa

SEQ ID NO: 237236 - DNA, 4928 bp, Artificial Sequence
  derived and/or modified sequence
atggcatctgggagcaggtggagaccaacacctcctccactccttttgctcctgctgttggccttagctgcccgagcggacggccttgagttcggaggtggtcccggacagtgggctagatacgctcggtgggctggcgcagcaagttccggcgaactcagtttctccctgagaaccaacgcaacccgggcactccttctatatctcgacgatggcggtgactgcgacttcctggaactgttgcttgtagacggccgtctgaggctgcgattcaccctgtcgtgcgcggaacccgctactctgcagttggatacccccgttgccgacgacagatggcacatggtgctgctgacgagagatgcgcgtaggaccgctttggctgtcgatggagaggccagagccgctgaagtgcgctcaaagcgacgagagatgcaggttgccagcgatctgttcgtaggaggcatccctcctgacgtgcggctcagtgctctcacccttagcactgttaagtatgaaccaccgttcaggggtctcctcgcaaatctgaagctgggcgaaaggccacctgctctcctcggctcacagggcctacggggagccactgccgacccactttgtgccccagcacgcaacccatgtgctaacggaggcctgtgcaccgtgctcgccccaggagaggtcggttgcgactgcagtcacaccgggtttggcggaaagttctgctctgaagcgccatccccattccagggtcccgcacacctgaccctgaatagtgaaggcaaagaggagttcgttgcaactttcaagggaaatgaatttttttgttatgatctttcacataatcctatacagagctccaccgacgagatcaccctggccttcagaaccctccagagaaatggactcatgttacacaccggaaaatccgcagactatgtgaatctatccctgaaatctggcgctgtctggctggtgattaatctggggtcaggcgcattcgaggcccttgtagagcctgtgaacggcaaatttaatgataacgcttggcacgatgttagagtgaccagaaacctcagacagcacgctggaattgggcacgccatggtgacgataagcgtggacggtattttgactaccaccggatacactcaggaagattataccatgctgggttctgacgactttttttatataggaggttccccaaacaccgctgatctgccaggatctcctgtaagtaataactttatggggtgcctgaaggacgtggtctacaaaaacaatgactttaaacttgagctctctcgcctggcaaaagagggggatcccaagatgaagctacagggcgatctatcctttagatgtgaagacgtcgccgcactcgatcctgttactttcgagtctccagaagcttttgtcgctctcccgcgttggagcgccaaacgtaccggttctatatccctcgacttccgcacaactgagcctaacggcttactcctgttttctcaggggaggcgggctggtggaggcgctgggagtcactccagtgcacagagagcggattacttcgcaatggaactgctagacggccatttgtatttgttattggacatgggatcggggggaattaagctgagggcctcatctcggaaggtgaatgatggcgaatggtgccatgtcgactttcaacgagacggcaggaagggatccatctccgttaattcccgcagcacgcctttccttgccacaggcgactccgagattctggacttggagtctgagttgtatctgggcggtctacccgaagggggtcgagtggatctgcccctgccacccgaggtgtggaccgctgcattgagagctgggtacgttggatgcgtgcgtgatctcttcattgacggaagatcacgcgaccttcggggtctggccgaagcacagggggcagtcggggtggcacccttctgttcccgcgagacactcaaacagtgcgcgagcgctccctgtaggaacggcggtgtatgccgggagggctggaatagatttatctgcgactgcattgggaccggatttttgggcagagtgtgtgaaagagaggccacagtactctcctacgacgggtcaatgtacatgaaaatcatgctgccaaacgcaatgcatacagaagcagaggacgtttcccttcgattcatgagccagagagcatacggcctaatgatggccaccacatctcgagaatccgcagacacgttgcgtttggagcttgacggaggtcagatgaagttaactgtcaatttaggaaaaggcccagaaacactgttcgctggacataaattgaatgacaatgagtggcacacagttcgggtggtccggcgaggaaaaagtttacagctatccgtggataacgtgaccgtcgaaggacaaatggcaggagctcacatgaggctcgagttccacaatatcgaaactggcataatgacagaacgcagattcatctcagtcgtcccttccaattttattgggcaccttagcggcctcgtgttcaatggacagccatacatggatcagtgcaaagatggagatattacatattgtgaactgaatgccagatttggcctgagggctattgtcgcggatccggttaccttcaagagccggtcctcttacctggcactggccacattgcaggcctatgcaagcatgcacttgttttttcagtttaaaaccacagcccctgacggtctccttttgttcaacagtggtaacggcaacgactttattgttatcgagctggtgaagggatatatacactacgtgttcgacttagggaatgggccttcgctgatgaagggcaacagcgacaagccggtcaatgataatcagtggcacaatgtggtcgtgagcagggacccgggaaatgtgcatacacttaagatcgattccagaaccgtaacacaacactccaatggtgcaagaaatctcgatctgaagggcgaattatacattgggggtttgagcaaaaatatgttcagtaacttgccgaagctggttgcttctcgagatggcttccagggatgcctggcatccgtggacctgaatggaaggcttcccgacttgatcgccgacgcattacacaggattggccaagtagaacggggatgcgacggcccatccactacttgtaccgaggagagttgtgctaatcagggagtgtgcctgcaacagtgggacgggttcacctgcgattgcactatgaccagctacggaggtccagtgtgtaatgaccctggaactacttatatttttggcaaggggggagcccttataacctacacctggccaccaaacgaccgacctagcacgcggatggaccgcttggcagtcgggttctccacccaccagcgaagtgcagtcttggtccgtgtagactctgcaagcggtctcggagattacctccagctacacattgaccaaggaaccgtgggggtaatatttaatgtgggcactgacgacataaccatcgacgagcctaacgcgattgtaagcgatggcaaatatcacgttgtgcggtttacccgaagtggagggaatgccaccttgcaggtcgactcttggcctgtgaatgagagatatcccgcaggaaggcagttaaccatctttaattcgcaggctgccattaagatagggggacgggatcaaggcagaccttttcagggccaggtgagtggactgtactacaatggcctaaaggtgctcgcactcgcggcagaaagtgaccccaacgtgcgaactgaggggcatctgcggctagtcggagagggaccatctgtgcttctcagtgcagagaccactgctaccactctgttagccgacatggctacaactatcatggagaccaccaccacaatggctaccacaactacccgtcgcggacggtctccaacattacgcgattccaccactcagaacacagacgaccttctggtagcatccgctgagtgcccgagcgacgatgaagacctcgaggaatgcgagccttccacaggaggtgagctcatcctgccaattattactgaggacagcttggacccacctcccgtagccacccgcagtcccttcgttccgcctccacctaccttttatccattcttaacaggagttggggctactcaggatactctgccaccgccagctgcacggcgaccaccctcgggcggaccctgtcaggcagaacgggatgactctgattgtgaggagcccatcgaagccagtggcttcgcttcaggagaggttttcgattccagtttaccccctacagacgatgaggacttttacaccacatttccattagtgacggacaggaccactcttctgtcgccaaggaagcctgctccgaggcccaacttaaggacagatggcgctacaggagcccctggtgtgttgttcgcaccatcggctcccgctcctaacctgccagctggaaagatgaaccacagggatcctctacagccactgctcgagaaccccccacttggtccaggcgctcccacttcatttgagcctcgcaggccaccacccttgcgcccaggtgtcacttcggcacctgggtttccccacctacccacggccaatcccacaggcccaggagaacgcggacctccaggggctgtcgaagtgataagggagtcttcatcaactaccgggatggtcgtcggtattgtggccgcagccgctctttgcattctgatcctgctgtacgctatgtataaatatcgaaatagagatgaggggtcataccaggtggaccagtctcggaattatatcagtaattccgcgcaatccaacggtgccgtcgtcaaagagaaagctcccgcagccccaaaaacaccctcaaaggctaagaagaacaaagacaaggagtactacgttta

SEQ ID NO: 237237 - DNA, 4929 bp, Artificial Sequence
  derived and/or modified sequence
atggcctccggctccaggtggagacccacgccacctcccctcttattactccttttactagcgctcgcagcgagggcagacggcctggaattcggcggtggaccaggccaatgggctagatatgcacgctgggccggtgctgcctcctccggggaactgtcctttagcctgcgaactaacgcgaccagagccctcctcctatatctggacgacggtggcgattgtgactttctcgagttgttgcttgtcgatgggagactgagattgcgcttcaccctttcttgtgccgagcccgctaccttgcagttagatacgcctgtggccgacgaccgctggcatatggttctgctgactagggatgcacgcagaacagctctggccgttgatggagaagcaagagccgcagaggtgcggagcaagagacgagagatgcaagttgcaagcgacctatttgtaggagggattcctccagatgtcagactgtccgcactgacactctccaccgtgaagtacgaacccccattccgtggcctgctggccaacctgaaactcggggagagacccccagctctgttgggatcacaaggtttgcgcggtgcgaccgctgaccctctctgcgcacctgcacgcaatccatgcgcaaatggtgggctgtgcaccgttctggctcctggcgaagttggctgtgactgctcccatacaggtttcgggggaaagttttgttccgaagaggagcaccccatggagggccctgcccacctgaccctcaatagtgaaggtaaagaagagtttgtggccaccttcaaaggaaatgagttcttctgttacgacttgtcccataaccctattcagtcttcaactgatgagataaccctggcatttcggacgctccaaagaaatggactaatgctccacacaggaaaatcagctgattacgtcaacttatctctaaaatcaggagccgtctggcttgtcatcaatctcggctccggggcatttgaggcactggtggaacctgtcaacggaaaatttaacgacaatgcgtggcatgatgttagggtaacccggaacctgcgccagcacgcgggaattggccatgccatggttactatctcagtcgacggaatcttgactacgactggctacactcaagaagattacacaatgctcggctcagatgattttttttatattgggggaagccctaacaccgctgatttaccgggttctcccgtgtctaacaacttcatgggttgcctgaaggacgtggtgtacaagaacaatgacttcaagcttgaattaagtcgactcgctaaggagggagatccaaagatgaaactccagggggaccttagtttccggtgcgaagatgtggccgcactcgacccggtgaccttcgaaagcccagaagccttcgtagcccttccacgatggtctgccaagaggaccggcagcatctcattagattttagaacgacagaaccaaacgggcttctgcttttcagccaaggccgacgtgctgggggaggagccggaagtcattcatccgctcagagagcagactacttcgccatggaactacttgatggccatctgtacctactacttgacatggggtccggtgggattaagctgcgggcatcatcccggaaagtgaatgatggagaatggtgccatgttgattttcagagagacggcaggaaggggagtatttctgttaactccaggtcaacacccttccttgcgacgggggatagcgagatcttggatctggagagcgaattgtatctgggcggactgcccgagggaggaagggttgatttgccactgccgcctgaggtttggacggccgcacttcgggcaggctatgtgggttgcgtaagggatctttttattgacggaaggagccgagatttgcgagggctcgctgaagcccaaggggctgtgggtgtcgctcccttctgttcaagagaaacactaaaacagtgtgcatcagctccttgccggaacggaggggtgtgcagggagggatggaacaggtttatctgtgactgcatcggaacggggtttctggggagagtgtgcgaacgggaggcaacagtactgtcctacgatggaagcatgtatatgaaaattatgctacctaacgctatgcacactgaggctgaggacgtctcattgagattcatgtcacaacgagcctatggtctcatgatggccactacttccagagagagcgctgacaccttacgcctggaactggacgggggacagatgaagctcaccgtcaacctgggaaaaggcccagaaaccctgtttgcgggacataaacttaatgacaacgagtggcacacagtgcgggtcgtgagaaggggaaagagcttgcagctgagtgtcgacaatgtgactgttgaggggcagatggctggggcacacatgaggttagagttccataacattgagacgggtatcatgaccgagaggaggtttattagcgtggtgcctagcaattttatcggtcacctttcgggacttgtgtttaacggccagccgtacatggaccaatgtaaggacggagatattacatattgcgagctgaatgcccgattcggacttagagcaattgtggccgatccagttaccttcaagtctcgatccagttacctggccctggctacgctgcaagcatatgccagtatgcacttatttttccagttcaagacgaccgctccagatggactgctgctgtttaattccggtaatgggaacgacttcatcgtaattgaacttgtaaaaggttatatacattacgtgtttgacttggggaatgggccttctctgatgaaaggtaacagtgataaaccagtcaacgataatcagtggcacaacgtggtggtgtccagggacccaggaaatgtgcataccctgaagattgactctaggactgtcacccagcacagtaatggagccagaaatctcgatttgaaaggagagttgtatatcgggggactctcgaagaatatgttcagcaacctgcctaaactggttgctagtcgcgatggcttccaggggtgcctggccagcgttgacctgaacggacgcctgcctgatttgattgcggacgcgctgcaccggattggtcaggtcgagaggggatgcgacggccctagcacaacgtgcacggaagagagttgtgccaatcaaggggtgtgccttcagcagtgggacggcttcacctgtgactgtacaatgaccagctatgggggaccagtttgcaacgaccctggaacgacttacatatttggcaaagggggagcgctgattacatatacctggccacccaatgataggccttcgactcgaatggacagactagctgtgggtttcagcactcatcagcgttccgcagtactggtgcgggttgactcagcatccggcctcggcgattacctccagttacacattgaccagggtaccgttggagtcatcttcaatgtgggaaccgatgacattaccattgacgagccgaatgctatagtaagtgacggcaagtaccacgtggtccgctttacgaggtctggcggaaacgcgactctgcaggtggacagctggccagtgaatgaacggtacccggcagggcgacagctcaccatttttaacagccaggcggctatcaaaatcggcggacgagatcaagggcgaccctttcagggacaggtcagcggactttattataatggccttaaggtactggccctggctgcagagtctgaccctaatgtgagaaccgaggggcatctgcggctagtgggggaaggacccagcgttctcctgtcggccgagactactgccactacactcctcgctgacatggccaccaccatcatggaaaccaccacaactatggcaacaacgacaactcgtcgcggaagaagccctactctgcgtgactcaacaacacagaatacggatgatctgctggttgcctctgccgagtgtccatcagatgatgaggacctggaggagtgtgagccaagcactggcggagagcttatacttcccataattaccgaggatagcttggaccccccaccagtggccactcgctctcccttcgtcccaccgcctcccactttctacccgttcctgacaggagtaggagccacgcaggacacccttccccctcccgctgcccgaagaccgccttctggtggcccatgccaggcagaaagggacgattcggattgcgaggagcctattgaggcctccggctttgctagtggagaagtcttcgacagctctctgccccctacagacgatgaggatttctatacaacctttcccctggtgaccgacagaacgacactgttgtctcctcgcaaacccgcacctcgccctaacttgcggactgacggagccaccggcgctccaggggtcttatttgccccttctgcacctgcccctaacttacctgccggaaaaatgaatcacagagatcccctgcagcccttactggagaatcccccactgggccctggggctcctaccagtttcgagcccagacgaccacctccattgaggccgggtgtgacgagcgcgcctggattcccacatctacctacagctaaccctacaggccctggggaacggggtccacctggagctgtcgaagtgataagagagagtagtagtaccaccggaatggtggttggtatcgtagccgctgcggctctctgtatactgatcctgctgtatgcgatgtataagtataggaatcgcgacgaaggctcctatcaggttgaccagtctagaaattacatctctaatagcgcacaatctaacggggcagtagtgaaagagaaagcacccgctgctcccaagaccccatctaaggccaaaaagaataaagacaaagagtattatgtatat

SEQ ID NO: 237238 - DNA, 4929 bp, Artificial Sequence
  derived and/or modified sequence
atggccagcggcagcagatggagacccacccccccccccctgctgctgctgctgctgctggccctggccgccagagccgacggcctggagttcggcggcggccccggccagtgggccagatacgccagatgggccggcgccgccagcagcggcgagctgagcttcagcctgagaaccaacgccaccagagccctgctgctgtacctggacgacggcggcgactgcgacttcctggagctgctgctggtggacggcagactgagactgagattcaccctgagctgcgccgagcccgccaccctgcagctggacacccccgtggccgacgacagatggcacatggtgctgctgaccagagacgccagaagaaccgccctggccgtggacggcgaggccagagccgccgaggtgagaagcaagagaagagagatgcaggtggccagcgacctgttcgtgggcggcatcccccccgacgtgagactgagcgccctgaccctgagcaccgtgaagtacgagccccccttcagaggcctgctggccaacctgaagctgggcgagagaccccccgccctgctgggcagccagggcctgagaggcgccaccgccgaccccctgtgcgcccccgccagaaacccctgcgccaacggcggcctgtgcaccgtgctggcccccggcgaggtgggctgcgactgcagccacaccggcttcggcggcaagttctgcagcgaggcccccagccccttccagggccccgcccacctgaccctgaacagcgagggcaaggaggagttcgtggccaccttcaagggcaacgagttcttctgctacgacctgagccacaaccccatccagagcagcaccgacgagatcaccctggccttcagaaccctgcagagaaacggcctgatgctgcacaccggcaagagcgccgactacgtgaacctgagcctgaagagcggcgccgtgtggctggtgatcaacctgggcagcggcgccttcgaggccctggtggagcccgtgaacggcaagttcaacgacaacgcctggcacgacgtgagagtgaccagaaacctgagacagcacgccggcatcggccacgccatggtgaccatcagcgtggacggcatcctgaccaccaccggctacacccaggaggactacaccatgctgggcagcgacgacttcttctacatcggcggcagccccaacaccgccgacctgcccggcagccccgtgagcaacaacttcatgggctgcctgaaggacgtggtgtacaagaacaacgacttcaagctggagctgagcagactggccaaggagggcgaccccaagatgaagctgcagggcgacctgagcttcagatgcgaggacgtggccgccctggaccccgtgaccttcgagagccccgaggccttcgtggccctgcccagatggagcgccaagagaaccggcagcatcagcctggacttcagaaccaccgagcccaacggcctgctgctgttcagccagggcagaagagccggcggcggcgccggcagccacagcagcgcccagagagccgactacttcgccatggagctgctggacggccacctgtacctgctgctggacatgggcagcggcggcatcaagctgagagccagcagcagaaaggtgaacgacggcgagtggtgccacgtggacttccagagagacggcagaaagggcagcatcagcgtgaacagcagaagcacccccttcctggccaccggcgacagcgagatcctggacctggagagcgagctgtacctgggcggcctgcccgagggcggcagagtggacctgcccctgccccccgaggtgtggaccgccgccctgagagccggctacgtgggctgcgtgagagacctgttcatcgacggcagaagcagagacctgagaggcctggccgaggcccagggcgccgtgggcgtggcccccttctgcagcagagagaccctgaagcagtgcgccagcgccccctgcagaaacggcggcgtgtgcagagagggctggaacagattcatctgcgactgcatcggcaccggcttcctgggcagagtgtgcgagagagaggccaccgtgctgagctacgacggcagcatgtacatgaagatcatgctgcccaacgccatgcacaccgaggccgaggacgtgagcctgagattcatgagccagagagcctacggcctgatgatggccaccaccagcagagagagcgccgacaccctgagactggagctggacggcggccagatgaagctgaccgtgaacctgggcaagggccccgagaccctgttcgccggccacaagctgaacgacaacgagtggcacaccgtgagagtggtgagaagaggcaagagcctgcagctgagcgtggacaacgtgaccgtggagggccagatggccggcgcccacatgagactggagttccacaacatcgagaccggcatcatgaccgagagaagattcatcagcgtggtgcccagcaacttcatcggccacctgagcggcctggtgttcaacggccagccctacatggaccagtgcaaggacggcgacatcacctactgcgagctgaacgccagattcggcctgagagccatcgtggccgaccccgtgaccttcaagagcagaagcagctacctggccctggccaccctgcaggcctacgccagcatgcacctgttcttccagttcaagaccaccgcccccgacggcctgctgctgttcaacagcggcaacggcaacgacttcatcgtgatcgagctggtgaagggctacatccactacgtgttcgacctgggcaacggccccagcctgatgaagggcaacagcgacaagcccgtgaacgacaaccagtggcacaacgtggtggtgagcagagaccccggcaacgtgcacaccctgaagatcgacagcagaaccgtgacccagcacagcaacggcgccagaaacctggacctgaagggcgagctgtacatcggcggcctgagcaagaacatgttcagcaacctgcccaagctggtggccagcagagacggcttccagggctgcctggccagcgtggacctgaacggcagactgcccgacctgatcgccgacgccctgcacagaatcggccaggtggagagaggctgcgacggccccagcaccacctgcaccgaggagagctgcgccaaccagggcgtgtgcctgcagcagtgggacggcttcacctgcgactgcaccatgaccagctacggcggccccgtgtgcaacgaccccggcaccacctacatcttcggcaagggcggcgccctgatcacctacacctggccccccaacgacagacccagcaccagaatggacagactggccgtgggcttcagcacccaccagagaagcgccgtgctggtgagagtggacagcgccagcggcctgggcgactacctgcagctgcacatcgaccagggcaccgtgggcgtgatcttcaacgtgggcaccgacgacatcaccatcgacgagcccaacgccatcgtgagcgacggcaagtaccacgtggtgagattcaccagaagcggcggcaacgccaccctgcaggtggacagctggcccgtgaacgagagataccccgccggcagacagctgaccatcttcaacagccaggccgccatcaagatcggcggcagagaccagggcagacccttccagggccaggtgagcggcctgtactacaacggcctgaaggtgctggccctggccgccgagagcgaccccaacgtgagaaccgagggccacctgagactggtgggcgagggccccagcgtgctgctgagcgccgagaccaccgccaccaccctgctggccgacatggccaccaccatcatggagaccaccaccaccatggccaccaccaccaccagaagaggcagaagccccaccctgagagacagcaccacccagaacaccgacgacctgctggtggccagcgccgagtgccccagcgacgacgaggacctggaggagtgcgagcccagcaccggcggcgagctgatcctgcccatcatcaccgaggacagcctggaccccccccccgtggccaccagaagccccttcgtgccccccccccccaccttctaccccttcctgaccggcgtgggcgccacccaggacaccctgcccccccccgccgccagaagaccccccagcggcggcccctgccaggccgagagagacgacagcgactgcgaggagcccatcgaggccagcggcttcgccagcggcgaggtgttcgacagcagcctgccccccaccgacgacgaggacttctacaccaccttccccctggtgaccgacagaaccaccctgctgagccccagaaagcccgcccccagacccaacctgagaaccgacggcgccaccggcgcccccggcgtgctgttcgcccccagcgcccccgcccccaacctgcccgccggcaagatgaaccacagagaccccctgcagcccctgctggagaacccccccctgggccccggcgcccccaccagcttcgagcccagaagacccccccccctgagacccggcgtgaccagcgcccccggcttcccccacctgcccaccgccaaccccaccggccccggcgagagaggcccccccggcgccgtggaggtgatcagagagagcagcagcaccaccggcatggtggtgggcatcgtggccgccgccgccctgtgcatcctgatcctgctgtacgccatgtacaagtacagaaacagagacgagggcagctaccaggtggaccagagcagaaactacatcagcaacagcgcccagagcaacggcgccgtggtgaaggagaaggcccccgccgcccccaagacccccagcaaggccaagaagaacaaggacaaggagtactacgtgtag

SEQ ID NO: 237239 - DNA, 4929 bp, Artificial Sequence
  derived and/or modified sequence
atggccagcggcagcagatggagacccacccccccccccctgctgctgctgctgctgctggccctggccgccagagccgacggcctggagttcggcggcggccccggccagtgggccagatacgccagatgggccggcgccgccagcagcggcgagctgagcttcagcctgagaaccaacgccaccagagccctgctgctgtacctggacgacggcggcgactgcgacttcctggagctgctgctggtggacggcagactgagactgagattcaccctgagctgcgccgagcccgccaccctgcagctggacacccccgtggccgacgacagatggcacatggtgctgctgaccagagacgccagaagaaccgccctggccgtggacggcgaggccagagccgccgaggtgagaagcaagagaagagagatgcaggtggccagcgacctgttcgtgggcggcatcccccccgacgtgagactgagcgccctgaccctgagcaccgtgaagtacgagccccccttcagaggcctgctggccaacctgaagctgggcgagagaccccccgccctgctgggcagccagggcctgagaggcgccaccgccgaccccctgtgcgcccccgccagaaacccctgcgccaacggcggcctgtgcaccgtgctggcccccggcgaggtgggctgcgactgcagccacaccggcttcggcggcaagttctgcagcgaggaggagcaccccatggagggccccgcccacctgaccctgaacagcgagggcaaggaggagttcgtggccaccttcaagggcaacgagttcttctgctacgacctgagccacaaccccatccagagcagcaccgacgagatcaccctggccttcagaaccctgcagagaaacggcctgatgctgcacaccggcaagagcgccgactacgtgaacctgagcctgaagagcggcgccgtgtggctggtgatcaacctgggcagcggcgccttcgaggccctggtggagcccgtgaacggcaagttcaacgacaacgcctggcacgacgtgagagtgaccagaaacctgagacagcacgccggcatcggccacgccatggtgaccatcagcgtggacggcatcctgaccaccaccggctacacccaggaggactacaccatgctgggcagcgacgacttcttctacatcggcggcagccccaacaccgccgacctgcccggcagccccgtgagcaacaacttcatgggctgcctgaaggacgtggtgtacaagaacaacgacttcaagctggagctgagcagactggccaaggagggcgaccccaagatgaagctgcagggcgacctgagcttcagatgcgaggacgtggccgccctggaccccgtgaccttcgagagccccgaggccttcgtggccctgcccagatggagcgccaagagaaccggcagcatcagcctggacttcagaaccaccgagcccaacggcctgctgctgttcagccagggcagaagagccggcggcggcgccggcagccacagcagcgcccagagagccgactacttcgccatggagctgctggacggccacctgtacctgctgctggacatgggcagcggcggcatcaagctgagagccagcagcagaaaggtgaacgacggcgagtggtgccacgtggacttccagagagacggcagaaagggcagcatcagcgtgaacagcagaagcacccccttcctggccaccggcgacagcgagatcctggacctggagagcgagctgtacctgggcggcctgcccgagggcggcagagtggacctgcccctgccccccgaggtgtggaccgccgccctgagagccggctacgtgggctgcgtgagagacctgttcatcgacggcagaagcagagacctgagaggcctggccgaggcccagggcgccgtgggcgtggcccccttctgcagcagagagaccctgaagcagtgcgccagcgccccctgcagaaacggcggcgtgtgcagagagggctggaacagattcatctgcgactgcatcggcaccggcttcctgggcagagtgtgcgagagagaggccaccgtgctgagctacgacggcagcatgtacatgaagatcatgctgcccaacgccatgcacaccgaggccgaggacgtgagcctgagattcatgagccagagagcctacggcctgatgatggccaccaccagcagagagagcgccgacaccctgagactggagctggacggcggccagatgaagctgaccgtgaacctgggcaagggccccgagaccctgttcgccggccacaagctgaacgacaacgagtggcacaccgtgagagtggtgagaagaggcaagagcctgcagctgagcgtggacaacgtgaccgtggagggccagatggccggcgcccacatgagactggagttccacaacatcgagaccggcatcatgaccgagagaagattcatcagcgtggtgcccagcaacttcatcggccacctgagcggcctggtgttcaacggccagccctacatggaccagtgcaaggacggcgacatcacctactgcgagctgaacgccagattcggcctgagagccatcgtggccgaccccgtgaccttcaagagcagaagcagctacctggccctggccaccctgcaggcctacgccagcatgcacctgttcttccagttcaagaccaccgcccccgacggcctgctgctgttcaacagcggcaacggcaacgacttcatcgtgatcgagctggtgaagggctacatccactacgtgttcgacctgggcaacggccccagcctgatgaagggcaacagcgacaagcccgtgaacgacaaccagtggcacaacgtggtggtgagcagagaccccggcaacgtgcacaccctgaagatcgacagcagaaccgtgacccagcacagcaacggcgccagaaacctggacctgaagggcgagctgtacatcggcggcctgagcaagaacatgttcagcaacctgcccaagctggtggccagcagagacggcttccagggctgcctggccagcgtggacctgaacggcagactgcccgacctgatcgccgacgccctgcacagaatcggccaggtggagagaggctgcgacggccccagcaccacctgcaccgaggagagctgcgccaaccagggcgtgtgcctgcagcagtgggacggcttcacctgcgactgcaccatgaccagctacggcggccccgtgtgcaacgaccccggcaccacctacatcttcggcaagggcggcgccctgatcacctacacctggccccccaacgacagacccagcaccagaatggacagactggccgtgggcttcagcacccaccagagaagcgccgtgctggtgagagtggacagcgccagcggcctgggcgactacctgcagctgcacatcgaccagggcaccgtgggcgtgatcttcaacgtgggcaccgacgacatcaccatcgacgagcccaacgccatcgtgagcgacggcaagtaccacgtggtgagattcaccagaagcggcggcaacgccaccctgcaggtggacagctggcccgtgaacgagagataccccgccggcagacagctgaccatcttcaacagccaggccgccatcaagatcggcggcagagaccagggcagacccttccagggccaggtgagcggcctgtactacaacggcctgaaggtgctggccctggccgccgagagcgaccccaacgtgagaaccgagggccacctgagactggtgggcgagggccccagcgtgctgctgagcgccgagaccaccgccaccaccctgctggccgacatggccaccaccatcatggagaccaccaccaccatggccaccaccaccaccagaagaggcagaagccccaccctgagagacagcaccacccagaacaccgacgacctgctggtggccagcgccgagtgccccagcgacgacgaggacctggaggagtgcgagcccagcaccggcggcgagctgatcctgcccatcatcaccgaggacagcctggaccccccccccgtggccaccagaagccccttcgtgccccccccccccaccttctaccccttcctgaccggcgtgggcgccacccaggacaccctgcccccccccgccgccagaagaccccccagcggcggcccctgccaggccgagagagacgacagcgactgcgaggagcccatcgaggccagcggcttcgccagcggcgaggtgttcgacagcagcctgccccccaccgacgacgaggacttctacaccaccttccccctggtgaccgacagaaccaccctgctgagccccagaaagcccgcccccagacccaacctgagaaccgacggcgccaccggcgcccccggcgtgctgttcgcccccagcgcccccgcccccaacctgcccgccggcaagatgaaccacagagaccccctgcagcccctgctggagaacccccccctgggccccggcgcccccaccagcttcgagcccagaagacccccccccctgagacccggcgtgaccagcgcccccggcttcccccacctgcccaccgccaaccccaccggccccggcgagagaggcccccccggcgccgtggaggtgatcagagagagcagcagcaccaccggcatggtggtgggcatcgtggccgccgccgccctgtgcatcctgatcctgctgtacgccatgtacaagtacagaaacagagacgagggcagctaccaggtggaccagagcagaaactacatcagcaacagcgcccagagcaacggcgccgtggtgaaggagaaggcccccgccgcccccaagacccccagcaaggccaagaagaacaaggacaaggagtactacgtgtag

SEQ ID NO: 237240 - protein, 15 aa, Artificial Sequence
  derived and/or modified sequence
LGDVYVNDAFGTAHR

SEQ ID NO: 237241 - protein, 417 aa, Artificial Sequence
  derived and/or modified sequence
MSLSKKLTLDKLDVRGKRVIMRVDFNVPMKKNQITNNQRIKASIPSIKYCLDNGAKAVVLMSHLGRPDGVPMPDKYSLAPVAVELKSLLGKDVLFLKDCVGAEVEKACANPAPGSVILLENLRFHVEEEGKGQDPSGKKIKAEPDKIEAFRASLSKLGDVYVNDAFGTAHRAHSSMVGVNLPHKASGFLMKKELDYFAKALENPVRPFLAILGGAKVADKIQLIKNMLDKVNEMIIGGGMAYTFLKVLNNMEIGASLFDEEGAKIVKDIMAKAQKNGVRITFPVDFVTGDKFDENAQVGKATVASGISPGWMGLDCGPESNKNHAQVVAQARLIVWNGPLGVFEWDAFAKGTKALMDEIVKATSKGCITVIGGGDTATCCAKWNTEDKVSHVSTGGGASLELLEGKILPGVEALSNM

SEQ ID NO: 237242 - DNA, 1254 bp, Artificial Sequence
  derived and/or modified sequence
atgtctctaagcaaaaaactgacccttgacaagttggacgtccgaggtaaacgtgttatcatgagagtagattttaatgtgccaatgaaaaaaaaccagataactaataaccagcgcataaaggccagcataccctctattaagtactgccttgacaatggcgccaaggccgtggtgctgatgagccacctgggccgccccgacggcgtacctatgcctgacaaatatagcctcgccccagtggctgtggaactgaaaagtctgctcggaaaagacgtactattcctgaaagattgtgtcggggccgaggttgaaaaggcttgtgccaaccccgcccccggcagcgtgatactacttgagaatcttcggttccacgttgaggaggagggcaagggtcaagatccaagtggcaaaaagattaaagctgagcctgataaaatagaagcttttagagcttctctgagcaagctgggcgacgtgtacgtgaatgacgccttcgggaccgcccacagagcccacagctccatggtcggggtcaatctcccacataaggcgtctgggtttctgatgaagaaagagctggattatttcgcaaaggctctggaaaatcctgtgcgccctttccttgcaattcttggtggagccaaggtggcggataaaatccagctgatcaaaaacatgctcgacaaagtgaacgagatgataattggaggtgggatggcctacacgttcctgaaagtcctgaacaatatggaaatcggggcgagcctcttcgacgaagaaggcgcaaaaatcgttaaggacattatggcaaaagctcagaaaaacggagtgaggatcacattcccagtggacttcgtgactggggataagttcgacgagaacgcacaagtgggtaaggccacggtggcgtccggcataagcccaggctggatgggactggattgcggtcctgagagcaacaagaatcacgcccaagtagttgcgcaagcgagacttattgtctggaatggaccactcggcgtattcgaatgggatgcttttgcaaagggaacaaaggccctcatggatgagatcgtgaaggcgacctccaaggggtgcattaccgtgatcggggggggcgatactgcaacttgctgcgctaaatggaacacagaagacaaggtctctcacgtgagcacagggggcggcgccagccttgagttgctcgagggcaagatcttgcccggcgtcgaggcactctctaacatgtag

SEQ ID NO: 237243 - DNA, 1254 bp, Artificial Sequence
  derived and/or modified sequence
atgagcctgagcaagaagctgaccctggacaagctggatgtgcggggcaagagggtcatcatgagggtggacttcaacgtgcccatgaagaagaaccagatcaccaacaaccagaggatcaaggccagcatccccagcatcaagtactgcctggacaatggagccaaggctgtggtgctgatgagccacctgggccgcccagatggagtgcccatgccagacaagtacagcctggcccctgtggccgtggagctgaagagcctgctgggcaaggatgtgctcttcctgaaggactgtgtgggcgctgaggtggagaaggcctgtgccaacccagcccctggcagcgtcatcctgctggagaacctgcgcttccacgtggaggaggagggcaagggccaggaccccagcggcaagaagatcaaggccgagccagacaagattgaggccttccgggccagcctgagcaagctgggagatgtgtatgtgaatgatgccttcggcacagcccaccgggcccacagctccatggtgggcgtgaacctgccccacaaggccagcggcttcctgatgaagaaggagctggactactttgccaaggccctggagaaccctgtgcggcccttcctggccatcctgggcggggccaaggtggccgacaagatccagctgatcaagaacatgctggacaaggtgaatgagatgatcatcggcggcggcatggcctacaccttcctgaaggtgctgaacaacatggagattggagccagcctgtttgatgaggagggcgccaagatcgtgaaggacatcatggccaaggcccagaagaatggagtgcgcatcaccttccctgtggactttgtgactggagacaagtttgatgaaaatgcccaggtgggcaaggccaccgtggccagcggcatcagccctggctggatgggcctggactgtggccctgagagcaacaagaaccacgcccaggtggtggcccaggcccggctcatcgtgtggaatggccccctgggcgtgtttgagtgggatgcctttgccaagggcaccaaggccctgatggatgaaattgtgaaggccaccagcaagggctgcatcaccgtgattggaggaggagacacagccacctgctgtgccaagtggaacacagaggacaaggtgagccacgtgtccactggaggaggagccagcctggagctgctggagggcaagatcctgcccggggtggaggccctgagcaacatgtag

SEQ ID NO: 237244 - DNA, 1254 bp, Artificial Sequence
  derived and/or modified sequence
atgagcctgagcaagaagctgaccctggacaagctggacgtgcggggcaaacgagtcattatgcgcgtagattttaacgtgcccatgaaaaaaaaccagattaccaataatcagcgtataaaggcctctataccgagcattaaatattgcttggacaatggtgctaaagcagtggtgctaatgtctcatctggggcgccccgacggcgttcccatgccggacaagtactcgctggcacctgtggccgtggagctcaaaagcctgttgggcaaggacgtgttgtttctcaaggattgcgtcggggccgaagtggaaaaagcttgcgccaatcctgccccgggatccgttatcttattggaaaacctgagatttcacgtcgaggaagaaggcaaagggcaggatccctccggaaagaaaataaaggcagaaccggacaaaattgaagcttttcgtgcgagtctcagtaagttaggagatgtgtacgtgaatgacgcatttggcacggcgcatcgcgcgcacagctccatggttggcgttaatcttccacacaaagcatccggcttcttgatgaaaaaagaactcgattacttcgccaaagccttggaaaacccagttcggcccttcctcgccattctgggcggcgccaaggtcgccgacaaaatacaactgatcaagaacatgttggacaaagtcaatgagatgattatcggggggggaatggcttacaccttcttaaaggttctcaataacatggagatcggagcatctctgtttgacgaggagggggcaaagatcgtgaaggatataatggcgaaagcccagaagaatggggttcgtataacttttcctgtggattttgttactggagacaaatttgatgagaatgcccaggtcggaaaagctaccgtcgctagtggaattagccccggctggatggggttggattgtggccccgagtctaacaagaatcacgcccaggtggtcgcccaggcacggctgattgtttggaatggtcccttgggggtttttgaatgggatgcgtttgccaaggggactaaggctttgatggacgaaatagtcaaggctacctcgaaggggtgtatcaccgtgatcggaggcggcgacactgcaacatgctgtgccaagtggaacaccgaggataaagtgtcccatgtgtccaccggtgggggcgcctccctggaacttttggaggggaaaattctaccgggggtggaggctctgtccaatatgtag

SEQ ID NO: 237245 - DNA, 1688 bp, Artificial Sequence
  derived and/or modified sequence
aacagtggccgttgtgctggagacagtgaggagaagaaaggggcgggacaagggcaaaggcgttagaagtcaccaccgacccagcccctcaacagcaagttggttcttcagcattaagatccaggtgtcagcctatgtctttatattgtcaagatgtctctttctaagaagttgactttagacaaactggatgttagagggaagcgagtcatcatgagagtagacttcaatgttcccatgaagaagaaccagattacaaacaaccagaggatcaaggcttccatcccaagcatcaagtactgcctggacaatggagccaaggcagtagttcttatgagtcatctaggtcggcctgatggtgttcccatgcctgacaaatattccttagcacctgttgctgttgagctcaaatccttgctgggcaaggatgttctgttcctgaaggactgtgtaggcgcagaagtggagaaagcctgtgccaacccagctcctggttcagtcatcctgctggagaacctgcgctttcatgtggaggaagaagggaagggccaagatccctctggaaagaagattaaagctgagccagataaaatagaagccttccgagcatcactttccaagctaggggacgtctatgtcaatgatgcttttggcactgcacaccgcgctcatagttccatggtgggagtgaatctgccccataaagcatccggattcttgatgaagaaggaactagattactttgctaaagccttggaaaacccagtgagaccctttctggctatacttggtggagccaaagtggcagacaagatccaacttatcaaaaatatgctggacaaagtcaatgagatgattattggtggtggaatggcttataccttccttaaggtactcaacaacatggagattggtgcttccctgtttgatgaagagggagccaagatcgttaaagatatcatggccaaagcacaaaagaatggtgtaaggattacttttcctgttgattttgttactggggacaagtttgacgagaacgctcaggttggaaaagccactgtagcatctggcatatctcctggctggatgggtttggactgtggtcctgagagcaacaagaatcatgctcaagttgtggctcaagcaaggctaattgtttggaatgggccgttaggagtatttgaatgggatgcctttgctaagggaaccaaagccctcatggatgaaattgtgaaagccacttccaagggctgcatcactgttatagggggtggagacactgctacttgctgtgccaaatggaacactgaagataaagtcagccatgtcagcactggaggcggtgccagtctagagcttctggaaggtaaaatccttcctggagtagaggccctcagcaacatgtagttaatatagtgttacttccttctgttttctgtccatggcccttaagtcagcttaatgcttttacatctcgatgtgacttttgttaaaatctactcctagatcaagacctatgtaatggacaagcagcaggccatcaggaactcttaatatcagcacagcaattcattttagtttggtcacgcatttgcctgttcaagttctcatttgaacttcaccattgtgctatctagggaggacatattcttaagttgcctattaaagaaagtgagctgaagaaactg

SEQ ID NO: 237246 - DNA, 1254 bp, Artificial Sequence
  derived and/or modified sequence
atgtccttaagcaaaaaactgaccctggataaactggacgtgcggggaaagcgcgtgatcatgcgcgtggatttcaatgttccaatgaagaaaaatcagatcaccaataaccagcgaatcaaagcgagtattcctagcatcaagtattgcctggataacggagccaaggctgtggttctgatgtcacatttgggcaggcctgatggtgtacctatgccggataagtactcgttagccccagtggcggtcgaactgaagtcacttttgggaaaggatgtccttttcttaaaggactgcgtgggtgctgaggtagagaaagcctgtgcaaaccccgcaccgggatcagtaatcctgttggaaaacctgagatttcatgtggaagaggagggaaaaggccaagatccttccggaaaaaagatcaaggctgagccggacaagattgaggcctttcgagctagcttgagcaaattaggtgatgtgtatgtgaatgacgccttcgggactgcccatcgtgcgcattcatccatggtgggggttaatttgcctcacaaggcaagcggattccttatgaagaaagagctcgattacttcgctaaggcactggagaaccctgttcgaccattcttagcaatattaggcggagccaaagtggcagacaagattcagttgatcaagaatatgctggacaaggtcaatgaaatgatcatcggtgggggaatggcctacacattcttgaaagtcctaaacaacatggaaatcggcgctagcctgtttgacgaagaaggcgcaaaaatcgttaaagatatcatggccaaggcccagaagaacggtgtgcggataacattccctgtggatttcgtgaccggggacaaatttgatgagaacgctcaggttggtaaggctacagtggcttctggaatttcccccggatggatgggactggattgcgggccagagagcaataagaaccacgcacaagtggtcgctcaagccagactcatagtttggaacggacccctgggcgtgtttgaatgggacgcattcgccaaaggcacgaaagccctcatggacgaaattgtaaaggctacctcaaaggggtgtattaccgtcatcggcggtggggacactgccacgtgctgtgcaaaatggaataccgaggataaagtgtcccacgtgtccactgggggtggcgcatctctggaactgctggaaggtaaaatcctgcctggagtggaggccttgagcaacatgtag

SEQ ID NO: 237247 - DNA, 1254 bp, Artificial Sequence
  derived and/or modified sequence
atgagcctgagcaagaagctgaccctggacaagctggacgtgagaggcaagagagtgatcatgagagtggacttcaacgtgcccatgaagaagaaccagatcaccaacaaccagagaatcaaggccagcatccccagcatcaagtactgcctggacaacggcgccaaggccgtggtgctgatgagccacctgggcagacccgacggcgtgcccatgcccgacaagtacagcctggcccccgtggccgtggagctgaagagcctgctgggcaaggacgtgctgttcctgaaggactgcgtgggcgccgaggtggagaaggcctgcgccaaccccgcccccggcagcgtgatcctgctggagaacctgagattccacgtggaggaggagggcaagggccaggaccccagcggcaagaagatcaaggccgagcccgacaagatcgaggccttcagagccagcctgagcaagctgggcgacgtgtacgtgaacgacgccttcggcaccgcccacagagcccacagcagcatggtgggcgtgaacctgccccacaaggccagcggcttcctgatgaagaaggagctggactacttcgccaaggccctggagaaccccgtgagacccttcctggccatcctgggcggcgccaaggtggccgacaagatccagctgatcaagaacatgctggacaaggtgaacgagatgatcatcggcggcggcatggcctacaccttcctgaaggtgctgaacaacatggagatcggcgccagcctgttcgacgaggagggcgccaagatcgtgaaggacatcatggccaaggcccagaagaacggcgtgagaatcaccttccccgtggacttcgtgaccggcgacaagttcgacgagaacgcccaggtgggcaaggccaccgtggccagcggcatcagccccggctggatgggcctggactgcggccccgagagcaacaagaaccacgcccaggtggtggcccaggccagactgatcgtgtggaacggccccctgggcgtgttcgagtgggacgccttcgccaagggcaccaaggccctgatggacgagatcgtgaaggccaccagcaagggctgcatcaccgtgatcggcggcggcgacaccgccacctgctgcgccaagtggaacaccgaggacaaggtgagccacgtgagcaccggcggcggcgccagcctggagctgctggagggcaagatcctgcccggcgtggaggccctgagcaacatgtag

SEQ ID NO: 237248 - protein, 666 aa, Artificial Sequence
  derived and/or modified sequence
MPPGGSGPGGCPRRPPALAGPLPPPPPPPPPPLLPLLPLLLLLLLGAAEGARVSSSLSTTHHVHHFHSKHGTVPIAINRMPFLTRGGHAGTTYIFGKGGALITYTWPPNDRPSTRMDRLAVGFSTHQRSAVLVRVDSASGLGDYLQLHIDQGTVGVIFNVGTDDITIDEPNAIVSDGKYHVVRFTRSGGNATLQVDSWPVNERYPAGNFDNERLAIARQRIPYRLGRVVDEWLLDKGRQLTIFNSQAAIKIGGRDQGRPFQGQVSGLYYNGLKVLALAAESDPNVRTEGHLRLVGEGPSVLLSAETTATTLLADMATTIMETTTTMATTTTRRGRSPTLRDSTTQNTDDLLVASAECPSDDEDLEECEPSTGGELILPIITEDSLDPPPVATRSPFVPPPPTFYPFLTGVGATQDTLPPPAARRPPSGGPCQAERDDSDCEEPIEASGFASGEVFDSSLPPTDDEDFYTTFPLVTDRTTLLSPRKPAPRPNLRTDGATGAPGVLFAPSAPAPNLPAGKMNHRDPLQPLLENPPLGPGAPTSFEPRRPPPLRPGVTSAPGFPHLPTANPTGPGERGPPGAVEVIRESSSTTGMVVGIVAAAALCILILLYAMYKYRNRDEGSYQVDQSRNYISNSAQSNGAVVKEKAPAAPKTPSKAKKNKDKEYYV

SEQ ID NO: 237249 - DNA, 2001 bp, Artificial Sequence
  derived and/or modified sequence
atgcctcccggcggttctggccccggtggatgtcctagaaggcctccagcactggccggtcccctgcctccaccaccacctcccccacctccccctttactgccgttgctgccactccttcttctcctgctgctgggagccgccgagggtgcgcgggtgagctccagcttaagcaccacgcaccacgtccaccatttccattctaagcatggaaccgtgcctatcgcgattaaccgcatgcccttcctgacccgaggcggtcacgcagggactacttatattttcgggaagggcggggccctgattacttacacctggcctcccaatgacaggcctagtactagaatggatcgcctcgcggtgggcttttctacccaccagcgaagcgcggtcttagtccgagtagatagcgccagtgggcttggtgactatctacagctccacatagaccaagggactgtaggcgtgatcttcaacgtgggaacagatgacattacgattgatgaacccaatgcaatcgtgagcgatgggaagtatcatgtggtcagattcacacggtctggaggcaatgccacccttcaggtagattcctggcctgtcaatgaacggtacccagccgggaacttcgacaatgaaaggctggctatcgctcggcaaaggattccttatcgcctgggccgcgtagtggacgaatggttgctggacaaggggagacagttaaccatctttaacagccaggcagccataaagattggcggcagagatcaagggcgaccctttcagggccaggtgtctgggctgtattacaatggccttaaggtcctcgccttagctgcagagagtgatcctaatgtgagaacagaaggccacctcagactggtaggtgagggcccatcagtgttgcttagcgctgagaccacagccactactctcctggccgacatggcaaccacaatcatggaaactaccaccaccatggccacaacaaccacccggcgcgggaggtcccccactctccgcgatagtacaacgcaaaacactgacgatctcctggtcgcttctgccgagtgcccctccgacgacgaggatcttgaagagtgtgagccctctaccgggggggaactgatcctccctatcattacagaagattccctggatcctccccctgtggccaccagatctcccttcgtacctccccccccaaccttctacccttttttgacgggtgtcggcgctacacaagatactctccctccacccgctgccagacggccaccctccgggggaccgtgtcaggctgagcgggacgactccgattgcgaagagccaatcgaagcgagcgggttcgcatcaggagaggtcttcgattcatctcttccgccgactgatgacgaagatttctatacaacctttcctctcgtcactgacagaactacgttactgtctccacgaaaaccagccccacgccctaatctacgcaccgacggggccaccggcgctccaggtgtgctgttcgccccgagcgcaccagcacccaacctccctgcgggtaagatgaatcatagggacccactccagcccttgctggagaaccctccattggggccgggcgctcctacgtcgtttgaacccaggaggcctccaccactccgccccggcgtaacttccgcccccggttttccacacctgccaacagccaaccccacaggtcctggtgaacgcggaccccccggagctgtagaagtcatccgtgaatctagcagtacaactggtatggtcgtaggcattgttgctgcggctgcgctgtgcatattaatcctgctttacgcaatgtacaagtaccggaacagagacgagggaagttaccaggtggaccagagcaggaactatatcagcaactctgctcaatcgaatggagccgtggtgaaagagaaagctcccgctgctcccaagacaccctccaaggccaaaaaaaacaaggacaaagaatactacgtgtag

SEQ ID NO: 237250 - DNA, 2001 bp, Artificial Sequence
  derived and/or modified sequence
atgcctcctgggggcagcggccctgggggctgcccccggcggcccccagccctggccggccccctgcccccacctcctcctcctcctcctccacccctgctgcccctgctgcccctgctgctgctgctgctgctgggcgctgctgagggcgcccgggtgagcagcagcctgagcaccacccaccacgtgcaccacttccacagcaagcacggcaccgtgcccatcgccatcaacaggatgcccttcctgacccggggcggccatgctggcaccacctacatctttggaaaaggaggagccctgatcacctacacctggcccccaaatgaccggcccagcaccaggatggaccggctggccgtgggcttcagcacccaccagaggtctgctgtgctggtgcgggtggacagcgccagcggcctgggggactacctgcagctgcacatcgaccagggcaccgtgggcgtcatcttcaacgtgggcacagatgacatcaccattgatgagcccaatgccatcgtgtctgatggcaagtaccacgtggtgcgcttcaccaggtctggaggaaatgccaccctgcaggtggacagctggcctgtgaatgaaagatacccagctggcaactttgacaatgaaaggctggccatcgcccggcagaggatcccctaccgcctgggccgggtggtggatgagtggctgctggacaagggccggcagctgaccatcttcaacagccaggccgccatcaagattggaggccgggaccagggccggcccttccagggccaggtgtctggcctgtactacaacggcctgaaggtgctggccctggccgctgagagtgaccccaacgtgaggacagagggccacctgcggctggtgggggagggccccagcgtgctgctgtctgctgagaccacagccaccaccctgctggccgacatggccaccaccatcatggagaccaccaccaccatggccaccaccaccacccggcggggccgcagccccaccctgcgggacagcaccacccagaacacagatgacctgctggtggccagcgctgagtgccccagtgatgatgaggacctggaggagtgtgagcccagcactggaggagagctgatcctgcccatcatcacagaggacagcctggaccccccacctgtggccaccaggagcccctttgtgcccccaccacccaccttctaccccttcctgactggagtgggcgccacccaggacaccctgcccccacctgctgcccggcggcccccatctgggggcccctgccaggccgagagagatgacagcgactgtgaggagcccatcgaggccagcggctttgccagcggggaggtgtttgacagcagcctgcccccaacagatgatgaggacttctacaccaccttccccctggtgacagacaggaccaccctgctgagccccaggaagccagccccccggcccaacctgaggacagatggagccaccggggcccctggggtgctgtttgcccccagcgccccagcccccaacctgcctgctgggaagatgaaccaccgggaccccctgcagcccctgctggagaacccccccctgggccctggggcccccaccagctttgagccccggcggcccccacccctgcggcctggggtgaccagcgcccctggcttcccccacctgcccacagccaaccccactggacctggagagcggggccccccaggagctgtggaggtgatccgggagagcagcagcaccaccggcatggtggtgggcatcgtggccgccgccgccctgtgcatcctgatcctgctgtatgccatgtacaagtacagaaacagagatgagggcagctaccaggtggaccagagcaggaactacatcagcaacagcgcccagagcaatggagctgtggtgaaggagaaggccccagctgcccccaagacccccagcaaggccaagaagaacaaggacaaggagtactacgtgtag

SEQ ID NO: 237251 - DNA, 2001 bp, Artificial Sequence
  derived and/or modified sequence
atgccccccggcggcagcggccccggcggctgcccccggcggccccctgcactcgcaggaccgttgccgcctcctccacctccgcctcctccccccctgttgccactgctcccccttctgctattgttgcttctgggggccgctgagggcgccagagtgagttcctcactgtccactacacaccacgtgcaccattttcattccaagcatggcactgtacccattgctattaacagaatgcccttcctcactcgcggaggccacgccgggacgacttatattttcggaaagggaggcgctctgataacatatacatggcctccaaacgacaggccatctaccagaatggacaggttggccgttgggttttcaacccaccagcgatctgctgtcctcgttcgtgtggattccgctagtgggctcggcgattatttacagcttcacatcgatcaggggactgtaggtgtcatattcaacgttgggacagatgacataacgattgacgagcctaacgccattgtaagcgacggaaagtaccatgtggtccgatttacaagatctgggggaaatgccacactacaggttgattcttggccagttaatgaaagataccccgccggaaacttcgacaatgagcggctggctattgcccgacagcgcattccctaccgactgggaagagtggtggacgagtggctcctggataaagggcgacagctgaccattttcaactcacaggcggccatcaaaatcggagggagagatcagggccgtccctttcagggacaagtttcaggcctctactataatggcttaaaagtgttggccctcgccgccgaatctgaccctaatgtccggacagaggggcatctgcgcctcgtaggcgaaggcccttctgtgttattgagcgcagagacaactgcgaccactctattggccgacatggccaccaccatcatggaaaccactacgaccatggctaccacaacgactaggcgtgggcggtctcctaccttacgcgattccaccacccaaaacacggatgacctgctggtagccagcgcagaatgtcccagcgatgatgaagacttagaggagtgtgaaccatcaaccggcggggagctgattctcccaatcattaccgaagactctttggatcctccccccgtggccacacggagtccgttcgtacctccaccgccaactttttacccattcctgaccggagtgggggctactcaggacacgctgccgccacctgctgctaggcggcctccctccggcggcccatgtcaggctgaaagagacgactcagactgcgaggagcccatcgaagcttccggattcgcaagcggggaggtcttcgactcgagcttaccaccaaccgacgacgaggatttctatacgactttccccctcgtgaccgaccggactaccctcctttctccacggaagccagcgcctaggcctaatttgaggacagacggagccacaggcgctccaggggtgctgtttgctccctcagctcctgcgccaaatctgcccgcaggcaaaatgaaccatcgggatcctctccagcctctactcgaaaatcctccactgggccctggcgcacccacaagcttcgagccccggcgaccgcctccattgagacctggcgtgactagcgcacctggattcccacatttgccaactgccaacccaacaggccccggggagcgaggaccccccggcgctgtggaagtaatccgtgagtcctcttcaactaccggaatggtcgtaggtattgtagcagccgcagcactctgtattctgatcttgctgtacgcaatgtacaaatatcggaatagggatgaaggctcctatcaggtggaccagtcacgcaattacatttccaattcagctcagtcaaatggagcggttgtcaaggagaaagcccctgccgcgccaaagaccccctccaaagcaaaaaagaataaagacaaagaatattacgtatag

SEQ ID NO: 237252 - DNA, 3535 bp, Artificial Sequence
  derived and/or modified sequence
ggcagcagcggcgcggccggccccagtcgccgtcggtctcccgccttcgggggaaccaggtctccgtccctcttctctcctccagcccgcaccgccccgctccccagctcggtttttccgcaggatttccctcgctctcccctccctgcttggcccccgcgctcccctccctctccactcggcaccatgccccctcccccgggcgctcccccgggtttctgacggccctctgcgccgctccgaccccgccgggatgcagagagacccctagctcctcgcgatggacccaggcatcctggaccttggcgttgccgctccgcggacccccgatttcccggcgggatccagttgattttgttggctccggaccgaggcttgggccctggtttacctccgcttcatccctaccccgctcccggagctcggagccggaggggggcttcgcggggctgcgcagccccgcgtccccgcccccggccatggggctgtgaggcggtcgcccccgggccgaaatgccccccggggggagcgggccgggggggtgcccgcgccgccccccggccctggctgggcccctgccgccgcctccaccgccgccgccgccacctctgctgccgctgttgccgctgttgctgctgttgctgctgggggcggccgagggggcccgggtctcctccagcctcagcaccacccaccacgtccaccacttccacagcaagcacggcaccgtgcccatcgccatcaaccgcatgcccttcctcacccgcggcggccacgccgggaccacatacatctttgggaaggggggagcgctcatcacctacacgtggccccccaatgacaggcccagcacgaggatggatcgcctggccgtgggcttcagcacccaccagcggagcgctgtgctggtgcgggtggacagcgcctccggccttggagactacctgcagctgcacatcgaccagggcaccgtgggggtgatctttaacgtgggcacggacgacattaccatcgacgagcccaacgccatagtaagcgacggcaaataccacgtggtgcgcttcactcgaagcggcggcaacgccaccctgcaggtggacagctggccggtcaacgagcggtacccggcaggaaactttgataacgagcgcctggcgattgctagacagagaatcccctaccggcttggtcgagtagtagatgagtggctgctcgacaaaggccgccagctgaccatcttcaacagccaggctgccatcaagatcgggggccgggatcagggccgccccttccagggccaggtgtccggcctctactacaatgggctcaaggtgctggcgctggccgccgagagcgaccccaatgtgcggactgagggtcacctgcgcctggtgggggaggggccgtccgtgctgctcagtgcggagaccacggccaccaccctgctggctgacatggccaccaccatcatggagactaccaccaccatggccactaccaccacgcgccggggccgctcccccacactgagggacagcaccacccagaacacagatgacctgctggtggcctctgctgagtgtccaagcgatgatgaggacctggaggagtgtgagcccagtactggaggagagttaatattgcccattatcacggaggactccttagacccccctcccgtggccacccgatcccccttcgtgcccccgccccctaccttctaccccttcctcacgggagtgggcgccacccaagacacgctgcccccgcccgccgcgcgccgcccgccctctgggggcccgtgccaggccgagcgggacgacagcgactgcgaggagcccatcgaggcctcgggcttcgcctccggggaggtctttgactccagcctcccccccacggacgacgaggacttttacaccacctttcccctggtcacggaccgcaccaccctcctgtcaccccgcaaacccgctccccggcccaacctcaggacagatggggccacgggcgcccctggggtgctgtttgccccctccgccccggcccccaacctgccggcgggcaaaatgaaccaccgagacccgcttcagcccttgctggagaacccgcccttggggcccggggcccccacgtcctttgagccgcggaggccccctcccctgcgccccggcgtgacctcagcccccggcttcccccatctgcccacagccaaccccacagggcctggggagcggggcccgccgggcgcagtggaggtgatccgggagtccagcagcaccacgggcatggtggtgggcattgtggcggcggcggcgctctgcatcctcatcctcctctacgccatgtataagtaccgcaatcgtgatgagggctcctaccaggtggaccagagccgaaactacatcagtaactcggcccagagcaatggggcggtggtgaaagagaaggccccggctgcccccaagacgcccagcaaggccaagaagaacaaagacaaggagtattatgtctgagcccccggcactgcgccccactgccagctgcccctcctgggagggcccgggaggagggtgccaccctctccctgccaggggcctggggaccctctccctggctgcctcaggcttctcttacgaagaggaaacgcaaaaaaagaaaaggaaaaaccccgtgctcgcccccttcctcctgccgtccactgcgcggcctcgtcagtcccggggctgactgtccctctcagctctgcgcctgccaggcagggcacgtgctcacagccctgggttgatttatttttttaagggggtagttttattttggtggggttgggtgggaaggaaggctgggggttttgtaaagtgtccactgctcgtcctgttaattttcctcaatttttcttcttcttccttctgtccctcctgccttccttctcttcccaagccctccaatccccatcccaggcttgctgtgtctcactgtccccaccctccttccctacttctttttttgtgtgtctggtttctcccttcctttcctccctttgggtttccagagtcggtgggagaagggcgggagggtgggcccgagtggcccagtgggtgggtggggtggggtggggcaagtgccccaactcccctcaccaggagaggcacctgcttggtgccgcccagggaaggggctcaggcctgacggaaggcctgttctgtgtgtgccgccgggcgacgtgcattgatggggaagctgctggaggagcaggggtggggggtgggagggaggggaaaggcaaatgcagatatatattacagacaaatactctagattccacgagcagcagcctgtggcacccgctgggcgcgggcagcagggaagagggagcaaggcattgtccacagactgctggggtcacttctttgcccacgggctccctgctcccccagttttttttctctctttgttaacaaatgtgtctgagtcttggaaaacaccccaaccccggaaatgtgtgggaaaaagaaaacaaaaactttccaaattccaa

SEQ ID NO: 237253 - DNA, 2001 bp, Artificial Sequence
  derived and/or modified sequence
atgccgcctggcggatccggtcccggagggtgtcctagaaggccacccgctttggccggacctttgcctcctccgcctccacctccccctccccctcttctcccactgctgcctttacttctgttgctcctgcttggcgcagccgagggagccagagtgtcttcctctctgtctaccactcatcacgtgcaccattttcactcgaaacacgggacggtgcccatcgccatcaacagaatgccttttctcacccggggtggacatgccggtaccacctacatttttggaaaagggggtgctctgatcacatacacctggccccctaatgatagaccgagcacaagaatggataggctcgctgtgggattctcgactcatcagagatccgcagtcctggtgagggtcgacagcgcttccggcctcggtgactacctccagctacacattgatcaaggcaccgtaggagtgattttcaatgttggaactgacgacatcactatcgatgagcctaatgcaattgtgagcgatggcaaataccatgttgtacgcttcacccggagcggcggtaatgccactctgcaggtcgacagctggcctgtgaatgagagatacccagccggaaattttgataacgagaggttggcaattgcaaggcagagaatcccctatcgactggggagagttgtggatgagtggctgctggataaaggtcgacagttgactatcttcaatagtcaggctgctattaaaatcggaggacgcgaccaaggcaggccattccaagggcaggtcagcggcctgtattacaacgggctgaaggtgcttgctctcgcggctgagtccgaccctaatgtgcgcaccgaggggcatttgagactcgttggagagggaccttccgtcctcctgagtgccgaaaccacagcgaccacactcctggctgacatggctactacaataatggagaccacaactacgatggctacaaccactactcgcagaggtagatcccccacactgagggactccaccacacaaaatactgacgatctgttggttgcaagcgccgaatgtcctagcgatgacgaagacctcgaggaatgtgaacctagtaccggaggcgaactgatcctccccattatcaccgaggactcattagatccccctcccgttgctacacgcagccccttcgtgccgccaccacccaccttctacccctttctcaccggcgtcggcgcaacgcaggataccctgccccctcccgctgcgcgacgacctccttccggcggaccgtgtcaggcagagagggatgatagcgattgtgaagagcctatcgaagcctccggcttcgcctcaggagaggtgttcgattcatcactgcccccaacagacgatgaggatttttacacaacatttcctttggtgacagacagaaccacactccttagtcctcgcaagcctgcccctcggcctaacctgcgtacagacggcgctaccggtgccccaggtgtcctgttcgccccaagtgctcctgctccaaacctgccggctggaaagatgaatcatcgggacccactacaacctctccttgagaatccccctctgggccctggagctcctactagtttcgagcctcggaggccgccaccactccgccctggtgtgacgtccgcgccaggctttccacacctgccgacggccaatcccacgggccctggtgagcgcggtcccccaggtgcagtggaggttatccgggaaagtagttctaccacggggatggtggtcggcatcgtggcagcagctgccctttgtatcttaatcctcctgtatgcgatgtacaagtaccgcaaccgcgacgaaggatcatatcaagtcgaccagtctcggaattatatctcaaactccgcccaatcaaatggggcagttgtgaaggaaaaagctcccgctgctcccaaaacacccagtaaagctaagaaaaacaaagataaagaatactatgtgtag

SEQ ID NO: 237254 - DNA, 2001 bp, Artificial Sequence
  derived and/or modified sequence
atgccccccggcggcagcggccccggcggctgccccagaagaccccccgccctggccggccccctgccccccccccccccccccccccccccccccctgctgcccctgctgcccctgctgctgctgctgctgctgggcgccgccgagggcgccagagtgagcagcagcctgagcaccacccaccacgtgcaccacttccacagcaagcacggcaccgtgcccatcgccatcaacagaatgcccttcctgaccagaggcggccacgccggcaccacctacatcttcggcaagggcggcgccctgatcacctacacctggccccccaacgacagacccagcaccagaatggacagactggccgtgggcttcagcacccaccagagaagcgccgtgctggtgagagtggacagcgccagcggcctgggcgactacctgcagctgcacatcgaccagggcaccgtgggcgtgatcttcaacgtgggcaccgacgacatcaccatcgacgagcccaacgccatcgtgagcgacggcaagtaccacgtggtgagattcaccagaagcggcggcaacgccaccctgcaggtggacagctggcccgtgaacgagagataccccgccggcaacttcgacaacgagagactggccatcgccagacagagaatcccctacagactgggcagagtggtggacgagtggctgctggacaagggcagacagctgaccatcttcaacagccaggccgccatcaagatcggcggcagagaccagggcagacccttccagggccaggtgagcggcctgtactacaacggcctgaaggtgctggccctggccgccgagagcgaccccaacgtgagaaccgagggccacctgagactggtgggcgagggccccagcgtgctgctgagcgccgagaccaccgccaccaccctgctggccgacatggccaccaccatcatggagaccaccaccaccatggccaccaccaccaccagaagaggcagaagccccaccctgagagacagcaccacccagaacaccgacgacctgctggtggccagcgccgagtgccccagcgacgacgaggacctggaggagtgcgagcccagcaccggcggcgagctgatcctgcccatcatcaccgaggacagcctggaccccccccccgtggccaccagaagccccttcgtgccccccccccccaccttctaccccttcctgaccggcgtgggcgccacccaggacaccctgcccccccccgccgccagaagaccccccagcggcggcccctgccaggccgagagagacgacagcgactgcgaggagcccatcgaggccagcggcttcgccagcggcgaggtgttcgacagcagcctgccccccaccgacgacgaggacttctacaccaccttccccctggtgaccgacagaaccaccctgctgagccccagaaagcccgcccccagacccaacctgagaaccgacggcgccaccggcgcccccggcgtgctgttcgcccccagcgcccccgcccccaacctgcccgccggcaagatgaaccacagagaccccctgcagcccctgctggagaacccccccctgggccccggcgcccccaccagcttcgagcccagaagacccccccccctgagacccggcgtgaccagcgcccccggcttcccccacctgcccaccgccaaccccaccggccccggcgagagaggcccccccggcgccgtggaggtgatcagagagagcagcagcaccaccggcatggtggtgggcatcgtggccgccgccgccctgtgcatcctgatcctgctgtacgccatgtacaagtacagaaacagagacgagggcagctaccaggtggaccagagcagaaactacatcagcaacagcgcccagagcaacggcgccgtggtgaaggagaaggcccccgccgcccccaagacccccagcaaggccaagaagaacaaggacaaggagtactacgtgtag

SEQ ID NO: 237255 - protein, 442 aa, Artificial Sequence
  derived and/or modified sequence
MYQRMLRCGAELGSPGGGGGGGGGGGAGGRLALLWIVPLTLSGLLGVAWGASSLGAHHIHHFHGSSKHHSVPIAIYRSPASLRGGHAGTTYIFSKGGGQITYKWPPNDRPSTRADRLAIGFSTVQKEAVLVRVDSSSGLGDYLELHIHQGKIGVKFNVGTDDIAIEESNAIINDGKYHVVRFTRSGGNATLQVDSWPVIERYPAGRQLTIFNSQATIIIGGKEQGQPFQGQLSGLYYNGLKVLNMAAENDANIAIVGNVRLVGEVPSSMTTESTATAMQSEMSTSIMETTTTLATSTARRGKPPTKEPISQTTDDILVASAECPSDDEDIDPCEPSSGGLANPTRAGGREPYPGSAEVIRESSSTTGMVVGIVAAAALCILILLYAMYKYRNRDEGSYHVDESRNYISNSAQSNGAVVKEKQPSSAKSSNKNKKNKDKEYYV

SEQ ID NO: 237256 - protein, 396 aa, Artificial Sequence
  derived and/or modified sequence
ALEIWEQPPAPRLLFPGLPFRTSPSPAAFYRSPASLRGGHAGTTYIFSKGGGQITYKWPPNDRPSTRADRLAIGFSTVQKEAVLVRVDSSSGLGDYLELHIHQGKIGVKFNVGTDDIAIEESNAIINDGKYHVVRFTRSGGNATLQVDSWPVIERYPAGRQLTIFNSQATIIIGGKEQGQPFQGQLSGLYYNGLKVLNMAAENDANIAIVGNVRLVGEVPSSMTTESTATAMQSEMSTSIMETTTTLATSTARRGKPPTKEPISQTTDDILVASAECPSDDEDIDPCEPSSGGLANPTRAGGREPYPGSAEVIRESSSTTGMVVGIVAAAALCILILLYAMYKYRNRDEGSYHVDESRNYISNSAQSNGAVVKEKQPSSAKSSNKNKKNKDKEYYV

SEQ ID NO: 237257 - DNA, 1329 bp, Artificial Sequence
  derived and/or modified sequence
atgtaccagagaatgctccgatgtggtgcggagctggggtcacccgggggcggcggtggcggtgggggtggcggaggtgcgggaggcaggcttgcattgctctggatagtaccgctaaccctgtcgggcctgctgggagtagcttggggagcctctagcttaggggcccatcatattcaccattttcacggaagcagcaaacatcactcagtgcccatcgccatatatcggagcccagcctccctccgcggcggacacgctggtacaacttacatcttctccaagggtggcggtcagattacatacaaatggcctcccaacgatagaccaagcacccgagccgacaggctcgctatcggattcagcaccgtgcagaaggaagctgtcttagtgcgggtggactcttcatctggccttggtgactatcttgagctgcatatccatcagggcaaaattggcgtcaagttcaatgtaggtactgatgacatcgctattgaggaaagcaatgcaatcatcaatgacggcaagtatcacgtcgttcgttttacccgctccggaggaaacgctactctgcaggtggacagctggccagtgatagaacgatacccagcaggtcggcaattgaccattttcaactcacaggctactatcattattggtggaaaagaacaggggcagcccttccaggggcagcttagtggcctctactataatggcctgaaagtccttaatatggcagccgagaacgatgcaaatatcgcgattgtaggaaacgtgcgccttgtgggagaagtgcccagcagcatgaccacagagtcgacggcaaccgctatgcagagcgaaatgtcaacctcgatcatggagactacaacaaccctcgcaacaagcaccgcgagacgcggaaagccacctacgaaggaaccaatctcccaaacaaccgatgacattttggtggcctctgccgaatgtccttccgatgatgaggacatcgatccttgtgaaccatcttctggggggctggctaatcccaccagggcagggggtcgggaaccatacccaggtagtgccgaagtgatcagggaatcctcgtcaacaaccggtatggttgtcgggatcgtggctgcagcggcgctgtgcattttgatcctgctgtacgccatgtataaatatagaaacagagacgaggggtcctaccacgttgacgagtcaaggaactatatctcgaacagtgcccagtctaacggggccgtggtgaaagaaaaacagccctcatctgctaagagcagcaataagaataagaaaaacaaagacaaagaatactatgtgtag

SEQ ID NO: 237258 - DNA, 1191 bp, Artificial Sequence
  derived and/or modified sequence
gcactggagatttgggaacagccgcctgcccctcgcttattattccccggcctccccttccgcacgagccccagccctgcggccttttacagaagccctgccagtctacgcggcggacacgccggaacaacgtacatcttttccaaagggggcggccagataacatacaagtggcccccaaatgacagacccagtacacgggcagacaggctggctatcgggttctcgaccgtgcagaaagaagccgttctggttcgcgtggactctagtagtggcctaggcgactaccttgagctacacatccatcaaggtaaaatcggagtgaagtttaatgttggtactgacgacattgcgatcgaagagagcaatgcaattatcaacgatggcaaataccacgtggtaagattcactaggagcggtggaaacgccaccctgcaagttgatagttggcctgtgatcgagaggtatcccgccggtagacagctgacaatcttcaattcccaagctacaattatcattggcggtaaggagcagggacagccctttcaggggcaactctcaggactttattataacggtttgaaggtgctgaacatggcagctgagaatgacgccaatattgctatagtgggcaacgttcgcctggtgggagaggtgccctcgtcaatgaccactgaaagcaccgcaactgcaatgcagagtgaaatgagtacttctatcatggagaccaccaccacactcgccaccagcactgctcgcaggggcaagccccctacaaaggaaccaatttctcagactacagatgacattttagtggccagcgccgagtgtccttcagacgatgaggacatagacccatgtgagccctccagtggcggcctggcaaacccaacacgagctggcggacgcgagccctatcccggatccgctgaagtcatacgggagtcatcatccacaaccggaatggtggtcgggatagttgctgctgccgcattgtgcatccttattctcctgtatgcgatgtataagtacagaaatagagacgaagggtcttaccacgtggacgagagtcgtaactatatttctaacagcgctcagagtaacggcgccgtcgtcaaagaaaagcagcctagcagcgccaaatcatccaataaaaacaagaagaataaagataaagagtactacgtgtag

SEQ ID NO: 237259 - DNA, 1329 bp, Artificial Sequence
  derived and/or modified sequence
atgtaccagaggatgctgcgctgtggggctgagctgggcagccctgggggcggcggcggcggcggcggcggcggcggggccggcggccgcctggccctgctgtggatcgtgcccctgaccctgagcggcctgctgggcgtggcctggggcgccagcagcctgggcgcccaccacatccaccacttccacggcagcagcaagcaccacagcgtgcccatcgccatctaccgcagccctgccagcctgcggggcggccatgctggcaccacctacatcttcagcaaaggaggcggccagatcacctacaagtggcccccaaatgaccggcccagcaccagggctgaccggctggccatcggcttcagcacagtgcagaaggaggccgtgctggtgcgggtggacagcagcagcggcctgggggactacctggagctgcacatccaccagggcaagattggagtgaagttcaacgtgggcacagatgacatcgccatcgaggagagcaatgccatcatcaatgatggcaagtaccacgtggtgcgcttcaccaggtctggaggaaatgccaccctgcaggtggacagctggcctgtgattgagcgctacccagctggccggcagctgaccatcttcaacagccaggccaccatcatcattggaggcaaggagcagggccagcccttccagggccagctgagcggcctgtactacaacggcctgaaggtgctgaacatggctgctgaaaatgatgccaacatcgccatcgtgggcaatgtgcggctggtgggggaggtgcccagctccatgaccacagagagcacagccacagccatgcagagcgagatgagcaccagcatcatggagaccaccaccaccctggccaccagcacagcccggcggggcaagccacccaccaaggagcccatcagccagaccacagatgacatcctggtggccagcgctgagtgccccagtgatgatgaggacatcgacccctgtgagcccagcagcggcggcctggccaaccccacccgggccggcggccgggagccctacccaggcagcgctgaggtgatccgggagagcagcagcaccaccggcatggtggtgggcatcgtggccgccgccgccctgtgcatcctgatcctgctgtatgccatgtacaagtacagaaacagagatgagggcagctaccacgtggatgagagcaggaactacatcagcaacagcgcccagagcaatggagctgtggtgaaggagaagcagcccagcagcgccaagagcagcaacaagaacaagaagaacaaggacaaggagtactacgtgtag

SEQ ID NO: 237260 - DNA, 1191 bp, Artificial Sequence
  derived and/or modified sequence
gccctggagatctgggagcagcccccagccccccggctgctcttccctggcctgcccttccgcaccagccccagccctgctgccttctaccgcagccctgccagcctgcggggcggccatgctggcaccacctacatcttcagcaaaggaggcggccagatcacctacaagtggcccccaaatgaccggcccagcaccagggctgaccggctggccatcggcttcagcacagtgcagaaggaggccgtgctggtgcgggtggacagcagcagcggcctgggggactacctggagctgcacatccaccagggcaagattggagtgaagttcaacgtgggcacagatgacatcgccatcgaggagagcaatgccatcatcaatgatggcaagtaccacgtggtgcgcttcaccaggtctggaggaaatgccaccctgcaggtggacagctggcctgtgattgagcgctacccagctggccggcagctgaccatcttcaacagccaggccaccatcatcattggaggcaaggagcagggccagcccttccagggccagctgagcggcctgtactacaacggcctgaaggtgctgaacatggctgctgaaaatgatgccaacatcgccatcgtgggcaatgtgcggctggtgggggaggtgcccagctccatgaccacagagagcacagccacagccatgcagagcgagatgagcaccagcatcatggagaccaccaccaccctggccaccagcacagcccggcggggcaagccacccaccaaggagcccatcagccagaccacagatgacatcctggtggccagcgctgagtgccccagtgatgatgaggacatcgacccctgtgagcccagcagcggcggcctggccaaccccacccgggccggcggccgggagccctacccaggcagcgctgaggtgatccgggagagcagcagcaccaccggcatggtggtgggcatcgtggccgccgccgccctgtgcatcctgatcctgctgtatgccatgtacaagtacagaaacagagatgagggcagctaccacgtggatgagagcaggaactacatcagcaacagcgcccagagcaatggagctgtggtgaaggagaagcagcccagcagcgccaagagcagcaacaagaacaagaagaacaaggacaaggagtactacgtgtag

SEQ ID NO: 237261 - DNA, 1329 bp, Artificial Sequence
  derived and/or modified sequence
atgtaccagcggatgctgcggtgcggcgccgagctgggcagccccggcggaggagggggtgggggaggaggaggtggggcaggcgggcgcctagccctcttgtggatcgtgcctcttaccttgagcggactgctcggggtggcctggggagcaagcagcttaggggcacaccacattcaccacttccacggatcctcaaaacatcactccgtaccgattgccatttataggagcccagccagtctccgcggcggccacgctggaaccacttacatttttagcaagggcggaggccaaatcacctataaatggccacccaacgaccgcccctccacacgagcagacaggctcgcaataggtttttctactgtacaaaaagaggccgtcctagtgcgggtggactcctcttccgggctcggcgactacctagagctgcacatccatcagggaaaaattggtgtcaaattcaacgtgggaacagatgatatcgccatcgaggaatccaacgctatcatcaatgacgggaaataccacgtggtccgttttacccgttccggtgggaacgctaccttgcaggttgactcatggccggttatcgaacggtacccagccggaagacagctaacaatcttcaatagccaggcaaccattatcattggcgggaaagaacagggccagccatttcaaggtcagttaagtggcctttactacaatggactgaaagtcttaaatatggcagctgagaacgacgccaacatagccatcgtagggaatgtgagactggtgggagaggtgccttcctctatgaccaccgagagcaccgctactgctatgcagagtgagatgtcgacctcaattatggagaccactacaaccctcgccaccagcaccgcacgccgcggtaagcctcctaccaaagagccaatttcccagacaaccgacgacattcttgtggcaagtgccgagtgcccaagtgatgacgaggatatcgacccctgtgagccgagctccggtgggctggcgaatcccactcgagccggcgggagagagccttaccctggttctgcagaggtcattagagagtcgagctcgactaccggaatggtcgtgggaattgtggcagcagctgctctgtgtatcctgatactattatacgctatgtataaatatcgaaacagagacgagggtagttatcacgtcgacgagagcagaaactacatctccaacagtgctcagagcaacggcgcggtggtgaaagaaaagcagccttccagtgccaagtcatctaataagaataagaagaataaggacaaagagtattacgtgtag

SEQ ID NO: 237262 - DNA, 1191 bp, Artificial Sequence
  derived and/or modified sequence
gccctggagatctgggagcagccccccgccccccggctgctgttccctggtctcccatttagaaccagtccgtcccctgccgccttctataggagtccagcaagcctgcggggaggccacgcaggcactacatatattttctcaaagggcgggggacaaattacttacaagtggcctcccaatgacagacctagtacaagggcggaccgcctggccattggctttagcacggtccagaaggaggccgtgctggtgagggtcgattcttcttccggcttgggagattacttggagcttcacattcatcaagggaaaattggcgtgaaatttaatgtggggaccgatgacattgctatcgaagagagtaacgcaatcatcaacgacggcaagtatcatgtggtcagatttacgcgaagtggcggaaatgccactctgcaggtagacagctggcccgtaatcgagcgataccccgctgggcgccaactaaccatcttcaattctcaggccacaattattattggcggaaaggaacagggtcaaccattccaggggcagctgtctggtctgtactataatggacttaaggttctgaatatggctgctgagaatgacgctaatattgcaattgtcgggaatgtaagactggtgggggaagttccatcgtcgatgaccaccgaaagcactgctacagcaatgcaatctgagatgtcaaccagtatcatggagaccactacaactttggcgactagcaccgccagacggggaaaaccccctacaaaagagccgatctcgcagacaactgatgatatcttagtggccagtgcggaatgcccttccgacgacgaagacatcgacccttgcgagccctcctcgggcggtctcgctaacccgaccagggccggaggaagggagccctaccctggctccgccgaagtcatccgagaaagtagctcgacaacaggcatggttgtgggaatcgttgccgctgcggcgctttgcatcttgattctgctatacgcgatgtataaataccgcaaccgggatgaaggctcctaccatgtggatgagtcccggaattatatcagcaactccgctcagtccaacggcgccgtggtaaaagaaaagcagccctcctctgctaagtcctcaaataagaataagaaaaataaagataaggaatattacgtgtag

SEQ ID NO: 237263 - DNA, 5573 bp, Artificial Sequence
  derived and/or modified sequence
ttttttctttttctttttctttttctgtttctctcccttactccttcgtctgcatcttcttctcagctgcctttccgccgttcgattcccacttccttcagaagggcgcactcttccctctgaacccctcgccgggcgtaagtgtcaggaggcggcggacgcggagattgcctcgggagcaggcgatgcgcgccgctgctccgcgcgctgcccgggggaggctggcgctagcgggcgagccggccggggctgaatggagggaaggggcgcctggattccatggggtctgcttctgtcttgaaaggaggttgggccggcgaagtggcctccctagtccccgcacacaaagctaaatggatttacctagtggattcgcggtggatgtctgtcatgtagaagtgaggaccttccaggaggagctttaaacaatttctcggccccccacccgccggcacgcactctcgcccgaaactctttgggagtatctctcgagaacctggagccctggaaatctgggagcagccacccgctccgcgcttgctgttcccggggctgcctttccggacaagcccctctccagctgcattcgcctcggctatgtttcggattgtttggggtgctaggcacggcggactccaggaccccgagaagactgtccgaaggagggagaggatgggtgccctggcgcggtgaggcggccggcccctcagcccactccgcgccgcccgctcccctgcgccctctcctctccccgcgccccaaactttgcctcccgcggcggctgcccctcggcgggcgccccgccatgtaccagaggatgctccggtgcggcgccgagctgggctcgcccgggggcggcggcggcggcggcggcggcggcggcgcaggggggcgcctggccctgctttggatagtcccgctcaccctcagcggcctcctaggagtggcgtggggggcatccagtttgggagcgcaccacatccaccatttccatggcagcagcaagcatcattcagtgcctattgcaatctacaggtcaccggcatccttgcgaggcggacacgctgggacgacatatatctttagcaaaggtggtggacaaatcacgtataagtggcctcctaatgaccgacccagtacacgagcagacagactggccataggttttagcactgttcagaaagaagccgtattggtgcgagtggacagttcttcaggcttgggtgactacctagaactgcatatacaccagggaaaaattggagttaagtttaatgttgggacagatgacatcgccattgaagaatccaatgcaatcattaatgatgggaaataccatgtagttcgtttcacgaggagtggtggcaatgccacgttgcaggtggacagctggccagtgatcgagcgctaccctgcagggcgtcagctcacaatcttcaatagccaagcaaccataataattggcgggaaagagcagggccagcccttccagggccagctctctgggctgtactacaatggcttgaaagttctgaatatggcagccgaaaacgatgccaacatcgccatagtgggaaatgtgagactggttggtgaagtgccttcctctatgacaactgagtcaacagccactgccatgcaatcagagatgtccacatcaattatggagactaccacgaccctggctactagcacagccagaagaggaaagcccccgacaaaagaacccattagccagaccacagatgacatccttgtggcctcagcagagtgtcccagcgatgatgaggacattgacccctgtgagccgagctcaggtgggttagccaacccaacccgagcaggcggcagagagccgtatccaggctcagcagaagtgatccgggagtccagcagcaccacgggtatggtcgttgggatagtagccgctgccgccctgtgcatccttatcctcctctatgccatgtacaagtacagaaaccgggatgaaggctcataccatgtggacgagagtcgaaactacatcagtaactcagcacagtccaatggggctgttgtaaaggagaaacaacccagcagtgcgaaaagctccaacaaaaataagaaaaacaaggataaagagtattatgtctgatcccaagatcttaaatggacacttgtatagaaatagtcttcattttatctgagacataatataaacttatttactttcctttttatgaagcacatacaaaagaagacagggaatgcaatcaggaaggaaagactttttaaaaaataaaaacaagtatctcatgctcttgtttctcaaaaaagaaaaacaaaaaacaaaaaacaggggccaataaattccctaacatccacagtgttttcatttactctgcttgtctttatgttgctggaacatttctaaaagacagtgatgaccgcacgcattcataaagcaaaggagtactacagcatcaaggcacaacacaaaaaccaacacaaaacataacacaaaaaagaagctacctatgatcctggatttagccaaagtgctagcgctttcctgagaagtcagtccaattgccagagaagactgtccttttgagtgactcaacctgcaaacctttaagagtttgccgcctggtgcaactggagcagtggttggaacttgcatttgaaacaaagtgctggcttttttgaagacttgtgtaggaacacattcaaaaagcccctttctggttgtgagagaggaaaaaaaagtatggaggccttattttcaaaaatgtgaaatataaggcacgttttcacacaaaatttcaaaacaaaaacaagagggcatagatgcaatcattgggaaattttcatgcacgcttattatgttattacatatgtttatataaaatccatctctgtgtgctttctggactgtgataagtgacgttttatagcctgttgtatagaaaatgcaaaatatatctctgctcttcagccatttttggtaaattcaatgttataagtgttgctaagtatagggagttttatgacatcagagcaacaattatttcagttgggtttttctttttttttgccaccattataaattgccacaattacttttattttttaaagaaattacagtgtagtgtttattctaaggaagatatgtatgaatgtatatacaaagactcagctacttcttttcttatatgtacagccttcattctgttgcaattaagttttagtacttgtatgaaaggtgtgaattagaaagtcacatatatacatatgtatcttataatcttttctccctgaaatactcacattcccacatacattcactattttcacacacacacacacacacacacacacacacacacacacacacacacgaatccacagcaatccatcagatatgctggaagatccaaacgtgcatacagtagcaaatatttattgacaaattgaaaagcaggaaggaagagggttgtgccaaggtattgatgacaaatggggtgatttgcttcattgagatcttgctcccaggtaaccttaagaagattttagtccctaaagaaatgaacctttccttatcaaatagaatatcactgatatactgctgcatgaataagaaccattatgtgggcaggttatggaagcaaaattggttaatctacaccttaactctggctgctgcaattgaaaactttctttctaataaaataatatatatatctctgaatctgatgtgcatgatgaacatttctggaaagtaaacactttctctcgactaagaaagtatttttcagtaatttttgattctgtattactacccacttaaaaaatcattctctgttaattattgactatgttttaacttttctggttttacatatatatcattaaatatagttttagtttaacacattaagtagtggaaaagtatagattatacacttgttttgcatattattcaatgatgttcacagcaataaattactaatatgagaaggtagtgcaaaaaatgcattattacattgcaagttgatgtttcaggaaaaattggttgcattacttgaataccttctaaaagaacgataaaaaattttgtagaagagaagaatatctttccaattagctttaatcagcaaaggcaaaaaatgcaaaacatcttttgtgatactttagttgatgaaaaaaaagccaagaagtggcctggatttcagacatacagcaccttagaaatatgtataattcatagcaaatcaccactatctatggttgccaagtaattgttgtgtacaaagaaatttagtggctttttatgacccagaaagtagaaggtataaaatgaaaatttaatatccattgcttcttttctagattttcattttttttaatttgccacattaaataattcacgagtcttttcttttcccccgtctcattcagtcttactcagggaaagccagttaaataagaagggaagtgtaaaactactaatttacagcttgaagggtttttttttttaagattgcttttctattttatctattaagcttgaaccagtttccatctggaaagattctaaaatataatagaaaataaattgaataatggtaattttaagcagtatatctatgaaatgtgttgtttgggattgatttcaatgtttctccccagcgtaaattttaaagttacatgcaatgattgatatagtttattatcagcaaaattatttctaatattattggcttacacaaactctagcaaaaattattttttcctcaatggaaaaagaaaagagaggaacagagttagaaagagaaaatgacttgaatcccaagtatcttcataccaaacatatcagggttccctgcatagtttgcagttgattgaggatttcacacgacttggcataaatttgattacatctctagactgtaacttttctgattgattatgcttcttttttatccatgtaatgtgttgccttttttaaaagaacaaatactacaataacgtgtgaagtggtcaatccctaagacatcaaagaaaggccacataaccctacccttctagtgctttgtgtgattgggtatcaaaggggttttcttcttctttttttgtttgtttgtttttctgttgcaaggccaatttatccattattggaaatgctaagcaagtggaatttactgttttgttaataaaatatttcttaatacaactgtgatttattgattttaaaaattatatgcggcaccatttcgtgcttaagtgggaaagtaaagaaggctgcatttgaagggaagacccatccttatattatagaggaagaatgttgactctcttttttctggatttaactagtcattaaagacctctatattcatacacttaaagatgtagccattaaatgtacttttgttatatttgttcatcttgatatgccagaaaccataaactcatacagtattagttgcaaacaatattaaaatactaatttcataaatatgctttttctctataaaagacaatggaatccaagttaagtaaacctgtgattaaattccaacactatcaca

SEQ ID NO: 237264 - DNA, 4627 bp, Artificial Sequence
  derived and/or modified sequence
gccctggaaatctgggagcagccacccgctccgcgcttgctgttcccggggctgcctttccggacaagcccctctccagctgcattctacaggtcaccggcatccttgcgaggcggacacgctgggacgacatatatctttagcaaaggtggtggacaaatcacgtataagtggcctcctaatgaccgacccagtacacgagcagacagactggccataggttttagcactgttcagaaagaagccgtattggtgcgagtggacagttcttcaggcttgggtgactacctagaactgcatatacaccagggaaaaattggagttaagtttaatgttgggacagatgacatcgccattgaagaatccaatgcaatcattaatgatgggaaataccatgtagttcgtttcacgaggagtggtggcaatgccacgttgcaggtggacagctggccagtgatcgagcgctaccctgcagggcgtcagctcacaatcttcaatagccaagcaaccataataattggcgggaaagagcagggccagcccttccagggccagctctctgggctgtactacaatggcttgaaagttctgaatatggcagccgaaaacgatgccaacatcgccatagtgggaaatgtgagactggttggtgaagtgccttcctctatgacaactgagtcaacagccactgccatgcaatcagagatgtccacatcaattatggagactaccacgaccctggctactagcacagccagaagaggaaagcccccgacaaaagaacccattagccagaccacagatgacatccttgtggcctcagcagagtgtcccagcgatgatgaggacattgacccctgtgagccgagctcaggtgggttagccaacccaacccgagcaggcggcagagagccgtatccaggctcagcagaagtgatccgggagtccagcagcaccacgggtatggtcgttgggatagtagccgctgccgccctgtgcatccttatcctcctctatgccatgtacaagtacagaaaccgggatgaaggctcataccatgtggacgagagtcgaaactacatcagtaactcagcacagtccaatggggctgttgtaaaggagaaacaacccagcagtgcgaaaagctccaacaaaaataagaaaaacaaggataaagagtattatgtctgatcccaagatcttaaatggacacttgtatagaaatagtcttcattttatctgagacataatataaacttatttactttcctttttatgaagcacatacaaaagaagacagggaatgcaatcaggaaggaaagactttttaaaaaataaaaacaagtatctcatgctcttgtttctcaaaaaagaaaaacaaaaaacaaaaaacaggggccaataaattccctaacatccacagtgttttcatttactctgcttgtctttatgttgctggaacatttctaaaagacagtgatgaccgcacgcattcataaagcaaaggagtactacagcatcaaggcacaacacaaaaaccaacacaaaacataacacaaaaaagaagctacctatgatcctggatttagccaaagtgctagcgctttcctgagaagtcagtccaattgccagagaagactgtccttttgagtgactcaacctgcaaacctttaagagtttgccgcctggtgcaactggagcagtggttggaacttgcatttgaaacaaagtgctggcttttttgaagacttgtgtaggaacacattcaaaaagcccctttctggttgtgagagaggaaaaaaaagtatggaggccttattttcaaaaatgtgaaatataaggcacgttttcacacaaaatttcaaaacaaaaacaagagggcatagatgcaatcattgggaaattttcatgcacgcttattatgttattacatatgtttatataaaatccatctctgtgtgctttctggactgtgataagtgacgttttatagcctgttgtatagaaaatgcaaaatatatctctgctcttcagccatttttggtaaattcaatgttataagtgttgctaagtatagggagttttatgacatcagagcaacaattatttcagttgggtttttctttttttttgccaccattataaattgccacaattacttttattttttaaagaaattacagtgtagtgtttattctaaggaagatatgtatgaatgtatatacaaagactcagctacttcttttcttatatgtacagccttcattctgttgcaattaagttttagtacttgtatgaaaggtgtgaattagaaagtcacatatatacatatgtatcttataatcttttctccctgaaatactcacattcccacatacattcactattttcacacacacacacacacacacacacacacacacacacacacacacacgaatccacagcaatccatcagatatgctggaagatccaaacgtgcatacagtagcaaatatttattgacaaattgaaaagcaggaaggaagagggttgtgccaaggtattgatgacaaatggggtgatttgcttcattgagatcttgctcccaggtaaccttaagaagattttagtccctaaagaaatgaacctttccttatcaaatagaatatcactgatatactgctgcatgaataagaaccattatgtgggcaggttatggaagcaaaattggttaatctacaccttaactctggctgctgcaattgaaaactttctttctaataaaataatatatatatctctgaatctgatgtgcatgatgaacatttctggaaagtaaacactttctctcgactaagaaagtatttttcagtaatttttgattctgtattactacccacttaaaaaatcattctctgttaattattgactatgttttaacttttctggttttacatatatatcattaaatatagttttagtttaacacattaagtagtggaaaagtatagattatacacttgttttgcatattattcaatgatgttcacagcaataaattactaatatgagaaggtagtgcaaaaaatgcattattacattgcaagttgatgtttcaggaaaaattggttgcattacttgaataccttctaaaagaacgataaaaaattttgtagaagagaagaatatctttccaattagctttaatcagcaaaggcaaaaaatgcaaaacatcttttgtgatactttagttgatgaaaaaaaagccaagaagtggcctggatttcagacatacagcaccttagaaatatgtataattcatagcaaatcaccactatctatggttgccaagtaattgttgtgtacaaagaaatttagtggctttttatgacccagaaagtagaaggtataaaatgaaaatttaatatccattgcttcttttctagattttcattttttttaatttgccacattaaataattcacgagtcttttcttttcccccgtctcattcagtcttactcagggaaagccagttaaataagaagggaagtgtaaaactactaatttacagcttgaagggtttttttttttaagattgcttttctattttatctattaagcttgaaccagtttccatctggaaagattctaaaatataatagaaaataaattgaataatggtaattttaagcagtatatctatgaaatgtgttgtttgggattgatttcaatgtttctccccagcgtaaattttaaagttacatgcaatgattgatatagtttattatcagcaaaattatttctaatattattggcttacacaaactctagcaaaaattattttttcctcaatggaaaaagaaaagagaggaacagagttagaaagagaaaatgacttgaatcccaagtatcttcataccaaacatatcagggttccctgcatagtttgcagttgattgaggatttcacacgacttggcataaatttgattacatctctagactgtaacttttctgattgattatgcttcttttttatccatgtaatgtgttgccttttttaaaagaacaaatactacaataacgtgtgaagtggtcaatccctaagacatcaaagaaaggccacataaccctacccttctagtgctttgtgtgattgggtatcaaaggggttttcttcttctttttttgtttgtttgtttttctgttgcaaggccaatttatccattattggaaatgctaagcaagtggaatttactgttttgttaataaaatatttcttaatacaactgtgatttattgattttaaaaattatatgcggcaccatttcgtgcttaagtgggaaagtaaagaaggctgcatttgaagggaagacccatccttatattatagaggaagaatgttgactctcttttttctggatttaactagtcattaaagacctctatattcatacacttaaagatgtagccattaaatgtacttttgttatatttgttcatcttgatatgccagaaaccataaactcatacagtattagttgcaaacaatattaaaatactaatttcataaatatgctttttctctataaaagacaatggaatccaagttaagtaaacctgtgattaaattccaacactatc

SEQ ID NO: 237265 - DNA, 1329 bp, Artificial Sequence
  derived and/or modified sequence
atgtatcaaaggatgttacggtgcggggctgaactggggtctcccggaggcggtggcggtggaggtgggggtggcggagccggtggcaggctcgctttgctgtggatagtccctctaacgctatccggtctactgggcgtggcctggggagcctcctccttaggggcacaccacattcatcatttccacggttctagcaagcaccactctgtgcccatagctatttaccggtcacctgcgagcttacgaggaggacacgccggaaccacttacatctttagtaaaggaggtgggcagatcacgtacaaatggcccccaaatgacaggccttccacccgagcagatcgcctcgccattggcttttcaacagtccagaaggaagcagtgctcgtccgggtagattcaagttccggcttgggagattatctagagctccacatccatcaaggcaagatcggcgtgaagtttaacgtagggactgacgacatcgcgatcgaagagtccaacgctattattaacgatggaaaataccacgtggtgaggtttacccgatcagggggtaacgcaaccttacaggtggattcctggccagttattgagcggtatccagccggaaggcagcttaccattttcaattcccaggctacgattattattggaggaaaagaacaggggcagccgttccagggtcaactctccggcctttattataatggtcttaaggtgctgaacatggccgctgagaacgatgccaatatagccatagtaggcaatgtccggctcgtcggtgaagttccatccagcatgacaaccgagtctacagcgaccgcaatgcagagcgagatgagtacaagcatcatggagaccacaacgacactggcaacatctactgctcggaggggaaaaccgcctaccaaggagcccatttcacagacaacggacgatatcctggttgcatcagccgaatgcccttccgacgacgaggatatcgacccctgtgagccttctagcggcggactggccaaccccacgagagcaggaggcagagagccctatcctgggtccgccgaagtgattagagaaagcagctccacgacagggatggtggttggtattgtcgcggctgcagccctctgcatccttatcctattgtatgcaatgtataagtaccgcaatagggatgaaggaagctaccacgtggatgagagccgtaactatatcagcaattccgctcagagcaatggagctgtggtaaaagaaaagcagccctcttctgctaaatcctcaaataagaacaagaagaataaggacaaagagtactatgtgtag

SEQ ID NO: 237266 - DNA, 1191 bp, Artificial Sequence
  derived and/or modified sequence
gccctcgaaatctgggagcagccccctgccccacggctcctctttcctgggctcccatttcgcacgagccctagccccgcagctttctaccgatcgccagcatcccttcgaggcggtcacgcgggaacgacgtatatcttctctaaaggcggtggccagatcacctataaatggccacccaatgacaggccctctacccgggcagataggctggcgattggcttctctaccgtgcaaaaggaagcagtgctggtccgggtggattcctcctcagggctgggtgactacttagagcttcacatccaccagggcaagattggagtcaagttcaacgttggtacagatgacatagccattgaggagtcaaacgccattatcaatgatggcaagtaccacgtggtgaggttcactcggtccgggggtaatgctacgctccaggtggattcctggcctgttattgagagataccctgccggacggcaactgacaatttttaatagccaggcaactataattatagggggaaaagagcagggccaacctttccagggacagctaagcggtctttattacaatggcctgaaagttcttaatatggcagccgagaacgacgcaaatattgccatagttggaaacgttaggcttgtcggagaggtaccatcttccatgacgactgagagtaccgctaccgccatgcagtctgagatgagtacttcgataatggagacaacgaccacgttggctacaagtaccgctcggaggggtaagccgcctaccaaggaacccatctctcagactacagacgatattctggtcgccagcgcagaatgccctagcgacgatgaggacatagatccttgcgaaccctcttcaggcggactcgcaaaccccacacgtgctggcggacgggagccatatcccggaagcgctgaggttataagggaatctagttccacaacaggaatggtggtggggattgttgccgctgccgctttgtgcattctgatccttctgtatgcaatgtacaagtatcgtaatcgagacgagggaagctatcacgtggatgagtctcggaattatatcagcaattccgctcaatccaatggtgccgtagtcaaagaaaaacagccaagcagtgctaagagttcgaataaaaacaaaaagaacaaggacaaggagtattacgtatag

SEQ ID NO: 237267 - DNA, 1329 bp, Artificial Sequence
  derived and/or modified sequence
atgtaccagagaatgctgagatgcggcgccgagctgggcagccccggcggcggcggcggcggcggcggcggcggcggcgccggcggcagactggccctgctgtggatcgtgcccctgaccctgagcggcctgctgggcgtggcctggggcgccagcagcctgggcgcccaccacatccaccacttccacggcagcagcaagcaccacagcgtgcccatcgccatctacagaagccccgccagcctgagaggcggccacgccggcaccacctacatcttcagcaagggcggcggccagatcacctacaagtggccccccaacgacagacccagcaccagagccgacagactggccatcggcttcagcaccgtgcagaaggaggccgtgctggtgagagtggacagcagcagcggcctgggcgactacctggagctgcacatccaccagggcaagatcggcgtgaagttcaacgtgggcaccgacgacatcgccatcgaggagagcaacgccatcatcaacgacggcaagtaccacgtggtgagattcaccagaagcggcggcaacgccaccctgcaggtggacagctggcccgtgatcgagagataccccgccggcagacagctgaccatcttcaacagccaggccaccatcatcatcggcggcaaggagcagggccagcccttccagggccagctgagcggcctgtactacaacggcctgaaggtgctgaacatggccgccgagaacgacgccaacatcgccatcgtgggcaacgtgagactggtgggcgaggtgcccagcagcatgaccaccgagagcaccgccaccgccatgcagagcgagatgagcaccagcatcatggagaccaccaccaccctggccaccagcaccgccagaagaggcaagccccccaccaaggagcccatcagccagaccaccgacgacatcctggtggccagcgccgagtgccccagcgacgacgaggacatcgacccctgcgagcccagcagcggcggcctggccaaccccaccagagccggcggcagagagccctaccccggcagcgccgaggtgatcagagagagcagcagcaccaccggcatggtggtgggcatcgtggccgccgccgccctgtgcatcctgatcctgctgtacgccatgtacaagtacagaaacagagacgagggcagctaccacgtggacgagagcagaaactacatcagcaacagcgcccagagcaacggcgccgtggtgaaggagaagcagcccagcagcgccaagagcagcaacaagaacaagaagaacaaggacaaggagtactacgtgtag

SEQ ID NO: 237268 - DNA, 1191 bp, Artificial Sequence
  derived and/or modified sequence
gccctggagatctgggagcagccccccgcccccagactgctgttccccggcctgcccttcagaaccagccccagccccgccgccttctacagaagccccgccagcctgagaggcggccacgccggcaccacctacatcttcagcaagggcggcggccagatcacctacaagtggccccccaacgacagacccagcaccagagccgacagactggccatcggcttcagcaccgtgcagaaggaggccgtgctggtgagagtggacagcagcagcggcctgggcgactacctggagctgcacatccaccagggcaagatcggcgtgaagttcaacgtgggcaccgacgacatcgccatcgaggagagcaacgccatcatcaacgacggcaagtaccacgtggtgagattcaccagaagcggcggcaacgccaccctgcaggtggacagctggcccgtgatcgagagataccccgccggcagacagctgaccatcttcaacagccaggccaccatcatcatcggcggcaaggagcagggccagcccttccagggccagctgagcggcctgtactacaacggcctgaaggtgctgaacatggccgccgagaacgacgccaacatcgccatcgtgggcaacgtgagactggtgggcgaggtgcccagcagcatgaccaccgagagcaccgccaccgccatgcagagcgagatgagcaccagcatcatggagaccaccaccaccctggccaccagcaccgccagaagaggcaagccccccaccaaggagcccatcagccagaccaccgacgacatcctggtggccagcgccgagtgccccagcgacgacgaggacatcgacccctgcgagcccagcagcggcggcctggccaaccccaccagagccggcggcagagagccctaccccggcagcgccgaggtgatcagagagagcagcagcaccaccggcatggtggtgggcatcgtggccgccgccgccctgtgcatcctgatcctgctgtacgccatgtacaagtacagaaacagagacgagggcagctaccacgtggacgagagcagaaactacatcagcaacagcgcccagagcaacggcgccgtggtgaaggagaagcagcccagcagcgccaagagcagcaacaagaacaagaagaacaaggacaaggagtactacgtgtag

SEQ ID NO: 237269 - protein, 354 aa, Artificial Sequence
  derived and/or modified sequence
MGCTLSAEERAALERSKAIEKNLKEDGISAAKDVKLLLLGAGESGKSTIVKQMKIIHEDGFSGEDVKQYKPVVYSNTIQSLAAIVRAMDTLGIEYGDKERKADAKMVCDVVSRMEDTEPFSAELLSAMMRLWGDSGIQECFNRSREYQLNDSAKYYLDSLDRIGAADYQPTEQDILRTRVKTTGIVETHFTFKNLHFRLFDVGGQRSERKKWIHCFEDVTAIIFCVALSGYDQVLHEDETTNRMHESLKLFDSICNNKWFTDTSIILFLNKKDIFEEKIKKSPLTICFPEYTGPSAFTEAVAYIQAQYESKNKSAHKEIYTHVTCATDTNNIQFVFDAVTDVIIAKNLRGCGLY

SEQ ID NO: 237270 - DNA, 1065 bp, Artificial Sequence
  derived and/or modified sequence
atgggctgtacgctcagtgccgaggagagggccgctctggagaggagcaaggccatcgaaaaaaatttgaaagaggatgggatctccgcagctaaagacgtcaagcttctgctgttgggcgccggtgagagtggaaaatccaccattgtgaaacagatgaagatcattcacgaggatggttttagcggcgaggatgtcaagcagtataaacccgtagtttattctaatactattcagtccctagcggcaatcgtgcgggctatggacacactggggatcgaatatggagacaaagaaagaaaagccgatgccaagatggtctgcgacgtggtttcccggatggaggataccgaacccttcagcgctgaattgctatccgcaatgatgaggctgtggggcgactccggcatacaggagtgctttaaccgcagtcgcgaatatcagctcaacgattccgctaagtattatctcgatagtctggacaggattggagctgcagattatcagcctacagagcaagacatcctgagaaccagagtgaagacaacaggtatagttgagactcactttacgtttaagaatctccacttcagactcttcgacgtcggggggcagcggagcgagaggaaaaagtggatccactgcttcgaagatgtcaccgccataattttttgtgtggcacttagcgggtacgaccaggtgctgcatgaagacgaaaccacaaacaggatgcacgagtccctgaagctattcgattctatctgtaataacaaatggttcaccgacacctcaataatcctgtttttgaacaagaaagacatattcgaggagaaaattaaaaagagccccctaactatctgctttccagaatacaccggtcctagtgccttcactgaggctgtggcctacatccaggctcagtatgaaagtaagaacaagtctgcacacaaagagatctacacacatgtcacgtgtgctacagatacaaacaatatccaattcgtcttcgacgcagttacagatgtcataatcgcgaaaaacctgcgggggtgcggactatattag

SEQ ID NO: 237271 - DNA, 1299 bp, Artificial Sequence
  derived and/or modified sequence
atgggatgtactctgagcgcagaggagagagccgccctcgagcggagcaaggcgattgagaaaaacctcaaagaggatggcatcagcgccgccaaagacgtgaaattactcctgctcggggctggagaatcaggaaaaagcaccattgtgaagcagatgaagatcatccatgaagatggcttctccggagaagacgtgaaacagtacaagcctgttgtctacagcaacactatccagtccctggcagccatcgtccgggccatggacactttgggcatcgaatatggtgataaggagagaaaggctgacgccaagatggtgtgtgatgtggtgagtcggatggaagacaccgagcccttctctgcagagctgctttctgccatgatgcggctctggggcgactcaggaatccaagagtgcttcaaccggtcccgggagtatcagctcaacgactctgccaaatactacctggacagcctggatcggattggggccgccgactaccagcccaccgagcaggacatcctccgaaccagggtcaaaaccactggcatcgtagaaacccacttcacattcaagaacctccacttcaggctgtttgacgtcggaggccagcgatctgaacgcaagaagtggatccattgcttcgaggacgtcacggccatcattttctgtgtcgcgctcagcggctatgaccaggtgctccacgaagacgaaaccacgaaccgcatgcacgaatccctgaagctttttgacagcatctgcaacaacaaatggttcacagacacgtccatcatcctgtttcttaacaagaaggacatatttgaagagaagatcaagaagtccccgctcaccatctgctttcctgaatatacaggccccagcgccttcacagaagccgtggcttacatccaggcccagtacgagagcaagaacaagtcagcccacaaagagatctacacccacgtcacctgcgccacggacaccaacaacatccagtttgtctttgatgctgtgacggacgtcatcatcgccaaaaacctgcggggctgtggactctactgagcccagccgccctgcccggcacccttgccctgcctggcctgccgccccccctcccctggaaccaggctccaccactctcagaccactctttgcacttgaggaagaagacctcagaggctggcaccaagggagggaggagggagcatcctccacccgcaccccccaacagaacttgtggtaacgcaggggcggggcggggctgctgagtgcatgctgcaaggccaggagactcca

SEQ ID NO: 237272 - DNA, 1065 bp, Artificial Sequence
  derived and/or modified sequence
atgggctgcaccctgtctgctgaggagagagctgccctggagaggagcaaggccatcgagaagaacctgaaggaggatggcatctctgctgccaaggatgtgaagctgctgctgctgggcgctggggagagcggcaagagcaccatcgtgaagcagatgaagatcatccatgaagatggcttcagcggggaggatgtgaagcagtacaagcctgtggtgtacagcaacaccatccagagcctggccgccatcgtgcgggccatggacaccctgggcattgaatatggagacaaggagaggaaggcagatgccaagatggtgtgtgatgtggtgtccaggatggaggacacagagcccttctctgctgagctgctgagcgccatgatgaggctgtggggagacagcggcatccaggagtgcttcaacagaagccgggagtaccagctgaatgacagcgccaagtactacctggacagcctggacagaattggagctgctgactaccagcccacagagcaggacatcctgcggaccagggtgaagaccactggaattgtggagacccacttcaccttcaagaacctgcacttccggctgtttgatgtgggcggccagaggtctgagaggaagaagtggatccactgctttgaagatgtgacagccatcatcttctgtgtggccctgagcggctatgaccaggtgctgcatgaagatgagaccaccaacaggatgcatgagagcctgaagctgtttgacagcatctgcaacaacaagtggttcacagacaccagcatcatcctcttcctgaacaagaaggacatctttgaggagaagatcaagaagagccccctgaccatctgcttccctgagtacacaggccccagcgccttcacagaggccgtggcctacatccaggcccagtatgagagcaagaacaagagcgcccacaaggagatctacacccacgtgacctgtgccacagacaccaacaacatccagtttgtgtttgatgctgtgacagatgtgatcatcgccaagaacctgcggggctgcggcctgtactag

SEQ ID NO: 237273 - DNA, 1065 bp, Artificial Sequence
  derived and/or modified sequence
atgggctgcaccctgagcgccgaggagcgggccgccctggagcggagcaaggctattgaaaagaatctgaaggaggatgggattagcgccgctaaagacgtcaagctgcttctgctgggggcaggggagtccggcaagtccacgatcgtcaaacagatgaagatcattcacgaagacggattttccggtgaggatgtaaagcagtacaaacctgtggtttactccaacaccattcagtcactcgctgctatcgtccgcgcaatggataccctgggcatcgaatatggggacaaagagaggaaagccgatgcaaaaatggtgtgtgatgttgtgtcaagaatggaggataccgaacccttctcggccgagttgctgtccgcaatgatgagactgtggggcgattccgggattcaggagtgcttcaaccgcagcagagagtaccaactgaatgacagcgccaagtactacctggatagtctggacaggataggcgccgccgactatcaacctaccgaacaggatatcctgcggaccagagtgaagactacagggatagtggaaacccacttcacctttaagaatctgcattttcggcttttcgacgtggggggacagagaagtgagcgaaaaaagtggatacattgcttcgaggatgtgactgctatcatattttgcgtagcactgagtgggtacgaccaagtgctacacgaggacgagaccacgaaccgcatgcacgaatctctcaaactttttgactccatatgtaataataagtggtttaccgacactagcatcatactttttctaaacaagaaggacatcttcgaggaaaaaattaagaagagccccctgacaatatgcttcccggagtacacgggaccttcagccttcacagaagcggtggcttatattcaagcacagtacgagtccaagaataaaagtgcacataaggagatctatacccacgtcacatgcgccaccgatacaaacaatatccagtttgttttcgatgcggtgacagatgtgatcattgctaagaatctcagagggtgtgggctgtattag

SEQ ID NO: 237274 - DNA, 1065 bp, Artificial Sequence
  derived and/or modified sequence
atgggttgtaccctcagcgccgaagagcgtgctgctctggagaggtccaaagcaatcgagaagaacttgaaggaagatggcatatccgcggcaaaagatgtcaaactcctgcttttgggagcaggcgaatcaggcaagtctaccattgttaagcaaatgaaaattatccacgaagacgggttctcgggcgaagacgtcaaacagtacaagcctgtcgtgtactcgaataccattcagtccttggccgctatagtcagggcaatggataccctaggtatcgagtatggagacaaggagagaaaggccgacgccaagatggtgtgtgacgtcgtctctcggatggaggataccgaacctttcagcgctgaactgctgtcagctatgatgaggctgtggggcgattctgggattcaggagtgtttcaatcgcagtcgagagtaccagctgaatgacagcgcgaagtactatctagattctcttgatcgcatcggcgcagcagattaccaacccactgagcaagacatccttagaacccgagttaaaacaacaggaatcgtggagacacacttcacctttaaaaatctgcattttcgcctgtttgacgtgggtgggcagagaagcgagcggaaaaagtggattcactgcttcgaagatgtgacagcaattatcttttgtgtcgccctgagtggttacgatcaggtactgcatgaggacgagacaacaaatagaatgcatgagtctctgaagcttttcgacagcatatgcaacaacaagtggttcacagacacatctattatattgttcttaaataaaaaggatatcttcgaggagaaaattaagaagtcacctctgaccatctgcttccctgagtatacgggaccaagcgcctttactgaagcggtcgcttacatccaggcccagtacgaatccaagaacaagtccgctcataaggaaatctacacgcatgttacgtgcgcaaccgacactaacaatattcagtttgtgtttgacgcggtaacggacgtaatcatagccaaaaacctgcgcggttgcggtctctactag

SEQ ID NO: 237275 - DNA, 1065 bp, Artificial Sequence
  derived and/or modified sequence
atgggctgcaccctgagcgccgaggagagagccgccctggagagaagcaaggccatcgagaagaacctgaaggaggacggcatcagcgccgccaaggacgtgaagctgctgctgctgggcgccggcgagagcggcaagagcaccatcgtgaagcagatgaagatcatccacgaggacggcttcagcggcgaggacgtgaagcagtacaagcccgtggtgtacagcaacaccatccagagcctggccgccatcgtgagagccatggacaccctgggcatcgagtacggcgacaaggagagaaaggccgacgccaagatggtgtgcgacgtggtgagcagaatggaggacaccgagcccttcagcgccgagctgctgagcgccatgatgagactgtggggcgacagcggcatccaggagtgcttcaacagaagcagagagtaccagctgaacgacagcgccaagtactacctggacagcctggacagaatcggcgccgccgactaccagcccaccgagcaggacatcctgagaaccagagtgaagaccaccggcatcgtggagacccacttcaccttcaagaacctgcacttcagactgttcgacgtgggcggccagagaagcgagagaaagaagtggatccactgcttcgaggacgtgaccgccatcatcttctgcgtggccctgagcggctacgaccaggtgctgcacgaggacgagaccaccaacagaatgcacgagagcctgaagctgttcgacagcatctgcaacaacaagtggttcaccgacaccagcatcatcctgttcctgaacaagaaggacatcttcgaggagaagatcaagaagagccccctgaccatctgcttccccgagtacaccggccccagcgccttcaccgaggccgtggcctacatccaggcccagtacgagagcaagaacaagagcgcccacaaggagatctacacccacgtgacctgcgccaccgacaccaacaacatccagttcgtgttcgacgccgtgaccgacgtgatcatcgccaagaacctgagaggctgcggcctgtactag

SEQ ID NO: 237276 - protein, 1158 aa, Artificial Sequence
  derived and/or modified sequence
MESGHLLWALLFMQSLWPQLTDGATRVYYLGIRDVQWNYAPKGRNVITNQPLDSDIVASSFLKSDKNRIGGTYKKTIYKEYKDDSYTDEVAQPAWLGFLGPVLQAEVGDVILIHLKNFATRPYTIHPHGVFYEKDSEGSLYPDGSSGPLKADDSVPPGGSHIYNWTIPEGHAPTDADPACLTWIYHSHVDAPRDIATGLIGPLITCKRGALDGNSPPQRQDVDHDFFLLFSVVDENLSWHLNENIATYCSDPASVDKEDETFQESNRMHAINGFVFGNLPELNMCAQKRVAWHLFGMGNEIDVHTAFFHGQMLTTRGHHTDVANIFPATFVTAEMVPWEPGTWLISCQVNSHFRDGMQALYKVKSCSMAPPVDLLTGKVRQYFIEAHEIQWDYGPMGHDGSTGKNLREPGSISDKFFQKSSSRIGGTYWKVRYEAFQDETFQEKMHLEEDRHLGILGPVIRAEVGDTIQVVFYNRASQPFSMQPHGVFYEKDYEGTVYNDGSSYPGLVAKPFEKVTYRWTVPPHAGPTAQDPACLTWMYFSAADPIRDTNSGLVGPLLVCRAGALGADGKQKGVDKEFFLLFTVLDENKSWYSNANQAAAMLDFRLLSEDIEGFQDSNRMHAINGFLFSNLPRLDMCKGDTVAWHLLGLGTETDVHGVMFQGNTVQLQGMRKGAAMLFPHTFVMAIMQPDNLGTFEIYCQAGSHREAGMRAIYNVSQCPGHQATPRQRYQAARIYYIMAEEVEWDYCPDRSWEREWHNQSEKDSYGYIFLSNKDGLLGSRYKKAVFREYTDGTFRIPRPRTGPEEHLGILGPLIKGEVGDILTVVFKNNASRPYSVHAHGVLESTTVWPLAAEPGEVVTYQWNIPERSGPGPNDSACVSWIYYSAVDPIKDMYSGLVGPLAICQKGILEPHGGRSDMDREFALLFLIFDENKSWYLEENVATHGSQDPGSINLQDETFLESNKMHAINGKLYANLRGLTMYQGERVAWYMLAMGQDVDLHTIHFHAESFLYRNGENYRADVVDLFPGTFEVVEMVASNPGTWLMHCHVTDHVHAGMETLFTVFSRTEHLSPLTVITKETEKAVPPRDIEEGNVKMLGMQIPIKNVEMLASVLVAISVTLLLVVLALGGVVWYQHRQRKLRRNRRSILDDSFKLLSFKQ

SEQ ID NO: 237277 - protein, 1161 aa, Artificial Sequence
  derived and/or modified sequence
MWAMESGHLLWALLFMQSLWPQLTDGATRVYYLGIRDVQWNYAPKGRNVITNQPLDSDIVASSFLKSDKNRIGGTYKKTIYKEYKDDSYTDEVAQPAWLGFLGPVLQAEVGDVILIHLKNFATRPYTIHPHGVFYEKDSEGSLYPDGSSGPLKADDSVPPGGSHIYNWTIPEGHAPTDADPACLTWIYHSHVDAPRDIATGLIGPLITCKRGALDGNSPPQRQDVDHDFFLLFSVVDENLSWHLNENIATYCSDPASVDKEDETFQESNRMHAINGFVFGNLPELNMCAQKRVAWHLFGMGNEIDVHTAFFHGQMLTTRGHHTDVANIFPATFVTAEMVPWEPGTWLISCQVNSHFRDGMQALYKVKSCSMAPPVDLLTGKVRQYFIEAHEIQWDYGPMGHDGSTGKNLREPGSISDKFFQKSSSRIGGTYWKVRYEAFQDETFQEKMHLEEDRHLGILGPVIRAEVGDTIQVVFYNRASQPFSMQPHGVFYEKDYEGTVYNDGSSYPGLVAKPFEKVTYRWTVPPHAGPTAQDPACLTWMYFSAADPIRDTNSGLVGPLLVCRAGALGADGKQKGVDKEFFLLFTVLDENKSWYSNANQAAAMLDFRLLSEDIEGFQDSNRMHAINGFLFSNLPRLDMCKGDTVAWHLLGLGTETDVHGVMFQGNTVQLQGMRKGAAMLFPHTFVMAIMQPDNLGTFEIYCQAGSHREAGMRAIYNVSQCPGHQATPRQRYQAARIYYIMAEEVEWDYCPDRSWEREWHNQSEKDSYGYIFLSNKDGLLGSRYKKAVFREYTDGTFRIPRPRTGPEEHLGILGPLIKGEVGDILTVVFKNNASRPYSVHAHGVLESTTVWPLAAEPGEVVTYQWNIPERSGPGPNDSACVSWIYYSAVDPIKDMYSGLVGPLAICQKGILEPHGGRSDMDREFALLFLIFDENKSWYLEENVATHGSQDPGSINLQDETFLESNKMHAINGKLYANLRGLTMYQGERVAWYMLAMGQDVDLHTIHFHAESFLYRNGENYRADVVDLFPGTFEVVEMVASNPGTWLMHCHVTDHVHAGMETLFTVFSRTEHLSPLTVITKETEKAVPPRDIEEGNVKMLGMQIPIKNVEMLASVLVAISVTLLLVVLALGGVVWYQHRQRKLRRNRRSILDDSFKLLSFKQ

SEQ ID NO: 237278 - protein, 1212 aa, Artificial Sequence
  derived and/or modified sequence
MTQTLPYHLSLLNVLFPGPCSRHFKFRRGKCAQPAWRKVSAPSQDLLITKVMWAMESGHLLWALLFMQSLWPQLTDGATRVYYLGIRDVQWNYAPKGRNVITNQPLDSDIVASSFLKSDKNRIGGTYKKTIYKEYKDDSYTDEVAQPAWLGFLGPVLQAEVGDVILIHLKNFATRPYTIHPHGVFYEKDSEGSLYPDGSSGPLKADDSVPPGGSHIYNWTIPEGHAPTDADPACLTWIYHSHVDAPRDIATGLIGPLITCKRGALDGNSPPQRQDVDHDFFLLFSVVDENLSWHLNENIATYCSDPASVDKEDETFQESNRMHAINGFVFGNLPELNMCAQKRVAWHLFGMGNEIDVHTAFFHGQMLTTRGHHTDVANIFPATFVTAEMVPWEPGTWLISCQVNSHFRDGMQALYKVKSCSMAPPVDLLTGKVRQYFIEAHEIQWDYGPMGHDGSTGKNLREPGSISDKFFQKSSSRIGGTYWKVRYEAFQDETFQEKMHLEEDRHLGILGPVIRAEVGDTIQVVFYNRASQPFSMQPHGVFYEKDYEGTVYNDGSSYPGLVAKPFEKVTYRWTVPPHAGPTAQDPACLTWMYFSAADPIRDTNSGLVGPLLVCRAGALGADGKQKGVDKEFFLLFTVLDENKSWYSNANQAAAMLDFRLLSEDIEGFQDSNRMHAINGFLFSNLPRLDMCKGDTVAWHLLGLGTETDVHGVMFQGNTVQLQGMRKGAAMLFPHTFVMAIMQPDNLGTFEIYCQAGSHREAGMRAIYNVSQCPGHQATPRQRYQAARIYYIMAEEVEWDYCPDRSWEREWHNQSEKDSYGYIFLSNKDGLLGSRYKKAVFREYTDGTFRIPRPRTGPEEHLGILGPLIKGEVGDILTVVFKNNASRPYSVHAHGVLESTTVWPLAAEPGEVVTYQWNIPERSGPGPNDSACVSWIYYSAVDPIKDMYSGLVGPLAICQKGILEPHGGRSDMDREFALLFLIFDENKSWYLEENVATHGSQDPGSINLQDETFLESNKMHAINGKLYANLRGLTMYQGERVAWYMLAMGQDVDLHTIHFHAESFLYRNGENYRADVVDLFPGTFEVVEMVASNPGTWLMHCHVTDHVHAGMETLFTVFSRTEHLSPLTVITKETEKAVPPRDIEEGNVKMLGMQIPIKNVEMLASVLVAISVTLLLVVLALGGVVWYQHRQRKLRRNRRSILDDSFKLLSFKQ

SEQ ID NO: 237279 - DNA, 3639 bp, Artificial Sequence
  derived and/or modified sequence
atgacccagactctgccgtaccacctatcactactgaatgtgctgttcccagggccctgctcccggcattttaagtttaggcgcggcaagtgcgcccagcctgcttggcgcaaggtgtctgctccaagccaagacctgttgatcacaaaagtcatgtgggccatggaatccgggcacttactatgggccctgctttttatgcagagcctttggccccaactgaccgatggtgcaacgcgtgtgtattacctgggcatccgcgatgtccagtggaattatgccccgaaaggacgaaacgtcatcacgaaccagcccttagactctgacattgtggcaagctctttcttgaagtctgataaaaatagaatcggcggtacttataaaaagactatttacaaggagtataaagacgacagttacacagatgaagtggctcaacccgcatggctgggcttcctgggcccggttctgcaggccgaggttggtgatgtaattttgattcacctgaagaatttcgctacccgcccctacaccatccatccccacggggtgttttatgaaaaagattcagagggttctctctatccggacggaagcagtggacctttgaaggccgacgatagcgttccacctggtgggtcgcacatctacaactggaccattcctgaaggccacgcacccaccgacgctgaccctgcatgcctgacgtggatttatcactctcacgtagatgcccctagagatatagctacagggctgatcgggcctttaattacctgcaaacgcggtgccctggacgggaattcgccgccgcaacgccaggacgtggaccacgacttcttcctcctgttctccgttgttgatgagaatctgtcctggcatcttaatgagaatattgccacctattgttctgatcccgcctcggtggacaaggaagacgaaaccttccaggagagcaaccgaatgcatgctatcaacgggtttgtgtttggcaacttgcccgagcttaacatgtgtgcacagaaaagagtggcttggcatctgtttggtatgggaaatgaaattgatgtgcacacagctttttttcatggccaaatgctgactactcgtggacaccacacagacgtggccaacatttttcccgccacctttgtgacagctgaaatggtgccctgggagcctggaacctggctgatcagctgccaggtcaactcccatttccgggacggcatgcaggctctgtataaggtaaaaagttgcagtatggctcccccagtcgacctgctgacaggcaaagtgagacagtactttattgaggcacacgaaatacagtgggactatggacctatgggccacgatggcagtaccggcaagaatctgagggagcctgggagtattagcgacaagttctttcagaagtcctcttcacggatcggcggtacatactggaaagtgagatacgaggccttccaagacgagaccttccaggaaaagatgcatttggaggaggatcgccaccttgggatactgggccccgttatccgcgccgaggtcggagatactatccaggttgtattctacaacagagcaagtcagccttttagtatgcagccccacggggtcttctatgagaaggactacgagggaaccgtgtataacgacgggtccagttatcccggactggttgctaaaccattcgagaaagtgacttaccggtggaccgtaccgccccacgcgggacccacggcccaggatccagcttgtctcacatggatgtacttttcagccgcggaccccattcgcgacacaaattcaggcctggtggggcccctgttggtttgcagagccggcgccttgggggccgacggaaagcaaaagggtgtggataaggagttttttctgctttttaccgttttagacgaaaataagagttggtattctaacgccaaccaggcagcagctatgctggattttcggctgctttccgaggatatagaaggcttccaggattctaatcgcatgcacgctattaatggtttcttgttctccaacctgcctaggctcgatatgtgcaagggggacaccgtggcctggcacctgctcggcttgggaaccgaaaccgacgtccatggtgtaatgtttcaggggaatactgtgcagcttcagggcatgcggaagggggccgctatgttgtttcctcatacctttgtgatggcgattatgcagcctgacaatcttggtaccttcgagatctactgccaggccggttcacacagggaggctggaatgagggcaatctacaatgtttcccagtgcccaggtcaccaggctaccccacggcagcgttatcaagccgcgcgaatctactacattatggctgaggaggtggagtgggattactgccctgataggagctgggaacgggaatggcataatcaatccgagaaggactcatatgggtacatatttctatctaataaagacggcctcctgggttctaggtacaaaaaagcagtgtttagggaatacaccgacggcacattccggatcccacgtccccgtacaggccccgaggagcatcttgggattcttggccccctcattaagggagaggttggagacattctcaccgttgtgttcaagaacaatgccagccgcccttactccgtccacgctcatggcgtgctggaaagtacgacagtgtggcctctggccgccgaacccggcgaggtagtcacctaccagtggaacataccagaacgcagtggtccaggaccaaatgatagtgcctgcgtcagctggatttattacagtgcggtcgacccaatcaaggatatgtatagcggattagttgggccactagcaatttgccagaagggcatccttgaaccacatggcgggcgatccgacatggacagagagttcgcgctcttgttcctgattttcgatgagaataaaagctggtatcttgaggagaacgtggctactcacgggtcccaagatcccggatccattaatctccaggacgaaacgtttttagagtcgaataaaatgcacgctattaatgggaagctgtatgcaaacctgcgggggttgaccatgtaccaaggggagagggtggcatggtatatgctcgccatgggacaggacgttgaccttcataccatccattttcatgctgaaagctttctgtacagaaatggagaaaattatagagccgatgtagtggatctgtttccaggaacttttgaagtggtcgaaatggttgcgtctaaccctgggacatggctcatgcactgtcacgtgacagaccacgtccacgctggaatggagacactgtttacggtgttctcacgcaccgaacacttgtctccattgactgtgattacaaaggaaacagagaaggcagtcccacccagagatatagaggagggcaatgtcaagatgcttggaatgcagataccaatcaaaaacgtagagatgctggcctcagtattggtggcaatctctgtgactcttctccttgtagtgttagctctgggaggtgtggtgtggtatcagcaccggcagagaaaactcagacgaaatagaaggtcaatcctagatgattcctttaaattattatcctttaagcagtag

SEQ ID NO: 237280 - DNA, 4854 bp, Artificial Sequence
  derived and/or modified sequence
tttgtgtctatttttttaaacattacatttgtcataatcattcatattgttgtgtgtagttgtagtttgttcattattattgctataaagaatttcattttatgaataaaatgcaatgtattcattcattatagtgttcacgaacattttgactgtttctattttgggtttatgaatattctagtaaatattttttagtaaattctcacttgttgttaagtacaatttatagaggataggaagtggcaacaacaatgagtgttccccttttgcctatgggaaaagagaggcaaagggagaattagtgttagtggcccaataaggcttctggtgcctgtttcctgattcttgggacagagcacattcttcctgctacaccattgaaaaaactggatccagatctctcttctgaaggaactagtaatacatgattagcagcacgggtgactttttaactatgcccttcaaaatccaatcattgaaaacttattgaattaaaaggaatcaggtaagttaaagaaactgggctaaatgggttttgctttctcagtcactcaacctggctcttgcctcttcagttttctggacacgtagaaagcccctttgttctctttcttctacaccagcagtttttatttgcctgtttcccagagtaatgtgggccatggagtcaggccacctcctctgggctctgctgttcatgcagtccttgtggcctcaactgactgatggagccactcgagtctactacctgggcatccgggatgtgcagtggaactatgctcccaagggaagaaatgtcatcacgaaccagcctctggacagtgacatagtggcttccagcttcttaaagtctgacaagaaccggatagggggaacctacaagaagaccatctataaagaatacaaggatgactcatacacagatgaagtggcccagcctgcctggttgggcttcctggggccagtgttgcaggctgaagtgggggatgtcattcttattcacctgaagaattttgccactcgtccctataccatccaccctcatggtgtcttctacgagaaggactctgaaggttccctatacccagatggctcctctgggccactgaaagctgatgactctgttcccccggggggcagccatatctacaactggaccattccagaaggccatgcacccaccgatgctgacccagcgtgcctcacctggatctaccattctcatgtagatgctccacgagacattgcaactggcctaattgggcctctcatcacctgtaaaagaggagccctggatgggaactcccctcctcaacgccaggatgtagaccatgatttcttcctcctcttcagtgtggtagatgagaacctcagctggcatctcaatgagaacattgccacttactgctcagatcctgcttcagtggacaaagaagatgagacatttcaggagagcaataggatgcatgcaatcaatggctttgtttttgggaatttacctgagctgaacatgtgtgcacagaaacgtgtggcctggcacttgtttggcatgggcaatgaaattgatgtccacacagcatttttccatggacagatgctgactacccgtggacaccacactgatgtggctaacatctttccagccacctttgtgactgctgagatggtgccctgggaacctggtacctggttaattagctgccaagtgaacagtcactttcgagatggcatgcaggcactctacaaggtcaagtcttgctccatggcccctcctgtggacctgctcacaggcaaagttcgacagtacttcattgaggcccatgagattcaatgggactatggcccgatggggcatgatgggagtactgggaagaatttgagagagccaggcagtatctcagataagtttttccagaagagctccagccgaattgggggcacttactggaaagtgcgatatgaagcctttcaagatgagacattccaagagaagatgcatttggaggaagataggcatcttggaatcctggggccagtgatccgggctgaggtgggtgacaccattcaggtggtcttctacaaccgtgcctcccagccattcagcatgcagccccatggggtcttttatgagaaagactatgaaggcactgtgtacaatgatggctcatcttaccctggcttggttgccaagccctttgagaaagtaacataccgctggacagtcccccctcatgccggtcccactgctcaggatcctgcttgtctcacttggatgtacttctctgctgcagatcccataagagacacaaattctggcctggtgggcccgctgctggtgtgcagggctggtgccttgggtgcagatggcaagcagaaaggggtggataaagaattctttcttctcttcactgtgttggatgagaacaagagctggtacagcaatgccaatcaagcagctgctatgttggatttccgactgctttcagaggatattgagggcttccaagactccaatcggatgcatgccattaatgggtttctgttctctaacctgcccaggctggacatgtgcaagggtgacacagtggcctggcacctgctcggcctgggcacagagactgatgtgcatggagtcatgttccagggcaacactgtgcagcttcagggcatgaggaagggtgcagctatgctctttcctcatacctttgtcatggccatcatgcagcctgacaaccttgggacatttgagatttattgccaggcaggcagccatcgagaagcagggatgagggcaatctataatgtctcccagtgtcctggccaccaagccacccctcgccaacgctaccaagctgcaagaatctactatatcatggcagaagaagtagagtgggactattgccctgaccggagctgggaacgggaatggcacaaccagtctgagaaggacagttatggttacattttcctgagcaacaaggatgggctcctgggttccagatacaagaaagctgtattcagggaatacactgatggtacattcaggatccctcggccaaggactggaccagaagaacacttgggaatcttgggtccacttatcaaaggtgaagttggtgatatcctgactgtggtattcaagaataatgccagccgcccctactctgtgcatgctcatggagtgctagaatctactactgtctggccactggctgctgagcctggtgaggtggtcacttatcagtggaacatcccagagaggtctggccctgggcccaatgactctgcttgtgtttcctggatctattattctgcagtggatcccatcaaggacatgtatagtggcctggtggggcccttggctatctgccaaaagggcatcctggagccccatggaggacggagtgacatggatcgggaatttgcattgttgttcttgatttttgatgaaaataagtcttggtatttggaggaaaatgtggcaacccatgggtcccaggatccaggcagtattaacctacaggatgaaactttcttggagagcaataaaatgcatgcaatcaatgggaaactctatgccaaccttaggggtcttaccatgtaccaaggagaacgagtggcctggtacatgctggccatgggccaagatgtggatctacacaccatccactttcatgcagagagcttcctctatcggaatggcgagaactaccgggcagatgtggtggatctgttcccagggacttttgaggttgtggagatggtggccagcaaccctgggacatggctgatgcactgccatgtgactgaccatgtccatgctggcatggagaccctcttcactgttttttctcgaacagaacacttaagccctctcaccgtcatcaccaaagagactgaaaaagcagtgccccccagagacattgaagaaggcaatgtgaagatgctgggcatgcagatccccataaagaatgttgagatgctggcctctgttttggttgccattagtgtcacccttctgctcgttgttctggctcttggtggagtggtttggtaccaacatcgacagagaaagctacgacgcaataggaggtccatcctggatgacagcttcaagcttctgtctttcaaacagtaacatctggagcctggagatatcctcaggaagcacatctgtagtgcactcccagcaggccatggactagtcactaaccccacactcaaaggggcatgggtggtggagaagcagaaggagcaatcaagcttatctggatatttctttctttatttattttacatggaaataatatgatttcactttttctttagtttctttgctctacgtgggcacctggcactaagggagtaccttattatcctacatcgcaaatttcaacagctacattatatttccttctgacacttggaaggtattgaaatttctagaaatgtatccttctcacaaagtagagaccaagagaaaaactcattgattgggtttctacttctttcaaggactcaggaaatttcactttgaactgaggccaagtgagctgttaagataacccacacttaaactaaaggctaagaatataggcttgatgggaaattgaaggtaggctgagtattgggaatccaaattgaattttgattctccttggcagtgaactactttgaagaagtggtcaatgggttgttgctgccatgagcatgtacaacctctggagctagaagctcctcaggaaagccagttctccaagttcttaacctgtggcactgaaaggaatgttgagttacctcttcatgttttagacagcaaaccctatccattaaagtacttgttagaacact

SEQ ID NO: 237281 - DNA, 4490 bp, Artificial Sequence
  derived and/or modified sequence
actgagcatttctaagggagttgaggctggtggctcctccttccttcctactggtgcttccacctgccttggtctgagttgcagtccatggggcagcgcctaagtgtctgagcacacttaagaatctctagtggtttatgacccagactttgccctaccacctcagtcttctgaatgttctcttccctggaccctgctccagacactttaaattcagaagaggaaaatgtgcccagcctgcctggagaaaagtgtctgctcctagccaagatctcctcatcacaaaagtaatgtgggccatggagtcaggccacctcctctgggctctgctgttcatgcagtccttgtggcctcaactgactgatggagccactcgagtctactacctgggcatccgggatgtgcagtggaactatgctcccaagggaagaaatgtcatcacgaaccagcctctggacagtgacatagtggcttccagcttcttaaagtctgacaagaaccggatagggggaacctacaagaagaccatctataaagaatacaaggatgactcatacacagatgaagtggcccagcctgcctggttgggcttcctggggccagtgttgcaggctgaagtgggggatgtcattcttattcacctgaagaattttgccactcgtccctataccatccaccctcatggtgtcttctacgagaaggactctgaaggttccctatacccagatggctcctctgggccactgaaagctgatgactctgttcccccggggggcagccatatctacaactggaccattccagaaggccatgcacccaccgatgctgacccagcgtgcctcacctggatctaccattctcatgtagatgctccacgagacattgcaactggcctaattgggcctctcatcacctgtaaaagaggagccctggatgggaactcccctcctcaacgccaggatgtagaccatgatttcttcctcctcttcagtgtggtagatgagaacctcagctggcatctcaatgagaacattgccacttactgctcagatcctgcttcagtggacaaagaagatgagacatttcaggagagcaataggatgcatgcaatcaatggctttgtttttgggaatttacctgagctgaacatgtgtgcacagaaacgtgtggcctggcacttgtttggcatgggcaatgaaattgatgtccacacagcatttttccatggacagatgctgactacccgtggacaccacactgatgtggctaacatctttccagccacctttgtgactgctgagatggtgccctgggaacctggtacctggttaattagctgccaagtgaacagtcactttcgagatggcatgcaggcactctacaaggtcaagtcttgctccatggcccctcctgtggacctgctcacaggcaaagttcgacagtacttcattgaggcccatgagattcaatgggactatggcccgatggggcatgatgggagtactgggaagaatttgagagagccaggcagtatctcagataagtttttccagaagagctccagccgaattgggggcacttactggaaagtgcgatatgaagcctttcaagatgagacattccaagagaagatgcatttggaggaagataggcatcttggaatcctggggccagtgatccgggctgaggtgggtgacaccattcaggtggtcttctacaaccgtgcctcccagccattcagcatgcagccccatggggtcttttatgagaaagactatgaaggcactgtgtacaatgatggctcatcttaccctggcttggttgccaagccctttgagaaagtaacataccgctggacagtcccccctcatgccggtcccactgctcaggatcctgcttgtctcacttggatgtacttctctgctgcagatcccataagagacacaaattctggcctggtgggcccgctgctggtgtgcagggctggtgccttgggtgcagatggcaagcagaaaggggtggataaagaattctttcttctcttcactgtgttggatgagaacaagagctggtacagcaatgccaatcaagcagctgctatgttggatttccgactgctttcagaggatattgagggcttccaagactccaatcggatgcatgccattaatgggtttctgttctctaacctgcccaggctggacatgtgcaagggtgacacagtggcctggcacctgctcggcctgggcacagagactgatgtgcatggagtcatgttccagggcaacactgtgcagcttcagggcatgaggaagggtgcagctatgctctttcctcatacctttgtcatggccatcatgcagcctgacaaccttgggacatttgagatttattgccaggcaggcagccatcgagaagcagggatgagggcaatctataatgtctcccagtgtcctggccaccaagccacccctcgccaacgctaccaagctgcaagaatctactatatcatggcagaagaagtagagtgggactattgccctgaccggagctgggaacgggaatggcacaaccagtctgagaaggacagttatggttacattttcctgagcaacaaggatgggctcctgggttccagatacaagaaagctgtattcagggaatacactgatggtacattcaggatccctcggccaaggactggaccagaagaacacttgggaatcttgggtccacttatcaaaggtgaagttggtgatatcctgactgtggtattcaagaataatgccagccgcccctactctgtgcatgctcatggagtgctagaatctactactgtctggccactggctgctgagcctggtgaggtggtcacttatcagtggaacatcccagagaggtctggccctgggcccaatgactctgcttgtgtttcctggatctattattctgcagtggatcccatcaaggacatgtatagtggcctggtggggcccttggctatctgccaaaagggcatcctggagccccatggaggacggagtgacatggatcgggaatttgcattgttgttcttgatttttgatgaaaataagtcttggtatttggaggaaaatgtggcaacccatgggtcccaggatccaggcagtattaacctacaggatgaaactttcttggagagcaataaaatgcatgcaatcaatgggaaactctatgccaaccttaggggtcttaccatgtaccaaggagaacgagtggcctggtacatgctggccatgggccaagatgtggatctacacaccatccactttcatgcagagagcttcctctatcggaatggcgagaactaccgggcagatgtggtggatctgttcccagggacttttgaggttgtggagatggtggccagcaaccctgggacatggctgatgcactgccatgtgactgaccatgtccatgctggcatggagaccctcttcactgttttttctcgaacagaacacttaagccctctcaccgtcatcaccaaagagactgaaaaagcagtgccccccagagacattgaagaaggcaatgtgaagatgctgggcatgcagatccccataaagaatgttgagatgctggcctctgttttggttgccattagtgtcacccttctgctcgttgttctggctcttggtggagtggtttggtaccaacatcgacagagaaagctacgacgcaataggaggtccatcctggatgacagcttcaagcttctgtctttcaaacagtaacatctggagcctggagatatcctcaggaagcacatctgtagtgcactcccagcaggccatggactagtcactaaccccacactcaaaggggcatgggtggtggagaagcagaaggagcaatcaagcttatctggatatttctttctttatttattttacatggaaataatatgatttcactttttctttagtttctttgctctacgtgggcacctggcactaagggagtaccttattatcctacatcgcaaatttcaacagctacattatatttccttctgacacttggaaggtattgaaatttctagaaatgtatccttctcacaaagtagagaccaagagaaaaactcattgattgggtttctacttctttcaaggactcaggaaatttcactttgaactgaggccaagtgagctgttaagataacccacacttaaactaaaggctaagaatataggcttgatgggaaattgaaggtaggctgagtattgggaatccaaattgaattttgattctccttggcagtgaactactttgaagaagtggtcaatgggttgttgctgccatgagcatgtacaacctctggagctagaagctcctcaggaaagccagttctccaagttcttaacctgtggcactgaaaggaatgttgagttacctcttcatgttttagacagcaaaccctatccattaaagtacttgttagaacactg

SEQ ID NO: 237282 - DNA, 6013 bp, Artificial Sequence
  derived and/or modified sequence
aattctaggggctgccatggcttggctaagcttcccttgaccactgagcatttctaagggagttgaggctggtggctcctccttccttcctactggtgcttccacctgccttggtctgagttgcagtccatggggcagcgcctaagtgtctgagcacacttaagaatctctagtggtttatgacccagactttgccctaccacctcagtcttctgaatgttctcttccctggaccctgctccagacactttaaattcagaagaggaaaatgtgcccagcctgcctggagaaaagtgtctgctcctagccaagatctcctcatcacaaaagtaatgtgggccatggagtcaggccacctcctctgggctctgctgttcatgcagtccttgtggcctcaactgactgatggagccactcgagtctactacctgggcatccgggatgtgcagtggaactatgctcccaagggaagaaatgtcatcacgaaccagcctctggacagtgacatagtggcttccagcttcttaaagtctgacaagaaccggatagggggaacctacaagaagaccatctataaagaatacaaggatgactcatacacagatgaagtggcccagcctgcctggttgggcttcctggggccagtgttgcaggctgaagtgggggatgtcattcttattcacctgaagaattttgccactcgtccctataccatccaccctcatggtgtcttctacgagaaggactctgaaggttccctatacccagatggctcctctgggccactgaaagctgatgactctgttcccccggggggcagccatatctacaactggaccattccagaaggccatgcacccaccgatgctgacccagcgtgcctcacctggatctaccattctcatgtagatgctccacgagacattgcaactggcctaattgggcctctcatcacctgtaaaagaggagccctggatgggaactcccctcctcaacgccaggatgtagaccatgatttcttcctcctcttcagtgtggtagatgagaacctcagctggcatctcaatgagaacattgccacttactgctcagatcctgcttcagtggacaaagaagatgagacatttcaggagagcaataggatgcatgcaatcaatggctttgtttttgggaatttacctgagctgaacatgtgtgcacagaaacgtgtggcctggcacttgtttggcatgggcaatgaaattgatgtccacacagcatttttccatggacagatgctgactacccgtggacaccacactgatgtggctaacatctttccagccacctttgtgactgctgagatggtgccctgggaacctggtacctggttaattagctgccaagtgaacagtcactttcgagatggcatgcaggcactctacaaggtcaagtcttgctccatggcccctcctgtggacctgctcacaggcaaagttcgacagtacttcattgaggcccatgagattcaatgggactatggcccgatggggcatgatgggagtactgggaagaatttgagagagccaggcagtatctcagataagtttttccagaagagctccagccgaattgggggcacttactggaaagtgcgatatgaagcctttcaagatgagacattccaagagaagatgcatttggaggaagataggcatcttggaatcctggggccagtgatccgggctgaggtgggtgacaccattcaggtggtcttctacaaccgtgcctcccagccattcagcatgcagccccatggggtcttttatgagaaagactatgaaggcactgtgtacaatgatggctcatcttaccctggcttggttgccaagccctttgagaaagtaacataccgctggacagtcccccctcatgccggtcccactgctcaggatcctgcttgtctcacttggatgtacttctctgctgcagatcccataagagacacaaattctggcctggtgggcccgctgctggtgtgcagggctggtgccttgggtgcagatggcaagcagaaaggggtggataaagaattctttcttctcttcactgtgttggatgagaacaagagctggtacagcaatgccaatcaagcagctgctatgttggatttccgactgctttcagaggatattgagggcttccaagactccaatcggatgcatgccattaatgggtttctgttctctaacctgcccaggctggacatgtgcaagggtgacacagtggcctggcacctgctcggcctgggcacagagactgatgtgcatggagtcatgttccagggcaacactgtgcagcttcagggcatgaggaagggtgcagctatgctctttcctcatacctttgtcatggccatcatgcagcctgacaaccttgggacatttgagatttattgccaggcaggcagccatcgagaagcagggatgagggcaatctataatgtctcccagtgtcctggccaccaagccacccctcgccaacgctaccaagctgcaagaatctactatatcatggcagaagaagtagagtgggactattgccctgaccggagctgggaacgggaatggcacaaccagtctgagaaggacagttatggttacattttcctgagcaacaaggatgggctcctgggttccagatacaagaaagctgtattcagggaatacactgatggtacattcaggatccctcggccaaggactggaccagaagaacacttgggaatcttgggtccacttatcaaaggtgaagttggtgatatcctgactgtggtattcaagaataatgccagccgcccctactctgtgcatgctcatggagtgctagaatctactactgtctggccactggctgctgagcctggtgaggtggtcacttatcagtggaacatcccagagaggtctggccctgggcccaatgactctgcttgtgtttcctggatctattattctgcagtggatcccatcaaggacatgtatagtggcctggtggggcccttggctatctgccaaaagggcatcctggagccccatggaggacggagtgacatggatcgggaatttgcattgttgttcttgatttttgatgaaaataagtcttggtatttggaggaaaatgtggcaacccatgggtcccaggatccaggcagtattaacctacaggatgaaactttcttggagagcaataaaatgcatgcaatcaatgggaaactctatgccaaccttaggggtcttaccatgtaccaaggagaacgagtggcctggtacatgctggccatgggccaagatgtggatctacacaccatccactttcatgcagagagcttcctctatcggaatggcgagaactaccgggcagatgtggtggatctgttcccagggacttttgaggttgtggagatggtggccagcaaccctgggacatggctgatgcactgccatgtgactgaccatgtccatgctggcatggagaccctcttcactgttttttctcgaacagaacacttaagccctctcaccgtcatcaccaaagagactgaaaaagcagtgccccccagagacattgaagaaggcaatgtgaagatgctgggcatgcagatccccataaagaatgttgagatgctggcctctgttttggttgccattagtgtcacccttctgctcgttgttctggctcttggtggagtggtttggtaccaacatcgacagagaaagctacgacgcaataggaggtccatcctggatgacagcttcaagcttctgtctttcaaacagtaacatctggagcctggagatatcctcaggaagcacatctgtagtgcactcccagcaggccatggactagtcactaaccccacactcaaaggggcatgggtggtggagaagcagaaggagcaatcaagcttatctggatatttctttctttatttattttacatggaaataatatgatttcactttttctttagtttctttgctctacgtgggcacctggcactaagggagtaccttattatcctacatcgcaaatttcaacagctacattatatttccttctgacacttggaaggtattgaaatttctagaaatgtatccttctcacaaagtagagaccaagagaaaaactcattgattgggtttctacttctttcaaggactcaggaaatttcactttgaactgaggccaagtgagctgttaagataacccacacttaaactaaaggctaagaatataggcttgatgggaaattgaaggtaggctgagtattgggaatccaaattgaattttgattctccttggcagtgaactactttgaagaagtggtcaatgggttgttgctgccatgagcatgtacaacctctggagctagaagctcctcaggaaagccagttctccaagttcttaacctgtggcactgaaaggaatgttgagttacctcttcatgttttagacagcaaaccctatccattaaagtacttgttagaacactgaaagactgaatttggtgatttttgacagtctctgtggcttctgtcactgtgattgaaacagaaaatacttagggggtgagtgagtatagtatgtatttgtctagcctttgtagaacctacaagtttttgttttagagatgaggaagctgttccagaggaagcatcaaagagtgctgggtaccaccctagaaaaggagctgtcgcataaatgacaaaaattttctgagtgtcaagaaaatttgccagagggaaatagaagtctgagacgagactcaaacctgtccagtgggccaggggaagtaggaccatatcttatggggcctttttggcagtggtggtgtgaaaggtctagttgcaactttgggggcttccttataggatggagtcattctttctggtattttacagcaatattcctttgttacatgcaaatttgagccaaatattggttagagagcacagataagtgataaattttagattgggtaagatggcccaccccactgcaatatccataatattgtaccacatggcaagtggagaacagaagaggtatcaaggagagaaaagatgataactatgtactgttttacactttaaaaagcattttaattcttgattgcgtttggattacctcagggcaagtcattttacatttgagtaatgttatccatttatacatttgagtgaacaaaagcttatggacattaagtaacttcatccaagatccctcaggtagaagttgagcagggattcatgtattcatctgtttgactccaaatacctatttcatcctcatatatcatggaaacatccactaatctccatccaccttacccatattgattccaacttttctgtctgtccagcaatctgtctgtctaggtagcaatctcttgaagataaaatgtagaaactcacagagctggtgttcagttacgatataagtttggaggagaaaacacaatccagaagctatgattcctcttgtttttccatggtcaatgggtttctggagagctttactgagaatctcagaaataaagtgtgggtggaagggggatttagatggctagttatccaagagttagtgtttaggccattgcagaatcaatgatttaacagcagcagaactgttttggcctgcagttaacatgaatgttaatgaagaccaagtacatgctaggaattccagtcaattaatggttataatttacatgcaactaggaggttcttagcttggtctcagttataactctaagagactaggagaggtagatgagatggaatgcatttcttcttattttgtaatcctgctccaggtcaaggaatagaaactcagagcccatgtatttaagaaagaaatgtatttttgtggtaagtttgctccaagtagggatacaagtatctatttttgacaatcaagtgacattgccatctattcagttgctcaagctggaaattatcagtgtcaacacatc

SEQ ID NO: 237283 - DNA, 3639 bp, Artificial Sequence
  derived and/or modified sequence
atgacccagaccctgccctaccacctgagcctgctgaatgtgctcttccctggcccctgcagccgccacttcaagttcagaagaggaaaatgtgcccagcctgcctggaggaaggtgtctgcccccagccaggacctgctgatcaccaaggtgatgtgggccatggagagcggccacctgctgtgggccctgctcttcatgcagagcctgtggccccagctgacagatggagccaccagggtgtactacctgggcatcagagatgtgcagtggaactatgcccccaagggcagaaatgtcatcaccaaccagcccctggacagcgacatcgtggccagcagcttcctgaagagtgacaagaacagaattggaggcacctacaagaagaccatctacaaggagtacaaggatgacagctacacagatgaggtggcccagcctgcctggctgggcttcctgggccctgtgctgcaggccgaggtgggagatgtgatcctgatccacctgaagaactttgccacccggccctacaccatccacccccacggcgtcttctatgagaaggacagcgagggcagcctgtacccagatggcagcagcggccccctgaaggcagatgacagcgtgcccccaggcggcagccacatctacaactggaccatccctgagggccacgcccccacagatgctgaccctgcctgcctgacctggatctaccacagccacgtggatgccccccgggacatcgccaccggcctcatcggccccctcatcacctgcaagagaggagccctggatggcaacagccccccccagaggcaggatgtggaccatgacttcttcctgctcttctctgtggtggatgagaacctgtcctggcacctgaatgaaaatattgccacctactgcagcgaccctgcctctgtggacaaggaggatgagaccttccaggagagcaacaggatgcacgccatcaatggatttgtgtttggaaacctgcctgagctgaacatgtgtgcccagaagagggtggcctggcacctgtttggcatgggaaatgaaattgatgtgcacacagccttcttccacggccagatgctgaccacccggggccaccacacagatgtggccaacatcttccctgccacctttgtgacagctgagatggtgccctgggagcccggcacctggctgatcagctgccaggtgaacagccacttcagagatggcatgcaggccctgtacaaggtgaagagctgcagcatggcccctcctgtggacctgctgaccgggaaggtgcggcagtacttcatcgaggcccacgagatccagtgggactatggccccatgggccatgatggcagcacaggcaagaacctgcgggagcccggcagcatcagtgacaagttcttccagaagagcagcagccgcatcggcggcacctactggaaggtgcgctatgaggccttccaggatgagaccttccaggagaagatgcacctggaggaggacagacacctgggcatcctgggccctgtgatccgggcagaggtgggggacaccatccaggtggtgttctacaacagagccagccagcccttctccatgcagccccatggagtcttctatgagaaggactatgagggcaccgtgtacaatgatggcagcagctacccaggcctggtggccaagccctttgagaaggtgacctaccgctggacagtgccccctcatgctggccccacagcccaggaccctgcctgcctgacctggatgtacttctctgctgctgaccccatccgggacaccaacagcggcctggtgggccccctgctggtgtgccgggccggggccctgggcgcagatggcaagcagaagggcgtggacaaggagttcttcctgctcttcaccgtgctggatgagaacaagtcctggtacagcaatgccaaccaggccgccgccatgctggacttccggctgctgtctgaagatattgagggcttccaggacagcaacaggatgcacgccatcaatggcttcctgttcagcaacctgccccggctggacatgtgcaagggggacacagtggcctggcacctgctgggcctgggcacagaaacagatgtgcacggcgtgatgttccagggcaacacagtgcagctgcagggcatgaggaagggggccgccatgctgttcccccacacctttgtgatggccatcatgcagcctgacaacctgggcacctttgagatctactgccaggccggcagccaccgggaggccggcatgagggccatctacaacgtgtcccagtgccccggccaccaggccaccccccggcagcgctaccaggccgcccgcatctactacatcatggccgaggaggtggagtgggactactgcccagaccgctcctgggagcgggagtggcacaaccagagcgagaaggacagctatggctacatcttcctgagcaacaaggatggcctgctgggcagccgctacaagaaggctgtgttccgggagtacacagatggcaccttccgcatcccccggcccaggactggacctgaggagcacctgggcatcctgggccccctcatcaagggggaggtgggggacatcctgactgtggtgttcaagaacaatgccagccggccctacagcgtgcacgcccatggagtgctggagagcaccaccgtgtggcccctggccgctgagcccggggaggtggtgacctaccagtggaacatccctgagaggagcggccctggccccaatgattctgcctgtgtgtcctggatctactacagcgctgtggaccccatcaaggacatgtacagcggcctggtgggccccctggccatctgccagaagggcatcctggagccccatggaggccgcagtgacatggaccgggagtttgccctgctcttcctgatctttgatgagaacaagtcctggtacctggaggagaatgtggccacccacggcagccaggaccccggcagcatcaacctgcaggatgagaccttcctggagagcaacaagatgcacgccatcaacgggaagctgtatgccaacctgcggggcctgaccatgtaccagggcgagcgggtggcctggtacatgctggccatgggccaggatgtggacctgcacaccatccacttccacgccgagagcttcctgtacagaaatggagagaactacagagcagatgtggtggacctcttccctggcacctttgaggtggtggagatggtggccagcaaccctggcacctggctgatgcactgccacgtgacagaccacgtgcacgccggcatggagaccctcttcaccgtcttcagcaggacagagcacctgagccccctgaccgtcatcaccaaggagacagagaaggctgtgcccccccgggacatcgaggagggcaatgtgaagatgctgggcatgcagatccccatcaagaatgtggagatgctggcctctgtgctggtggccatctctgtgaccctgctgctggtggtgctggccctgggcggcgtggtgtggtaccagcaccggcagaggaagctgcggaggaacagaagaagcatcctggatgacagcttcaagctgctgtccttcaagcagtag

SEQ ID NO: 237284 - DNA, 3639 bp, Artificial Sequence
  derived and/or modified sequence
atgacccagaccctgccctaccacctgagcctgctgaacgtgctgtttcctggaccttgcagtcgccactttaagtttcgcagggggaagtgcgcacagccagcctggaggaaagtatccgctccctcccaggaccttcttatcacaaaggttatgtgggcgatggagagcgggcaccttttatgggcgctgctgtttatgcagagcctttggccccagctaacagatggggccactcgggtgtattaccttggaatcagagacgttcagtggaactacgcccccaaggggaggaacgtgattacaaaccaacctctggatagtgacatcgtggcgtcaagttttctgaagtccgacaaaaaccggatcggaggcacatacaaaaaaacgatctacaaggaatacaaagatgacagctacacggatgaagtggcccagcccgcgtggctgggattccttggcccagttctgcaggccgaagttggcgatgtcatcctcatccacctaaagaatttcgccactcgcccatatacaatacacccacatggggtcttctacgagaaggacagcgaggggagcctctaccccgacggttccagtggtcccctgaaggccgacgattccgttcctcctggcggctcacacatctacaattggacaattccagaagggcatgctcctactgacgcagaccctgcctgcttgacttggatctaccatagccacgtggacgcgcctcgcgatatagcaaccggactgatagggccgttgatcacatgcaagcgtggagctctcgatggcaacagccctcctcaacgacaagacgtcgaccatgacttcttcctcctcttttcggtggttgatgaaaacctatcctggcatcttaatgaaaatatcgccacgtattgctcagatcctgccagcgtggacaaggaggatgaaaccttccaagaaagcaaccgcatgcacgcaataaatggcttcgtgttcgggaacctgccagaacttaatatgtgcgcccagaagagagtggcctggcatctgtttggaatgggcaatgagattgatgtgcacacagctttcttccatgggcaaatgctgacaacacgcggacatcatactgatgtcgccaacatcttcccggctacattcgtcacagctgaaatggtcccgtgggaacccgggacctggcttatcagttgtcaggtgaatagtcatttccgcgatggcatgcaggctctgtataaggttaagagctgttcgatggcaccgccagtggacctcctgactggaaaagttcggcagtactttattgaagcccatgaaatccagtgggattatggtcctatggggcacgacggcagtactggaaagaacttgcgtgaaccaggtagcatcagcgacaaattttttcagaagagctctagtcgcatcggagggacctactggaaggtacgctatgaagctttccaggacgagacatttcaggagaagatgcacctcgaagaggatcgacacctaggaatcctcggcccagtgatcagagctgaagtgggcgacaccatccaggtggtgttctacaaccgcgccagccaaccattcagcatgcagcctcatggcgtattttatgagaaagactacgaaggcactgtttacaatgacggatcatcatatcccggcctggtcgccaaaccatttgagaaggtgacttaccgctggaccgtgcccccccacgccggccctacagcccaggatcccgcctgcctcacatggatgtatttcagtgcagcagacccaattagggataccaacagcgggctagtcggcccgctcctcgtgtgcagagcaggcgccctgggggctgatggcaagcagaagggggtcgacaaagagttctttcttttattcacggtgttggacgaaaataaaagctggtattccaacgccaaccaagccgctgcaatgctggacttccgcctgctcagcgaggatatcgagggcttccaggatagtaaccgtatgcatgccatcaatggatttttgttttcaaatctgccaagattggatatgtgcaaaggtgacacggtggcctggcatctgctaggactggggactgagacagacgtgcatggggtgatgtttcagggcaacactgtccagctacagggcatgaggaagggagccgccatgctgttcccccacaccttcgtgatggctataatgcagcctgacaatctgggaacctttgaaatttattgtcaagccggttctcacagagaggccggcatgcgcgctatttataacgtgtcccagtgcccaggccaccaagccacaccgcgacaacggtaccaggccgccaggatctactatattatggcggaggaggttgaatgggactactgtcctgaccggagctgggaacgggagtggcataatcaaagcgaaaaggacagctacggctacatctttttaagtaacaaagacggcctgttgggatccaggtacaaaaaggcagtgtttagagaatatacagatgggaccttccgaatccctaggccaagaacggggcccgaggaacatttgggcatcctgggacctctgatcaagggggaggtcggtgatatcctcaccgtcgtgtttaagaataatgctagccgtccgtacagcgtccacgctcatggcgtgctcgagagcactactgtgtggcccctagctgccgagcccggggaagtggtcacataccagtggaatatacctgaaagatccggaccaggccctaatgactccgcgtgcgtctcatggatctactatagcgccgtggatcccatcaaagacatgtactccggactggtgggtcctcttgcaatatgccagaagggtatcctggagcctcatggtgggcgatccgacatggaccgggagtttgccctccttttccttatctttgacgaaaacaaaagctggtacctggaagaaaacgtggcaacacatgggagtcaggatcctggatcaatcaatctgcaggacgagacttttttagaaagcaataaaatgcacgctatcaacggcaaactgtatgcaaacctgcggggcttaactatgtatcagggagagcgcgtagcctggtatatgctagctatgggacaggatgtcgatttgcatacaatccattttcatgctgaaagcttcctctacagaaatggcgagaactatcgggctgacgttgtggacctttttcccgggaccttcgaagtggtggagatggtggcttcgaaccctggcacctggctgatgcactgccatgttactgaccacgttcacgccggaatggagacactgttcaccgtgttctctcgcaccgagcacctgtctccgctcaccgtcattacgaaggagactgagaaagccgtaccaccaagagacatagaagaagggaacgttaagatgctgggcatgcaaatccccatcaagaatgtagagatgctggcctccgtgcttgtggcgataagcgtgactctgctgctggtcgtgctcgctctcggcggcgtggtatggtaccaacaccgccagcgaaaactgcgcagaaatcggagaagtatcctggacgacagtttcaagctcctctcatttaagcaatag

SEQ ID NO: 237285 - DNA, 3639 bp, Artificial Sequence
  derived and/or modified sequence
atgactcagaccctgccataccatttgtctttgttaaatgtgctgttccctgggccatgctccaggcacttcaagttcagaagaggtaaatgtgctcagccagcttggcgaaaggtctccgcaccctctcaggacttgttaatcacaaaggtcatgtgggccatggagagcgggcatctgctgtgggcattgctatttatgcagtctctctggccccagctcacagatggtgctactagggtgtactaccttggtatacgcgacgttcagtggaattatgcacccaagggacgaaatgtcatcactaatcaaccactggattctgatatcgtagcttccagcttcctgaagtccgataaaaatcgaattgggggaacttacaagaagacaatctacaaggagtacaaggatgacagttatacagatgaggtggcccaacccgcatggctcggcttcctgggccctgtgctgcaggcagaggtaggtgacgtcatacttatccatctgaagaatttcgctacaagaccgtataccatccacccgcatggggtgttctacgagaaggactcggagggctccctgtatcccgacgggtcctctggacctttaaaggccgacgactcagtacctccgggagggtcccatatatataactggaccataccagagggccatgccccaactgacgcagatcccgcttgtctaacgtggatctaccattcccacgtggacgccccaagagatatcgccacgggccttatcggcccactcattacatgcaagcggggtgctttggatggcaacagccctccacagaggcaggatgtggatcatgacttcttccttcttttttctgttgtggatgagaatctcagctggcacttaaatgaaaacatcgccacgtattgtagcgatccagccagtgtggataaggaggatgagacctttcaggagtctaaccggatgcacgctattaatggctttgtattcggtaacctgcctgagttgaatatgtgcgctcaaaagagggtcgcctggcatctctttggaatgggcaatgagatcgacgttcatacggcattctttcacggccagatgctgacgactaggggccatcataccgatgtggccaatattttccctgctaccttcgtaacagccgagatggttccctgggagcctggtacctggctgatatcctgtcaggttaatagtcactttagggatggaatgcaagcattatacaaagttaagagttgctcgatggccccacccgtagacctgttaactggcaaagtgagacagtactttattgaggcacacgagattcagtgggattacggcccaatgggacatgatggatcgacaggcaagaacctacgcgaaccaggaagcatcagcgataagttctttcaaaaaagctctagtcggattggagggacttactggaaggtgcggtatgaggcttttcaggacgaaacctttcaggaaaaaatgcatctcgaggaggaccgccaccttgggatcctggggcctgttatacgtgccgaagtgggcgatactatccaagtggtcttttacaatcgagcatcgcaaccattcagtatgcagccccacggtgtgttctacgagaaggattatgaaggaactgtgtataacgacggcagcagctaccctggcctcgtggctaaaccatttgaaaaggtcacctacagatggacggttccaccacatgcgggacccaccgcccaggatcccgcttgtttgacctggatgtattttagcgctgcagacccaatccgagatacaaactcgggtctggtgggccctctgcttgtgtgtagagctggtgcactgggcgctgatggcaagcagaaaggcgttgataaggaattcttcctactctttactgttctggatgagaacaagagttggtactctaacgcaaatcaggcagccgcaatgctcgattttagactgctcagcgaagacatcgagggctttcaggattcaaatagaatgcatgcaatcaatggcttcctgttcagcaacctccctaggctagacatgtgcaaaggtgatactgtagcttggcatctgcttgggctgggtactgagactgatgtgcatggggtcatgtttcaggggaacactgtgcagctccaagggatgcgtaaaggagctgcaatgctattcccgcacacttttgttatggccatcatgcagcctgataatctcggaacgtttgaaatctattgtcaggctggctcacatagggaagctggcatgcgagcaatttacaacgtttctcagtgtcccggacatcaggccacaccaagacaacgctaccaggctgccaggatttactacatcatggccgaggaagtcgaatgggactactgccccgaccggtcatgggagcgcgaatggcataatcagtccgaaaaggattcctacggctacatcttcctgtccaataaggacggactcctgggctccaggtacaagaaggctgtcttccgagaatacacagacgggacattccgcatccccagacccaggacaggaccagaggaacacctgggtatcctgggccctctgattaaaggggaggtgggtgatatcctgacagtggtattcaaaaacaatgcatcaagaccctactcagtccacgctcacggagtgttagagtctacaaccgtgtggcctctggcagccgaacccggtgaagttgtgacataccagtggaacatcccggaacggagcggacccggtcccaatgattctgcgtgcgtatcctggatttattacagtgctgtggaccccatcaaagacatgtattccggcttggttggcccactcgccatctgccagaaagggatcctagaacctcacggcggacgctcagatatggatagagaattcgccctgctgtttcttatcttcgacgagaataaatcatggtacctggaggaaaacgtggcgacacacgggtcccaggatcccggatcaataaatcttcaagacgaaaccttccttgagtctaacaaaatgcacgctatcaacggcaagctgtacgcgaatttgcgaggcctgactatgtaccagggcgagagggtggcttggtacatgctggcaatgggtcaggatgtggacctgcatacaattcatttccacgccgaaagtttcctataccgcaacggcgagaactaccgagcagatgtggtggacctttttccgggaacattcgaggtcgtagagatggtggccagtaacccagggacatggttgatgcattgtcacgttaccgatcacgtccacgccggtatggaaaccctatttacggtcttctcacggaccgaacacctctcccccttgaccgttattactaaagagaccgagaaagcagtacctccccgtgacatagaggagggaaatgtgaagatgctgggcatgcagataccaattaagaacgtagagatgcttgctagtgtcctggtcgcaatttctgtgacactcttgctggtggtcctagctctgggtggcgtggtgtggtatcagcatcgacaaagaaagctgcggagaaataggcggtccattctggacgacagctttaaacttttgtctttcaaacagtag

SEQ ID NO: 237286 - DNA, 3639 bp, Artificial Sequence
  derived and/or modified sequence
atgacccagaccctgccctaccacctgagcctgctgaacgtgctgttccccggcccctgcagcagacacttcaagttcagaagaggcaagtgcgcccagcccgcctggagaaaggtgagcgcccccagccaggacctgctgatcaccaaggtgatgtgggccatggagagcggccacctgctgtgggccctgctgttcatgcagagcctgtggccccagctgaccgacggcgccaccagagtgtactacctgggcatcagagacgtgcagtggaactacgcccccaagggcagaaacgtgatcaccaaccagcccctggacagcgacatcgtggccagcagcttcctgaagagcgacaagaacagaatcggcggcacctacaagaagaccatctacaaggagtacaaggacgacagctacaccgacgaggtggcccagcccgcctggctgggcttcctgggccccgtgctgcaggccgaggtgggcgacgtgatcctgatccacctgaagaacttcgccaccagaccctacaccatccacccccacggcgtgttctacgagaaggacagcgagggcagcctgtaccccgacggcagcagcggccccctgaaggccgacgacagcgtgccccccggcggcagccacatctacaactggaccatccccgagggccacgcccccaccgacgccgaccccgcctgcctgacctggatctaccacagccacgtggacgcccccagagacatcgccaccggcctgatcggccccctgatcacctgcaagagaggcgccctggacggcaacagccccccccagagacaggacgtggaccacgacttcttcctgctgttcagcgtggtggacgagaacctgagctggcacctgaacgagaacatcgccacctactgcagcgaccccgccagcgtggacaaggaggacgagaccttccaggagagcaacagaatgcacgccatcaacggcttcgtgttcggcaacctgcccgagctgaacatgtgcgcccagaagagagtggcctggcacctgttcggcatgggcaacgagatcgacgtgcacaccgccttcttccacggccagatgctgaccaccagaggccaccacaccgacgtggccaacatcttccccgccaccttcgtgaccgccgagatggtgccctgggagcccggcacctggctgatcagctgccaggtgaacagccacttcagagacggcatgcaggccctgtacaaggtgaagagctgcagcatggccccccccgtggacctgctgaccggcaaggtgagacagtacttcatcgaggcccacgagatccagtgggactacggccccatgggccacgacggcagcaccggcaagaacctgagagagcccggcagcatcagcgacaagttcttccagaagagcagcagcagaatcggcggcacctactggaaggtgagatacgaggccttccaggacgagaccttccaggagaagatgcacctggaggaggacagacacctgggcatcctgggccccgtgatcagagccgaggtgggcgacaccatccaggtggtgttctacaacagagccagccagcccttcagcatgcagccccacggcgtgttctacgagaaggactacgagggcaccgtgtacaacgacggcagcagctaccccggcctggtggccaagcccttcgagaaggtgacctacagatggaccgtgcccccccacgccggccccaccgcccaggaccccgcctgcctgacctggatgtacttcagcgccgccgaccccatcagagacaccaacagcggcctggtgggccccctgctggtgtgcagagccggcgccctgggcgccgacggcaagcagaagggcgtggacaaggagttcttcctgctgttcaccgtgctggacgagaacaagagctggtacagcaacgccaaccaggccgccgccatgctggacttcagactgctgagcgaggacatcgagggcttccaggacagcaacagaatgcacgccatcaacggcttcctgttcagcaacctgcccagactggacatgtgcaagggcgacaccgtggcctggcacctgctgggcctgggcaccgagaccgacgtgcacggcgtgatgttccagggcaacaccgtgcagctgcagggcatgagaaagggcgccgccatgctgttcccccacaccttcgtgatggccatcatgcagcccgacaacctgggcaccttcgagatctactgccaggccggcagccacagagaggccggcatgagagccatctacaacgtgagccagtgccccggccaccaggccacccccagacagagataccaggccgccagaatctactacatcatggccgaggaggtggagtgggactactgccccgacagaagctgggagagagagtggcacaaccagagcgagaaggacagctacggctacatcttcctgagcaacaaggacggcctgctgggcagcagatacaagaaggccgtgttcagagagtacaccgacggcaccttcagaatccccagacccagaaccggccccgaggagcacctgggcatcctgggccccctgatcaagggcgaggtgggcgacatcctgaccgtggtgttcaagaacaacgccagcagaccctacagcgtgcacgcccacggcgtgctggagagcaccaccgtgtggcccctggccgccgagcccggcgaggtggtgacctaccagtggaacatccccgagagaagcggccccggccccaacgacagcgcctgcgtgagctggatctactacagcgccgtggaccccatcaaggacatgtacagcggcctggtgggccccctggccatctgccagaagggcatcctggagccccacggcggcagaagcgacatggacagagagttcgccctgctgttcctgatcttcgacgagaacaagagctggtacctggaggagaacgtggccacccacggcagccaggaccccggcagcatcaacctgcaggacgagaccttcctggagagcaacaagatgcacgccatcaacggcaagctgtacgccaacctgagaggcctgaccatgtaccagggcgagagagtggcctggtacatgctggccatgggccaggacgtggacctgcacaccatccacttccacgccgagagcttcctgtacagaaacggcgagaactacagagccgacgtggtggacctgttccccggcaccttcgaggtggtggagatggtggccagcaaccccggcacctggctgatgcactgccacgtgaccgaccacgtgcacgccggcatggagaccctgttcaccgtgttcagcagaaccgagcacctgagccccctgaccgtgatcaccaaggagaccgagaaggccgtgccccccagagacatcgaggagggcaacgtgaagatgctgggcatgcagatccccatcaagaacgtggagatgctggccagcgtgctggtggccatcagcgtgaccctgctgctggtggtgctggccctgggcggcgtggtgtggtaccagcacagacagagaaagctgagaagaaacagaagaagcatcctggacgacagcttcaagctgctgagcttcaagcagtag

SEQ ID NO: 237287 - protein, 192 aa, Artificial Sequence
  derived and/or modified sequence
MDGSGEQPRGGGPTSSEQIMKTGALLLQGFIQDRAGRMGGEAPELALDPVPQDASTKKLSECLKRIGDELDSNMELQRMIAAVDTDSPREVFFRVAADMFSDGNFNWGRVVALFYFASKLVLKALCTKVPELIRTIMGWTLDFLRERLLGWIQDQGGWDGLLSYFGTPTWQTVTIFVAGVLTASLTIWKKMG

SEQ ID NO: 237288 - DNA, 579 bp, Artificial Sequence
  derived and/or modified sequence
atggacgggtctggggagcagcctcggggcggggggcccacctcgagcgagcaaatcatgaaaacaggagcgttactcctccagggattcatacaagacagagcaggccggatgggtggcgaggccccggagctggccctcgatcccgtgcctcaggatgcctcaacaaagaagctctccgaatgtctgaaacgtatcggggacgaattggactccaatatggagctgcagcgcatgatcgcagcagtagacacagacagcccgcgggaggtgttctttcgtgtagccgctgacatgttctctgatgggaattttaactggggaagagtggtggctctattctattttgcgagcaagctcgtcctcaaggcactgtgcacaaaagtgcctgaacttatcagaaccattatgggctggaccctcgattttctccgcgaaagactgctggggtggattcaggatcagggcggatgggacggtctcctgagttacttcggtactccaacctggcagaccgtgacaattttcgtcgcaggcgtgctaactgcctctttgactatctggaagaagatgggatag

SEQ ID NO: 237289 - DNA, 579 bp, Artificial Sequence
  derived and/or modified sequence
atggatggcagcggggagcagccccggggcggcggccccaccagcagcgagcagatcatgaagacaggagccctgctgctgcagggcttcatccaggacagagctggccgcatgggcggggaggcccctgagctggccctggaccctgtgccccaggatgccagcaccaagaagctgtctgaatgtctgaagagaattggagatgagctggacagcaacatggagctgcagaggatgattgctgctgtggacacagacagcccccgggaggtgttcttccgggtggccgctgacatgttcagtgatggcaacttcaactggggccgggtggtggccctcttctactttgccagcaagctggtgctgaaggccctgtgcaccaaggtgcctgagctgatccgcaccatcatgggctggaccctggacttcctgcgggagcggctgctgggctggatccaggaccagggcggctgggatggcctgctgagctacttcggcacccccacctggcagacagtgaccatctttgtggccggcgtgctgacagccagcctgaccatctggaagaagatgggctag

SEQ ID NO: 237290 - DNA, 579 bp, Artificial Sequence
  derived and/or modified sequence
atggacggcagcggcgagcagccccggggcggcggccccaccagctccgagcaaatcatgaagactggggctctcctgcttcagggattcatccaggacagagcaggccgaatgggaggtgaagctcctgaactggccttggacccggtgcctcaggacgcaagtacaaaaaaactttcagagtgtctgaagaggatcggtgatgagctagactctaacatggagctgcaaagaatgatcgctgccgtggacacagactcccctagagaagtcttcttccgggtagcagccgacatgttctcagatggtaacttcaattggggcagagttgtggccctcttctattttgcctcgaaactggtattaaaagcgctgtgcacgaaagtgccggaactaattagaaccattatgggatggaccctggattttctgagagaaagattactgggctggatccaggaccagggcggctgggacgggctcctgagctacttcgggacacctacctggcagacagtgaccatctttgtggccggcgtgctaacagctagcttgaccatatggaaaaagatgggctag

SEQ ID NO: 237291 - DNA, 579 bp, Artificial Sequence
  derived and/or modified sequence
atggacggaagcggggaacagccacgcggagggggacccaccagcagtgagcaaattatgaagactggcgcactgctgctgcaaggcttcattcaggatagggctggcagaatgggaggcgaggccccagaattagccctggacccagtgccccaagatgctagcacaaaaaagctttcggaatgccttaaacgcatcggcgacgagttggattccaatatggaattgcaaaggatgatcgcagcagtggatacagattcccctagggaagtgttttttagggtggccgcagacatgttctccgacggcaatttcaactgggggagggtggttgccctgttctacttcgcatccaagctcgtcctgaaggcattgtgcacaaaagtccccgagcttattcggacaataatggggtggaccctcgattttctccgggagagactactgggctggattcaggaccaagggggatgggacgggttgctgagttacttcggcacccctacgtggcagaccgtcacaattttcgtagcaggcgtgctgacggctagtctgactatttggaaaaagatgggttag

SEQ ID NO: 237292 - DNA, 793 bp, Artificial Sequence
  derived and/or modified sequence
gctgcggccgcccgcgcggacccggcgagaggcggcggcgggagcggcggtgatggacgggtccggggagcagcccagaggcggggggcccaccagctctgagcagatcatgaagacaggggcccttttgcttcagggtttcatccaggatcgagcagggcgaatggggggggaggcacccgagctggccctggacccggtgcctcaggatgcgtccaccaagaagctgagcgagtgtctcaagcgcatcggggacgaactggacagtaacatggagctgcagaggatgattgccgccgtggacacagactccccccgagaggtctttttccgagtggcagctgacatgttttctgacggcaacttcaactggggccgggttgtcgcccttttctactttgccagcaaactggtgctcaaggccctgtgcaccaaggtgccggaactgatcagaaccatcatgggctggacattggacttcctccgggagcggctgttgggctggatccaagaccagggtggttgggacggcctcctctcctactttgggacgcccacgtggcagaccgtgaccatctttgtggcgggagtgctcaccgcctcactcaccatctggaagaagatgggctgaggcccccagctgccttggactgtgtttttcctccataaattatggcatttttctgggaggggtggggattgggggacgtgggcatttttcttacttttgtaattattggggggtgtggggaagagtggtcttgagggggtaataaacctccttcgggacaca

SEQ ID NO: 237293 - DNA, 735 bp, Artificial Sequence
  derived and/or modified sequence
gcggccgcccgcgcggacccggcgagaggcggcggcgggagcggcggtgatggacgggtccggggagcagcccagaggcggggtttcatccaggatcgagcagggcgaatggggggggaggcacccgagctggccctggacccggtgcctcaggatgcgtccaccaagaagctgagcgagtgtctcaagcgcatcggggacgaactggacagtaacatggagctgcagaggatgattgccgccgtggacacagactccccccgagaggtctttttccgagtggcagctgacatgttttctgacggcaacttcaactggggccgggttgtcgcccttttctactttgccagcaaactggtgctcaaggccctgtgcaccaaggtgccggaactgatcagaaccatcatgggctggacattggacttcctccgggagcggctgttgggctggatccaagaccagggtggttgggacggcctcctctcctactttgggacgcccacgtggcagaccgtgaccatctttgtggcgggagtgctcaccgcctcactcaccatctggaagaagatgggctgaggcccccagctgccttggactgtgtttttcctccataaattatggcatttttctgggaggggtggggattgggggacgtgggcatttttcttacttttgtaattattggggggtgtggggaagagtggtcttgagggggtaataaacctccttcgggac

SEQ ID NO: 237294 - DNA, 579 bp, Artificial Sequence
  derived and/or modified sequence
atggacggcagcggcgagcagcccagaggcggcggccccaccagcagcgagcagatcatgaagaccggcgccctgctgctgcagggcttcatccaggacagagccggcagaatgggcggcgaggcccccgagctggccctggaccccgtgccccaggacgccagcaccaagaagctgagcgagtgcctgaagagaatcggcgacgagctggacagcaacatggagctgcagagaatgatcgccgccgtggacaccgacagccccagagaggtgttcttcagagtggccgccgacatgttcagcgacggcaacttcaactggggcagagtggtggccctgttctacttcgccagcaagctggtgctgaaggccctgtgcaccaaggtgcccgagctgatcagaaccatcatgggctggaccctggacttcctgagagagagactgctgggctggatccaggaccagggcggctgggacggcctgctgagctacttcggcacccccacctggcagaccgtgaccatcttcgtggccggcgtgctgaccgccagcctgaccatctggaagaagatgggctag

SEQ ID NO: 237295 - protein, 143 aa, Artificial Sequence
  derived and/or modified sequence
MDGSGEQPRGGGPTSSEQIMKTGALLLQGMIAAVDTDSPREVFFRVAADMFSDGNFNWGRVVALFYFASKLVLKALCTKVPELIRTIMGWTLDFLRERLLGWIQDQGGWDGLLSYFGTPTWQTVTIFVAGVLTASLTIWKKMG

SEQ ID NO: 237296 - DNA, 432 bp, Artificial Sequence
  derived and/or modified sequence
atggatggatctggggagcagccccgcggcggcggtccgacctccagcgagcagattatgaagactggggccttgctcttacaaggcatgatcgccgctgtagataccgatagccctagagaggtcttttttagggtggctgccgatatgttcagtgatggaaacttcaattggggacgcgtcgtcgcactgttctactttgcaagtaaactggtgcttaaggcactttgcactaaggttcccgaactcattcggactattatgggatggacactggacttcctgcgagaacggctgctggggtggattcaggaccaaggggggtgggatggattactatcttacttcgggactcccacttggcagacagtcaccatattcgtggccggcgtgctgactgcctccctgacaatttggaagaaaatgggctag

SEQ ID NO: 237297 - DNA, 432 bp, Artificial Sequence
  derived and/or modified sequence
atggatggcagcggggagcagccccggggcggcggccccaccagcagcgagcagatcatgaagacaggagccctgctgctgcagggcatgattgctgctgtggacacagacagcccccgggaggtgttcttccgggtggccgctgacatgttcagtgatggcaacttcaactggggccgggtggtggccctcttctactttgccagcaagctggtgctgaaggccctgtgcaccaaggtgcctgagctgatccgcaccatcatgggctggaccctggacttcctgcgggagcggctgctgggctggatccaggaccagggcggctgggatggcctgctgagctacttcggcacccccacctggcagacagtgaccatctttgtggccggcgtgctgacagccagcctgaccatctggaagaagatgggctag

SEQ ID NO: 237298 - DNA, 432 bp, Artificial Sequence
  derived and/or modified sequence
atggacggcagcggcgagcagccccggggcggcggccccaccagctccgaacagattatgaagacaggcgctttgctgttgcaaggaatgatcgcagccgttgacaccgactccccaagggaggtattctttcgggtggccgcggatatgttctcagatggcaatttcaactggggcagggtcgtcgccctgttttattttgcttcaaagctggttttgaaagccctgtgtacaaaggtaccagaactgatccggactattatgggatggaccctggactttctgagggagcggctgctgggttggatccaagaccagggcggctgggatggtctgctgagttattttggtacccccacgtggcagacggttaccatattcgtggccggtgttttgactgccagtctgaccatctggaagaaaatgggatag

SEQ ID NO: 237299 - DNA, 432 bp, Artificial Sequence
  derived and/or modified sequence
atggatggctccggcgagcagccaagggggggagggccaaccagttctgagcagataatgaaaacaggcgctcttctgctgcagggcatgattgccgctgttgacacagactctcccagagaggtgtttttccgagtggccgctgacatgttttcagacgggaattttaattggggacgcgtagtggctctattttactttgccagcaagctggtcttgaaagctctgtgcacaaaggttcctgaactcattcggaccatcatggggtggacgttggacttcttaagggaacggctgctcggctggattcaggaccagggcggatgggatggcctcctgtcttattttgggacaccgacctggcagacagttacgatattcgtggccggagtcctgacagcatccctgaccatctggaagaagatgggatag

SEQ ID NO: 237300 - DNA, 433 bp, Artificial Sequence
  derived and/or modified sequence
atggacgggtccggggagcagcccagaggcggggggcccaccagctctgagcagatcatgaagacaggggcccttttgcttcaggggatgattgccgccgtggacacagactccccccgagaggtctttttccgagtggcagctgacatgttttctgacggcaacttcaactggggccgggttgtcgcccttttctactttgccagcaaactggtgctcaaggccctgtgcaccaaggtgccggaactgatcagaaccatcatgggctggacattggacttcctccgggagcggctgttgggctggatccaagaccagggtggttgggacggcctcctctcctactttgggacgcccacgtggcagaccgtgaccatctttgtggcgggagtgctcaccgcctcactcaccatctggaagaagatgggctgag

SEQ ID NO: 237301 - DNA, 432 bp, Artificial Sequence
  derived and/or modified sequence
atggacggcagcggcgagcagcccagaggcggcggccccaccagcagcgagcagatcatgaagaccggcgccctgctgctgcagggcatgatcgccgccgtggacaccgacagccccagagaggtgttcttcagagtggccgccgacatgttcagcgacggcaacttcaactggggcagagtggtggccctgttctacttcgccagcaagctggtgctgaaggccctgtgcaccaaggtgcccgagctgatcagaaccatcatgggctggaccctggacttcctgagagagagactgctgggctggatccaggaccagggcggctgggacggcctgctgagctacttcggcacccccacctggcagaccgtgaccatcttcgtggccggcgtgctgaccgccagcctgaccatctggaagaagatgggctag

SEQ ID NO: 237302 - protein, 179 aa, Artificial Sequence
  derived and/or modified sequence
MDGSGEQPRGGGPTSSEQIMKTGALLLQGFIQDRAGRMGGEAPELALDPVPQDASTKKLSECLKRIGDELDSNMELQRMIAAVDTDSPREVFFRVAADMFSDGNFNWGRVVALFYFASKLVLKALCTKVPELIRTIMGWTLDFLRERLLGWIQDQGGWTVTIFVAGVLTASLTIWKKMG

SEQ ID NO: 237303 - protein, 164 aa, Artificial Sequence
  derived and/or modified sequence
MDGSGEQPRGGGPTSSEQIMKTGALLLQGFIQDRAGRMGGEAPELALDPVPQDASTKKLSECLKRIGDELDSNMELQRMIAAVDTDSPREVFFRVAADMFSDGNFNWGRVVALFYFASKLVLKAGVKWRDLGSLQPLPPGFKRFTCLSIPRSWDYRPCAPRCRN

SEQ ID NO: 237304 - DNA, 540 bp, Artificial Sequence
  derived and/or modified sequence
atggacgggtctggcgagcagcccagagggggtggccctacatcatccgaacaaattatgaagacaggcgccctgctgctccagggatttatccaggaccgagcagggcgaatgggcggcgaggcccctgagcttgcgctggatcccgttcctcaggacgccagcaccaaaaagctcagcgagtgtctcaaaagaataggtgacgagctagactctaacatggaattgcagcggatgatagcagcagtcgacactgactcaccaagggaggttttcttccgcgtggcggccgacatgttttccgatggaaactttaactggggacgtgtagtcgcattattttatttcgcctccaaacttgtactcaaggccctatgcaccaaggtgcccgaattgatccgaacaatcatgggttggacactggatttcctcagggaaagactactgggctggattcaggatcaggggggctggacagttacaatttttgtggcaggcgtccttactgcaagcttgaccatatggaaaaagatgggatag

SEQ ID NO: 237305 - DNA, 495 bp, Artificial Sequence
  derived and/or modified sequence
atggacggtagcggcgagcagccacgggggggtggccctacctcctcagagcagataatgaagacaggcgctctgcttctgcagggattcatccaggaccgtgccgggaggatggggggtgaagcaccggaacttgcactagatccagttccgcaagacgcttctaccaagaaattgtccgagtgtctgaaaaggatcggggacgaattagactcaaatatggaattgcaaagaatgatcgcagccgttgacactgactcaccacgggaggtgtttttcagagtggcagctgacatgttcagtgacggcaacttcaattggggacgggtcgtagctctgttttatttcgcatctaagttagttctgaaggccggggtcaagtggagagaccttggctctttacagcccctcccacctggatttaagcggtttacatgcctttcaattccccggtcttgggattatcgcccatgtgcaccccgctgtcggaattag

SEQ ID NO: 237306 - DNA, 540 bp, Artificial Sequence
  derived and/or modified sequence
atggatggcagcggggagcagccccggggcggcggccccaccagcagcgagcagatcatgaagacaggagccctgctgctgcagggcttcatccaggacagagctggccgcatgggcggggaggcccctgagctggccctggaccctgtgccccaggatgccagcaccaagaagctgtctgaatgtctgaagagaattggagatgagctggacagcaacatggagctgcagaggatgattgctgctgtggacacagacagcccccgggaggtgttcttccgggtggccgctgacatgttcagtgatggcaacttcaactggggccgggtggtggccctcttctactttgccagcaagctggtgctgaaggccctgtgcaccaaggtgcctgagctgatccgcaccatcatgggctggaccctggacttcctgcgggagcggctgctgggctggatccaggaccagggcggctggacagtgaccatctttgtggccggcgtgctgacagccagcctgaccatctggaagaagatgggctag

SEQ ID NO: 237307 - DNA, 495 bp, Artificial Sequence
  derived and/or modified sequence
atggatggcagcggggagcagccccggggcggcggccccaccagcagcgagcagatcatgaagacaggagccctgctgctgcagggcttcatccaggacagagctggccgcatgggcggggaggcccctgagctggccctggaccctgtgccccaggatgccagcaccaagaagctgtctgaatgtctgaagagaattggagatgagctggacagcaacatggagctgcagaggatgattgctgctgtggacacagacagcccccgggaggtgttcttccgggtggccgctgacatgttcagtgatggcaacttcaactggggccgggtggtggccctcttctactttgccagcaagctggtgctgaaggccggcgtgaagtggagggacctgggcagcctgcagcccctgcccccaggcttcaagcgcttcacctgcctgagcatccccaggtcctgggactaccggccctgtgccccccgctgcagaaattag

SEQ ID NO: 237308 - DNA, 540 bp, Artificial Sequence
  derived and/or modified sequence
atggacggcagcggcgagcagccccggggcggcggccccaccagcagcgagcagatcatgaagactggtgctcttttgctacaggggttcatccaagatagggcaggcagaatggggggtgaggcgcctgagctcgcactggatccggtgccccaagatgcatcaacgaagaaattgtctgagtgtctgaaaagaatcggggatgaactagactcaaatatggaactacagcgaatgatcgcagctgttgacacagattctccacgcgaggtcttttttcgagtcgcagcggatatgttctccgacggcaacttcaattggggccgggtagtggctctattttacttcgcaagcaagttggtgctaaaggctttgtgtaccaaggtgcccgagttgattaggacaattatgggatggacgctagatttcctgagagagaggttgctgggctggatccaggaccagggtgggtggaccgtgaccatttttgtcgctggagtccttaccgcctccctgactatttggaaaaagatggggtag

SEQ ID NO: 237309 - DNA, 495 bp, Artificial Sequence
  derived and/or modified sequence
atggacggcagcggcgagcagccccggggcggcggccccaccagctcggagcagataatgaagacaggtgcattgctgctgcagggatttattcaggatagggcaggcagaatgggaggtgaagcccctgagctggctctggatccagtcccccaagacgcatctacaaagaagctgagtgaatgcctgaaaaggattggtgacgaactagatagcaatatggagttgcagcggatgatagcagctgtggatactgatagccccagggaagtgtttttccgggtggcggctgatatgtttagcgacggcaactttaactggggtagagttgtcgctctcttctattttgccagtaagctggtgctgaaagcgggtgttaagtggcgagatttaggaagtttgcagcctctgccaccgggctttaaacgcttcacatgcctgagcatcccgagatcttgggactacaggccttgcgcaccccgttgtaggaactag

SEQ ID NO: 237310 - DNA, 540 bp, Artificial Sequence
  derived and/or modified sequence
atggatggctctggtgagcagcccagaggcggaggcccaacatcatcagagcagatcatgaagactggagcactgctactgcagggcttcattcaggatcgcgctgggcgaatgggcggagaggcccctgagctggcgctggacccggtgccgcaggatgcgagcacaaagaaactctcagagtgcctgaagagaattggagacgaactggactcaaatatggagctgcaacgcatgattgccgcagtggatacggattccccacgggaggtttttttccgggtggccgcagatatgttctccgatggaaacttcaattggggccgagtggttgccctcttctattttgcgagcaaactcgtcttgaaggctttatgcaccaaggtgcccgagctgatccgcaccataatgggctggactctggattttctccgggaaagactgttagggtggatccaggatcaggggggttggaccgtgacgatcttcgtggccggagtgttgactgctagtctcaccatttggaagaagatgggctag

SEQ ID NO: 237311 - DNA, 495 bp, Artificial Sequence
  derived and/or modified sequence
atggacggcagcggcgaacagcccagagggggaggtcccacctcgagtgaacagattatgaagacaggcgctctgctcctccaggggtttatccaggatagagccggaagaatgggtggtgaagcacccgagcttgccctcgaccccgttcctcaagatgctagcaccaagaagctctcggaatgcctgaagcgtattggcgatgaactcgatagcaatatggaactccaaaggatgatcgctgccgtcgataccgattcgccgagggaagtgttctttcgggtcgccgcagatatgttcagtgacggcaattttaattggggcagggtggtggctctcttctactttgcctccaagcttgtactaaaagccggtgtgaaatggcgggacctgggatctttgcagcctttacctccaggctttaaaaggttcacttgtttatcaatccccagatcatgggattaccggccatgcgctcctcggtgtaggaactag

SEQ ID NO: 237312 - DNA, 540 bp, Artificial Sequence
  derived and/or modified sequence
atggacgggtccggggagcagcccagaggcggggggcccaccagctctgagcagatcatgaagacaggggcccttttgcttcagggtttcatccaggatcgagcagggcgaatggggggggaggcacccgagctggccctggacccggtgcctcaggatgcgtccaccaagaagctgagcgagtgtctcaagcgcatcggggacgaactggacagtaacatggagctgcagaggatgattgccgccgtggacacagactccccccgagaggtctttttccgagtggcagctgacatgttttctgacggcaacttcaactggggccgggttgtcgcccttttctactttgccagcaaactggtgctcaaggccctgtgcaccaaggtgccggaactgatcagaaccatcatgggctggacattggacttcctccgggagcggctgttgggctggatccaagaccagggtggttggaccgtgaccatctttgtggcgggagtgctcaccgcctcactcaccatctggaagaagatgggctga

SEQ ID NO: 237313 - DNA, 540 bp, Artificial Sequence
  derived and/or modified sequence
atggacggcagcggcgagcagcccagaggcggcggccccaccagcagcgagcagatcatgaagaccggcgccctgctgctgcagggcttcatccaggacagagccggcagaatgggcggcgaggcccccgagctggccctggaccccgtgccccaggacgccagcaccaagaagctgagcgagtgcctgaagagaatcggcgacgagctggacagcaacatggagctgcagagaatgatcgccgccgtggacaccgacagccccagagaggtgttcttcagagtggccgccgacatgttcagcgacggcaacttcaactggggcagagtggtggccctgttctacttcgccagcaagctggtgctgaaggccctgtgcaccaaggtgcccgagctgatcagaaccatcatgggctggaccctggacttcctgagagagagactgctgggctggatccaggaccagggcggctggaccgtgaccatcttcgtggccggcgtgctgaccgccagcctgaccatctggaagaagatgggctag

SEQ ID NO: 237314 - DNA, 495 bp, Artificial Sequence
  derived and/or modified sequence
atggacggcagcggcgagcagcccagaggcggcggccccaccagcagcgagcagatcatgaagaccggcgccctgctgctgcagggcttcatccaggacagagccggcagaatgggcggcgaggcccccgagctggccctggaccccgtgccccaggacgccagcaccaagaagctgagcgagtgcctgaagagaatcggcgacgagctggacagcaacatggagctgcagagaatgatcgccgccgtggacaccgacagccccagagaggtgttcttcagagtggccgccgacatgttcagcgacggcaacttcaactggggcagagtggtggccctgttctacttcgccagcaagctggtgctgaaggccggcgtgaagtggagagacctgggcagcctgcagcccctgccccccggcttcaagagattcacctgcctgagcatccccagaagctgggactacagaccctgcgcccccagatgcagaaactag

SEQ ID NO: 237315 - protein, 418 aa, Artificial Sequence
  derived and/or modified sequence
MHPRRPDGFDGLGYRGGARDEQGFGGAFPARSFSTGSDLGHWVTTPPDIPGSRNLHWGEKSPPYGVPTTSTPYEGPTEEPFSSGGGGSVQGQSSEQLNRFAGFGIGLASLFTENVLAHPCIVLRRQCQVNYHAQHYHLTPFTVINIMYSFNKTQGPRALWKGMGSTFIVQGVTLGAEGIISEFTPLPREVLHKWSPKQIGEHLLLKSLTYVVAMPFYSASLIETVQSEIIRDNTGILECVKEGIGRVIGMGVPHSKRLLPLLSLIFPTVLHGVLHYIISSVIQKFVLLILKRKTYNSHLAESTSPVQSMLDAYFPELIANFAASLCSDVILYPLETVLHRLHIQGTRTIIDNTDLGYEVLPINTQYEGMRDCINTIRQEEGVFGFYKGFGAVIIQYTLHAAVLQITKIIYSTLLQNNI

SEQ ID NO: 237316 - DNA, 1257 bp, Artificial Sequence
  derived and/or modified sequence
atgcacccccgcagaccagatggctttgacggcttgggctaccgcgggggcgcgagagacgagcaaggttttggcggcgctttcccggctcggtccttttccactggttctgacctcggacactgggtgaccacgcccccggacatccccggatccaggaacctgcattggggggagaagtcacctccatacggcgtacccaccacttcaaccccttacgaaggcccaaccgaggagcctttcagcagtggcggtgggggaagcgttcagggtcaaagcagcgagcaactaaataggtttgctggttttggaattggactggcatcactcttcactgagaacgtactagcgcatccatgcatagtgctcagacgacagtgccaggtaaattatcatgcccagcactaccacttgacacccttcacagtgatcaacatcatgtacagctttaacaagactcaaggccctcgcgccctgtggaaaggcatgggatctacgttcattgtccaaggcgtaacactcggagcagaaggtatcatctcagaattcaccccactaccccgcgaggtcttgcacaagtggtcaccgaaacagatcggcgagcacctgctgctcaagagcctgacttatgtcgtggcaatgccattttacagcgcctctctcattgaaacggtgcagtctgaaatcattcgagacaacaccggcattctcgaatgtgtcaaggaaggcatcgggagggtgatcggcatgggggtgcctcatagcaagagattgctgcctctcttgtccttaatatttcctacagttctccatggcgttcttcactatatcatcagcagtgtcattcagaagttcgtgcttttgattctcaagcgcaagacatacaattcccacctggccgagtcgacatcccctgttcagtctatgttagacgcatactttcctgagttaatcgcaaacttcgctgcctcactgtgttccgatgtgatcttgtacccacttgagacggtcctccaccgcctgcatattcaggggacgagaaccatcatcgacaatactgatttgggttacgaagttttgcctatcaatacccagtacgaagggatgagagattgtatcaatactattcgccaggaggaaggcgtgttcggtttctataaggggttcggtgccgttatcatccagtataccctgcacgctgccgtgttacaaataacgaagatcatatacagcacactgctgcaaaataacatttag

SEQ ID NO: 237317 - DNA, 1257 bp, Artificial Sequence
  derived and/or modified sequence
atgcacccccggcggccagatggctttgatggcctgggctaccggggcggggccagagatgagcagggctttggaggagccttccctgcccggagcttcagcactggaagtgacctgggccactgggtgaccaccccaccagacatccctggcagcaggaacctgcactggggcgagaagagccccccctacggcgtgcccaccaccagcaccccctatgagggccccacagaggagcccttcagcagcggcggcggcggctctgtgcagggccagagcagcgagcagctgaacagatttgctggctttggaattggcctggccagcctcttcacagaaaatgtgctggcccacccctgcatcgtgctgcggcggcagtgccaggtgaactaccacgcccagcactaccacctgacccccttcaccgtcatcaacatcatgtacagcttcaacaagacccagggcccccgggccctgtggaagggcatgggcagcaccttcatcgtgcagggcgtgaccctgggcgctgagggcatcatcagcgagttcacccccctgccccgggaggtgctgcacaagtggagccccaagcagattggagagcacctgctgctgaagagcctgacctacgtggtggccatgcccttctacagcgccagcctcatcgagaccgtgcagagcgagatcatccgggacaacacaggcatcctggagtgtgtgaaggagggcatcggccgggtcatcggcatgggcgtgccccacagcaagaggctgctgcccctgctgagcctcatcttccccaccgtgctgcatggagtgctgcactacatcatcagcagcgtcatccagaagtttgtgctgctgatcctgaagaggaagacctacaacagccacctggccgagagcaccagccctgtgcagagcatgctggatgcctacttccctgagctgattgccaactttgctgccagcctgtgcagtgatgtgatcctgtaccccctggagaccgtgctgcaccggctgcacatccagggcaccaggaccatcatcgacaacacagacctgggctatgaggtgctgcccatcaacacccagtatgagggcatgagggactgcatcaacaccatccggcaggaggagggcgtgtttggcttctacaagggctttggagctgtgatcatccagtacaccctgcacgccgctgtgctgcagatcaccaagatcatctacagcaccctgctgcagaacaacatctag

SEQ ID NO: 237318 - DNA, 1257 bp, Artificial Sequence
  derived and/or modified sequence
atgcacccccggcggcccgacggcttcgacggcctgggctaccgggggggtgcgcgggatgagcagggtttcggtggagcatttcctgctcggtctttttctaccggatcagacttaggtcactgggttactacaccccctgacatcccgggatcacggaatcttcactggggagagaaatcccctccctatggcgtccccaccacaagcaccccatatgagggcccaactgaggagccattctcaagtggcggcggaggctccgtgcagggtcagtcctctgagcagctgaaccgcttcgccggtttcggtatcggtctggctagtctgttcacagagaacgtgcttgcccatccatgtattgtgcttcgtcgacaatgccaggtgaactatcatgcccaacattatcacctgactcctttcacagtcattaacattatgtactcttttaacaaaactcagggcccccgggcgctctggaaaggcatggggtccaccttcatagtccagggcgtgacgctgggcgctgaaggaattatcagtgaattcacacctctccctcgagaggtcctacacaaatggtcacccaaacagataggcgaacatttactacttaaatcattaacatacgtagtggccatgcctttttatagcgccagtcttatagagactgttcagtcggagatcattcgagacaatactgggatcctggagtgcgttaaggagggaatcggcagggtgatcggaatgggagtccctcattccaaaaggctgttgccccttctcagtctcatcttccctacagtcctgcacggggttctccactacattatctcctcagtgatccagaaatttgttttgctaatcctgaaacggaagacttacaattcccacctcgcggagagcacaagccccgtgcagagcatgcttgatgcctattttcctgagctgattgcaaactttgccgcgtcgttgtgctcagacgtgattctgtatccgttggagactgtactgcaccggctccacatccagggcacccgcactataatcgacaatactgacctcggatatgaagttcttccgattaatacacagtacgagggcatgagggactgtatcaacacaattcgtcaagaggagggggtatttggcttctataaaggatttggcgccgtgattattcagtatacgttacatgcggcagtactccaaattaccaaaataatttactcgacgctgttgcagaataacatctag

SEQ ID NO: 237319 - DNA, 1257 bp, Artificial Sequence
  derived and/or modified sequence
atgcatccccgacgacccgatggctttgacggccttggatatcgcggaggggctagggatgagcaaggctttggcggagcgttccccgctagatctttctccaccgggagcgacctgggtcactgggtaactacgccccctgacatccctggctcccgcaacttacactggggagaaaagtcccctccctatggtgttccgactacttcaacgccttacgagggacccacagaagagccattctcctccggcggtgggggatccgtccaggggcagagctcagaacaactaaatagatttgcaggctttggcataggcctagcaagtctctttacggaaaatgttcttgcccatccatgcatcgttttgcgccgacaatgtcaggttaactaccacgcccaacattatcatctgacacccttcacagttatcaatatcatgtatagttttaacaaaacacagggcccacgcgctctgtggaaaggaatggggtctacatttattgttcagggggtaacattgggcgctgagggcatcattagtgaatttactcctctacctcgcgaggtgttgcataagtggagcccgaagcagatcggcgagcacctcttgttgaaatcacttacttacgtagtggcaatgcctttttacagtgcaagcctgattgagacagtccagagcgaaataattagggataatactgggattctggagtgcgtcaaagaaggcataggaagggttataggaatgggtgtgcctcactctaagagactgctccctttgttgtctctcatcttccctacagtattgcatggggtgctccattatattatttcttcagtcatccagaaattcgtactcctgatcctgaaacgcaagacatataattcgcacttggcagagtccacctctcctgtgcaatctatgctggatgcatactttcccgagctaatcgccaactttgccgcttccctgtgttctgatgttattctgtacccactggagaccgttttacacaggctgcatattcaaggcacacgcaccatcatcgacaacacagatctgggctacgaggtactgcccattaacactcagtatgaggggatgagggattgtatcaataccatccgccaggaggagggagtcttcgggttctacaaagggttcggagccgtgatcatccagtataccttacatgctgctgttcttcagattaccaagatcatttacagcacccttcttcagaataacatctag

SEQ ID NO: 237320 - DNA, 2385 bp, Artificial Sequence
  derived and/or modified sequence
acttccggttgtcagaatttacccctgacgcggcggcggccgacgggaagctgtgtgtgcttaggtcgtggtggccccggtggtggtgggctccgggcgggctcgcgtcatcctgcccccgctgcgatgcatccgcggcgcccggacggatttgatggcttgggctaccggggtggtgcccgggacgagcagggctttggcggcgccttccctgcaaggtccttcagcaccgggtcggacctgggccactgggtgacgactcccccagatatccccggcagccgcaacctgcactggggcgagaagagcccgccctacggcgtgcccaccacctccaccccgtacgaaggccccacggaggaacccttttccagtggcggcggcggcagtgtgcaggggcagagcagtgaacagctgaatagatttgctggatttggtattggacttgcaagtctctttacagaaaatgtattggcacatccttgcattgttctacgccgccaatgtcaggttaattaccatgctcagcattaccatctcactccatttacagtcatcaatattatgtacagtttcaacaaaactcagggacctagagccctgtggaaaggaatgggaagtacatttattgtccagggagtcacacttggagcagaaggcataattagtgaatttacacctttgccaagggaggttttacataaatggagtcctaaacaaataggagaacaccttctactgaaatccctaacttacgtggtggcaatgcctttttattcagcaagtctgattgaaacagtgcagagtgagataattcgagataatactggcattttggagtgtgttaaagaaggaattggaagagtgataggcatgggagtgcctcatagcaaacgacttcttccgcttctttccttgatcttccctacggtgcttcatggagttcttcattacatcatcagctcagttattcagaagtttgtcctactaattctaaagagaaagacttacaatagccacctagctgagagcactagccctgtgcagagtatgttggatgcttattttccagaacttattgctaactttgctgccagtctttgttctgacgttatactttacccattggaaacagttttgcaccgccttcacattcaaggaacacgcacaataattgacaatacagaccttggctatgaagtgcttccaattaatacacaatatgagggaatgagagactgtatcaataccataaggcaggaggaaggagtgtttggtttttataaagggtttggtgctgttataatacagtacacactgcatgcagctgttttacagattaccaaaattatttactctacacttcttcaaaataacatttgagatttaggttccttcactgagtagtctggaagatataatctggataatttgctatgaagttatgagggatacaagtgaaatactggggaagaaaatggattggaaagtaaaattggtactaaagcccatactgattatcttgactttgttttttaaggcataggtatatattttggatcaaaatccttccaaatttgaaaactcaataaaaataacacttattaaattctagttagtgtagcactcatgctgaagtaaacatgatcgtaggcagaagcaaaattttattataaaatctaaaacaaaactttatagagttgaatctattccatctgacttcaatatttgccaaacgtttattttacctcctagattgatgttggtatagtatccttaatacagtgtagtatattaatgtccttaatacaatcaggaggtttttacctttaagcaaataaattatgtcattattgaaaaagacttaagggatgattagacttggcaatctgtaagcaggagtataaatgttttaaattgcattgtccctatgtaactatcttaatggctatatatatgtattttataaagccatttatgtatacacatgtaacttggaatttccttcatccctacacattttctacacttacatcaccttattgcataaaacaaagtcacgcgctttctgcttgaacatcaaaatatcaaaaaccaaggtacccaaaagatacaagtcagagacaacatccttgtccatatccaaacccagtgtttcagtgctagcaacttaatttctcatacatttatagagtttggtttgctttgctagttgtgtgaatcattgggctgtttttagagccactgttaagagagaatataaaataatcatgacaattactactgtttccacatttacaaattgtgtacttaaatgaacctcatttcccttttatttctgaatggcttgtctgagaggaaacaaaattaaaattcatctgggaa

SEQ ID NO: 237321 - DNA, 2624 bp, Artificial Sequence
  derived and/or modified sequence
gacgcggcggcggccgacgggaagctgtgtgtgcttaggtcgtggtggccccggtggtggtgggctccgggcgggctcgcgtcatcctgcccccgctgcgatgcatccgcggcgcccgggacgagcagggctttggcggcgccttccctgcaaggtccttcagcaccgggtcggacctgggccactgggtgacgactcccccagatatccccggcagccgcaacctgcactggggcgagaagagcccgccctacggcgtgcccaccacctccaccccgtacgaaggccccacggaggaacccttttccagtggcggcggcggcagtgtgcaggggcagagcagtgaacagctgaatagatttgctggatttggtattggacttgcaagtctctttacagaaaatgtattggcacatccttgcattgttctacgccgccaatgtcaggttaattaccatgctcagcattaccatctcactccatttacagtcatcaatattatgtacagtttcaacaaaactcagggacctagagccctgtggaaaggaatgggaagtacatttattgtccagggagtcacacttggagcagaaggcataattagtgaatttacacctttgccaagggaggttttacataaatggagtcctaaacaaataggagaacaccttctactgaaatccctaacttacgtggtggcaatgcctttttattcagcaagtctgattgaaacagtgcagagtgagataattcgagataatactggcattttggagtgtgttaaagaaggaattggaagagtgataggcatgggagtgcctcatagcaaacgacttcttccgcttctttccttgatcttccctacggtgcttcatggagttcttcattacatcatcagctcagttattcagaagtttgtcctactaattctaaagagaaagacttacaatagccacctagctgagagcactagccctgtgcagagtatgttggatgcttattttccagaacttattgctaactttgctgccagtctttgttctgacgttatactttacccattggaaacagttttgcaccgccttcacattcaaggaacacgcacaataattgacaatacagaccttggctatgaagtgcttccaattaatacacaatatgagggaatgagagactgtatcaataccataaggcaggaggaaggagtgtttggtttttataaagggtttggtgctgttataatacagtacacactgcatgcagctgttttacagattaccaaaattatttactctacacttcttcaaaataacatttgagatttaggttccttcactgagtagtctggaagatataatctggataatttgctatgaagttatgagggatacaagtgaaatactggggaagaaaatggattggaaagtaaaattggtactaaagcccatactgattatcttgactttgttttttaaggcataggtatatattttggatcaaaatccttccaaatttgaaaactcaataaaaataacacttattaaattctagttagtgtagcactcatgctgaagtaaacatgatcgtaggcagaagcaaaattttattataaaatctaaaacaaaactttatagagttgaatctattccatctgacttcaatatttgccaaacgtttattttacctcctagattgatgttggtatagtatccttaatacagtgtagtatattaatgtccttaatacaatcaggaggtttttacctttaagcaaataaattatgtcattattgaaaaagacttaagggatgattagacttggcaatctgtaagcaggagtataaatgttttaaattgcattgtccctatgtaactatcttaatggctatatatatgtattttataaagccatttatgtatacacatgtaacttggaatttccttcatccctacacattttctacacttacatcaccttattgcataaaacaaagtcacgcgctttctgcttgaacatcaaaatatcaaaaaccaaggtacccaaaagatacaagtcagagacaacatccttgtccatatccaaacccagtgtttcagtgctagcaacttaatttctcatacatttatagagtttggtttgctttgctagttgtgtgaatcattgggctgtttttagagccactgttaagagagaatataaaataatcatgacaattactactgtttccacatttacaaattgtgtacttaaatgaacctcatttcccttttatttctgaatggcttgtctgagaggaaacaaaattaaaattcatctgggaatttgtgcctcttgtctagtatatagtcaccactaaataatggcttccgtttttattttctttcaggttttgctttaaattttgttttccaaaatagatgtacgtggagggaaaagcaattattcttatcaccttttatttaaacttctttagatgaatactgaagaaaaatccaaaccttaaaggaaatgtgcccttgtattttatgggtgaggggaaaaagtacatttgtacatttcaacatataataagcaaaaaaattactaatcagtttaataaaaacattttgtctattcctaaatgt

SEQ ID NO: 237322 - DNA, 1257 bp, Artificial Sequence
  derived and/or modified sequence
atgcaccccagaagacccgacggcttcgacggcctgggctacagaggcggcgccagagacgagcagggcttcggcggcgccttccccgccagaagcttcagcaccggcagcgacctgggccactgggtgaccaccccccccgacatccccggcagcagaaacctgcactggggcgagaagagccccccctacggcgtgcccaccaccagcaccccctacgagggccccaccgaggagcccttcagcagcggcggcggcggcagcgtgcagggccagagcagcgagcagctgaacagattcgccggcttcggcatcggcctggccagcctgttcaccgagaacgtgctggcccacccctgcatcgtgctgagaagacagtgccaggtgaactaccacgcccagcactaccacctgacccccttcaccgtgatcaacatcatgtacagcttcaacaagacccagggccccagagccctgtggaagggcatgggcagcaccttcatcgtgcagggcgtgaccctgggcgccgagggcatcatcagcgagttcacccccctgcccagagaggtgctgcacaagtggagccccaagcagatcggcgagcacctgctgctgaagagcctgacctacgtggtggccatgcccttctacagcgccagcctgatcgagaccgtgcagagcgagatcatcagagacaacaccggcatcctggagtgcgtgaaggagggcatcggcagagtgatcggcatgggcgtgccccacagcaagagactgctgcccctgctgagcctgatcttccccaccgtgctgcacggcgtgctgcactacatcatcagcagcgtgatccagaagttcgtgctgctgatcctgaagagaaagacctacaacagccacctggccgagagcaccagccccgtgcagagcatgctggacgcctacttccccgagctgatcgccaacttcgccgccagcctgtgcagcgacgtgatcctgtaccccctggagaccgtgctgcacagactgcacatccagggcaccagaaccatcatcgacaacaccgacctgggctacgaggtgctgcccatcaacacccagtacgagggcatgagagactgcatcaacaccatcagacaggaggagggcgtgttcggcttctacaagggcttcggcgccgtgatcatccagtacaccctgcacgccgccgtgctgcagatcaccaagatcatctacagcaccctgctgcagaacaacatctag

SEQ ID NO: 237323 - protein, 664 aa, Artificial Sequence
  derived and/or modified sequence
MDSNHQSNYKLSKTEKKFLRKQIKAKHTLLRHEGIETVSYATQSLVVANGGLGNGVSRNQLLPVLEKCGLVDALLMPPNKPYSFARYRTTEESKRAYVTLNGKEVVDDLGQKITLYLNFVEKVQWKELRPQALPPGLMVVEEIISSEEEKMLLESVDWTEDTDNQNSQKSLKHRRVKHFGYEFHYENNNVDKDKPLSGGLPDICESFLEKWLRKGYIKHKPDQMTINQYEPGQGIPAHIDTHSAFEDEIVSLSLGSEIVMDFKHPDGIAVPVMLPRRSLLVMTGESRYLWTHGITCRKFDTVQASESLKSGIITSDVGDLTLSKRGLRTSFTFRKVRQTPCNCSYPLVCDSQRKETPPSFPESDKEASRLEQEYVHQVYEEIAGHFSSTRHTPWPHIVEFLKALPSGSIVADIGCGNGKYLGINKELYMIGCDRSQNLVDICRERQFQAFVCDALAVPVRSGSCDACISIAVIHHFATAERRVAALQEIVRLLRPGGKALIYVWAMEQEYNKQKSKYLRGNRNSQGKKEEMNSDTSVQRSLVEQMRDMGSRDSASSVPRINDSQEGGCNSRQVSNSKLPVHVNRTSFYSQDVLVPWHLKGNPDKGKPVEPFGPIGSQDPSPVFHRYYHVFREGELEGACRTVSDVRILQSYYDQGNWCVILQKA

SEQ ID NO: 237324 - protein, 452 aa, Artificial Sequence
  derived and/or modified sequence
MMGCFALQTVDTELTADSVEWCPLQGCRHLLACGTYQLRRPEDRPAGPQNKGGMEVKEPQVRLGRLFLYSFNDNNSIHPLVEVQRKDTSAILDMKWCHIPVAGHALLGLADASGSIQLLRLVESEKSHVLEPLSSLALEEQCLALSLDWSTGKTGRAGDQPLKIISSDSTGQLHLLMVNETRPRLQKVASWQAHQFEAWIAAFNYWHPEIVYSGGDDGLLRGWDTRVPGKFLFTSKRHTMGVCSIQSSPHREHILATGSYDEHILLWDTRNMKQPLADTPVQGGVWRIKWHPFHHHLLLAACMHSGFKILNCQKAMEERQEATVLTSHTLPDSLVYGADWSWLLFRSLQRAPSWSFPSNLGTKTADLKGASELPTPCHECREDNDGEGHARPQSGMKPLTEGMRKNGTWLQATAATTRDCGVNPEEADSAFSLLATCSFYDHALHLWEWEGN

SEQ ID NO: 237325 - DNA, 1359 bp, Artificial Sequence
  derived and/or modified sequence
atgatgggctgcttcgccctgcagaccgtggacaccgagctgaccgccgacagcgtggagtggtgccccctgcagggctgcagacacctgctggcctgcggcacctaccagctgagaagacccgaggacagacccgccggcccccagaacaagggcggcatggaggtgaaggagccccaggtgagactgggcagactgttcctgtacagcttcaacgacaacaacagcatccaccccctggtggaggtgcagagaaaggacaccagcgccatcctggacatgaagtggtgccacatccccgtggccggccacgccctgctgggcctggccgacgccagcggcagcatccagctgctgagactggtggagagcgagaagagccacgtgctggagcccctgagcagcctggccctggaggagcagtgcctggccctgagcctggactggagcaccggcaagaccggcagagccggcgaccagcccctgaagatcatcagcagcgacagcaccggccagctgcacctgctgatggtgaacgagaccagacccagactgcagaaggtggccagctggcaggcccaccagttcgaggcctggatcgccgccttcaactactggcaccccgagatcgtgtacagcggcggcgacgacggcctgctgagaggctgggacaccagagtgcccggcaagttcctgttcaccagcaagagacacaccatgggcgtgtgcagcatccagagcagcccccacagagagcacatcctggccaccggcagctacgacgagcacatcctgctgtgggacaccagaaacatgaagcagcccctggccgacacccccgtgcagggcggcgtgtggagaatcaagtggcaccccttccaccaccacctgctgctggccgcctgcatgcacagcggcttcaagatcctgaactgccagaaggccatggaggagagacaggaggccaccgtgctgaccagccacaccctgcccgacagcctggtgtacggcgccgactggagctggctgctgttcagaagcctgcagagagcccccagctggagcttccccagcaacctgggcaccaagaccgccgacctgaagggcgccagcgagctgcccaccccctgccacgagtgcagagaggacaacgacggcgagggccacgccagaccccagagcggcatgaagcccctgaccgagggcatgagaaagaacggcacctggctgcaggccaccgccgccaccaccagagactgcggcgtgaaccccgaggaggccgacagcgccttcagcctgctggccacctgcagcttctacgaccacgccctgcacctgtgggagtgggagggcaactag

SEQ ID NO: 237326 - DNA, 1359 bp, Artificial Sequence
  derived and/or modified sequence
atgatgggctgtttcgctctgcaaaccgtcgacacagagttgacagccgactccgttgagtggtgtccactgcaggggtgccgccacctgctagcctgcggtacttatcagctcagacggccggaggacaggcccgcaggaccacagaataagggaggcatggaagtcaaggagcctcaggtccggcttggccgtctctttttatattctttcaatgataacaacagtattcatcccctggtggaggtacagcgtaaggacaccagcgccatcctcgacatgaaatggtgtcacattccagtagctggacatgccctgctggggctggccgacgctagcggatctatccaactccttaggctggttgagtctgagaagagccatgtgttggaacctctcagttcactcgcccttgaggagcaatgcttagcactctctctggattggtcaaccggaaagaccgggcgagccggcgaccagccattgaaaataatttcctccgatagcacagggcagctgcatctcttaatggtgaatgagaccaggccacgccttcaaaaagtggccagctggcaggcacatcagtttgaagcttggatagctgcattcaattactggcaccctgagattgtttactctgggggcgacgacggtctgctgcggggctgggatactagagttcctggcaagttcctgttcacttctaagcgccacactatgggcgtctgttctattcagtcttctccgcaccgggagcatatcttggccactggatcatacgatgaacacatcctgctctgggatacccggaacatgaagcaacccttggccgatacccctgtgcaaggtggcgtctggcgcataaagtggcacccttttcaccatcacctgctcctggcagcctgcatgcattccggttttaaaattctgaactgccagaaagcgatggaagagaggcaggaagccaccgtcttaacctctcataccctgcctgactccttggtctatggagccgactggtcttggcttctgtttagaagcctgcagcgggctccctcgtggtctttcccttccaatctaggtaccaagactgctgacctcaagggtgcgagtgaactcccgaccccttgccacgagtgtcgcgaagataatgatggtgagggccatgcccgtccgcagtccggcatgaagcccctgactgaaggaatgcggaagaatgggacttggctgcaggcaacggcagcaacaacccgcgattgcggcgtgaaccccgaggaagcggactcagccttctctctgctagctacctgttcattttatgaccacgcactacacctgtgggaatgggaaggtaattag

SEQ ID NO: 237327 - DNA, 1359 bp, Artificial Sequence
  derived and/or modified sequence
atgatgggctgctttgccctgcagacagtggacacagagctgacagctgacagcgtggagtggtgccccctgcagggctgccgccacctgctggcctgtggcacctaccagctgcggcggcctgaggacaggcctgctggcccccagaacaagggcggcatggaggtgaaggagccccaggtgcggctgggccgcctcttcctgtacagcttcaatgacaacaacagcatccaccccctggtggaggtgcagaggaaggacaccagcgccatcctggacatgaagtggtgccacatccctgtggccggccacgccctgctgggcctggctgatgccagcggcagcatccagctgctgcggctggtggagagcgagaagagccacgtgctggagcccctgagcagcctggccctggaggagcagtgcctggccctgagcctggactggagcacaggcaagacaggccgggccggggaccagcccctgaagatcatcagcagtgacagcacaggccagctgcacctgctgatggtgaatgagacccggccccggctgcagaaggtggcctcctggcaggcccaccagtttgaggcctggattgctgccttcaactactggcaccctgagatcgtgtacagcggaggagatgatggcctgctgcggggctgggacaccagggtgcctgggaagttcctgttcaccagcaagaggcacaccatgggcgtgtgcagcatccagagcagcccccaccgggagcacatcctggccaccggcagctatgatgagcacatcctgctgtgggacaccaggaacatgaagcagcccctggccgacacccctgtgcagggcggcgtgtggaggatcaagtggcaccccttccaccaccacctgctgctggccgcctgcatgcacagcggcttcaagatcctgaactgccagaaggccatggaggagcggcaggaggccaccgtgctgaccagccacaccctgcctgacagcctggtgtatggagctgactggagctggctgctcttccgcagcctgcagagggcccccagctggagcttccccagcaacctgggcaccaagacagctgacctgaagggggccagcgagctgcccaccccctgccatgaatgtcgggaggacaatgatggagagggccacgcccggccccagagcggcatgaagcccctgacagagggcatgaggaagaatggcacctggctgcaggccacagctgccaccacccgggactgtggggtgaaccctgaggaggccgacagcgccttcagcctgctggccacctgcagcttctatgaccacgccctgcacctgtgggagtgggagggcaactag

SEQ ID NO: 237328 - DNA, 1359 bp, Artificial Sequence
  derived and/or modified sequence
atgatgggctgcttcgccctgcagaccgtggacaccgagctgaccgccgatagcgtagagtggtgccctttacagggatgccgtcacctgttggcatgcggaacttatcagttgagaagaccagaggatagacccgctggaccacaaaacaaaggggggatggaggttaaggagcctcaagtgcgactcggcaggctgttcctctatagcttcaacgacaataactcaattcatccactagtggaggtgcagcggaaggatacttctgcaattcttgacatgaagtggtgccacattcccgttgcaggccacgcgctgcttggactggccgatgcctcaggatcaatccaactccttcggttagttgagagcgaaaagtcacatgtcctcgagccactctcctctcttgcattggaggagcaatgtttggctctgagtctagactggagcacgggtaagaccggccgggcgggcgatcagcctctaaaaatcatatcaagtgacagcaccggacagcttcaccttctcatggttaacgaaacaagacctagactccagaaggtcgcatcgtggcaggctcaccaattcgaagcttggatcgcagccttcaactactggcaccccgaaatcgtgtactccggcggagacgatgggttgctccggggatgggataccagagtgcctggtaagtttctttttaccagtaagcggcacacaatgggggtgtgcagcatccagagtagcccacaccgtgaacacattttggccaccggctcctacgatgagcacattctactgtgggatacacggaacatgaagcaaccactcgccgacacgcctgttcaggggggtgtgtggcggatcaaatggcatccctttcatcaccatctgctcctcgctgcgtgcatgcacagcggatttaaaatcctgaactgccagaaggccatggaggaacgccaggaggctacagttctgacttcccatacactccccgactcccttgtgtatggcgctgattggagctggctcctgttccgcagcctgcagagggccccatcctggtcgtttccttcgaacttgggaaccaagactgcggacttaaagggggcaagtgaattgccaactccttgtcacgaatgccgggaggataacgacggtgaaggccatgctcggccccagtccggtatgaagcctcttaccgagggcatgcgtaaaaacgggacctggctgcaggccactgccgccacgacaagggattgtggagttaatcctgaggaggcggactccgccttcagcctgttggccacatgcagcttctatgaccacgccttgcatctgtgggagtgggagggcaactag

SEQ ID NO: 237329 - DNA, 1359 bp, Artificial Sequence
  derived and/or modified sequence
atgatggggtgctttgcactgcagaccgtcgatacagagctgaccgccgacagcgtggagtggtgccccctccaggggtgcagacacctcctcgcttgcggtacttaccagctgcgccgaccggaggatcgtcccgcaggacctcagaataaaggaggaatggaagtcaaggaaccacaggtccgactcgggaggttatttctgtatagcttcaacgacaacaactccatccaccctctggtggaagtccagagaaaagatacctctgccatcctggacatgaagtggtgccatatcccagtggccggacacgcgttgctaggcttagctgacgccagtggaagtattcaattgctccgtctcgtggagagcgaaaagagccatgttttagaaccactgtctagtctagccctggaagaacagtgtctcgccctgagccttgattggtcaaccggcaagacgggacgggctggggaccaacctctcaagatcattagttctgacagcacaggtcagctgcatctgctcatggttaatgaaaccaggcccaggttgcagaaggtggcttcttggcaggcccaccagtttgaggcgtggatcgccgctttcaattattggcacccagagatagtctactctggcggagatgatggactcctgcgtgggtgggacactagggttccaggcaagtttctgtttaccagcaaaagacacaccatgggcgtctgtagtattcaaagctctccccatcgcgaacatatcttggcaaccgggtcttatgatgagcatattcttctgtgggatactcgaaatatgaagcagcctctggcagatacccctgtccagggtggtgtttggcgaatcaagtggcacccattccaccaccatttgttactggctgcctgtatgcactccggcttcaagattttaaattgtcaaaaagccatggaggagcggcaagaggccacagtgctgactagtcatacactgccagatagtcttgtctacggtgccgactggtcatggcttctgtttagatccttgcagcgagcgccttcatggtcgttcccctccaacctgggcactaagacagccgacctcaaaggtgcctccgagttgcctactccatgtcacgaatgcagagaggacaatgacggtgagggccacgcaagaccccagtccgggatgaagcctttaaccgaagggatgaggaagaacggcacctggcttcaggctaccgccgcaaccacacgcgattgcggagttaaccccgaggaggccgatagcgccttcagcctgctcgcaacatgtagtttttacgatcacgccctgcatctgtgggagtgggagggcaactag

SEQ ID NO: 237330 - DNA, 1847 bp, Artificial Sequence
  derived and/or modified sequence
ccccggaaggagtcgcgagagaggcggcccgcgctgacggtgtccctggggctctgcgctcgtccggccggccccggcctcgccgccccgcgcagtacccagcccggccccgccgacccgcctctactgccggctccgcgcccttccccgagggctggatgatgggctgtttcgccctgcaaacggtggacaccgagctgaccgcggactcggtggagtggtgcccgctgcaaggctgcaggcacctgctggcgtgcgggacctaccagctgcggcggccggaggaccggcctgccggcccccagaacaagggtggaatggaagttaaggagcctcaggtccgtttaggccgtctcttcctgtacagtttcaatgacaacaactctattcaccctctggtcgaggtccaaagaaaagatacttctgcaatcctggacatgaaatggtgtcacatcccggtggctggacatgccctcttgggcttggcagatgccagtggatccatacaactgctccgcctggtggaatctgagaagagccacgtgctggagccattgtccagccttgccctggaggagcagtgtctggctttgtccctagattggtccactgggaaaactggaagggccggggaccagcccttgaagatcatcagcagtgactccacagggcagctccacctcctgatggtgaatgagacgaggcccaggctgcagaaagtggcctcatggcaggcacatcaattcgaggcctggattgctgctttcaattactggcatccagaaattgtgtattcagggggcgacgatggccttctgaggggctgggacaccagggtacccggcaaatttctcttcaccagcaaaagacacaccatgggtgtgtgcagcatccagagcagccctcatcgggagcacatcctggccacgggaagctatgatgaacacatcctactgtgggacacacgaaacatgaagcagccgttggcagatacgcctgtgcagggtggggtatggagaatcaagtggcaccctttccaccaccacctgctcctggccgcctgcatgcacagtggctttaagatcctcaactgccaaaaggcaatggaggagaggcaggaggcgacggtcctgacatctcacacattgcccgactcgctggtgtatggagccgactggtcctggctgctcttccgttctctgcagcgggccccctcgtggtcctttcctagcaacctaggaaccaagacggcagacctgaagggtgcaagcgagttgccaacaccctgtcatgaatgcagagaggataacgatggggagggccatgccagaccccagagtggaatgaagccactcacagagggcatgaggaagaatggcacctggctgcaggctacagcagccaccacacgtgactgtggcgtgaacccagaagaagcagactcagccttcagcctcctggccacctgctccttctatgaccatgcgctccacctctgggagtgggaggggaactgagcttgaaatcatgaagccccttcccacaaggaaaccaggagggagactgcgagtgagtgcccgggaccacctcatcagagatgcttactgcagccctgcaggtgcctgtgcactgatggaatccacagtgtagtcagaaaagctgttgacttctcttaaatcagcttccctgctgggcccctgaaagtggactgggtgattctgtctggcagagagtggggaaaagacgcggtttccagcttgcagatttgttaagtttctcaggcagattttgactttcagcctttcatacttgtttaagcaactatttgtattaaatgaagttttttg

SEQ ID NO: 237331 - protein, 378 aa, Artificial Sequence
  derived and/or modified sequence
MVMAYFVENFWGEKNSGFDVLYHNMKHGQISTKELADFVRERATIEEAYSRSMTKLAKSASNYSQLGTFAPVWDVFKTSTEKLANCHLDLVRKLQELIKEVQKYGEEQVKSHKKTKEEVAGTLEAVQTIQSITQALQKSKENYNAKCVEQERLKKEGATQREIEKAAVKSKKATDTYKLYVEKYALAKADFEQKMTETAQKFQDIEETHLIHIKEIIGSLSNAIKEIHLQIGQVHEEFINNMANTTVESLIQKFAESKGTGKERPGLIEFEECDTASAVEGIKPRKRKTFALPGIIKKEKDAESVWSFTVVAQVGMQWRDLGLLHSPPPRFKRFSSYLSLPSSWNYGAHHHIWLIFCIFSRDRVSPYWPGWSRTPDLR

SEQ ID NO: 237332 - protein, 810 aa, Artificial Sequence
  derived and/or modified sequence
MVMAYFVENFWGEKNSGFDVLYHNMKHGQISTKELADFVRERATIEEAYSRSMTKLAKSASNYSQLGTFAPVWDVFKTSTEKLANCHLDLVRKLQELIKEVQKYGEEQVKSHKKTKEEVAGTLEAVQTIQSITQALQKSKENYNAKCVEQERLKKEGATQREIEKAAVKSKKATDTYKLYVEKYALAKADFEQKMTETAQKFQDIEETHLIHIKEIIGSLSNAIKEIHLQIGQVHEEFINNMANTTVESLIQKFAESKGTGKERPGLIEFEECDTASAVEGIKPRKRKTFALPGIIKKEKDAESVECPDADSLNIPDVDEEGYSIKPETNQNDTKENHFYSSSDSDSEDEEPKKYRIEIKPMHPNNSHHTMASLDELKVSIGNITLSPAISVSTNTRLNRNFNDEELTKSKPSAPPNEKGTSDLLAWDPLFGPSLDSSSSSSLTSSSSARPTTPLSVGTIVPPPRPASRPKLTSGKLSGINEIPRPFSPPVTSNTSPPPAAPLARAESSSSISSSASLSAANTPTVGVSRGPSPVSLGNQDTLPVAVALTESVNAYFKGADPTKCIVKITGDMTMSFPSGIIKVFTSNPTPAVLCFRVKNISRLEQILPNAQLVFSDPSQCDSNTKDFWMNMQAVTVYLKKLSEQNPAASYYNVDVLKYQVSSNGIQSTPLNLATYWKCSASTTDLRVDYKYNPEAMVAPSVLSNIQVVVPVDGGVTNMQSLPPAIWNAEQMKAFWKLSSISEKSENGGSGSLRAKFDLSEGPSKPTTLAVQFLSEGSTLSGVDFELVGTGYRLSLIKKRFATGRYLADC

SEQ ID NO: 237333 - protein, 810 aa, Artificial Sequence
  derived and/or modified sequence
MVMAYFVENFWGEKNSGFDVLYHNMKHGQISTKELADFVRERATIEEAYSRSMTKLAKSASNYSQLGTFAPVWDVFKTSTEKLANCHLDLVRKLQELIKEVQKYGEEQVKSHKKTKEEVAGTLEAVQTIQSITQALQKSKENYNAKCVEQERLKKEGATQREIEKAAVKSKKATDTYKLYVEKYALAKADFEQKMTETAQKFQDIEETHLIHIKEIIGSLSNAIKEIHLQIGQVHEEFINNMANTTVESLIQKFAESKGTGKERPGLIEFEECDTASAVEGIKPRKRKTFALPGIIKKEKDAESVECPDADSLNIPDVDEEGYSIKPETNQNDTKENHFYSSSDSDSEDEEPKKYRIEIKPMHPNNSHHTMASLDELKVSIGNITLSPAISRHSPVQMNRNLSNEELTKSKPSAPPNEKGTSDLLAWDPLFGPSLDSSSSSSLTSSSSARPTTPLSVGTIVPPPRPASRPKLTSGKLSGINEIPRPFSPPVTSNTSPPPAAPLARAESSSSISSSASLSAANTPTVGVSRGPSPVSLGNQDTLPVAVALTESVNAYFKGADPTKCIVKITGDMTMSFPSGIIKVFTSNPTPAVLCFRVKNISRLEQILPNAQLVFSDPSQCDSNTKDFWMNMQAVTVYLKKLSEQNPAASYYNVDVLKYQVSSNGIQSTPLNLATYWKCSASTTDLRVDYKYNPEAMVAPSVLSNIQVVVPVDGGVTNMQSLPPAIWNAEQMKAFWKLSSISEKSENGGSGSLRAKFDLSEGPSKPTTLAVQFLSEGSTLSGVDFELVGTGYRLSLIKKRFATGRYLADC

SEQ ID NO: 237334 - DNA, 1278 bp, Artificial Sequence
  derived and/or modified sequence
gcggaacccggcgcggcggcggcacgatggtcatggcgtatttcgtcgagaatttttggggggaaaaaaatagtggctttgatgtcctctaccataatatgaaacatggacagatatcaacaaaagaactagcagattttgtaagggaacgagctaccatagaggaggcatactccaggtcaatgacaaaactagcaaaatctgcaagcaattattcacaacttggaacatttgcaccagtatgggatgtattcaaaacatctacagagaaattagcaaattgtcacttggatcttgttagaaaattacaagaattaataaaggaagttcagaagtatggagaagaacaagtaaagtctcataaaaagactaaagaagaagttgcaggaactctggaagctgtccaaaccattcagagcataactcaggccctccagaaatccaaggaaaattacaatgccaagtgtgtagaacaggagcgtttgaaaaaggaaggagctacacaaagagaaatagaaaaggcagctgttaaatctaagaaagctacagatacctataaactctatgtggaaaaatatgcattagcaaaagctgatttcgaacagaaaatgacagaaacagctcagaaatttcaagatattgaagaaactcatctcattcacataaaggaaattataggatccttgtcaaatgctataaaggaaattcatttgcagataggccaggtccatgaagaatttataaataacatggctaatactacagttgaaagtttgatacaaaaatttgctgagtcaaaaggcactgggaaggaaagacctggcctcattgaatttgaagaatgtgacactgctagtgcagttgaaggtataaaaccaaggaaaagaaagacctttgctttgccaggaatcattaaaaaggaaaaagatgcagaatctgtatggagtttcactgttgttgcccaggttggaatgcaatggcgcgatcttggcttactgcattctccacctcccaggttcaagcgattctcctcctacctcagcctcccaagtagctggaattacggcgcccaccaccacatctggctaattttttgtatttttagtagagacagggtttcaccatattggccaggctggtcgcgaactcctgacctcaggtgaaccacccgcctcagcttcccaaagtgctgggattacaggcctgagccacgcgcccggcctgatttaccttcttttaaaaataaaaaattaatatacaaagaatatgtaataaaca

SEQ ID NO: 237335 - DNA, 4980 bp, Artificial Sequence
  derived and/or modified sequence
gccggtctctgggaagaaggcggcggcggcgaaaggcgggggtgctgtgggggccgggccgtgtttacacagcggcgggcgggcgcggacgcggaacccggcgcggcggcggcacgatggtcatggcgtatttcgtcgagaatttttggggggaaaaaaatagtggctttgatgtcctctaccataatatgaaacatggacagatatcaacaaaagaactagcagattttgtaagggaacgagctaccatagaggaggcatactccaggtcaatgacaaaactagcaaaatctgcaagcaattattcacaacttggaacatttgcaccagtatgggatgtattcaaaacatctacagagaaattagcaaattgtcacttggatcttgttagaaaattacaagaattaataaaggaagttcagaagtatggagaagaacaagtaaagtctcataaaaagactaaagaagaagttgcaggaactctggaagctgtccaaaccattcagagcataactcaggccctccagaaatccaaggaaaattacaatgccaagtgtgtagaacaggagcgtttgaaaaaggaaggagctacacaaagagaaatagaaaaggcagctgttaaatctaagaaagctacagatacctataaactctatgtggaaaaatatgcattagcaaaagctgatttcgaacagaaaatgacagaaacagctcagaaatttcaagatattgaagaaactcatctcattcacataaaggaaattataggatccttgtcaaatgctataaaggaaattcatttgcagataggccaggtccatgaagaatttataaataacatggctaatactacagttgaaagtttgatacaaaaatttgctgagtcaaaaggcactgggaaggaaagacctggcctcattgaatttgaagaatgtgacactgctagtgcagttgaaggtataaaaccaaggaaaagaaagacctttgctttgccaggaatcattaaaaaggaaaaagatgcagaatctgtggaatgtcctgatgcagattcattgaacattcctgatgtagatgaagaaggctacagtattaaaccagaaacaaatcagaatgataccaaagagaaccatttctactcatctagtgattctgactccgaagatgaagaaccaaagaagtatcggatagaaattaagcctatgcatccaaataactcacatcacacaatggcttctttggatgaattaaaagtatctatagggaatataacactctccccagcaatatctgtaagtacaaacacaagacttaacagaaactttaacgatgaggagttaacaaaatcaaagccatctgctccacccaatgaaaaaggaaccagtgatttacttgcttgggaccccctatttggaccatctcttgattcatcttcttcatcttcactaacttcatcatcatcagccaggcccacaactcctctttctgtaggcaccattgtcccacctccgaggcctgcttccagaccaaagcttacttcaggcaaactcagtgggattaatgaaatacccaggccattcagcccacctgtaacttccaacaccagcccacctcctgctgcaccattagcccgggcagaaagttcttcttctatctcatcatctgcttcattgagtgctgccaatactccaacagtaggtgtgtcacggggtcccagccctgtcagccttggaaatcaggataccttacctgtggcagttgcccttacagaatctgttaatgcctactttaaaggagcagatcccaccaagtgtattgtgaagatcactggtgatatgacaatgtcatttccaagtggaattattaaagtcttcaccagcaatccaactccagctgtgttgtgcttcagggtgaaaaatatcagcagactagagcagattcttccaaatgcacagcttgtgttcagtgatccatcacaatgtgattccaacacaaaagatttttggatgaacatgcaagctgttacagtctacctcaagaagctgtcagagcaaaatccagctgcttcttattataatgtagatgtattaaagtatcaggtatcatcaaatggtattcagtccactcctctgaatcttgcaacatactggaaatgtagtgctagcaccacagatcttagagtggattataaatacaatccagaagctatggtggcacctagtgtgctttccaacatacaggtggtggtaccagtggatggaggagtaacgaacatgcagtcccttccccctgcaatatggaatgcagaacaaatgaaagccttttggaaattgtctagtatttcagaaaaatcagaaaatggaggttctgggtccctccgagcaaaatttgatctttcagaaggacctagtaaacccacgacacttgcagtacaattcctcagcgagggaagtaccctttcaggagtagatttcgaacttgtgggcactggctataggctttccttaataaagaagcggtttgctactggacgatacctggcggattgttgatggacctgggaaagtgatgtggcttcagggattacaaacctgccattctgcattatctgttctttccaaacactattttaacttgtatgatgtctttcaaacttagacatatttgagagctgactacaaacattaaatcgcacttttaaagtgagtcattgaaataaatagtactgaaatgattctctatgttgtaaatgatcaactacaatattcaggaagcacatttattcagattctcagtaaaaatgaagtttttgtaggattaatttttaaattatttccagtgtctatgttgaaaaaaagggttatagtgtaatatcaggcctaaagtttcagaagagcaagcacaaagtaatttagctttccatacatttttagagtcagagataactttgaaatttcataagtttgatattcagtggatacaaatagaacatgaattctaagttttgggtaatgttaactcagaacacttaatcaaattgagctatgtgccataaggtaatcagaccagagtccaagttgtatgcaaaaaatctataatttgattctcataaacatattaataaagtataagtgatgttttatatgatttttaaaaaaaattctcaagtgcaatgtgttttaaaataagcttgcaaatgacagcagagacatttacttctgcagttagttaactttataggagttgtgatttttttgatgaattaatgctgtagatttaatttatttttatatggaattgcataatgtgtgccttttaaaacaataacaaaaaccagagatgtgcctatacaatttgtgttcattaatgtgcctcactttttttctcagtctgaatcttctgttcagaatcttacagtgatcaagcatttttataagatatttgcaatttttgtaaatatttttggcctgcaactgggaaggggattcagagtcataaagcctaacttaagaatcctggctcacttctttggtgatacactgtagccactagaaagagaaataaacccaatggcatgtgtttacaggaagaaagattaccttcagatacttgacattaacctcatcaaaagtgtgtgaattttaaaacaaattctaaaaaaactatagtgctaaattggtaactggtattttaactctcaatttagcattttccttgatactttatcattgaaaatttatgcatttatttactgattgtgttgtgaacatgagttttatggtattttgtgagggatgcattttttaaaagattaattttggaaacagaaggagaagcactgccatttgtttttatttcaacaattggaaaaattaccaatttgtacattttaattattcaatttctactttgtaaaaatagggaaattatttgaagtgatatatttggttaaacatttctaaaaataaactaccaatactaaatagtaagaaacctaactttagtagcaaatcttgattaattgaagaaataaaatatttcggataaggtttcataatttacaaatgggaatttcatttataataataaatatgagtgtcctttatttgcctagtagaagtgataaattgtgttatatatgataatttatataaaaccactaattgttccgttaagcttcacagaaaataaaacctctattactagacatttatgtaacatcttgctgtactaaatacagcagaaaatctactctttagcaatatataacacagtatatgcttttttatatattcaatgttagcccaagtctgaatttacatttgactaaagcagcacataagataatttgctaaaatgctaatctttactaaatagtgagctaaattagaatttctaactcttatattgtgctcttttaaatgccaattacagtcccttactggaattctaactgtaatttgctttgcaatcaaactgcttttagggcagccaatattttattattggaattcagacactgttcttaccgtgtttgtttttaatcaaatattacctaaaaatgtacaaattagtgaaatggttaaacttctgcactttcttagttaccacagtcttcataccaagtattgggtacaggttacaattttgaagccatatgagtttatattgattttttttttccatttaaaaatccactaatggtgtaaaagagaccagtagattttcaatgggaaatgtacctagcaagctggttcttgcttatatatagtgataaactttgtagctgcctctttaaccaagaatttgtaaacacaactctaataaatgtgagttttaaaggattgttatttactactttggattgtaattagaacaatgcacatctgtcttccaagattttgtaaatatttttgatttttttcattaaatgtaaattttacataaaagttgtgctcttaataaacatgtaatatataattt

SEQ ID NO: 237336 - DNA, 4981 bp, Artificial Sequence
  derived and/or modified sequence
gccggtctctgggaagaaggcggcggcggcgaaaggcgggggtgctgtgggggccgggccgtgtttacacagcggcgggcgggcgcggacgcggaacccggcgcggcggcggcacgatggtcatggcgtatttcgtcgagaatttttggggggaaaaaaatagtggctttgatgtcctctaccataatatgaaacatggacagatatcaacaaaagaactagcagattttgtaagggaacgagctaccatagaggaggcatactccaggtcaatgacaaaactagcaaaatctgcaagcaattattcacaacttggaacatttgcaccagtatgggatgtattcaaaacatctacagagaaattagcaaattgtcacttggatcttgttagaaaattacaagaattaataaaggaagttcagaagtatggagaagaacaagtaaagtctcataaaaagactaaagaagaagttgcaggaactctggaagctgtccaaaccattcagagcataactcaggccctccagaaatccaaggaaaattacaatgccaagtgtgtagaacaggagcgtttgaaaaaggaaggagctacacaaagagaaatagaaaaggcagctgttaaatctaagaaagctacagatacctataaactctatgtggaaaaatatgcattagcaaaagctgatttcgaacagaaaatgacagaaacagctcagaaatttcaagatattgaagaaactcatctcattcacataaaggaaattataggatccttgtcaaatgctataaaggaaattcatttgcagataggccaggtccatgaagaatttataaataacatggctaatactacagttgaaagtttgatacaaaaatttgctgagtcaaaaggcactgggaaggaaagacctggcctcattgaatttgaagaatgtgacactgctagtgcagttgaaggtataaaaccaaggaaaagaaagacctttgctttgccaggaatcattaaaaaggaaaaagatgcagaatctgtggaatgtcctgatgcagattcattgaacattcctgatgtagatgaagaaggctacagtattaaaccagaaacaaatcagaatgataccaaagagaaccatttctactcatctagtgattctgactccgaagatgaagaaccaaagaagtatcggatagaaattaagcctatgcatccaaataactcacatcacacaatggcttctttggatgaattaaaagtatctatagggaatataacactctccccagcaatatctagacacagtccagtacagatgaatcggaatttgtctaatgaggagttaacaaaatcaaagccatctgctccacccaatgaaaaaggaaccagtgatttacttgcttgggaccccctatttggaccatctcttgattcatcttcttcatcttcactaacttcatcatcatcagccaggcccacaactcctctttctgtaggcaccattgtcccacctccgaggcctgcttccagaccaaagcttacttcaggcaaactcagtgggattaatgaaatacccaggccattcagcccacctgtaacttccaacaccagcccacctcctgctgcaccattagcccgggcagaaagttcttcttctatctcatcatctgcttcattgagtgctgccaatactccaacagtaggtgtgtcacggggtcccagccctgtcagccttggaaatcaggataccttacctgtggcagttgcccttacagaatctgttaatgcctactttaaaggagcagatcccaccaagtgtattgtgaagatcactggtgatatgacaatgtcatttccaagtggaattattaaagtcttcaccagcaatccaactccagctgtgttgtgcttcagggtgaaaaatatcagcagactagagcagattcttccaaatgcacagcttgtgttcagtgatccatcacaatgtgattccaacacaaaagatttttggatgaacatgcaagctgttacagtctacctcaagaagctgtcagagcaaaatccagctgcttcttattataatgtagatgtattaaagtatcaggtatcatcaaatggtattcagtccactcctctgaatcttgcaacatactggaaatgtagtgctagcaccacagatcttagagtggattataaatacaatccagaagctatggtggcacctagtgtgctttccaacatacaggtggtggtaccagtggatggaggagtaacgaacatgcagtcccttccccctgcaatatggaatgcagaacaaatgaaagccttttggaaattgtctagtatttcagaaaaatcagaaaatggaggttctgggtccctccgagcaaaatttgatctttcagaaggacctagtaaacccacgacacttgcagtacaattcctcagcgagggaagtaccctttcaggagtagatttcgaacttgtgggcactggctataggctttccttaataaagaagcggtttgctactggacgatacctggcggattgttgatggacctgggaaagtgatgtggcttcagggattacaaacctgccattctgcattatctgttctttccaaacactattttaacttgtatgatgtctttcaaacttagacatatttgagagctgactacaaacattaaatcgcacttttaaagtgagtcattgaaataaatagtactgaaatgattctctatgttgtaaatgatcaactacaatattcaggaagcacatttattcagattctcagtaaaaatgaagtttttgtaggattaatttttaaattatttccagtgtctatgttgaaaaaaagggttatagtgtaatatcaggcctaaagtttcagaagagcaagcacaaagtaatttagctttccatacatttttagagtcagagataactttgaaatttcataagtttgatattcagtggatacaaatagaacatgaattctaagttttgggtaatgttaactcagaacacttaatcaaattgagctatgtgccataaggtaatcagaccagagtccaagttgtatgcaaaaaatctataatttgattctcataaacatattaataaagtataagtgatgttttatatgatttttaaaaaaaattctcaagtgcaatgtgttttaaaataagcttgcaaatgacagcagagacatttacttctgcagttagttaactttataggagttgtgatttttttgatgaattaatgctgtagatttaatttatttttatatggaattgcataatgtgtgccttttaaaacaataacaaaaaccagagatgtgcctatacaatttgtgttcattaatgtgcctcactttttttctcagtctgaatcttctgttcagaatcttacagtgatcaagcatttttataagatatttgcaatttttgtaaatatttttggcctgcaactgggaaggggattcagagtcataaagcctaacttaagaatcctggctcacttctttggtgatacactgtagccactagaaagagaaataaacccaatggcatgtgtttacaggaagaaagattaccttcagatacttgacattaacctcatcaaaagtgtgtgaattttaaaacaaattctaaaaaaactatagtgctaaattggtaactggtattttaactctcaatttagcattttccttgatactttatcattgaaaatttatgcatttatttactgattgtgttgtgaacatgagttttatggtattttgtgagggatgcattttttaaaagattaattttggaaacagaaggagaagcactgccatttgtttttatttcaacaattggaaaaattaccaatttgtacattttaattattcaatttctactttgtaaaaatagggaaattatttgaagtgatatatttggttaaacatttctaaaaataaactaccaatactaaatagtaagaaacctaactttagtagcaaatcttgattaattgaagaaataaaatatttcggataaggtttcataatttacaaatgggaatttcatttataataataaatatgagtgtcctttatttgcctagtagaagtgataaattgtgttatatatgataatttatataaaaccactaattgttccgttaagcttcacagaaaataaaacctctattactagacatttatgtaacatcttgctgtactaaatacagcagaaaatctactctttagcaatatataacacagtatatgcttttttatatattcaatgttagcccaagtctgaatttacatttgactaaagcagcacataagataatttgctaaaatgctaatctttactaaatagtgagctaaattagaatttctaactcttatattgtgctcttttaaatgccaattacagtcccttactggaattctaactgtaatttgctttgcaatcaaactgcttttagggcagccaatattttattattggaattcagacactgttcttaccgtgtttgtttttaatcaaatattacctaaaaatgtacaaattagtgaaatggttaaacttctgcactttcttagttaccacagtcttcataccaagtattgggtacaggttacaattttgaagccatatgagtttatattgattttttttttccatttaaaaatccactaatggtgtaaaagagaccagtagattttcaatgggaaatgtacctagcaagctggttcttgcttatatatagtgataaactttgtagctgcctctttaaccaagaatttgtaaacacaactctaataaatgtgagttttaaaggattgttatttactactttggattgtaattagaacaatgcacatctgtcttccaagattttgtaaatatttttgatttttttcattaaatgtaaattttacataaaagttgtgctcttaataaacatgtaatatataattta

SEQ ID NO: 237337 - DNA, 1137 bp, Artificial Sequence
  derived and/or modified sequence
atggtcatggcatatttcgtagaaaatttttggggggaaaaaaactctggcttcgacgtgctgtatcacaatatgaagcatggccagattagtaccaaggagctagctgattttgtgcgcgaaagggcgactattgaggaagcgtatagccgcagcatgacaaaattggctaagtccgcctccaactactcccagttagggacttttgcacccgtatgggacgttttcaagacctcaacagaaaaactagctaattgccatctagatctggttcggaaactacaggagttgattaaagaggtacagaagtatggggaggagcaggtgaaatcgcacaagaaaacgaaagaagaggtggcagggacactcgaggcggtgcaaacaattcagagtataactcaagcgctgcagaaaagcaaagaaaattataacgcgaagtgcgtggagcaggagagattaaaaaaagaaggggcgactcagcgagagatcgaaaaagccgcagtgaagtctaagaaggccacggacacatataagctttatgtcgaaaagtatgctctggcaaaagccgacttcgagcagaagatgacagagaccgctcagaaattccaggacattgaggagacgcaccttatacacattaaggagataatcggatccctaagtaacgcaattaaggagatacatttgcagatcggccaagttcatgaggaattcataaataatatggcaaacacgaccgtggaatcactgattcaaaagttcgccgagagtaaaggaactggcaaggagcgccccggcctcatcgagtttgaggaatgtgataccgcttccgctgtggaaggtatcaagccccggaaacgaaagactttcgccttgccggggatcattaaaaaggaaaaagatgccgagtcggtgtggagctttaccgtggtggcccaggtgggcatgcaatggcgcgatctcggacttctacactcacccccacccagatttaagaggttttccagttatctttccttaccgagcagctggaactacggcgcacaccatcacatctggcttattttttgcattttcagcagagacagggttagcccatactggcccggttggtcgagaacccccgatttacgctag

SEQ ID NO: 237338 - DNA, 2433 bp, Artificial Sequence
  derived and/or modified sequence
atggttatggcgtacttcgtagagaatttctggggagaaaagaatagcggtttcgatgtcctttatcacaatatgaagcacggacaaatctctacaaaggaactggctgacttcgttcgcgaacgggctacaattgaggaggcttacagcagaagtatgaccaagctggcaaaatctgccagcaattattcccagttagggacctttgcaccggtctgggacgtgtttaaaaccagtacggaaaagctcgccaattgccatctcgacctggtgcggaaactgcaggagctcatcaaggaggtccaaaagtacggcgaagagcaggtgaagagccataaaaaaaccaaggaggaggtcgctggtactttagaagctgtgcaaactattcagtccatcacccaggcactgcagaagtctaaagaaaattataatgctaaatgcgttgaacaggagcgactgaagaaggagggggccacacagcgcgagatagaaaaggccgcagtgaagagcaagaaagcaaccgatacgtataaattgtacgtcgaaaaatacgcattggccaaggccgattttgagcagaagatgacagagaccgcccagaagttccaggacatcgaagaaacacaccttatccacattaaggaaataatcggaagcttatccaatgccataaaggagatccatctgcagattggtcaggtgcatgaggaattcatcaataacatggcgaataccacggtggaatcacttatccagaaatttgccgaatcaaaggggacaggcaaagaacgtccaggactgatcgaatttgaagagtgcgacacagcatcagcggtagaaggtattaagccccgtaaaaggaagactttcgcccttccggggatcatcaaaaaggagaaagatgccgaaagcgtggagtgccctgacgctgattcgctaaacatacctgacgttgacgaagaggggtacagcatcaaacccgaaactaatcaaaatgacactaaggaaaaccatttttactcctccagtgacagtgactctgaagacgaagaaccaaagaaataccggatcgagattaaacctatgcatccaaataactcccaccacaccatggccagtctggacgagctgaaggtctctattggtaacatcaccctctcgcccgccatcagtgtgtccaccaacacgagactgaacagaaatttcaacgatgaagagttgactaaaagcaagccctccgctcctcccaatgaaaaggggacctctgatttacttgcatgggatcctctctttggcccgtcactggattcttccagctcatcatccctgacatcctcatccagcgcacggcctactacacctctgagtgtcggaacaatcgtaccccccccccgtcccgcatctcgcccgaaactaacatctggaaaactgagcggcattaatgagatcccccggcccttctccccgccagtgacttccaacacaagccccccgccagccgccccactggccagagcagagtcttcgtccagcatatcaagttctgcctcccttagtgctgccaataccccaactgtaggcgtgtccagaggcccttctcccgtgagcctaggcaaccaggacaccctacctgtcgctgtggctctgacagaaagcgtcaacgcctattttaagggagccgaccccaccaagtgtatagtcaagatcacaggagacatgactatgtcctttccatcaggcatcattaaagtgttcacaagtaatcccacacccgcagtgctgtgttttcgagtgaagaatattagccggttggagcagatcctccccaacgcacagcttgtcttctcggatccatctcagtgtgattctaatacaaaggatttctggatgaacatgcaagccgtcaccgtttacttgaagaaattgtcagagcagaaccctgctgcgtcttactataatgtagatgtcctaaagtaccaggtctcctccaatgggatccagtctacacccctgaacctcgctacatattggaagtgctctgccagcacaacagatttgagagtggattacaagtataacccagaggcaatggtggctccatctgtgctttcaaatattcaggtggtggtgcccgtggacggaggcgtgacgaacatgcagagtttgccacctgccatctggaatgcagaacagatgaaagcattctggaagctcagtagcatctcagagaaaagcgagaatggcggaagcggttccctgcgtgcaaagttcgacctgagtgagggccccagtaaacccactacactcgcagttcagtttttatccgagggatccacattgtctggcgttgattttgagctggttggcactggttatcgcctgtcacttatcaaaaaacgttttgcaacgggaagatatctggcggattgttag

SEQ ID NO: 237339 - DNA, 2433 bp, Artificial Sequence
  derived and/or modified sequence
atggtaatggcatactttgtcgaaaatttctggggtgagaagaactctggatttgatgtcctctatcacaatatgaagcacggtcaaatatccacgaaggaactagctgatttcgtgagagaacgagccacaattgaagaagcctactcccgatccatgactaaactggctaagtcagcatccaattacagccagttggggacttttgctcctgtctgggatgtgttcaagaccagcacggagaaactcgcgaattgtcacctagacctggtgcgaaagttgcaggagctgatcaaagaagtccagaaatacggtgaggaacaagtcaagagccataagaagacaaaggaagaggtggctggaactcttgaggcggtacagaccattcagtccataacccaagcactgcagaagtctaaggagaattacaacgccaaatgcgtggagcaagagaggctcaagaaagagggggcgacacagcgtgaaatagaaaaagcagctgtgaagagcaagaaagccaccgatacttacaaactttacgtggagaaatacgccctggccaaggcggatttcgagcaaaaaatgaccgaaaccgcccagaaattccaggacattgaagaaacccacttgatccatatcaaggaaattatcggatctctcagcaacgctataaaggaaatccatctgcaaatcggtcaggtgcatgaggaatttataaacaacatggctaatactaccgtagaaagtttgatccagaagttcgcagaaagtaaaggcaccgggaaagagcgacccggcctaattgagttcgaagagtgcgataccgccagtgccgtcgaaggcatcaaaccgaggaagagaaaaacctttgcactgcccggaatcatcaaaaaagagaaagatgcggagagcgtggagtgcccagatgcagactccttaaacattcccgacgtcgacgaggagggatactctatcaagcctgaaaccaatcaaaatgatacgaaagagaatcacttctatagtagttctgattccgatagcgaggatgaggagccaaagaagtacaggatcgaaattaaacctatgcatcctaacaattcccatcatacaatggcaagtctggatgagctcaaggtgtcaatcggcaatattacgctgagtcccgctatctcccgccactcccccgtgcaaatgaaccgcaacttatctaatgaagagctgacaaagagtaagcccagtgccccgccaaacgaaaaaggcacatctgacctcttagcttgggatcctctgttcgggccctctctcgattcatcctcatcttccagtcttacatccagcagttccgcaaggccaaccactcccctgtccgtcggcacaattgtgcccccaccaagacctgcgtcccgtcccaagctgaccagcggaaagctttctggcataaatgaaatccccaggccattctcaccacccgttactagcaatacttcccccccgccagcagcaccattagcgcgcgctgaaagctcctctagcatcagcagctctgcatccctgagtgcagccaacactcctacagtgggggtgagccgggggccttccccggtttccttaggcaaccaggacacgttgcctgtggctgtggccctgacggagtctgtgaatgcgtacttcaaaggcgcagatcccacaaagtgcatcgtgaaaattacaggggatatgaccatgtcatttccatccggaattattaaagtgtttactagcaaccctacccccgccgttttgtgtttccgagtgaaaaacatctctcggttagaacagatcctgcctaatgcacagctagtgttctcagatccttctcagtgcgacagcaatacaaaagatttttggatgaacatgcaggcagttaccgtgtacttgaagaagctgtcggagcagaaccctgccgcgtcctactacaatgttgacgtgctgaaatatcaggtgagttctaacggtattcaaagtactcccctgaatctagccacttactggaagtgttcagcctccaccacagaccttcgcgttgattacaaatataatcctgaagctatggtggctcccagcgtgctgagcaacatacaggtcgtggtgccagtggacggcggggtgaccaacatgcagagcctccctccagccatttggaacgcggagcagatgaaagccttctggaaactctcttctatttcagagaaatcggagaatggaggcagcggcagtcttcgggcaaaatttgacctgagcgaagggccgagtaagcctacaacacttgccgtccagtttctaagcgagggatccaccctgagtggggtggacttcgagctggttgggactggttacagattatccctgatcaaaaagcgattcgctactggccggtacttagccgactgttag

SEQ ID NO: 237340 - DNA, 1137 bp, Artificial Sequence
  derived and/or modified sequence
atggtgatggcctactttgtggagaacttctggggcgagaagaacagcggctttgatgtgctgtaccacaacatgaagcacggccagatcagcaccaaggagctggccgactttgtgcgggagcgggccaccatcgaggaggcctacagccgctccatgaccaagctggccaagagcgccagcaactacagccagctgggcacctttgcccctgtgtgggatgtgttcaagaccagcacagagaagctggccaactgccacctggacctggtgaggaagctgcaggagctgatcaaggaggtgcagaagtacggggaggagcaggtgaagagccacaagaagaccaaggaggaggtggccggcaccctggaggccgtgcagaccatccagagcatcacccaggccctgcagaagagcaaagaaaactacaatgccaagtgtgtggagcaggagcggctgaagaaggagggcgccacccagcgggagattgagaaggctgctgtgaagagcaagaaggccacagacacctacaagctgtatgtggagaagtatgccctggccaaggctgactttgagcagaagatgacagaaacagcccagaagttccaggacatcgaggagacccacctgatccacatcaaggagatcatcggcagcctgagcaatgccatcaaggagatccacctgcagatcggccaggtgcatgaggagttcatcaacaacatggccaacaccaccgtggagagcctcatccagaagtttgctgagagcaagggcaccgggaaggagaggcctggcctcatcgagtttgaggagtgtgacacagccagcgctgtggagggcatcaagcccaggaagaggaagacctttgccctgcccggcatcatcaagaaggagaaggatgctgagagcgtgtggagcttcaccgtggtggcccaggtgggcatgcagtggagggacctgggcctgctgcacagccccccaccccgcttcaagcgcttcagcagctacctgagcctgcccagctcctggaactacggggcccaccaccacatctggctgatcttctgcatcttcagccgggacagagtgagcccctactggccaggctggagcaggaccccagacctgaggtag

SEQ ID NO: 237341 - DNA, 2433 bp, Artificial Sequence
  derived and/or modified sequence
atggtgatggcctactttgtggagaacttctggggcgagaagaacagcggctttgatgtgctgtaccacaacatgaagcacggccagatcagcaccaaggagctggccgactttgtgcgggagcgggccaccatcgaggaggcctacagccgctccatgaccaagctggccaagagcgccagcaactacagccagctgggcacctttgcccctgtgtgggatgtgttcaagaccagcacagagaagctggccaactgccacctggacctggtgaggaagctgcaggagctgatcaaggaggtgcagaagtacggggaggagcaggtgaagagccacaagaagaccaaggaggaggtggccggcaccctggaggccgtgcagaccatccagagcatcacccaggccctgcagaagagcaaagaaaactacaatgccaagtgtgtggagcaggagcggctgaagaaggagggcgccacccagcgggagattgagaaggctgctgtgaagagcaagaaggccacagacacctacaagctgtatgtggagaagtatgccctggccaaggctgactttgagcagaagatgacagaaacagcccagaagttccaggacatcgaggagacccacctgatccacatcaaggagatcatcggcagcctgagcaatgccatcaaggagatccacctgcagatcggccaggtgcatgaggagttcatcaacaacatggccaacaccaccgtggagagcctcatccagaagtttgctgagagcaagggcaccgggaaggagaggcctggcctcatcgagtttgaggagtgtgacacagccagcgctgtggagggcatcaagcccaggaagaggaagacctttgccctgcccggcatcatcaagaaggagaaggatgctgagagcgtggagtgcccagatgctgacagcctgaacatcccagatgtggatgaggagggctacagcatcaagccagagaccaaccagaatgacaccaaggagaaccacttctacagcagcagtgacagcgacagtgaagatgaggagcccaagaagtacagaattgagatcaagcccatgcaccccaacaacagccaccacaccatggccagcctggatgagctgaaggtgtccatcggcaacatcaccctgagccctgccatctctgtgtccaccaacacccggctgaacagaaacttcaatgatgaggagctgaccaagagcaagcccagcgcccccccaaatgagaagggcaccagtgacctgctggcctgggaccccctgtttggccccagcctggacagcagcagcagcagcagcctgaccagcagcagcagcgcccggcccaccacccccctgtctgtgggcaccatcgtgcccccacccaggcctgccagccggcccaagctgaccagcggcaagctgagcggcatcaatgagatcccccggcccttcagcccccctgtgaccagcaacaccagccccccacctgctgcccccctggcccgggcagagagcagcagcagcatcagcagcagcgccagcctgtctgctgccaacacccccaccgtgggcgtgtcccggggccccagccctgtgtccctgggcaaccaggacaccctgcctgtggccgtggccctgacagagagcgtgaatgcctacttcaagggagctgaccccaccaagtgcatcgtgaagatcaccggggacatgaccatgtccttccccagcggcatcatcaaggtgttcaccagcaaccccaccccagctgtgctgtgcttccgggtgaagaacatcagccggctggagcagatcctgcccaatgcccagctggtgttcagtgaccccagccagtgtgacagcaacaccaaggacttctggatgaacatgcaggccgtgacagtgtacctgaagaagctgtctgagcagaacccagctgccagctactacaacgtggatgtgctgaagtaccaggtgagcagcaatggcatccagagcacccccctgaacctggccacctactggaagtgcagcgccagcaccacagacctgcgggtggactacaagtacaaccctgaggccatggtggcccccagcgtgctgagcaacatccaggtggtggtgcctgtggatggaggagtgaccaacatgcagagcctgcccccagccatctggaatgctgagcagatgaaggccttctggaagctgagcagcatcagcgagaagtcagaaaatggaggcagcggcagcctgcgggccaagtttgacctgtctgagggccccagcaagcccaccaccctggccgtgcagttcctgtctgagggcagcaccctgtctggagtggactttgagctggtgggcaccggctaccgcctgagcctcatcaagaagagatttgccaccggccgctacctggccgactgctag

SEQ ID NO: 237342 - DNA, 2433 bp, Artificial Sequence
  derived and/or modified sequence
atggtgatggcctactttgtggagaacttctggggcgagaagaacagcggctttgatgtgctgtaccacaacatgaagcacggccagatcagcaccaaggagctggccgactttgtgcgggagcgggccaccatcgaggaggcctacagccgctccatgaccaagctggccaagagcgccagcaactacagccagctgggcacctttgcccctgtgtgggatgtgttcaagaccagcacagagaagctggccaactgccacctggacctggtgaggaagctgcaggagctgatcaaggaggtgcagaagtacggggaggagcaggtgaagagccacaagaagaccaaggaggaggtggccggcaccctggaggccgtgcagaccatccagagcatcacccaggccctgcagaagagcaaagaaaactacaatgccaagtgtgtggagcaggagcggctgaagaaggagggcgccacccagcgggagattgagaaggctgctgtgaagagcaagaaggccacagacacctacaagctgtatgtggagaagtatgccctggccaaggctgactttgagcagaagatgacagaaacagcccagaagttccaggacatcgaggagacccacctgatccacatcaaggagatcatcggcagcctgagcaatgccatcaaggagatccacctgcagatcggccaggtgcatgaggagttcatcaacaacatggccaacaccaccgtggagagcctcatccagaagtttgctgagagcaagggcaccgggaaggagaggcctggcctcatcgagtttgaggagtgtgacacagccagcgctgtggagggcatcaagcccaggaagaggaagacctttgccctgcccggcatcatcaagaaggagaaggatgctgagagcgtggagtgcccagatgctgacagcctgaacatcccagatgtggatgaggagggctacagcatcaagccagagaccaaccagaatgacaccaaggagaaccacttctacagcagcagtgacagcgacagtgaagatgaggagcccaagaagtacagaattgagatcaagcccatgcaccccaacaacagccaccacaccatggccagcctggatgagctgaaggtgtccatcggcaacatcaccctgagccctgccatcagccgccacagccctgtgcagatgaacagaaacctgagcaatgaggagctgaccaagagcaagcccagcgcccccccaaatgagaagggcaccagtgacctgctggcctgggaccccctgtttggccccagcctggacagcagcagcagcagcagcctgaccagcagcagcagcgcccggcccaccacccccctgtctgtgggcaccatcgtgcccccacccaggcctgccagccggcccaagctgaccagcggcaagctgagcggcatcaatgagatcccccggcccttcagcccccctgtgaccagcaacaccagccccccacctgctgcccccctggcccgggcagagagcagcagcagcatcagcagcagcgccagcctgtctgctgccaacacccccaccgtgggcgtgtcccggggccccagccctgtgtccctgggcaaccaggacaccctgcctgtggccgtggccctgacagagagcgtgaatgcctacttcaagggagctgaccccaccaagtgcatcgtgaagatcaccggggacatgaccatgtccttccccagcggcatcatcaaggtgttcaccagcaaccccaccccagctgtgctgtgcttccgggtgaagaacatcagccggctggagcagatcctgcccaatgcccagctggtgttcagtgaccccagccagtgtgacagcaacaccaaggacttctggatgaacatgcaggccgtgacagtgtacctgaagaagctgtctgagcagaacccagctgccagctactacaacgtggatgtgctgaagtaccaggtgagcagcaatggcatccagagcacccccctgaacctggccacctactggaagtgcagcgccagcaccacagacctgcgggtggactacaagtacaaccctgaggccatggtggcccccagcgtgctgagcaacatccaggtggtggtgcctgtggatggaggagtgaccaacatgcagagcctgcccccagccatctggaatgctgagcagatgaaggccttctggaagctgagcagcatcagcgagaagtcagaaaatggaggcagcggcagcctgcgggccaagtttgacctgtctgagggccccagcaagcccaccaccctggccgtgcagttcctgtctgagggcagcaccctgtctggagtggactttgagctggtgggcaccggctaccgcctgagcctcatcaagaagagatttgccaccggccgctacctggccgactgctag

SEQ ID NO: 237343 - DNA, 1137 bp, Artificial Sequence
  derived and/or modified sequence
atggtgatggcctacttcgtggagaacttctggggcgagaagaactccggctttgatgtgctgtatcacaacatgaagcacgggcagattagtactaaagagctggccgacttcgtgcgagaaagggcgaccatagaggaagcatatagcaggtccatgactaagctcgctaaatcggcttctaattactcacagctaggcacatttgcgccagtctgggatgtctttaagacatctaccgaaaagttagccaactgtcaccttgatctggtgcgcaaactgcaggagctaattaaagaagtccagaagtatggtgaggagcaggttaagtcacataaaaagaccaaagaggaggttgccggaaccctggaagccgttcagactatacagtccataacccaggctctgcagaaatctaaggagaattataacgccaaatgtgtggaacaagaaaggttgaagaaggaaggtgccacacagcgggagatcgaaaaggccgccgtgaagtccaaaaaggccaccgacacgtacaaattgtacgtcgagaagtatgccctggccaaggctgacttcgaacagaagatgaccgagactgctcagaagttccaggatattgaagagactcacctgattcacattaaagaaatcattgggagcttgagtaacgccattaaggaaatacacctccagattggacaggtccatgaggaattcatcaataatatggctaacaccactgttgagtcgctgatccagaagttcgccgagtcaaagggtaccggaaaagagcgccctggtctgatcgaattcgaggaatgcgatacagcctctgcagtggagggcataaaaccacgcaagcgcaaaactttcgctctcccgggtattataaaaaaggagaaggacgccgaaagcgtgtggtctttcactgtggtggcccaagtgggaatgcagtggcgcgacctgggcctgctgcatagtcctccccccaggttcaagcgttttagttcctacctgtccttaccgagtagctggaattatggggcacatcaccacatctggcttatcttttgcatattcagccgagacagagtgagcccttactggccaggttggtctcgcactcccgacctgcgatag

SEQ ID NO: 237344 - DNA, 2433 bp, Artificial Sequence
  derived and/or modified sequence
atggtgatggcctacttcgtggagaacttctggggcgagaagaacagtgggttcgatgtgctctaccataatatgaaacacggtcagattagtactaaagaattagcagactttgtgagggagagagcaacaatcgaagaagcttactcccgatctatgaccaagctggcgaaatctgcatccaactatagccagctcggcaccttcgctcctgtgtgggatgtgttcaagacaagtaccgagaaactcgccaattgccacctggacctggtcagaaaactacaggagctcatcaaggaggtccagaagtatggggaagagcaagttaagagtcacaagaagacaaaagaagaagtggccggaactctggaagcagtgcaaaccatccagagcatcacccaagcgctccagaagagcaaggagaactataatgcaaagtgtgtggaacaggaaaggctcaagaaggagggagccacccagagagaaattgaaaaggccgccgttaagtcaaagaaggccaccgatacatacaagctctatgtcgaaaaatacgctctggctaaggccgacttcgagcagaagatgaccgagacagcgcagaaattccaggatatagaagagacacacttaatccacattaaagagatcatcggtagcctgtcaaacgcaatcaaggagatccatctgcagatcgggcaagtgcacgaagagtttattaataatatggcgaacacaaccgtggagagccttatccagaagttcgccgagagcaagggtactgggaaggaacgccctggactgattgagtttgaggagtgtgacacagcctctgcagtggaggggataaaacctcggaaaagaaaaacctttgcccttcccggtatcataaaaaaagagaaagacgccgagagtgtggagtgtcccgacgctgacagcctgaacattcctgacgtcgacgaagaagggtatagcatcaaacccgagacgaaccagaacgacacaaaggaaaaccacttttactctagcagcgatagcgattcggaagacgaggagccaaaaaaatacaggatcgaaattaaacccatgcatccgaacaactcacatcacacaatggcttcactggatgagctgaaggtcagtatcgggaatattaccctgagccctgccatcagcgtcagtaccaatacccgcctcaataggaattttaacgacgaagaattgaccaaaagcaagccatccgccccgcccaacgaaaagggcacatcggacctcctagcctgggatccactgttcgggccctcgctggatagctctagctcctctagtctgaccagttcttctagcgcacgccccacaaccccactgagcgtgggaacgatagtgcctccccccaggcctgcctctagacccaaacttacgagcggcaagctgagcggcataaatgagatccctcgtcccttcagtccaccagtcaccagtaacacgtctccaccacctgccgcccctctggcacgggctgaatcctcatcctctatttctagctccgctagcttgagtgccgccaatactccgaccgtgggggtgagtcgtggtccatcccccgtttcactgggtaaccaggatacactgcccgtcgctgtggctttgaccgagagtgtgaatgcctacttcaagggggccgacccaacgaagtgtatcgtaaaaattaccggtgatatgactatgagcttcccttcaggcatcataaaagtgttcacaagtaatcctacacctgcggtcttatgtttcagggtgaaaaacatcagcagactggagcagatcctgcctaacgctcagctcgtgttctccgacccttctcagtgcgacagcaacacgaaggacttttggatgaacatgcaagcggttaccgtgtacctgaaaaaactctcggagcagaatcccgcagcatcctattacaatgttgacgtgcttaagtatcaagtctctagcaatgggattcagtccacacctttaaacctggccacctattggaagtgtagtgctagcaccactgacctgcgtgttgattacaagtataatccagaagccatggtggccccttcagtgctgtcaaatatccaggtggtggtccccgttgacggaggcgtgacaaacatgcagtcactgccccccgctatttggaatgctgaacagatgaaggcattctggaagttatcaagtatctctgagaagagcgagaacgggggctcagggagcttaagagcaaagttcgatctgagcgaggggccatccaaaccaactacactcgccgttcagttcctgtcagaaggatcaactctgtctggagtggacttcgaacttgtgggaaccgggtaccggctgtctttaatcaaaaaacgttttgccacgggcaggtatcttgctgattgttag

SEQ ID NO: 237345 - DNA, 2433 bp, Artificial Sequence
  derived and/or modified sequence
atggtgatggcctacttcgtggagaacttctggggcgagaagaactccgggtttgacgtcctctatcacaacatgaaacatggacagatttctactaaggagctggccgatttcgtccgggaacgcgctaccattgaggaggcgtactcccggagcatgactaagctggccaagagcgcctcaaactattctcagctgggtacctttgcccccgtgtgggacgtatttaagacttcaacagagaaactcgcaaactgccatctcgacttagttcgaaaacttcaggaattgatcaaggaggtccaaaaatatggcgaggagcaggttaagtcgcataaaaaaactaaagaagaggtcgctggtaccctggaggcagtccagaccatccagtcaatcacacaagctctgcagaagtctaaggagaattataacgccaagtgcgtcgagcaggagcgactgaagaaagaaggcgccacgcagcgagagatagaaaaggccgctgtgaagagtaagaaggctacagatacatacaaactgtatgtggagaaatacgcgctggctaaagccgattttgagcagaaaatgaccgaaaccgcccagaaattccaggacatcgaggagactcacctgatccacatcaaagaaattattggttccctgtctaatgccataaaggaaattcacctgcagataggacaggtccacgaagagttcatcaataatatggctaacaccacagtggaaagcttaattcagaaattcgctgagtctaagggcacaggaaaggaaagacccggcctgatcgaattcgaagagtgtgacacagccagcgcagtggaaggcattaagcctcgcaaaaggaagacgttcgctctcccaggtataattaagaaagaaaaggacgctgaaagcgtcgaatgtccagatgcggattcactcaatattcctgatgtggatgaggagggttacagcattaaaccagagactaatcaaaatgacacaaaagaaaaccatttttactcctccagcgacagtgactcagaagatgaagaacccaagaagtaccgaattgagatcaagcctatgcacccaaataactctcaccataccatggcctccctagatgagcttaaggttagcataggtaatatcacgttgtctccagctatttcacgtcactcacccgtccaaatgaaccgaaacctctccaatgaagagctgaccaagagcaaaccttccgcccctcctaacgagaaggggacaagcgatctgttggcttgggatccactattcggcccgtccctggacagtagctcatcaagctctctgactagttcaagctctgctcgccccactactccactctctgtgggcacgatcgttcccccaccacggcccgcttctaggcctaaactgacttcaggcaagctttccgggattaacgagatcccgcgccctttcagtcctcctgttacctctaacacgagccctccccccgccgcccctttagcccgcgcggagtcatcttcttccatcagtagttcagctagcctcagcgcagctaacactcccacggtcggagtcagccgtggccccagtccagtctcattaggcaaccaggacaccttgcccgtcgctgtcgctctaacagaaagtgtgaatgcctactttaaaggcgctgacccaaccaaatgtatcgtgaagatcaccggagacatgaccatgtcttttccgtctgggatcatcaaggtgtttacaagtaacccaacacccgccgtactgtgctttagggtcaagaacatttccagactggagcaaatcttgcccaacgcgcagctggttttcagcgacccctcccagtgcgatagcaataccaaggacttctggatgaacatgcaggctgtgaccgtttacttgaagaagctgtctgagcagaacccggcagcaagctactataatgtggatgtactgaagtaccaggtctcttccaacggcattcagagcaccccgctgaatttggctacgtactggaagtgttctgcatccaccacagacctgagggtcgactacaaatacaatccggaggctatggtcgctccctccgtcctatcaaacatccaggtggtagttccagtcgacggaggagtcacaaacatgcaatctctgccaccggctatatggaacgcagagcagatgaaagccttctggaaacttagcagcattagcgaaaagtctgaaaatgggggctctgggtcactgagagctaagttcgacctgtcagaggggccaagcaagcctaccaccctggctgtgcagtttctgtcagagggaagcaccttgagtggagttgatttcgaactagttggcaccggttataggctatctttaatcaagaaacgctttgccactgggcgttatttggcggactgttag

SEQ ID NO: 237346 - DNA, 1137 bp, Artificial Sequence
  derived and/or modified sequence
atggtaatggcatatttcgtagaaaacttctggggagagaaaaactctggtttcgacgtcctttaccacaacatgaagcacggtcagatctctactaaggaactggctgattttgtaagggaacgggcaaccatcgaagaggcgtactctcgtagcatgacaaagctcgctaaatccgcatctaactattcacagctgggcactttcgccccagtgtgggacgtctttaagacctcaaccgagaagctggccaactgccatcttgatcttgtgaggaaactgcaggaactgatcaaggaggtgcagaagtatggggaggaacaggtgaagagccacaaaaagacaaaggaagaagttgcaggaaccttggaggctgttcaaacaatccagagtatcacccaggcactgcagaaatctaaggagaattacaacgccaagtgcgtagagcaggagcgtctgaaaaaagaaggcgctactcaacgtgaaatagagaaagccgctgtcaagtctaagaaggcaactgatacctacaagctctacgtggagaagtacgccttggctaaggcggattttgaacaaaagatgacggaaaccgctcagaaattccaagatatcgaggagacgcacctcatacatatcaaggagattatcggaagtctgagtaatgcgatcaaggagattcatttgcagatcgggcaggtccatgaggagtttattaacaacatggcaaatactacagtagagtccctgatccagaagtttgctgagtcaaaggggactggcaaggagagaccagggctaatcgaatttgaggaatgtgatactgcatccgccgtggagggcattaaacccagaaaacgtaagacgtttgcgctgcccggtattataaagaaagagaaagatgcagagtccgtgtggtcttttacagtggttgcccaggtaggcatgcagtggcgcgacctgggtttactccattcacctccacccagattcaaacgtttttcatcctatttgtcattgcctagcagctggaactacggggctcaccaccacatttggctcatcttctgcatcttctcaagagacagagtgtccccatactggccgggatggtctcgaacacctgatctcagatag

SEQ ID NO: 237347 - DNA, 2433 bp, Artificial Sequence
  derived and/or modified sequence
atggtgatggcctacttcgtcgagaacttctggggcgaaaagaacagcggcttcgacgtgctgtatcataacatgaagcacggccagataagcaccaaggaactggcagactttgtgcgcgaaagggcaacgattgaggaagcttactcccggtcaatgactaagctggcaaagtctgctagcaactattcacagctgggcacctttgctcctgtttgggacgtattcaagactagcaccgaaaagcttgctaattgccacctagacctcgtgcggaaactgcaggagctgattaaagaggtgcagaaatacggagaggaacaagtgaagtcacataagaagacaaaagaagaagtggccggaaccctcgaggccgtccagactattcagagtatcacacaagccctccagaagagcaaagaaaattacaacgctaagtgcgttgaacaggagaggttgaagaaggagggggcaacgcagcgggaaatcgaaaaggccgcagtgaaatctaaaaaggctacagatacttataaactctacgtggagaaatacgctctggcgaaagctgattttgagcagaagatgactgagaccgctcagaagttccaggatatcgaggagacacatctgatacacatcaaggaaatcatcggtagcctaagcaatgcgatcaaagaaatacacctgcaaatcggccaagtgcacgaagagttcatcaacaatatggccaataccactgtggagtcactcattcagaagttcgccgaatccaaaggtaccggtaaagaaaggcctggtctgattgagttcgaagagtgtgacacggcctcagctgtggaaggcattaagcccaggaagagaaagacctttgcacttcccggtattattaaaaaagaaaaggacgcagaatccgtggaatgcccagacgcggattcgctgaacataccagacgtggacgaagaaggctactccatcaagcccgagaccaaccagaacgacactaaagaaaaccatttctattcgtcttctgactctgattccgaagacgaggaaccaaagaagtacagaatcgagattaagcctatgcacccaaataacagccaccatacgatggcttctctggacgagcttaaagtgtcgattggaaacatcactttgtctcctgccatttccgtttccactaacacacgcctcaaccgcaattttaatgacgaggaactcactaagagtaaaccatcagcacctccaaatgagaaggggacaagcgacttgctggcttgggatcccctgttcggcccatccctcgactccagcagctcgagttctctgacatcctcttccagcgcgagacctacgacacctctgagcgtgggaacaatcgtcccaccacctcggccagcatctcgaccaaaactgacctcaggtaaacttagcggcatcaatgaaatcccaagacccttttcgccgcctgtcacttcgaacacgagtcctccaccggcagccccactggccagggctgagtcctccagtagcatttcctcttccgccagcctgtccgccgcaaacacgcctaccgtgggggtcagcagaggtcctagccctgtgtcgctaggcaatcaggatactttgcccgtggcagtggccttaacagagagtgtgaacgcatactttaagggcgcagatcccacaaagtgcatcgtcaagatcacgggcgacatgactatgagcttccctagtgggataattaaagtcttcacaagcaacccgacacccgcagtgttatgtttcagagtcaagaacatctcccgcttggagcaaattttaccgaacgcacaacttgtattttctgacccaagccagtgcgatagcaacaccaaggacttttggatgaatatgcaggcggtgaccgtctacttgaaaaagctctccgaacagaatcctgccgcttcctattacaatgttgacgtcctgaagtatcaagtgtcatccaacggtatacaaagcactccccttaaccttgcaacttactggaagtgtagtgccagtactaccgatctcagggtggattacaaatacaatccagaagccatggtggctccaagtgtgctcagcaacatccaagtagtcgtcccagttgatggcggtgtcactaacatgcagtcactgccccctgccatttggaatgccgagcagatgaaggcattttggaaactcagcagtatttctgagaagagcgagaatggtggttcaggcagcctcagagctaaattcgatctcagtgaaggtccctccaaaccgacgaccctcgccgtccagttcctcagcgagggatccaccctgagtggagttgatttcgaactcgtggggaccggttaccgtctctcactcattaagaaaaggttcgctaccggtagatacctcgccgactgttag

SEQ ID NO: 237348 - DNA, 2433 bp, Artificial Sequence
  derived and/or modified sequence
atggtgatggcatacttcgtggagaacttttggggcgagaagaacagcggcttcgacgttctgtatcacaatatgaaacatggtcagatcagcaccaaagagctcgctgatttcgttagagagagagcaaccattgaggaagcatacagccgaagcatgaccaagttagcaaagagtgctagtaattacagtcagttggggacatttgccccagtgtgggacgtatttaagaccagcaccgagaaactcgctaattgccatctggacctggtcaggaaattgcaggaactgataaaggaggttcaaaaatacggcgaggagcaggttaagtcgcataaaaaaacaaaagaggaagttgctgggacactggaggccgttcagaccattcagtcaatcacccaggctcttcagaagagcaaggaaaactataacgccaagtgtgtggagcaggaaagactgaagaaggaaggtgcaactcagcgagaaatcgaaaaggcagcagtgaaatctaagaaagctacagatacgtataagctgtatgtagagaaatacgcactggccaaagccgatttcgagcagaaaatgaccgagacggcccagaaattccaggacatcgaggagactcatctaatccatatcaaggaaatcattggatcgttatcgaacgcaatcaaggagatccatctccagattgggcaggtccacgaagagttcattaacaacatggctaacacaaccgtggaatcactcatccaaaagttcgccgaatccaagggtaccggtaaggagcgcccaggactgattgagttcgaagagtgtgatacagcaagtgctgtcgagggcattaaaccccgaaagagaaagaccttcgccctacctggaataatcaagaaggaaaaagacgcagagtctgtggagtgccctgacgccgactccctcaatatcccagatgttgatgaggaagggtactcaatcaaacccgaaaccaaccaaaatgacactaaagagaatcacttctactcttcaagtgacagtgatagcgaggacgaagaacccaagaagtatcgtattgagatcaaaccgatgcacccaaacaattctcaccatacgatggcatccttggacgagctgaaagtgtccattggcaatatcactttgtccccagccatttctcggcacagccctgtacagatgaaccggaacttatccaatgaggagcttactaaatctaagccaagcgcaccccctaatgagaaaggcacgtcagatctcctggcctgggacccgctgtttgggccatctcttgacagctccagctcctcctctcttacatcaagctcaagtgctcgtcctaccacacctttgtctgtcggaacgattgtgcccccacctcgccctgctagtcgacctaagctgactagcgggaagctctcaggcatcaatgagattcctcgccctttctcacctccggttacttctaacacttctcccccaccagccgcacccctggcacgcgcagagagtagttcatccatctcgtctagtgcgtcactcagcgcagccaacacaccaaccgtcggagtctcacgcggaccgtcccccgtctcacttggaaatcaggataccttacctgttgccgtagcgctgactgagtctgtgaatgcatacttcaaaggcgctgacccgaccaaatgcatcgtaaagatcaccggcgacatgaccatgtctttcccaagcggaataattaaggtcttcacaagcaatccaacacctgccgtcctgtgttttagggttaaaaacatttcacggcttgaacaaattctccctaatgctcagctcgtgttctccgacccttctcagtgcgatagcaataccaaagatttttggatgaatatgcaggcagtgactgtgtatctgaaaaagctgtcagagcaaaatcctgccgctagctattacaacgtggatgtcttgaaatatcaggtgagctccaatggcatccagagcactcctctcaacttagccacatattggaaatgttcagcatctactacagatctgcgggtcgattacaaatacaacccagaagctatggtggccccatccgtgctgtctaatatacaggtcgtagtacctgtggacgggggagtaaccaacatgcaaagcctgcctcctgcgatttggaatgctgagcaaatgaaggcgttctggaaactttcctcaatctctgagaagtccgaaaacgggggttccggttctctacgagccaaatttgatctgagtgagggtccttctaagccaaccacccttgcggttcagttcctgtcagaagggagcacattatcgggtgttgacttcgagcttgttggaaccgggtaccggctgtccctgatcaagaagaggttcgccaccggcagatatctcgccgactgttag

SEQ ID NO: 237349 - DNA, 1137 bp, Artificial Sequence
  derived and/or modified sequence
atggtgatggcctacttcgtggagaacttctggggcgagaagaacagcggcttcgacgtgctgtaccacaacatgaagcacggccagatcagcaccaaggagctggccgacttcgtgagagagagagccaccatcgaggaggcctacagcagaagcatgaccaagctggccaagagcgccagcaactacagccagctgggcaccttcgcccccgtgtgggacgtgttcaagaccagcaccgagaagctggccaactgccacctggacctggtgagaaagctgcaggagctgatcaaggaggtgcagaagtacggcgaggagcaggtgaagagccacaagaagaccaaggaggaggtggccggcaccctggaggccgtgcagaccatccagagcatcacccaggccctgcagaagagcaaggagaactacaacgccaagtgcgtggagcaggagagactgaagaaggagggcgccacccagagagagatcgagaaggccgccgtgaagagcaagaaggccaccgacacctacaagctgtacgtggagaagtacgccctggccaaggccgacttcgagcagaagatgaccgagaccgcccagaagttccaggacatcgaggagacccacctgatccacatcaaggagatcatcggcagcctgagcaacgccatcaaggagatccacctgcagatcggccaggtgcacgaggagttcatcaacaacatggccaacaccaccgtggagagcctgatccagaagttcgccgagagcaagggcaccggcaaggagagacccggcctgatcgagttcgaggagtgcgacaccgccagcgccgtggagggcatcaagcccagaaagagaaagaccttcgccctgcccggcatcatcaagaaggagaaggacgccgagagcgtgtggagcttcaccgtggtggcccaggtgggcatgcagtggagagacctgggcctgctgcacagccccccccccagattcaagagattcagcagctacctgagcctgcccagcagctggaactacggcgcccaccaccacatctggctgatcttctgcatcttcagcagagacagagtgagcccctactggcccggctggagcagaacccccgacctgagatag

SEQ ID NO: 237350 - DNA, 2433 bp, Artificial Sequence
  derived and/or modified sequence
atggtgatggcctacttcgtggagaacttctggggcgagaagaacagcggcttcgacgtgctgtaccacaacatgaagcacggccagatcagcaccaaggagctggccgacttcgtgagagagagagccaccatcgaggaggcctacagcagaagcatgaccaagctggccaagagcgccagcaactacagccagctgggcaccttcgcccccgtgtgggacgtgttcaagaccagcaccgagaagctggccaactgccacctggacctggtgagaaagctgcaggagctgatcaaggaggtgcagaagtacggcgaggagcaggtgaagagccacaagaagaccaaggaggaggtggccggcaccctggaggccgtgcagaccatccagagcatcacccaggccctgcagaagagcaaggagaactacaacgccaagtgcgtggagcaggagagactgaagaaggagggcgccacccagagagagatcgagaaggccgccgtgaagagcaagaaggccaccgacacctacaagctgtacgtggagaagtacgccctggccaaggccgacttcgagcagaagatgaccgagaccgcccagaagttccaggacatcgaggagacccacctgatccacatcaaggagatcatcggcagcctgagcaacgccatcaaggagatccacctgcagatcggccaggtgcacgaggagttcatcaacaacatggccaacaccaccgtggagagcctgatccagaagttcgccgagagcaagggcaccggcaaggagagacccggcctgatcgagttcgaggagtgcgacaccgccagcgccgtggagggcatcaagcccagaaagagaaagaccttcgccctgcccggcatcatcaagaaggagaaggacgccgagagcgtggagtgccccgacgccgacagcctgaacatccccgacgtggacgaggagggctacagcatcaagcccgagaccaaccagaacgacaccaaggagaaccacttctacagcagcagcgacagcgacagcgaggacgaggagcccaagaagtacagaatcgagatcaagcccatgcaccccaacaacagccaccacaccatggccagcctggacgagctgaaggtgagcatcggcaacatcaccctgagccccgccatcagcgtgagcaccaacaccagactgaacagaaacttcaacgacgaggagctgaccaagagcaagcccagcgccccccccaacgagaagggcaccagcgacctgctggcctgggaccccctgttcggccccagcctggacagcagcagcagcagcagcctgaccagcagcagcagcgccagacccaccacccccctgagcgtgggcaccatcgtgcccccccccagacccgccagcagacccaagctgaccagcggcaagctgagcggcatcaacgagatccccagacccttcagcccccccgtgaccagcaacaccagccccccccccgccgcccccctggccagagccgagagcagcagcagcatcagcagcagcgccagcctgagcgccgccaacacccccaccgtgggcgtgagcagaggccccagccccgtgagcctgggcaaccaggacaccctgcccgtggccgtggccctgaccgagagcgtgaacgcctacttcaagggcgccgaccccaccaagtgcatcgtgaagatcaccggcgacatgaccatgagcttccccagcggcatcatcaaggtgttcaccagcaaccccacccccgccgtgctgtgcttcagagtgaagaacatcagcagactggagcagatcctgcccaacgcccagctggtgttcagcgaccccagccagtgcgacagcaacaccaaggacttctggatgaacatgcaggccgtgaccgtgtacctgaagaagctgagcgagcagaaccccgccgccagctactacaacgtggacgtgctgaagtaccaggtgagcagcaacggcatccagagcacccccctgaacctggccacctactggaagtgcagcgccagcaccaccgacctgagagtggactacaagtacaaccccgaggccatggtggcccccagcgtgctgagcaacatccaggtggtggtgcccgtggacggcggcgtgaccaacatgcagagcctgccccccgccatctggaacgccgagcagatgaaggccttctggaagctgagcagcatcagcgagaagagcgagaacggcggcagcggcagcctgagagccaagttcgacctgagcgagggccccagcaagcccaccaccctggccgtgcagttcctgagcgagggcagcaccctgagcggcgtggacttcgagctggtgggcaccggctacagactgagcctgatcaagaagagattcgccaccggcagatacctggccgactgctag

SEQ ID NO: 237351 - DNA, 2433 bp, Artificial Sequence
  derived and/or modified sequence
atggtgatggcctacttcgtggagaacttctggggcgagaagaacagcggcttcgacgtgctgtaccacaacatgaagcacggccagatcagcaccaaggagctggccgacttcgtgagagagagagccaccatcgaggaggcctacagcagaagcatgaccaagctggccaagagcgccagcaactacagccagctgggcaccttcgcccccgtgtgggacgtgttcaagaccagcaccgagaagctggccaactgccacctggacctggtgagaaagctgcaggagctgatcaaggaggtgcagaagtacggcgaggagcaggtgaagagccacaagaagaccaaggaggaggtggccggcaccctggaggccgtgcagaccatccagagcatcacccaggccctgcagaagagcaaggagaactacaacgccaagtgcgtggagcaggagagactgaagaaggagggcgccacccagagagagatcgagaaggccgccgtgaagagcaagaaggccaccgacacctacaagctgtacgtggagaagtacgccctggccaaggccgacttcgagcagaagatgaccgagaccgcccagaagttccaggacatcgaggagacccacctgatccacatcaaggagatcatcggcagcctgagcaacgccatcaaggagatccacctgcagatcggccaggtgcacgaggagttcatcaacaacatggccaacaccaccgtggagagcctgatccagaagttcgccgagagcaagggcaccggcaaggagagacccggcctgatcgagttcgaggagtgcgacaccgccagcgccgtggagggcatcaagcccagaaagagaaagaccttcgccctgcccggcatcatcaagaaggagaaggacgccgagagcgtggagtgccccgacgccgacagcctgaacatccccgacgtggacgaggagggctacagcatcaagcccgagaccaaccagaacgacaccaaggagaaccacttctacagcagcagcgacagcgacagcgaggacgaggagcccaagaagtacagaatcgagatcaagcccatgcaccccaacaacagccaccacaccatggccagcctggacgagctgaaggtgagcatcggcaacatcaccctgagccccgccatcagcagacacagccccgtgcagatgaacagaaacctgagcaacgaggagctgaccaagagcaagcccagcgccccccccaacgagaagggcaccagcgacctgctggcctgggaccccctgttcggccccagcctggacagcagcagcagcagcagcctgaccagcagcagcagcgccagacccaccacccccctgagcgtgggcaccatcgtgcccccccccagacccgccagcagacccaagctgaccagcggcaagctgagcggcatcaacgagatccccagacccttcagcccccccgtgaccagcaacaccagccccccccccgccgcccccctggccagagccgagagcagcagcagcatcagcagcagcgccagcctgagcgccgccaacacccccaccgtgggcgtgagcagaggccccagccccgtgagcctgggcaaccaggacaccctgcccgtggccgtggccctgaccgagagcgtgaacgcctacttcaagggcgccgaccccaccaagtgcatcgtgaagatcaccggcgacatgaccatgagcttccccagcggcatcatcaaggtgttcaccagcaaccccacccccgccgtgctgtgcttcagagtgaagaacatcagcagactggagcagatcctgcccaacgcccagctggtgttcagcgaccccagccagtgcgacagcaacaccaaggacttctggatgaacatgcaggccgtgaccgtgtacctgaagaagctgagcgagcagaaccccgccgccagctactacaacgtggacgtgctgaagtaccaggtgagcagcaacggcatccagagcacccccctgaacctggccacctactggaagtgcagcgccagcaccaccgacctgagagtggactacaagtacaaccccgaggccatggtggcccccagcgtgctgagcaacatccaggtggtggtgcccgtggacggcggcgtgaccaacatgcagagcctgccccccgccatctggaacgccgagcagatgaaggccttctggaagctgagcagcatcagcgagaagagcgagaacggcggcagcggcagcctgagagccaagttcgacctgagcgagggccccagcaagcccaccaccctggccgtgcagttcctgagcgagggcagcaccctgagcggcgtggacttcgagctggtgggcaccggctacagactgagcctgatcaagaagagattcgccaccggcagatacctggccgactgctag

SEQ ID NO: 237352 - protein, 506 aa, Artificial Sequence
  derived and/or modified sequence
MLKPLWKAAVAPTWPCSMPPRRPWDREAGTLQVLGALAVLWLGSVALICLLWQVPRPPTWGQVQPKDVPRSWEHGSSPAWEPLEAEARQQRDSCQLVLVESIPQDLPSAAGSPSAQPLGQAWLQLLDTAQESVHVASYYWSLTGPDIGVNDSSSQLGEALLQKLQQLLGRNISLAVATSSPTLARTSTDLQVLAARGAHVRQVPMGRLTRGVLHSKFWVVDGRHIYMGSANMDWRSLTQVKELGAVIYNCSHLAQDLEKTFQTYWVLGVPKAVLPKTWPQNFSSHFNRFQPFHGLFDGVPTTAYFSASPPALCPQGRTRDLEALLAVMGSAQEFIYASVMEYFPTTRFSHPPRYWPVLDNALRAAAFGKGVRVRLLVGCGLNTDPTMFPYLRSLQALSNPAANVSVDVKVFIVPVGNHSNIPFSRVNHSKFMVTEKAAYIGTSNWSEDYFSSTAGVGLVVTQSPGAQPAGATVQEQLRQLFERDWSSRYAVGLDGQAPGQDCVWQG

SEQ ID NO: 237353 - protein, 666 aa, Artificial Sequence
  derived and/or modified sequence
MADMEDLFGSDADSEAERKDSDSGSDSDSDQENAASGSNASGSESDQDERGDSGQPSNKELFGDDSEDEGASHHSGSDNHSERSDNRSEASERSDHEDNDPSDVDQHSGSEAPNDDEDEGHRSDGGSHHSEAEGSEKAHSDDEKWGREDKSDQSDDEKIQNSDDEERAQGSDEDKLQNSDDDEKMQNTDDEERPQLSDDERQQLSEEEKANSDDERPVASDNDDEKQNSDDEEQPQLSDEEKMQNSDDERPQASDEEHRHSDDEEEQDHKSESARGSDSEDEVLRMKRKNAIASDSEADSDTEVPKDNSGTMDLFGGADDISSGSDGEDKPPTPGQPVDENGLPQDQQEEEPIPETRIEVEIPKVNTDLGNDLYFVKLPNFLSVEPRPFDPQYYEDEFEDEEMLDEEGRTRLKLKVENTIRWRIRRDEEGNEIKESNARIVKWSDGSMSLHLGNEVFDVYKAPLQGDHNHLFIRQGTGLQGQAVFKTKLTFRPHSTDSATHRKMTLSLADRCSKTQKIRILPMAGRDPECQRTEMIKKEEERLRASIRRESQQRRMREKQHQRGLSASYLEPDRYDEEEEGEESISLAAIKNRYKGGIREERARIYSSDSDEGSEEDKAQRLLKAKKLTSDEEGEPSGKRKAEDDDKANKKHKKYVISDEEEEDDD

SEQ ID NO: 237354 - protein, 644 aa, Artificial Sequence
  derived and/or modified sequence
MADMEDLFGSDADSEAERKDSDSGSDSDSDQENAASGSNASGSESDQDERGDSGQPSNKELFGDDSEDEGASHHSGSDNHSERSDNRSEASERSDHEDNDPSDVDQHSGSEAPNDDEDEGHRSDGGSHHSEAEGSEKAHSDDEKWGREDKSDQSDDEKIQNSDDEERAQGSDEDKLQNSDDDEKMQNTDDEERPQLSDDERQQLSEEEKANSDDERPVASDNDDDDERPQASDEEHRHSDDEEEQDHKSESARGSDSEDEVLRMKRKNAIASDSEADSDTEVPKDNSGTMDLFGGADDISSGSDGEDKPPTPGQPVDENGLPQDQQEEEPIPETRIEVEIPKVNTDLGNDLYFVKLPNFLSVEPRPFDPQYYEDEFEDEEMLDEEGRTRLKLKVENTIRWRIRRDEEGNEIKESNARIVKWSDGSMSLHLGNEVFDVYKAPLQGDHNHLFIRQGTGLQGQAVFKTKLTFRPHSTDSATHRKMTLSLADRCSKTQKIRILPMAGRDPECQRTEMIKKEEERLRASIRRESQQRRMREKQHQRGLSASYLEPDRYDEEEEGEESISLAAIKNRYKGGIREERARIYSSDSDEGSEEDKAQRLLKAKKLTSDEEGEPSGKRKAEDDDKANKKHKKYVISDEEEEDDD

SEQ ID NO: 237355 - DNA, 2001 bp, Artificial Sequence
  derived and/or modified sequence
atggctgacatggaagacctgtttgggagtgatgctgacagcgaggctgaaagaaaggatagcgacagcggtagcgatagcgactccgaccaagagaatgccgcaagtgggtccaacgcaagcggaagtgaatccgatcaggacgagaggggggacagtgggcagccaagcaataaggaactgtttggagacgactcggaggacgagggagcatcacatcactccggctccgataaccactcagagcgtagtgacaatcggagcgaggctagtgaacgcagcgaccatgaagacaacgacccctccgacgtcgatcagcactctggatccgaagcacctaatgatgacgaggatgaggggcacaggtccgatggcggttcgcaccattcagaggctgagggatccgaaaaggcgcattccgatgacgagaaatggggacgtgaagacaagtccgatcagtccgacgacgagaagatccagaattccgacgacgaggagcgggcacaagggagtgacgaggacaagttgcagaattcagacgacgatgaaaagatgcagaacacagatgatgaggagagaccccagctttctgatgacgagaggcagcaattgagtgaggaggaaaaggccaattccgacgacgagcgccctgtagctagcgacaacgacgacgaaaagcagaattctgacgacgaggagcaaccacagttgtctgacgaggaaaagatgcagaatagtgatgatgaacgcccccaggcgtccgatgaggagcatagacattctgacgatgaggaagagcaagaccacaagtcagaatctgcaagaggctcagattccgaggatgaggtgctgcggatgaagagaaaaaacgccattgcttccgactctgaagccgattccgacaccgaggtccccaaagacaatagcggcacaatggatctcttcggtggggcagacgacatctccagcggctccgacggcgaagacaagcccccgactccaggtcaacccgtggacgaaaatggacttcctcaggaccagcaagaggaagagcccattcctgaaactcggatcgaggtcgagatacctaaggtgaacacagatctggggaacgatttgtactttgttaagctgccgaacttcctaagcgttgagccccgcccatttgatccacagtattacgaggatgagttcgaagacgaggagatgctagacgaagagggacggacacgactaaagctgaaggtggaaaatacaatcagatggcgcattaggcgcgacgaggaggggaacgagatcaaggagagtaacgcacgaattgtaaagtggtctgatgggagcatgagcttgcatctggggaacgaagtgtttgacgtgtacaaggcgcccctgcagggagaccacaaccacctctttatcagacagggaacaggcctccagggacaggcggttttcaagaccaaattgacgttccgccctcattcgaccgattctgcgacacatcggaaaatgacactctctcttgcggataggtgcagcaagacccagaagattagaattttgccaatggctgggcgggaccccgagtgtcagagaacagaaatgattaagaaggaggaggagcgcctccgggctagcatacggagagaaagccaacagaggcgcatgagagaaaaacagcatcaacgaggactcagcgcctcttatcttgaacccgaccgctacgacgaggaggaggaaggggaagagagcatttctctggctgccatcaagaacagatataagggaggtattcgtgaggagagagctaggatatattcaagtgattccgatgaggggtccgaggaggataaggcccagaggctcctcaaggccaaaaagttaacaagtgacgaagaaggggagccgagtgggaaacgcaaggccgaagacgatgacaaggccaataagaagcacaagaaatacgtaatctctgatgaggaggaagaagacgacgactag

SEQ ID NO: 237356 - DNA, 1935 bp, Artificial Sequence
  derived and/or modified sequence
atggcggacatggaggacctctttgggagtgatgcggactctgaggcggaaaggaaagactccgattcgggcagcgacagcgatagcgaccaagagaacgcagcctccggcagtaatgcctctgggtccgaatccgatcaggatgagcgcggcgactcagggcaaccctccaacaaggagctctttggagatgacagtgaagacgagggtgcctcccatcacagtggatctgataaccacagcgagcggtccgataatagatctgaagccagcgaaagatccgaccacgaggacaatgatcccagcgacgtggatcagcactcgggctcagaagcccctaatgacgacgaagacgaaggacaccggtctgacggcggctcgcaccatagcgaagcagagggatcggaaaaagcgcactccgacgatgagaagtggggaagagaagacaagagtgatcagagcgacgacgaaaagattcaaaattctgacgacgaggaacgcgcacaagggtctgatgaggataagctgcagaacagtgacgacgacgagaagatgcagaacacggacgacgaggaaagacctcaactctcagatgacgagcgacagcaactttccgaggaggagaaagcaaacagcgacgatgaaagaccagtcgccagcgacaatgacgatgacgatgagcgcccgcaggcatccgacgaggaacataggcactccgatgatgaggaagaacaagaccataaatcagaaagtgccaggggaagtgactccgaagacgaggtactgagaatgaaaagaaaaaacgcaatagcgagtgattccgaagccgattcggacaccgaagtccccaaggataactctgggacaatggatcttttcggtggagctgacgatatatcctctggatccgatggggaagataaacccccgactcctgggcaaccagttgacgagaacgggcttccacaggatcagcaagaggaagagcccattccagagaccaggattgaagtggaaatacccaaggtgaatacagacctggggaacgatctgtatttcgtgaaacttcctaacttcctgtccgttgaaccacggccatttgatccacagtactatgaagacgaattcgaggacgaggagatgctggatgaggaagggagaaccaggctaaagctcaaagttgagaacaccataaggtggcgtatcaggagagatgaggagggaaatgagatcaaagagtctaacgctagaatcgtgaagtggagtgacgggagcatgtcgttacacctcggaaatgaggtatttgacgtttacaaagcccccctacagggcgaccacaaccatctatttatcagacagggcactggactgcagggccaggcagtgtttaagacgaagctgacattcagaccccattccaccgacagtgccacacacaggaaaatgacactgtccctggccgatcggtgttccaaaacccagaagataagaatcctgccaatggctggaagagatcccgagtgtcaacgaaccgaaatgatcaagaaagaagaggagcgcctgcgcgcttcgatccgcagagaatctcagcagaggagaatgagagagaaacagcatcagcgaggactgtcggccagttatttggaaccagacaggtatgacgaggaggaggaaggagaagagagcatttctttggcggctatcaagaaccgctataagggaggaattagggaagagagagcacgcatctattcttctgacagtgacgaaggtagcgaggaggataaggctcagaggctgctgaaagccaagaaattaacatctgacgaagaaggtgagccatcaggtaaacggaaggctgaggatgatgacaaggctaacaaaaagcataaaaagtatgtcatttctgatgaggaggaagaagatgacgactag

SEQ ID NO: 237357 - DNA, 2001 bp, Artificial Sequence
  derived and/or modified sequence
atggctgacatggaggacctgtttggaagtgatgctgacagcgaggccgagaggaaggacagcgacagcggcagtgacagcgacagcgaccaggagaatgctgccagcggcagcaatgccagcggcagcgagagtgaccaggatgagcggggggacagcggccagcccagcaacaaggagctgtttggagatgacagtgaagatgagggcgccagccaccacagcggcagtgacaaccacagcgagaggagtgacaacagaagtgaggccagcgagaggagtgaccatgaagataatgaccccagtgatgtggaccagcacagcggcagcgaggccccaaatgatgatgaagatgagggccacagaagtgatggcggcagccaccacagcgaggccgagggcagcgagaaggcccacagtgatgatgagaagtggggccgggaggacaagagtgaccagagtgatgatgagaagatccagaacagtgatgatgaggagcgggcccagggcagtgatgaggacaagctgcagaacagtgatgatgatgagaagatgcagaacacagatgatgaggagcggccccagctgagtgatgatgagcggcagcagctgtctgaggaggagaaggccaacagtgatgatgagaggcctgtggccagtgacaatgatgatgagaagcagaacagtgatgatgaggagcagccccagctgagtgatgaggagaagatgcagaacagtgatgatgagcggccccaggccagtgatgaggagcaccgccacagtgatgatgaggaggagcaggaccacaagtctgagagcgcccggggcagtgacagtgaagatgaggtgctgaggatgaagaggaagaatgccatcgccagtgacagcgaggccgacagcgacacagaggtgcccaaggacaacagcggcaccatggacctgtttggaggagcagatgacatcagcagcggcagtgatggagaggacaagccacccaccccaggccagcctgtggatgaaaatggcctgccccaggaccagcaggaggaggagcccatccctgagacccgcatcgaggtggagatccccaaggtgaacacagacctgggcaatgacctgtactttgtgaagctgcccaacttcctgtctgtggagccccggccctttgacccccagtactatgaagatgaatttgaagatgaggagatgctggatgaggagggccgcacccggctgaagctgaaggtggagaacaccatccgctggaggatcagaagagatgaggagggcaatgagatcaaggagagcaatgcccgcatcgtgaagtggagcgatggctccatgagcctgcacctgggcaatgaggtgtttgatgtgtacaaggcccccctgcagggcgaccacaaccacctgttcatccggcagggcaccggcctgcagggccaggccgtgttcaagaccaagctgaccttccggccccacagcacagacagcgccacccacaggaagatgaccctgagcctggccgaccgctgcagcaagacccagaagatccgcatcctgcccatggccggccgggaccctgagtgccagaggacagagatgatcaagaaggaggaggagcggctgcgggccagcatccggcgggagagccagcagaggaggatgagggagaagcagcaccagaggggcctgagcgccagctacctggagccagacagatatgatgaggaggaggagggggaggagagcatcagcctggccgccatcaagaaccgctacaagggcggcatccgggaggagcgggcccgcatctacagcagtgacagtgatgagggcagcgaggaggacaaggcccagaggctgctgaaggccaagaagctgaccagtgatgaggagggggagcccagcggcaagaggaaggcagaagatgatgacaaggccaacaagaagcacaagaagtatgtgatcagtgatgaggaggaggaggatgatgactag

SEQ ID NO: 237358 - DNA, 1935 bp, Artificial Sequence
  derived and/or modified sequence
atggctgacatggaggacctgtttggaagtgatgctgacagcgaggccgagaggaaggacagcgacagcggcagtgacagcgacagcgaccaggagaatgctgccagcggcagcaatgccagcggcagcgagagtgaccaggatgagcggggggacagcggccagcccagcaacaaggagctgtttggagatgacagtgaagatgagggcgccagccaccacagcggcagtgacaaccacagcgagaggagtgacaacagaagtgaggccagcgagaggagtgaccatgaagataatgaccccagtgatgtggaccagcacagcggcagcgaggccccaaatgatgatgaagatgagggccacagaagtgatggcggcagccaccacagcgaggccgagggcagcgagaaggcccacagtgatgatgagaagtggggccgggaggacaagagtgaccagagtgatgatgagaagatccagaacagtgatgatgaggagcgggcccagggcagtgatgaggacaagctgcagaacagtgatgatgatgagaagatgcagaacacagatgatgaggagcggccccagctgagtgatgatgagcggcagcagctgtctgaggaggagaaggccaacagtgatgatgagaggcctgtggccagtgacaatgatgatgatgatgagcggccccaggccagtgatgaggagcaccgccacagtgatgatgaggaggagcaggaccacaagtctgagagcgcccggggcagtgacagtgaagatgaggtgctgaggatgaagaggaagaatgccatcgccagtgacagcgaggccgacagcgacacagaggtgcccaaggacaacagcggcaccatggacctgtttggaggagcagatgacatcagcagcggcagtgatggagaggacaagccacccaccccaggccagcctgtggatgaaaatggcctgccccaggaccagcaggaggaggagcccatccctgagacccgcatcgaggtggagatccccaaggtgaacacagacctgggcaatgacctgtactttgtgaagctgcccaacttcctgtctgtggagccccggccctttgacccccagtactatgaagatgaatttgaagatgaggagatgctggatgaggagggccgcacccggctgaagctgaaggtggagaacaccatccgctggaggatcagaagagatgaggagggcaatgagatcaaggagagcaatgcccgcatcgtgaagtggagcgatggctccatgagcctgcacctgggcaatgaggtgtttgatgtgtacaaggcccccctgcagggcgaccacaaccacctgttcatccggcagggcaccggcctgcagggccaggccgtgttcaagaccaagctgaccttccggccccacagcacagacagcgccacccacaggaagatgaccctgagcctggccgaccgctgcagcaagacccagaagatccgcatcctgcccatggccggccgggaccctgagtgccagaggacagagatgatcaagaaggaggaggagcggctgcgggccagcatccggcgggagagccagcagaggaggatgagggagaagcagcaccagaggggcctgagcgccagctacctggagccagacagatatgatgaggaggaggagggggaggagagcatcagcctggccgccatcaagaaccgctacaagggcggcatccgggaggagcgggcccgcatctacagcagtgacagtgatgagggcagcgaggaggacaaggcccagaggctgctgaaggccaagaagctgaccagtgatgaggagggggagcccagcggcaagaggaaggcagaagatgatgacaaggccaacaagaagcacaagaagtatgtgatcagtgatgaggaggaggaggatgatgactag

SEQ ID NO: 237359 - DNA, 2193 bp, Artificial Sequence
  derived and/or modified sequence
cgtgccgtaaagagaggccgggagctgcccctaaccgaggcagcagcggacgtgagcgataatggcggatatggaggatctcttcgggagcgacgccgacagcgaagctgagcgtaaagattctgattctggatctgactcagattctgatcaagagaatgctgcctctggcagtaatgcctctggaagtgaaagtgatcaggatgaaagaggtgattcaggacaaccaagtaataaggaactgtttggagatgacagtgaggacgagggagcttcacatcatagtggtagtgataatcactctgaaagatcagacaatagatcagaagcttctgagcgttctgaccatgaggacaatgacccctcagatgtagatcagcacagtggatcagaagcccctaatgatgatgaagacgaaggtcatagatcggatggagggagccatcattcagaagcagaaggttctgaaaaagcacattcagatgatgaaaaatggggcagagaagataaaagtgaccagtcagatgatgaaaagatacaaaattctgatgatgaggagagggcacaaggatctgatgaagataagctgcagaattctgacgatgatgagaaaatgcagaacacagatgatgaggagaggcctcagctttccgatgatgagagacaacagctatctgaggaggaaaaggctaattctgatgatgaacggccggtagcttctgataatgatgatgagaaacagaattctgatgatgaagaacaaccacagctgtctgatgaagagaaaatgcaaaattctgatgatgaaaggccacaggcctcagatgaagaacacaggcattcagatgatgaagaggaacaggatcataaatcagaatctgcaagaggcagtgatagtgaagatgaagttttacgaatgaaacgcaagaatgcgattgcatctgattcagaagcggatagtgacactgaggtgccaaaagataatagtggaaccatggatttatttggaggtgcagatgatatctcttcagggagtgatggagaagacaaaccacctactccaggacagcctgttgatgaaaatggattgcctcaggatcaacaggaagaggagccaattcctgagaccagaatagaagtagaaatacccaaagtaaacactgatttaggaaacgacttatattttgttaaactgcccaactttctcagtgtagagcccagaccttttgatcctcagtattatgaagatgaatttgaagatgaagaaatgctggatgaagaaggtagaaccaggttaaaattaaaggtagaaaatactataagatggaggatacgccgagatgaagaaggaaatgaaattaaagaaagcaatgctcggatagtcaagtggtcagatggaagcatgtccctgcatttaggcaatgaagtgtttgatgtgtacaaagccccactgcagggcgaccacaatcatctttttataagacaaggtactggtctacagggacaagcagtctttaaaacgaaactcaccttcagacctcactctacggacagtgccacacatagaaagatgactctgtcacttgcagataggtgttcaaagacacagaagattagaatcttgccaatggctggtcgtgatcctgaatgccaacgcacagaaatgattaagaaagaagaagaacgtttgagggcttccatacgtagggaatctcagcagcgccgaatgagagagaaacagcaccagcgggggctgagcgccagttacctggaacctgatcgatacgatgaggaggaggaaggcgaggagtccatcagcttggctgccattaaaaaccgatataaagggggcattcgagaggaacgagccagaatctattcatcagacagtgatgagggatcagaagaagataaagctcaaagattactcaaagcaaagaaacttaccagtgatgaggaaggtgaaccttccggaaagagaaaagcagaagatgatgataaagcaaataaaaagcataagaagtatgtgatcagcgatgaagaggaagaagatgatgattgaagtatgaaatatgaaaacattttatatattttattgtacagttataaatatgtaaacatgagttattttgattgaaatgaatcgatttgcttttgtgtaattttaattgtaataaaacaatttaaaagcaa

SEQ ID NO: 237360 - DNA, 2101 bp, Artificial Sequence
  derived and/or modified sequence
ctgcccctaaccgaggcagcagcggacgtgagcgataatggcggatatggaggatctcttcgggagcgacgccgacagcgaagctgagcgtaaagattctgattctggatctgactcagattctgatcaagagaatgctgcctctggcagtaatgcctctggaagtgaaagtgatcaggatgaaagaggtgattcaggacaaccaagtaataaggaactgtttggagatgacagtgaggacgagggagcttcacatcatagtggtagtgataatcactctgaaagatcagacaatagatcagaagcttctgagcgttctgaccatgaggacaatgacccctcagatgtagatcagcacagtggatcagaagcccctaatgatgatgaagacgaaggtcatagatcggatggagggagccatcattcagaagcagaaggttctgaaaaagcacattcagatgatgaaaaatggggcagagaagataaaagtgaccagtcagatgatgaaaagatacaaaattctgatgatgaggagagggcacaaggatctgatgaagataagctgcagaattctgacgatgatgagaaaatgcagaacacagatgatgaggagaggcctcagctttccgatgatgagagacaacagctatctgaggaggaaaaggctaattctgatgatgaacggccggtagcttctgataatgatgatgatgatgaaaggccacaggcctcagatgaagaacacaggcattcagatgatgaagaggaacaggatcataaatcagaatctgcaagaggcagtgatagtgaagatgaagttttacgaatgaaacgcaagaatgcgattgcatctgattcagaagcggatagtgacactgaggtgccaaaagataatagtggaaccatggatttatttggaggtgcagatgatatctcttcagggagtgatggagaagacaaaccacctactccaggacagcctgttgatgaaaatggattgcctcaggatcaacaggaagaggagccaattcctgagaccagaatagaagtagaaatacccaaagtaaacactgatttaggaaacgacttatattttgttaaactgcccaactttctcagtgtagagcccagaccttttgatcctcagtattatgaagatgaatttgaagatgaagaaatgctggatgaagaaggtagaaccaggttaaaattaaaggtagaaaatactataagatggaggatacgccgagatgaagaaggaaatgaaattaaagaaagcaatgctcggatagtcaagtggtcagatggaagcatgtccctgcatttaggcaatgaagtgtttgatgtgtacaaagccccactgcagggcgaccacaatcatctttttataagacaaggtactggtctacagggacaagcagtctttaaaacgaaactcaccttcagacctcactctacggacagtgccacacatagaaagatgactctgtcacttgcagataggtgttcaaagacacagaagattagaatcttgccaatggctggtcgtgatcctgaatgccaacgcacagaaatgattaagaaagaagaagaacgtttgagggcttccatacgtagggaatctcagcagcgccgaatgagagagaaacagcaccagcgggggctgagcgccagttacctggaacctgatcgatacgatgaggaggaggaaggcgaggagtccatcagcttggctgccattaaaaaccgatataaagggggcattcgagaggaacgagccagaatctattcatcagacagtgatgagggatcagaagaagataaagctcaaagattactcaaagcaaagaaacttaccagtgatgaggaaggtgaaccttccggaaagagaaaagcagaagatgatgataaagcaaataaaaagcataagaagtatgtgatcagcgatgaagaggaagaagatgatgattgaagtatgaaatatgaaaacattttatatattttattgtacagttataaatatgtaaacatgagttattttgattgaaatgaatcgatttgcttttgtgtaattttaattgtaataaaacaatttaaaagc

SEQ ID NO: 237361 - DNA, 2001 bp, Artificial Sequence
  derived and/or modified sequence
atggccgacatggaggacctgttcggcagcgacgccgacagcgaggctgaaagaaaggacagcgattcaggatcagactctgactccgatcaggaaaatgccgcctctggctccaatgcgtccggttccgagtcggatcaggacgaacggggggactcaggtcagcctagtaacaaggaactattcggggacgacagcgaagacgagggcgctagccatcatagtggttcggataaccacagtgagcgatcagacaatcggtcggaggcttccgagcgatcggaccatgaagacaacgatcctagtgatgtcgatcaacacagcggtagtgaggctccgaatgacgatgaggatgaagggcatcggtccgacggtggctctcaccattccgaggccgaaggctccgaaaaagcccacagtgacgatgaaaagtggggcagggaagacaaaagtgaccagtcggacgacgagaaaattcagaattcagacgacgaagagcgcgctcaaggctcggacgaggacaagctgcagaactctgacgatgatgaaaaaatgcagaatacagacgatgaggagcggcctcaactctccgacgacgagcgtcagcagttgagcgaggaagagaaggcgaatagcgatgacgaacgccccgtggcatcagataacgacgacgagaaacaaaactcagatgacgaagaacagccccagctcagcgacgaggagaagatgcaaaactcggatgacgagcggccccaggcatccgacgaggagcaccgccactccgacgacgaggaagagcaggatcataagagcgagagtgcccgcggaagcgactctgaagacgaagttctgagaatgaagcgcaaaaatgctattgcctcggattctgaggccgacagtgataccgaagtgcctaaggacaattccggcacaatggatttgttcggcggagctgacgacatcagcagcggcagcgatggggaggataaaccccccacccctggtcagcccgttgacgaaaatggccttccccaggatcaacaggaggaggagcctattccggaaactcgcatcgaggttgagatcccaaaggtgaacaccgacttgggaaacgatctctatttcgtcaaactgcccaactttctgtctgtcgaaccacgaccctttgaccctcaatactatgaggacgagtttgaggacgaggaaatgcttgatgaggagggccgcacccgattgaagctgaaggtcgagaatactatccgttggagaataaggcgagacgaagaagggaatgaaattaaagaaagtaatgcgcgcattgttaaatggagcgacggaagcatgagtctccatctgggcaatgaggtgtttgatgtctataaagctccactgcagggtgaccataatcatctctttataagacagggcaccgggctgcagggtcaggcggtgttcaagaccaaattgacattcagacctcactcaaccgacagtgctacacatagaaagatgaccctgtcattggcggaccgttgctcaaaaacacagaagatccggattttgcccatggcgggaagggatccggaatgccagcgaactgaaatgataaagaaggaagaagaacgcctgcgcgcgtccatccgccgggagtcacagcagaggcggatgagagagaaacagcatcagaggggcctatccgcaagttacctcgagcctgatcgctatgacgaggaggaggaaggagaggaatccatctcactagcagccatcaagaaccgatataaaggcggcatccgagaggagcgcgcccgtatctacagctctgatagcgatgaaggatccgaagaagacaaggctcagcggctgctaaaagcaaagaaactcacctccgacgaggagggcgagccgagcggcaagcgtaaggctgaagatgacgacaaggctaacaagaaacacaagaaatacgtaatttctgacgaagaggaagaagacgacgactag

SEQ ID NO: 237362 - DNA, 1935 bp, Artificial Sequence
  derived and/or modified sequence
atggccgacatggaggacctgttcggcagcgacgccgacagcgaggcggagaggaaggattcagattcgggaagcgacagcgattccgatcaggagaatgccgcttccggaagcaatgcttccgggagcgaatcggatcaagacgaacggggcgactctggacaaccatctaacaaggaattgtttggcgacgacagtgaggacgaaggggctagccatcatagtgggtcagacaaccattccgagagatctgacaacagatcggaagcgtccgagcggtccgatcacgaagataacgaccctagtgacgtagatcagcacagcgggagtgaggcaccgaatgatgatgaggacgaaggacaccggtctgatgggggctcacatcacagcgaagcagagggatcagagaaggcacactccgatgatgaaaagtgggggagggaggataagtcagatcaatctgacgatgagaaaattcaaaactctgacgacgaagaacgcgcgcagggatccgatgaagataaattacagaattcagatgatgatgaaaagatgcagaatactgatgatgaagaacgtcctcagctctctgatgacgaacggcagcagttaagcgaagaggagaaagctaatagcgatgatgagaggccggttgctagtgataacgacgacgatgatgagaggcctcaggcttcggacgaagaacataggcattcagatgacgaggaggaacaagaccataaatcagagtcagctagagggagcgatagcgaagacgaagtgctgagaatgaagagaaagaatgctatagctagcgattctgaggctgactccgataccgaggttcccaaggataacagtggtactatggatttgtttggaggagccgacgacatcagcagtggcagcgacggcgaagataagcccccgaccccaggccagcccgttgacgaaaacggcctgccccaggaccaacaggaggaagaaccaatcccagaaaccaggatcgaagttgagatccctaaggtcaataccgatttaggcaatgacttatattttgttaagttgcccaatttcctttcagttgaacctcggccctttgacccacagtattatgaggacgaattcgaagatgaagagatgctggatgaagaaggtcgaactcggctgaaattaaaggtggagaacacgattcgctggcggatcaggcgcgatgaggaagggaatgagatcaaagagtcaaacgcaagaatcgtgaagtggagcgacggctccatgagccttcacctgggaaacgaagtgttcgacgtatacaaagccccgctacagggggaccacaaccacctgttcattcgtcagggaacagggcttcagggacaagccgtgttcaagaccaagctgactttccgacctcattctactgacagcgcgacccatcggaagatgaccttatcgttggccgatcggtgctctaaaacccagaagatccggatactacccatggcaggacgggatcccgaatgccagagaaccgaaatgatcaaaaaagaagaggaacgtctgagagcttctattcggagagaatctcagcagcgtaggatgcgggagaagcagcatcagcgtgggctcagtgcatcatacttggagcctgatcggtatgatgaggaggaggaaggggaagaatcgatcagcctagcagctatcaagaatcgctataagggaggaattcgcgaggaacgagcccgcatttatagttcagactccgacgaaggctcagaagaagacaaagctcagcgactgcttaaggcaaaaaagctgacaagtgatgaagagggggaaccaagcgggaagagaaaagcagaggatgatgataaagcaaataagaaacacaaaaagtatgtaattagtgatgaagaggaggaagatgacgactag

SEQ ID NO: 237363 - DNA, 2001 bp, Artificial Sequence
  derived and/or modified sequence
atggccgacatggaagatctctttggctccgatgcagattctgaagctgaacgcaaggattccgattccggctctgattccgactcagaccaagagaacgccgcatcaggctccaacgctagtgggtctgagtctgaccaagacgaacgtggcgactccggacagccctctaataaagagttattcggcgatgatagcgaggacgaaggtgcatcccaccacagcgggtctgacaaccacagtgaaaggagtgataacaggtcagaggcttccgagagatccgaccacgaagataacgatccctctgacgtcgaccaacatagcggtagcgaggccccaaatgacgacgaggatgaggggcataggagcgatgggggatcacatcacagtgaagctgaaggatcagagaaggcccattccgatgacgaaaaatggggccgagaagacaaatcagaccagagtgatgacgaaaagatacagaactcggatgacgaggaaagagcccagggctctgacgaagataagctgcagaactcagacgatgatgaaaagatgcaaaatactgatgatgaagaacgacctcaattgtctgatgacgagcggcagcagctgtcagaagaagagaaggcaaactccgacgacgaacggccagtggcgtcagacaatgacgatgaaaagcagaactccgacgacgaagagcaaccccagcttagcgacgaagagaagatgcagaactcagacgacgaaaggccacaagctagcgacgaggaacatagacatagcgacgacgaggaggagcaggatcataagtcagagagtgcacgtgggtccgactcagaggacgaggtgctaaggatgaaacgtaaaaacgctattgcctcggactccgaggctgacagtgataccgaagtccctaaagataattcaggaaccatggaccttttcggcggtgccgacgacatttcttccggcagcgacggcgaagataagcccccaacacccggacagcctgtggacgagaacggactccctcaggatcagcaggaggaggagccaattcctgaaacccggatcgaggtggaaatccctaaagtcaatacagacttgggtaacgacctctattttgtcaagctccccaacttcctgtcggtagaacctcggccatttgacccacagtattacgaagacgagtttgaggatgaggagatgcttgatgaagaagggcgtactaggctaaaacttaaggtagaaaacaccataaggtggagaatccgtcgggatgaagagggtaatgaaataaaggagagcaacgcccgtattgtgaagtggtccgatggaagcatgtccctgcacctgggcaacgaggtgtttgatgtgtataaggccccactccagggggatcacaaccatctgtttatacgacagggaaccggcctacagggtcaggccgtctttaaaacaaagttgacttttaggcctcattcaacggactccgctacccaccgaaagatgaccctgagcctggctgataggtgtagcaaaacacagaaaatcagaatcctgcctatggctggcagagatccagagtgccaaaggactgagatgatcaaaaaagaggaagaacgactgagagcaagcattaggagagaatctcaacagaggagaatgagggaaaagcaacaccaacgaggattgagtgcaagctaccttgaacctgaccggtacgacgaggaagaagaaggagaggagtcgatctccctggcggcaatcaaaaataggtacaaaggcggtatccgcgaggaacgtgctagaatatacagctctgatagtgacgaaggatccgaagaagacaaagctcaacggctccttaaggctaaaaagcttaccagcgatgaagagggagagccatccgggaagagaaaggctgaggatgatgataaagcaaacaaaaagcacaaaaagtacgtcatctctgacgaagaagaggaggacgacgattag

SEQ ID NO: 237364 - DNA, 1935 bp, Artificial Sequence
  derived and/or modified sequence
atggctgatatggaggacctgttcggctccgacgccgattcagaggctgagcgtaaagactctgacagcgggagcgattccgattccgaccaagagaatgccgcaagcgggtcaaacgcgagtgggtccgagtcggaccaggatgagagaggagatagtggtcagcccagcaataaggagctcttcggagacgatagtgaggacgaaggagctagccatcacagcggttcagacaatcacagtgagcggtccgacaacagatcggaagcaagtgagcgaagtgatcatgaggacaacgatccctcagacgtggaccaacactccggatctgaggctcctaacgatgacgaagacgaaggccacagatctgatggtggatcacatcattccgaggctgaggggtccgaaaaggcccacagtgacgacgaaaagtgggggcgtgaagacaagtcggatcagtcagatgacgagaagattcaaaacagtgacgacgaagaaagggcccagggatcagacgaagataaactccaaaatagtgacgacgacgagaaaatgcaaaatacagatgacgaggaaaggcctcagctgagcgatgatgagcgacagcagttaagcgaagaggagaaggcaaacagtgatgatgaaagaccagtggcctctgataatgatgatgacgatgagcggccacaggcatccgatgaagagcacagacactctgacgacgaagaggaacaagatcataagtcagaatccgcgagagggtccgactccgaagatgaggtgctcaggatgaaaaggaagaacgcaatcgcctcagatagtgaagcagatagtgacaccgaggtgcccaaagacaacagcggcacgatggatctgtttggtggcgctgatgatatttctagtggctcggacggagaggataagcctcctacacctggacagcccgtagatgaaaatggcttacctcaggatcagcaggaggaggaacccattcccgagactcgcattgaagtggagattccaaaagtgaacacggacctcggaaacgacctttactttgtgaaattgccaaatttcctcagcgtggagccacgtcccttcgacccgcagtactatgaagatgaatttgaagacgaagaaatgctggatgaggagggcaggacgagactcaagctgaaggtggagaataccattcggtggcgaatcagaagagacgaggagggcaacgaaataaaggaatcaaacgccagaatagtgaagtggagcgatgggtcaatgtctctccatctcgggaacgaggtttttgatgtctacaaggctccgctgcagggtgaccataatcacctctttatccgtcaaggcaccggattgcagggccaggccgtttttaaaacaaagcttacctttagacctcactcgacggattccgccacacacaggaagatgaccttgtctttagctgaccgctgctctaagacccagaagatcaggatactaccaatggccggtcgggaccctgaatgccaacggactgaaatgattaaaaaggaggaagaaaggctgcgagcatcaattcgtcgagagtctcagcagagacgcatgcgggagaaacaacatcagagaggtctctccgccagctacctcgaaccagaccggtacgatgaagaagaagagggtgaggagagcattagcctcgccgctataaagaatcggtataagggagggatccgggaggaaagggctcggatttacagcagcgattccgacgaagggtccgaggaggacaaagcgcagcgcttacttaaggccaaaaaactgacctctgatgaggagggcgaaccttcgggtaagcgcaaggccgaagatgacgacaaagccaataaaaagcataaaaaatatgtgatctccgacgaagaggaagaggacgatgactag

SEQ ID NO: 237365 - DNA, 2001 bp, Artificial Sequence
  derived and/or modified sequence
atggccgacatggaggacctgttcggcagcgacgccgacagcgaggccgagagaaaggacagcgacagcggcagcgacagcgacagcgaccaggagaacgccgccagcggcagcaacgccagcggcagcgagagcgaccaggacgagagaggcgacagcggccagcccagcaacaaggagctgttcggcgacgacagcgaggacgagggcgccagccaccacagcggcagcgacaaccacagcgagagaagcgacaacagaagcgaggccagcgagagaagcgaccacgaggacaacgaccccagcgacgtggaccagcacagcggcagcgaggcccccaacgacgacgaggacgagggccacagaagcgacggcggcagccaccacagcgaggccgagggcagcgagaaggcccacagcgacgacgagaagtggggcagagaggacaagagcgaccagagcgacgacgagaagatccagaacagcgacgacgaggagagagcccagggcagcgacgaggacaagctgcagaacagcgacgacgacgagaagatgcagaacaccgacgacgaggagagaccccagctgagcgacgacgagagacagcagctgagcgaggaggagaaggccaacagcgacgacgagagacccgtggccagcgacaacgacgacgagaagcagaacagcgacgacgaggagcagccccagctgagcgacgaggagaagatgcagaacagcgacgacgagagaccccaggccagcgacgaggagcacagacacagcgacgacgaggaggagcaggaccacaagagcgagagcgccagaggcagcgacagcgaggacgaggtgctgagaatgaagagaaagaacgccatcgccagcgacagcgaggccgacagcgacaccgaggtgcccaaggacaacagcggcaccatggacctgttcggcggcgccgacgacatcagcagcggcagcgacggcgaggacaagccccccacccccggccagcccgtggacgagaacggcctgccccaggaccagcaggaggaggagcccatccccgagaccagaatcgaggtggagatccccaaggtgaacaccgacctgggcaacgacctgtacttcgtgaagctgcccaacttcctgagcgtggagcccagacccttcgacccccagtactacgaggacgagttcgaggacgaggagatgctggacgaggagggcagaaccagactgaagctgaaggtggagaacaccatcagatggagaatcagaagagacgaggagggcaacgagatcaaggagagcaacgccagaatcgtgaagtggagcgacggcagcatgagcctgcacctgggcaacgaggtgttcgacgtgtacaaggcccccctgcagggcgaccacaaccacctgttcatcagacagggcaccggcctgcagggccaggccgtgttcaagaccaagctgaccttcagaccccacagcaccgacagcgccacccacagaaagatgaccctgagcctggccgacagatgcagcaagacccagaagatcagaatcctgcccatggccggcagagaccccgagtgccagagaaccgagatgatcaagaaggaggaggagagactgagagccagcatcagaagagagagccagcagagaagaatgagagagaagcagcaccagagaggcctgagcgccagctacctggagcccgacagatacgacgaggaggaggagggcgaggagagcatcagcctggccgccatcaagaacagatacaagggcggcatcagagaggagagagccagaatctacagcagcgacagcgacgagggcagcgaggaggacaaggcccagagactgctgaaggccaagaagctgaccagcgacgaggagggcgagcccagcggcaagagaaaggccgaggacgacgacaaggccaacaagaagcacaagaagtacgtgatcagcgacgaggaggaggaggacgacgactag

SEQ ID NO: 237366 - DNA, 1935 bp, Artificial Sequence
  derived and/or modified sequence
atggccgacatggaggacctgttcggcagcgacgccgacagcgaggccgagagaaaggacagcgacagcggcagcgacagcgacagcgaccaggagaacgccgccagcggcagcaacgccagcggcagcgagagcgaccaggacgagagaggcgacagcggccagcccagcaacaaggagctgttcggcgacgacagcgaggacgagggcgccagccaccacagcggcagcgacaaccacagcgagagaagcgacaacagaagcgaggccagcgagagaagcgaccacgaggacaacgaccccagcgacgtggaccagcacagcggcagcgaggcccccaacgacgacgaggacgagggccacagaagcgacggcggcagccaccacagcgaggccgagggcagcgagaaggcccacagcgacgacgagaagtggggcagagaggacaagagcgaccagagcgacgacgagaagatccagaacagcgacgacgaggagagagcccagggcagcgacgaggacaagctgcagaacagcgacgacgacgagaagatgcagaacaccgacgacgaggagagaccccagctgagcgacgacgagagacagcagctgagcgaggaggagaaggccaacagcgacgacgagagacccgtggccagcgacaacgacgacgacgacgagagaccccaggccagcgacgaggagcacagacacagcgacgacgaggaggagcaggaccacaagagcgagagcgccagaggcagcgacagcgaggacgaggtgctgagaatgaagagaaagaacgccatcgccagcgacagcgaggccgacagcgacaccgaggtgcccaaggacaacagcggcaccatggacctgttcggcggcgccgacgacatcagcagcggcagcgacggcgaggacaagccccccacccccggccagcccgtggacgagaacggcctgccccaggaccagcaggaggaggagcccatccccgagaccagaatcgaggtggagatccccaaggtgaacaccgacctgggcaacgacctgtacttcgtgaagctgcccaacttcctgagcgtggagcccagacccttcgacccccagtactacgaggacgagttcgaggacgaggagatgctggacgaggagggcagaaccagactgaagctgaaggtggagaacaccatcagatggagaatcagaagagacgaggagggcaacgagatcaaggagagcaacgccagaatcgtgaagtggagcgacggcagcatgagcctgcacctgggcaacgaggtgttcgacgtgtacaaggcccccctgcagggcgaccacaaccacctgttcatcagacagggcaccggcctgcagggccaggccgtgttcaagaccaagctgaccttcagaccccacagcaccgacagcgccacccacagaaagatgaccctgagcctggccgacagatgcagcaagacccagaagatcagaatcctgcccatggccggcagagaccccgagtgccagagaaccgagatgatcaagaaggaggaggagagactgagagccagcatcagaagagagagccagcagagaagaatgagagagaagcagcaccagagaggcctgagcgccagctacctggagcccgacagatacgacgaggaggaggagggcgaggagagcatcagcctggccgccatcaagaacagatacaagggcggcatcagagaggagagagccagaatctacagcagcgacagcgacgagggcagcgaggaggacaaggcccagagactgctgaaggccaagaagctgaccagcgacgaggagggcgagcccagcggcaagagaaaggccgaggacgacgacaaggccaacaagaagcacaagaagtacgtgatcagcgacgaggaggaggaggacgacgactag

SEQ ID NO: 237367 - protein, 237 aa, Artificial Sequence
  derived and/or modified sequence
MAAASGSVLQRCIVSPAGRHSASLIFLHGSGDSGQGLRMWIKQVLNQDLTFQHIKIIYPTAPPRSYTPMKGGISNVWFDRFKITNDCPEHLESIDVMCQVLTDLIDEEVKSGIKKNRILIGGFSMGGCMAIHLAYRNHQDVAGVFALSSFLNKASAVYQALQKSNGVLPELFQCHGTADELVLHSWAEETNSMLKSLGVTTKFHSFPNVYHELSKTELDILKLWILTKLPGEMEKQK

SEQ ID NO: 237368 - DNA, 714 bp, Artificial Sequence
  derived and/or modified sequence
atggccgccgccagcggcagcgtgctgcagagatgcatcgtgagccccgccggcagacacagcgccagcctgatcttcctgcacggcagcggcgacagcggccagggcctgagaatgtggatcaagcaggtgctgaaccaggacctgaccttccagcacatcaagatcatctaccccaccgccccccccagaagctacacccccatgaagggcggcatcagcaacgtgtggttcgacagattcaagatcaccaacgactgccccgagcacctggagagcatcgacgtgatgtgccaggtgctgaccgacctgatcgacgaggaggtgaagagcggcatcaagaagaacagaatcctgatcggcggcttcagcatgggcggctgcatggccatccacctggcctacagaaaccaccaggacgtggccggcgtgttcgccctgagcagcttcctgaacaaggccagcgccgtgtaccaggccctgcagaagagcaacggcgtgctgcccgagctgttccagtgccacggcaccgccgacgagctggtgctgcacagctgggccgaggagaccaacagcatgctgaagagcctgggcgtgaccaccaagttccacagcttccccaacgtgtaccacgagctgagcaagaccgagctggacatcctgaagctgtggatcctgaccaagctgcccggcgagatggagaagcagaagtag

SEQ ID NO: 237369 - DNA, 714 bp, Artificial Sequence
  derived and/or modified sequence
atggcggcagcatctgggtccgtcctgcagaggtgtatagtatcacccgccggacgccacagcgcctcacttatctttctgcatggttctggcgattccggacagggccttcgcatgtggatcaagcaggtgcttaatcaggacctgacctttcagcacatcaagattatttatcctacggcccctccccgcagttacacgccgatgaagggtggcatctccaacgtctggttcgatcggtttaaaatcaccaatgactgtcctgagcacctagaaagtatcgatgtaatgtgccaggtcctgaccgacctcatcgatgaagaagtgaagtccggtattaagaagaatagaatcctgattggcggcttctcaatgggggggtgtatggccattcaccttgcataccgtaaccatcaggatgttgcaggggtttttgctctgtcttcattcctaaataaagcttcggccgtgtaccaagccctgcagaagtccaacggggtgcttcctgaacttttccagtgtcacggcacggctgatgagttggtgcttcacagctgggccgaggagaccaattcgatgctgaagtctcttggagtgacaacaaagttccacagtttccccaacgtctaccacgaactgagtaaaaccgagctggacatcctgaagctttggatcctcaccaagttgccgggcgaaatggaaaagcagaaatag

SEQ ID NO: 237370 - DNA, 1898 bp, Artificial Sequence
  derived and/or modified sequence
cgcggcaacgcaggggcggaaccgcatgactggcagtggcatcagcgatggcggctgcgtcggggtcggttctgcagcgctgtatcgtgtcgccggcagggaggcatagcgcctctctgatcttcctgcatggctcaggtgattctggacaaggattaagaatgtggatcaagcaggttttaaatcaagatttaacattccaacacataaaaattatttatccaacagctcctcccagatcatatactcctatgaaaggaggaatctccaatgtatggtttgacagatttaaaataaccaatgactgcccagaacaccttgaatcaattgatgtcatgtgtcaagtgcttactgatttgattgatgaagaagtaaaaagtggcatcaagaagaacaggatattaataggaggattctctatgggaggatgcatggcaatacatttagcatatagaaatcatcaagatgtggcaggagtatttgctctttctagttttctgaataaagcatctgctgtttaccaggctcttcagaagagtaatggtgtacttcctgaattatttcagtgtcatggtactgcagatgagttagttcttcattcttgggcagaagagacaaactcaatgttaaaatctctaggagtgaccacgaagtttcatagttttccaaatgtttaccatgagctaagcaaaactgagttagacatattgaagttatggattcttacaaagctgccaggagaaatggaaaaacaaaaatgaatgaatcaagagtgatttgttaatgtaagtgtaatgtctttgtgaaaagtgatttttactgccaaattataatgataattaaaatattaagaaataacactttcctgacttttttattattaaaatgcttatcactgtagacagtagctaatcttattaatgaaaaacaatagacaaacatctgtgcataatttttcagacacaattctgtaaatatttggaaaccttttaagtatttaaacttttaaatttttgaaataaagtattctaaactaatataaataaggacaatgaaaaaacatgaaaggacttagcataatgttattttatcttttctacaactttgtttaaattacctttccaaagatatttgtgtttatgtaattttccacggaataacattaatactctaggtttataaaccggtttcacattatttcatttgatcatcacaagagctttgtgaagtaagccgagaagttgttactggtatttaataatagcaatagaggagttaaagactttcccacagcttgcaggtcaagacaagaaattcaggtctcctaattctcagtggagctctatttctgttaacccaaattgctgctctgttttaggtctcaatttcatctgtaaaatgatactaatagtacttatcccattggatttttgttgagatttaaataaatagccaaaagccaatacataataaacactcaataaagattaaccataaggagagtcatgatctggttccaggaatacattgttagatgactgaaaaattgtattacttcaatgaaaatactataaataataacattttcatatattagttggttctcatgcatacataatctaattttatttgatcctcacaactgtttaagttttattaaatatacattatccctatttgtataaatagaatcatacaatacctgcctgctttcattcaacaaaattatcatgagatttttccatgttgtgtacatcaatagttcatctattttattgctcagtaatattccattgtgtggatgtatcactatttgtttacacattcaccactgatatataagttgcttccagtgtgaggctgttttaaataaagctgctatgaatattcatgtaaga

SEQ ID NO: 237371 - DNA, 714 bp, Artificial Sequence
  derived and/or modified sequence
atggctgctgccagcggctctgtgctgcagcgctgcatcgtgtccccagctggccgccacagcgccagcctcatcttcctgcacggcagcggggacagcggccagggcctgaggatgtggatcaagcaggtgctgaaccaggacctgaccttccagcacatcaagatcatctaccccacagccccacccaggagctacacccccatgaagggcggcatcagcaatgtgtggtttgaccgcttcaagatcaccaatgactgcccagagcacctggagagcattgatgtgatgtgccaggtgctgacagacctgattgatgaggaggtgaagagcggcatcaagaagaaccgcatcctgattggaggcttctccatgggcggctgcatggccatccacctggcctacagaaaccaccaggatgtggccggcgtgtttgccctgagcagcttcctgaacaaggccagcgctgtgtaccaggccctgcagaagagcaatggagtgctgcctgagctgttccagtgccacggcacagcagatgagctggtgctgcacagctgggccgaggagaccaacagcatgctgaagagcctgggcgtgaccaccaagttccacagcttccccaacgtgtaccacgagctgagcaagacagagctggacatcctgaagctgtggatcctgaccaagctgcccggggagatggagaagcagaagtag

SEQ ID NO: 237372 - DNA, 714 bp, Artificial Sequence
  derived and/or modified sequence
atggccgccgccagcggcagcgtgctgcagcggtgcatcgtgagcccagccggccggcatagtgccagcctcattttcctccatgggtctggagacagcggacagggcctgcgaatgtggattaagcaggtgctgaaccaggatctaacattccaacacattaagattatatacccaacagcccctccacgatcatatactcctatgaaagggggaatctcaaatgtctggtttgataggttcaaaatcaccaatgattgtccagaacacctcgaatccattgatgtgatgtgccaagtcctgaccgatctgatcgatgaggaggtcaagagcggaatcaagaagaatcgcatcctgatcggagggttcagtatgggcgggtgtatggcaattcatttagcttatcggaaccatcaggacgtcgccggggtttttgccctgagctctttcctgaataaagcctccgccgtataccaggctctccaaaagtcaaatggagtcttgcctgagcttttccagtgccacgggaccgccgatgagctcgtcctgcacagctgggcagaggagaccaactccatgttaaagtctctcggcgtgacgaccaagttccatagtttccctaacgtttaccatgaactgagtaaaactgaacttgatatcttgaaactatggattctcacaaagctgccaggagaaatggaaaaacagaagtag

SEQ ID NO: 237373 - DNA, 714 bp, Artificial Sequence
  derived and/or modified sequence
atggcagcagctagtgggtccgtcctccaacggtgtattgtgagccccgcagggaggcacagcgcaagcttgatctttctacacggttctggcgacagtggtcagggactgagaatgtggatcaagcaggtccttaatcaggatttgacattccagcatatcaagataatctatccaaccgctccccctaggtcctacacccctatgaaaggaggaatttcaaatgtgtggtttgatcgctttaagataaccaacgactgtccagaacacttggagtcaattgacgtaatgtgtcaggttcttaccgacctgatcgatgaggaggtcaagtcaggcatcaagaagaatcgtatcttgataggcggtttcagcatggggggttgcatggcaatacacttggcctaccgcaaccatcaagacgtagcgggtgtattcgctctgtcatcttttctgaacaaagctagcgccgtgtatcaagccctacagaaatctaacggcgtgctgccagaactttttcaatgtcacggcaccgccgatgagctggtattacattcctgggcggaggaaactaacagcatgcttaagagcctgggagtgaccaccaaattccatagcttccctaatgtgtaccatgaactgagtaaaaccgagcttgatattctcaaactgtggatattaaccaaacttcccggtgagatggagaagcagaagtag

SEQ ID NO: 237374 - protein, 520 aa, Artificial Sequence
  derived and/or modified sequence
MATTSTTGSTLLQPLSNAVQLPIDQVNFVVCQLFALLAAIWFRTYLHSSKTSSFIRHVVATLLGLYLALFCFGWYALHFLVQSGISYCIMIIIGVENMHNYCFVFALGYLTVCQVTRVYIFDYGQYSADFSGPMMIITQKITSLACEIHDGMFRKDEELTSSQRDLAVRRMPSLLEYLSYNCNFMGILAGPLCSYKDYITFIEGRSYHITQSGENGKEETQYERTEPSPNTAVVQKLLVCGLSLLFHLTICTTLPVEYNIDEHFQATASWPTKIIYLYISLLAARPKYYFAWTLADAINNAAGFGFRGYDENGAARWDLISNLRIQQIEMSTSFKMFLDNWNIQTALWLKRVCYERTSFSPTIQTFILSAIWHGVYPGYYLTFLTGVLMTLAARAMRNNFRHYFIEPSQLKLFYDVITWIVTQVAISYTVVPFVLLSIKPSLTFYSSWYYCLHILGILVLLLLPVKKTQRRKNTHENIQLSQSKKFDEGENSLGQNSFSTTNNVCNQNQEIASRHSSLKQ

SEQ ID NO: 237375 - DNA, 1563 bp, Artificial Sequence
  derived and/or modified sequence
atggccacgacatccactactggctccactttactccagcctctgtctaacgctgttcaactcccgatcgaccaagtgaatttcgtcgtgtgtcagctgtttgctctgttggccgcaatttggtttcgcacttacctgcactccagtaaaacaagtagtttcatcaggcatgtggtcgcaactctcctggggctgtacctcgctcttttctgctttggttggtacgcactgcattttcttgtccagagcggaatctcttattgtatcatgattatcataggggttgagaatatgcataattattgctttgtctttgctctgggctatttaacagtgtgtcaggttaccagagtttacatttttgattatggtcaatatagtgccgacttttcaggtcctatgatgattataacgcagaaaatcacatctctggcttgcgagatccatgacggcatgttcagaaaggatgaggagctcacttcttcacaaagagatctcgccgtgcgcaggatgccatccttgctcgagtaccttagctacaattgtaactttatgggcatcctcgctgggcccttatgttcctacaaagactatattacgttcatcgaagggagatcttaccacatcacacaaagcggggaaaacgggaaggaagagacacagtatgaaaggactgagccttctcctaacaccgctgtggtccaaaagctgctcgtgtgtggtcttagcctgctgtttcatttgacaatctgtacaacactcccggttgagtacaacatcgatgagcacttccaggccaccgcgagttggcccactaagattatttacctctacatctcactcctggcagccaggcccaaatactattttgcttggaccctggccgatgctataaataacgccgctggatttgggttccggggatacgatgaaaatggcgctgctagatgggatctgatctccaacttgcggattcagcagattgagatgtccacctctttcaaaatgtttttggataactggaacatacagactgctttgtggctcaagagagtgtgctacgaaagaacaagtttcagtccaacgatccaaacgttcattctgtccgccatctggcacggggtgtatcctggttactatctgacattccttacaggagtcctcatgacactcgcagctcgagcaatgcgaaataacttccggcactattttatcgagcctagccagttgaagctgttttacgacgtaataacatggatagttactcaagttgccattagctacactgttgtgccatttgtgctcctgtccatcaaaccttccttgacattctatagcagctggtactactgcctccatattctcgggatactcgtactcttattacttcccgtgaagaaaacccagcgccggaagaacacccacgaaaacattcaactcagccaaagcaaaaaattcgacgaaggtgagaactcactcggacagaactctttcagcacaacgaacaacgtatgtaaccagaatcaggagatagcttctcggcatagttcattgaagcaatag

SEQ ID NO: 237376 - DNA, 1563 bp, Artificial Sequence
  derived and/or modified sequence
atggccaccaccagcaccaccggcagcaccctgctgcagcccctgagcaatgctgtgcagctgcccatcgaccaggtgaactttgtggtgtgccagctgtttgccctgctggccgccatctggttccgcacctacctgcacagcagcaagaccagcagcttcatcagacatgtggtggccaccctgctgggcctgtacctggccctcttctgcttcggctggtacgccctgcacttcctggtgcagagcggcatctcctactgcatcatgatcatcattggagtggagaacatgcacaactactgctttgtgtttgccctgggctacctgactgtgtgccaggtgaccagggtgtacatctttgattatggccagtacagcgctgacttcagcggccccatgatgatcatcacccagaagatcaccagcctggcctgtgagatccatgatggcatgttcaggaaggatgaggagctgaccagcagccagagggacctggccgtgcggaggatgcccagcctgctggagtacctgagctacaactgcaacttcatgggcatcctggccggccccctgtgcagctacaaggactacatcaccttcatcgagggccgcagctaccacatcacccagagcggggagaatggcaaggaggagacccagtatgaaagaacagagcccagccccaacacagctgtggtgcagaagctgctggtgtgtggcctgagcctgctcttccacctgaccatctgcaccaccctgcctgtggagtacaacattgatgagcacttccaggccacagcctcctggcccaccaagatcatctacctgtacatcagcctgctggccgcccggcccaagtactactttgcctggaccctggctgatgccatcaacaatgctgctggcttcggcttccggggctatgatgaaaatggagctgcccgctgggacctgatcagcaacctgcgcatccagcagatcgagatgagcaccagcttcaagatgttcctggacaactggaacatccagacagccctgtggctgaagagggtgtgctatgaaagaaccagcttcagccccaccatccagaccttcatcctgagcgccatctggcatggagtgtacccaggctactacctgaccttcctgactggagtgctgatgaccctggccgcccgggccatgaggaacaacttccgccactacttcatcgagcccagccagctgaagctgttctatgatgtgatcacctggatcgtgacccaggtggccatctcctacacagtggtgccctttgtgctgctgagcatcaagcccagcctgaccttctacagctcctggtactactgcctgcacatcctgggcatcctggtgctgctgctgctgcctgtgaagaagacccagaggaggaagaacacccatgagaacatccagctgagccagagcaagaagtttgatgaaggagagaacagcctgggccagaacagcttcagcaccaccaacaacgtgtgcaaccagaaccaggagatcgccagccgccacagcagcctgaagcagtag

SEQ ID NO: 237377 - DNA, 7751 bp, Artificial Sequence
  derived and/or modified sequence
cgggcgcgggaggaggtggcggcggagggggaggtgcgagccgggcaccgcccccggcccctccccggccttccccgcgcagagctccgaccgcgggcggcccaggggcgggcgcgccgctgcatccccatcctcgtcgtcgcccggcacagcgcgagcgggcgagcggcgcgggcggccggagcgccgaggcccggccatggccaccaccagcaccacgggctccaccctgctgcagcccctcagcaacgccgtgcagctgcccatcgaccaggtcaactttgtagtgtgccaactctttgccttgctagcagccatttggtttcgaacttatctacattcaagcaaaactagctcttttataagacatgtagttgctacccttttgggcctttatcttgcacttttttgctttggatggtatgccttacactttcttgtacaaagtggaatttcctactgtatcatgatcatcataggagtggagaacatgcacaattactgctttgtgtttgctctgggatacctcacagtgtgccaagttactcgagtctatatctttgactatggacaatattctgctgatttttcaggcccaatgatgatcattactcagaagatcactagtttggcttgcgaaattcatgatgggatgtttcggaaggatgaagaactgacttcctcacagagggatttagctgtaaggcgcatgccaagcttactggagtatttgagttacaactgtaacttcatggggatcctggcaggcccactttgctcttacaaagactacattactttcattgaaggcagatcataccatatcacacaatctggtgaaaatggaaaagaagagacacagtatgaaagaacagagccatctccaaatactgcggttgttcagaagctcttagtttgtgggctgtccttgttatttcacttgaccatctgtacaacattacctgtggagtacaacattgatgagcattttcaagctacagcttcgtggccaacaaagattatctatctgtatatctctcttttggctgccagacccaaatactattttgcatggacgctagctgatgccattaataatgctgcaggctttggtttcagagggtatgacgaaaatggagcagctcgctgggacttaatttccaatttgagaattcaacaaatagagatgtcaacaagtttcaagatgtttcttgataattggaatattcagacagctctttggctcaaaagggtgtgttatgaacgaacctccttcagtccaactatccagacgttcattctctctgccatttggcacggggtatacccaggatattatctaacgtttctaacaggggtgttaatgacattagcagcaagagctatgagaaataactttagacattatttcattgaaccttcccaactgaaattattttatgatgttataacatggatagtaactcaagtagcaataagttacacagttgtgccatttgtgcttctttctataaaaccatcactcacgttttacagctcctggtattattgcctgcacattcttggtatcttagtattattgttgttgccagtgaaaaaaactcaaagaagaaagaatacacatgaaaacattcagctctcacaatccaaaaagtttgatgaaggagaaaattctttgggacagaacagtttttctacaacaaacaatgtttgcaatcagaatcaagaaatagcctcgagacattcatcactaaagcagtgatcgggaaggctctgagggctgttttttttttttgatgttaacagaaaccaatcttagcaccttttcaaggggtttgagtttgttggaaaagcagttaactggggggaaatggacagttatagataaggaatttcctgtacaccagattggaaatggagtgaaacaagccctcccatgccatgtctccgtgggccacgccttatgtaagaatatttccatatttcagtgggcactcccaacctcagcacttgtccgtagggtcacacgcgtgccctgttgctgaatgtatgttgcgtatcccaaggcactgaagaggtggaaaaataatcgtgtcaatctggatgatagagagaaattaacttttccaaatgaatgtcttgccttaaaccctctatttcctaaaatattgttcctaaatggtattttcaagtgtaatattgtgagaacgctactgcagtagttgatgttgtgtgctgtaaaggattttaggaggaatttgaaacaggatatttaagagtgtggatatttttaaaatgcaataaacatctcagtatttgaagggttttcttaaagtatgtcaaatgactacaatccatagtgaaactgtaaacagtaatggacgccaaattataggtagctgattttgctggagagtttaattaccttgtgcagtcaaagagcgcttccagaaggaatctcttaaaacataatgagaggtttggtaatgtgatattttaagcttattctttttcttaaaagagagaggtgacgaaggaaggcaggaatgaagaagcactgcgtggcctccggtggaatgcacggggcacagccgcgactctgcaggcagcttcccccccatgccagggctctgcgccgtcatgtgagacttaaaaaaaaagttgaatgacttcgtgatactttggacttctaaattaaatttatcaggcataaattatgtagaattagaggctttgaaaataatactggtaggttgctcaaaggttttgaaagagaaatcgctaggtaggttactatctggctaatccatttcttatccttgacaatttaattcatatttgggaaacttttagggaaatgaaaaataaaagtcactgagtctgggtgacattttttaagaataatataaattcagtttcaaactcttctcacattaaaattttgctgtgaactcttactaaaatgagttttaggttctgtaagtggaaaaatgtgcttttattttatgggccatttttaccacaactaatcttgccttggattactaagcatctcctgcgatcccacagaggactgtggtggccacaggagctgaaagcagaagagtgggatttgatgccaggcagtggagtggcctcagccccagattgtacctcctgccctgtaggaggggagggggcaaagccttctgacttcacctttgtttgacctatgtatggaacttacttttactttttgccttaaatttttaatgaaatgcaaattttctgtgatggggttctctctctctttttttcggggggtggagtcactaataaatttgcaaatgaagttaaagacaaggcaaccatctggcttatgctatataatacttcatttaaagaagaaaggaaaagcaaatgcacttgcagcttttgaggtctcagcaaaaatgggcatgtgtcttttttgaagtttagaaatatcctaatctatttttatttatctaaaagtaagtgttttccggctgataaggctaaccctacccaggaaaggattgataactaaataaatttcctctgttttcccatgcattgaaattatgttggctgagcatggtggctcacacctgtaatcctagcactttgggaggccgaggtgggcggatcacttgaggtcaggagttggagaccagcctggccaacgtggtgaatccccgtctctactgaaaacacaaaaattagacgggcatggtggcgcacacctgtaatcccagctacttgggaggctgaggcaggagaattgcttgaacctgggaggtggaggttgcagtgagctaaaattgtgccactgcactccagcctgggtgacagaggaagactccgtctcacaaaaaaaaaaaaagaaaaaagaaattatgccagctgtttaatgtgagagaatagaaagaatgttcatggaatgtacctgccctgtaaaatgtttgatcattttcattaatgttgcagagaatccgactgctattaagagaaagtgaacaaattaagaatttaaaagacaggttcaggcatgtcataagtgaaaacaagaaggcttaatacaaacttgttgggttttgttcgtgtgtgtgtgtgtgtgtgtgtgtgtgtttttttttggttcagcctatctagccacctacaaataatcacatttctgttacctgaatttatttctcagcctgtaaaccttagtcactgttacctgtttcttgctcagtgaatatgatcttggcactgtcatctagaaagcaagatatttgattggttttctggttccttcgaagataataattccatatccagtttgactgattttcatacccctgaatcaactagttattttcatgaaatggtttttggatatctctcctctagtttggagaagtaataatcacaaagattaatattttgcttctagtacttacagtagaagaattttaaactggtacgtctactcctgttaaatagaaaggggattcgttgtattatgtgcttgcttttttttaatcaatagaataagattcaatgcatatttatgttttatattttccactattcaggtatcatgaaatcactctagagatgatcaatcaacatcatatttatacttttggttaattatatactactcagggaaaaaatgaacaaaaataactactcatccttcaatttcattttcttgaaacagtaagagtataatttggtatgcctcagctgtcaccattttataagtggctcattctgttcttaaagtaagtatttttattggaactcagggtaattgggggaatttatttagcttctaaaatatccggcaggatagagaagatttatttggcttcaaaaatgtctggtgaccacttctcttattagccactactgcccatttgcttcaaaaatatatttattggtctccaccatgtgtgacacacacaggatttccaaacataccacttttgagaaaaatgtgcagtaaaaaggaggtttctagaaagtgacagtaactcacatttaagcactagctgacctaggaggagacctggatcttcattctggttctgcctttcatgagacttaagacttggaggagccacctgtcctgtagaccccaagttcctcagccataagcaaacgggttaatcctaagagttcaggaccagttgggtgtcgtgaacggagccattagcaaggtctgtaggattcaaggacttgggcacattcacagtccacactattgtcatggtcattgacttactacttgagctcaaagccctgacatttcaaaaggttgtcatgataacagtgaaacctctgaatcccttaaatcagaaggcatggcaacatactttttctactggcaatagctcttacaatgagtgtttcataatgaaatagtctctgctgaagaaaacatgttttccttttgctctctctgctttgttggtttctgtgctgtgtggaattggagaagatatatgctctgaaatattttatacagattactgactactggacagggtttaccactatataacatctcaaagttattcaaggatatttaaagcatatttagtttagttacaccttattttaaaccgcagaaaacaatagctttaaaatttttgccattaaaataattataaatttatacttttactcaaggactagatcacagttttaggacaaaaatctctcctatttaaagttcataccttgtaagtatttagtttgtatattcatgaacaaatctggacatttatactttttttgtttccttatcaactgttcacaattattagttaattggtcttaacagttctacattataattgaaagaaaaattacttgagaaaataattgtttcagaatagtgcctactatatctgtgtcagctaaaaatttgtccagagttttagatataagctagtattttgtggagttttatccaggcgttaatagttcttcctggctgaaatttaatataggtgcagaatcctaaataacactgtgagatgtaatcttaactgccctcaataccttataaaactgctgcatttaacccagtgtgcatttaatgagtggctggtcgttgatacactcatcttagatgctgaaatttctgttttctccagcccttgtaaaagtgggtttcttgatgaacgcgtgctcccaatgctgaagcaaaagatttgcatttaaggagagaaatacaccctgaaatttgagtttgaaagattagaacatagagggtctctacagtgtttttctgcaacaccaagtagtcaaatctatttatagaaactctgattacaacagaaattttaaaatgaaattttccacatcggtattttgtaggaaagctcttataatcaatgcttaagctgctttttgaggcttttcttgtacagaggttgcagccaattacattttaattggtaggctgctgaataatgtttttgtatgttttaaaataatatttattttaataggttttttaacattatgcaaatcccaataaagaactgacacgttccataggccattgactgggaaattttgtgaaacacagcctaaatacacagtttttacaccaactaatttgtcttgcctttaaaactgattataactcttctttaagtacaacttttataaagaaaaaatacaacactaagactgtatgttctgtaaattatagtgtgatgacccatgcagaaccgctgtctgaagcttactcagcgattcatagccatctccagccatgttttatcaaatcacacactaaaaataaatggaaatgctacagtgaaaaaccaaaagttacagagcaacataagtaaaatgactaggcagtttcttagtaacatgtttgaaatgggaaaggtgactgactgcctttcaccagagtcttagctgtttcacgttcactattttaggttaattttcttgggaaatcaatttgaatattcccccctgtccttttgcattaaaggacgaaaatatatgttgagagtttgacagactttttaaatatgcctctttcccaattttatgtatttttggttctgcgcacacagatttatcaatgaagtacatttgcctctggctttatcacaaggaaaaaggaatcaaacattgaacacaaatgtgttccaaaccagtcttgtccatcttgtcacttttatgtgactgctcctctgaaccagaaggggcacgatagaaggccataggaatgaaagtaaatcattcaggtgaagtgagaaattcttccatatacagagtgaaaatgtgtgatttcattcctgccttcctttaaacgttgtcttgatctctgcctagtagtagttgagccctcagtcgcccaaacatgaggagagacccaactccagcagccagaatttagtatttacatttgccttcccaagttgagaatagaatgtggtgttctgtgctttctgtttttattattccaaaatatttttttaaagaagtgttatttttcaacagattcataaattagttcctgatgtacggtaaattaaaactcccactgtgtcagtcaaactgagatgtgctcatttcataaccactcatttctagtctgtcagagctgcactggtggcttattgctggtttttaaaggtgtttttaacttacatgtaacatgtttaggacatgttttttttttctaatttgtgtgtctttacaactgattaaacagtagtttaaaaata

SEQ ID NO: 237378 - DNA, 1563 bp, Artificial Sequence
  derived and/or modified sequence
atggccaccaccagcaccaccggcagcaccctgctgcagcccctgtccaacgctgtgcagctgcccattgatcaggtcaatttcgtggtctgtcagttgttcgctctgctggccgccatttggtttaggacatatctacattcttctaagacttctagcttcatcaggcacgtggtggcaacactactgggtctgtatttggccctattctgcttcggctggtacgccttgcactttttagtgcaatctggcattagctattgcatcatgattatcatcggtgttgagaacatgcacaattattgcttcgtattcgccctcggctatctaacagtgtgtcaggtgactcgagtatatatcttcgactatggccaatactccgctgacttctccggtccgatgatgattatcacacagaaaattactagcctggcttgtgagattcacgacgggatgttcagaaaagacgaggagctaaccagtagccagcgcgatttggctgttaggaggatgccgtcgctgctggagtacctgtcctataattgcaactttatggggattctcgcagggcctctctgctcatacaaggattacattacctttatcgaagggcggtcttatcacataacacagtccggagaaaacggaaaagaggagactcagtatgaaagaaccgagccttcccctaacaccgctgtcgtacagaagcttctcgtttgcgggctgtccttgttgtttcatttgaccatttgcaccactctccctgttgagtataatatcgacgagcacttccaggccaccgcaagttggcccacgaaaattatatatctgtatatatcactgctcgcagctaggccgaaatactactttgcctggacactcgctgacgccattaataacgccgcaggctttggcttcagggggtatgatgagaatggcgccgcacgttgggatttaatttcaaatctccggattcagcaaatcgagatgtctacctcgtttaagatgttcttagataattggaatatccagaccgcactgtggctgaagagggtgtgttacgagcggacatccttctcaccaactatccaaacattcatactatcggcaatctggcacggagtataccccggctattacttgacgttcctgactggggtcctaatgaccctggcagccagggccatgaggaataatttccgtcattattttattgagccctcccagctgaagttgttttatgacgtgatcacgtggatagtaacacaggttgccatctcctataccgtcgtgcccttcgtgttgctgtcaatcaaaccatccctgacgttctacagctcgtggtactattgtcttcatatactcgggattttggtattgttgttgctgcctgtgaagaagacacagagacggaagaacacccacgagaacatccagctgtcacagtcaaagaagtttgacgagggagaaaacagtctgggacaaaattcgttttctacgacgaacaatgtgtgcaatcagaatcaggagattgcatctaggcacagctccctgaaacagtag

SEQ ID NO: 237379 - DNA, 1563 bp, Artificial Sequence
  derived and/or modified sequence
atggcgaccacttctactaccgggtccactctgttacaaccgctctctaacgcagtgcaattgcccatagaccaggttaattttgtcgtttgccagctcttcgcactcctggctgccatctggtttaggacctatttgcattccagcaaaacatcttcatttattagacacgtggtagccactcttctgggactgtacctggctctcttctgcttcgggtggtacgctctacacttcttagtccagtcaggcatctcttattgtataatgattattatcggcgtggagaacatgcacaactactgcttcgtgtttgccctgggctacctgacggtatgtcaagtcaccagggtctacatcttcgactacggacagtattctgccgattttagtggaccaatgatgataataacacagaagatcacatccctggcctgtgagattcatgatggaatgttccggaaagatgaggaactcactagtagtcagagagatctggctgtgcggcgaatgccttccctgcttgagtatttaagctacaactgtaattttatgggtatcctggcgggacctctgtgctcctacaaagactatatcactttcatcgaaggacgctcttatcacataacccaatcgggagaaaatggaaaggaggaaacacagtatgagaggaccgaaccatctcccaataccgccgttgtgcagaagttactcgtttgtgggttatcactgctattccaccttacaatttgtaccactcttccagttgagtacaacatcgacgagcactttcaggccactgcatcatggccaacaaagattatttatttgtatattagcctgcttgcagctcggcctaagtactactttgcatggactctggcagacgcaatcaataatgcagcgggatttggctttcggggttacgacgagaatggagctgctcgctgggacctgatatccaacctgcgcattcagcagatcgagatgtccacgagctttaaaatgttcctagacaactggaatattcagacagcactctggttgaagcgcgtgtgttacgaacggacctctttctccccaactatccaaacctttatactgagtgccatctggcacggtgtttacccgggttactacctcaccttcttaaccggcgtacttatgaccctagcggctcgtgctatgagaaacaattttagacactacttcattgagccaagtcagctgaagttgttctacgatgtgattacgtggattgtcacccaggtcgccatctcatatacagtggtcccgtttgttctcctcagcattaagcccagtctgactttttactcctcctggtattattgtctgcacatcctgggcatccttgtgctcttgctgttacctgtgaaaaaaacacagaggcggaaaaacacccacgagaatatccagctgtctcagtcaaagaagttcgatgaaggcgagaactcactgggccagaactccttttctactactaacaatgtctgcaatcaaaatcaagaaatcgcttctcgacacagcagcctgaagcagtag

SEQ ID NO: 237380 - DNA, 1563 bp, Artificial Sequence
  derived and/or modified sequence
atggccaccaccagcaccaccggcagcaccctgctgcagcccctgagcaacgccgtgcagctgcccatcgaccaggtgaacttcgtggtgtgccagctgttcgccctgctggccgccatctggttcagaacctacctgcacagcagcaagaccagcagcttcatcagacacgtggtggccaccctgctgggcctgtacctggccctgttctgcttcggctggtacgccctgcacttcctggtgcagagcggcatcagctactgcatcatgatcatcatcggcgtggagaacatgcacaactactgcttcgtgttcgccctgggctacctgaccgtgtgccaggtgaccagagtgtacatcttcgactacggccagtacagcgccgacttcagcggccccatgatgatcatcacccagaagatcaccagcctggcctgcgagatccacgacggcatgttcagaaaggacgaggagctgaccagcagccagagagacctggccgtgagaagaatgcccagcctgctggagtacctgagctacaactgcaacttcatgggcatcctggccggccccctgtgcagctacaaggactacatcaccttcatcgagggcagaagctaccacatcacccagagcggcgagaacggcaaggaggagacccagtacgagagaaccgagcccagccccaacaccgccgtggtgcagaagctgctggtgtgcggcctgagcctgctgttccacctgaccatctgcaccaccctgcccgtggagtacaacatcgacgagcacttccaggccaccgccagctggcccaccaagatcatctacctgtacatcagcctgctggccgccagacccaagtactacttcgcctggaccctggccgacgccatcaacaacgccgccggcttcggcttcagaggctacgacgagaacggcgccgccagatgggacctgatcagcaacctgagaatccagcagatcgagatgagcaccagcttcaagatgttcctggacaactggaacatccagaccgccctgtggctgaagagagtgtgctacgagagaaccagcttcagccccaccatccagaccttcatcctgagcgccatctggcacggcgtgtaccccggctactacctgaccttcctgaccggcgtgctgatgaccctggccgccagagccatgagaaacaacttcagacactacttcatcgagcccagccagctgaagctgttctacgacgtgatcacctggatcgtgacccaggtggccatcagctacaccgtggtgcccttcgtgctgctgagcatcaagcccagcctgaccttctacagcagctggtactactgcctgcacatcctgggcatcctggtgctgctgctgctgcccgtgaagaagacccagagaagaaagaacacccacgagaacatccagctgagccagagcaagaagttcgacgagggcgagaacagcctgggccagaacagcttcagcaccaccaacaacgtgtgcaaccagaaccaggagatcgccagcagacacagcagcctgaagcagtag

SEQ ID NO: 237381 - protein, 342 aa, Artificial Sequence
  derived and/or modified sequence
MASVTRAVFGELPSGGGTVEKFQLQSDLLRVDIISWGCTITALEVKDRQGRASDVVLGFAELEGYLQKQPYFGAVIGRVANRIAKGTFKVDGKEYHLAINKEPNSLHGGVRGFDKVLWTPRVLSNGVQFSRISPDGEEGYPGELKVWVTYTLDGGELIVNYRAQASQATPVNLTNHSYFNLAGQASPNINDHEVTIEADTYLPVDETLIPTGEVAPVQGTAFDLRKPVELGKHLQDFHLNGFDHNFCLKGSKEKHFCARVHHAASGRVLEVYTTQPGVQFYTGNFLDGTLKGKNGAVYPKHSGFCLETQNWPDAVNQPRFPPVLLRPGEEYDHTTWFKFSVA

SEQ ID NO: 237382 - DNA, 1029 bp, Artificial Sequence
  derived and/or modified sequence
atggcctcagtgactcgcgccgtttttggggaactcccatccggcggcgggacagtggaaaaatttcagctgcaatctgatctcttgcgggtggacatcatttcctggggatgtaccatcaccgcactggaagtaaaagatcggcagggcagggccagtgacgtcgttttaggcttcgcagagttggaaggctacctgcaaaagcagccctattttggcgcagtgatagggagggtggctaaccggatcgctaagggcactttcaaggtggatggaaaggaatatcacctggctatcaacaaggaaccaaactcgcttcacggaggcgttcgcggttttgataaggtgctgtggacgcctcgcgttctatctaatggcgtgcaattctctcgaatatcaccagatggcgaagagggttacccaggggaactcaaggtttgggtcacctacactctggatggcggcgagttgatcgtcaattatagggcccaggcgagccaggcaacccctgtgaatttaaccaaccactcgtactttaatctggccggccaggcctcaccgaacattaatgaccacgaggtgactattgaggccgacacttacctcccagttgacgaaaccctgattccaactggggaggtggctcctgtgcaagggaccgcttttgacctcagaaaaccagttgagctgggcaagcatttacaggacttccacctgaatggctttgatcataacttctgcttgaaaggttcaaaagaaaagcacttttgtgcgcgcgtgcaccacgctgcgtccggccgcgtcctagaagtctacaccacccaacccggcgtgcaattctacactgggaatttcctcgacggtacactgaaaggaaagaatggggcagtgtatcctaagcacagcgggttctgcctcgagacacaaaactggcccgacgccgtgaaccagccacgctttccacctgtgttgctccgccctggcgaagaatatgatcatacaacctggtttaaattttccgtggcctag

SEQ ID NO: 237383 - DNA, 1029 bp, Artificial Sequence
  derived and/or modified sequence
atggcctctgtgaccagggctgtgtttggagagctgcccagcggcggcggcaccgtggagaagttccagctgcagagcgacctgctgcgggtggacatcatctcctggggctgcaccatcacagccctggaggtgaaggaccggcagggccgggccagtgatgtggtgctgggctttgctgagctggagggctacctgcagaagcagccctactttggagctgtgattggccgggtggccaacagaattgccaagggcaccttcaaggtggatggcaaggagtaccacctggccatcaacaaggagcccaacagcctgcatggaggagtgcggggctttgacaaggtgctgtggaccccccgggtgctgagcaatggagtgcagttcagccgcatcagcccagatggagaggagggctacccaggagagctgaaggtgtgggtgacctacaccctggatggaggagagctgattgtgaactaccgggcccaggccagccaggccacccctgtgaacctgaccaaccacagctacttcaacctggccggccaggccagccccaacatcaatgaccacgaggtgaccatcgaggccgacacctacctgcctgtggatgagaccctcatccccactggagaggtggcccctgtgcagggcacagcctttgacctgaggaagcctgtggagctgggcaagcacctgcaggacttccacctgaatggatttgaccacaacttctgcctgaagggcagcaaggagaagcacttctgtgcccgggtgcaccacgccgccagcggccgggtgctggaggtgtacaccacccagcccggggtgcagttctacacaggcaacttcctggatggcaccctgaagggcaagaatggagctgtgtaccccaagcacagcggcttctgcctggagacccagaactggccagatgctgtgaaccagccccgcttcccccctgtgctgctgcggcctggagaggagtatgaccacaccacctggttcaagttctctgtggcctag

SEQ ID NO: 237384 - DNA, 1029 bp, Artificial Sequence
  derived and/or modified sequence
atggccagcgtgacccgggccgtgttcggcgagctgcccagcggcggcggaacggttgagaaattccagctgcagtcagacttactacgagtcgacatcatctcatgggggtgtacaatcaccgccctcgaggttaaggatcgtcagggccgggccagtgacgtcgtgttgggctttgcagaactggaaggttatttgcagaaacagccctactttggggcggtaatcggcagggtggccaaccggattgcaaaaggcacctttaaggtcgatggaaaggagtatcacttggccattaacaaggagccaaattctctacacggtggcgtacgggggtttgacaaggtgttgtggaccccgagagtactgagtaatggagtgcagtttagccgcatctctcctgacggagaggagggatatcctggggaactgaaggtgtgggtcacttatacacttgatgggggtgagctaatcgtgaactatcgcgcacaggcatctcaggccacgcctgtgaacctgactaatcattcatattttaatctggcagggcaagcgtcccccaacattaacgaccatgaggtgactatcgaggcggacacatacctgcccgtagatgagaccctgatcccgacaggagaagtggctccggtacagggtaccgcctttgacctcaggaagccagtggagcttggtaagcacctccaggacttccacctgaatgggtttgaccataatttctgccttaagggtagtaaggagaagcatttctgcgccagagttcatcacgccgcctccgggcgcgttttagaggtttacactactcagcccggagtacagttctacactgggaatttcttggatggtacactcaagggtaaaaatggggccgtgtatcctaaacatagcggtttctgcctggaaacccagaattggcccgacgccgtcaatcagcctagattcccccccgtcctgctgcgccccggggaggaatatgaccacaccacatggttcaaatttagcgtggcatag

SEQ ID NO: 237385 - DNA, 1029 bp, Artificial Sequence
  derived and/or modified sequence
atggcatccgtgacacgggctgtttttggtgagttgcctagtggtggcggaacagtcgagaagttccagctacagtctgacttattaagagtagatatcatctcctggggctgcactataaccgcattggaggtcaaagacagacagggaagagcctccgacgtcgtcctaggtttcgctgagctggaaggatatctacaaaagcagccctattttggggcagttatcggccgagtggcaaacagaatcgcgaagggaactttcaaggtggatggaaaagagtatcacctggctatcaataaagaacctaacagcctccatggcggtgtgcgaggattcgacaaggtgctgtggactcctagggtcctgtctaacggggtgcagttctccaggatctcacctgacggagaggagggatatcctggagagctgaaagtgtgggtaacttacaccctcgacgggggtgaattgatcgtgaactatcgagcccaggcctcccaggccacccctgtgaatctcaccaaccactcttatttcaacttagccggacaagctagtccaaacattaatgaccacgaggtgacaattgaagcagatacctatctcccagtcgacgagaccctgatacctacgggcgaagtggcacccgtccaagggaccgcctttgacctaaggaagccggtggagttaggtaagcatctgcaggattttcacctcaacggtttcgatcataatttttgccttaaagggagcaaggagaagcacttctgcgctagggtgcatcatgcagcttcggggagagtgctagaagtatataccactcagcctggcgtccagttctatacaggcaattttttagatgggacactcaaaggaaagaacggcgcagtctatcccaaacacagcggattttgtctagagacccagaattggccagacgccgtgaatcagcctcgatttcctccagtgttattgcgcccaggagaggagtatgatcataccacctggtttaagtttagcgtcgcctag

SEQ ID NO: 237386 - DNA, 2484 bp, Artificial Sequence
  derived and/or modified sequence
gacgagccaaggaaaaaaagtacaagtgtggctgcaaagtttgcccctcttgttaccctcaggcaaatgattgatttagaaaggccccaggggctattttttgcaggaacggtcactccctaaatccaggcagggaaagggaggagtctgagccgagtcacgccccttctcctgtaaacttgggtcgcctctagcttagcgagcgctggagtttgaagagcgggcagtggctgcacacgccaaactttccctatggcttcggtgaccagggccgtgtttggagagctgccctcgggaggagggacagtggagaagttccagctgcagtcagacctcttgagagtggacatcatctcctggggctgcacgatcacagccctagaggtcaaagacaggcaggggagagcctcggacgtggtgcttggcttcgccgagttggaaggatacctccaaaagcagccatactttggagcagttattgggagggtggccaaccgaatcgccaaaggaaccttcaaggtggatgggaaggagtatcacctggccattaacaaggaacccaacagtctgcatggaggagtcagagggtttgataaagtgctctggacccctcgggtgctgtcaaatggcgtccagttctcgcgcatcagtccagatggtgaagaaggctaccccggagagttaaaagtctgggtgacatacaccctggatggcggagagctcatagtcaactacagagcacaagccagtcaggccacaccagtcaacctgaccaaccattcttacttcaacctggcaggccaggcttccccaaatataaatgaccatgaagtcaccatagaagcggatacttatttgcctgtggatgaaaccctgattcctacaggagaagttgccccagtgcaaggcactgcattcgacctgagaaagccagtggagcttggaaaacacctgcaggacttccatctcaatggttttgaccacaatttctgtctgaagggatctaaagaaaagcatttttgtgcaagggtgcatcatgctgcaagcgggcgggtactagaagtatacaccacccagcccggggtccagttttacacgggcaacttcctggatggcacattaaagggcaagaatggagctgtctatcccaagcactccggtttctgcctggagactcagaactggcctgatgcagtcaatcagccccgcttccctcctgtgctgctgaggcctggtgaggagtatgaccacaccacctggttcaagttttctgtggcttaaggaagtgtgaagatatgatccagtccagggctaggctcagccacctgtctcctgtccagaaaaaaggtgaagattaagaagctttcagaatgattctatggattaaaatcatacaaatggtggctgttctgagaatcagtctgggtattgatttccttttccagtgactggctccaggccatgtctaatgaccagctcgattccctgtgcagttcagagggcaagtgaacccaaccaacaatgtcgtcatctaagccctgaccctagccagggactcccatgctgctgttggctccatctctccacactgcctctttcttttcaactttttgcccttcctttctttaaagctattctcacattgcttttatttcctcctccttcacctccaaccactgtcagcagcactctggagttttcaaatgtcacattagcctcaccctgcatgctaggagatggacctgtctctatacagcagtagatgattgataagtgaggaaactgaggcttacagaggttgaagaccaacaagctaataaataaaaagttgaggccgggcacggtggctcacgcctgtaatcccagcactttggaaggccgaggcaggcggatcacgaggtcaggagatcgagaccatcctggctaacacggtgaaaccccgtctctacataaaaaattagctgggtgtggtagcacgcacctgtagtcccagctacttgggaggctgaagcaggagaatcgcttgaacctgggaggtggaggttgcagtgagccgagatcatgccactgcactgggcaacagagcaaaactcgatctcaaaaaaaaaaaaaaaaaaaaggaaaaaaaagcagctctctctctcgggagagggaggggacttccgagaggaaaaggcctgcaagagcctttgggttaactgagaaagcacagcccggccaacgcttgggaagaaagacaggcaagcactggaaacaggagctattagggtgaggagagagccttgcctttcacagcacagtgaggatgacattgcaccagggacagagattgtatgtgacaaggctggggctccttctttcctagacaatcaaagtatcagtgatgggttttggttggtgattttgaaaaaaaaaaaaaaaagtatgttatactagtgtatgctgtactgaattgaaataaaaccaaaatctgcatcttcagaa

SEQ ID NO: 237387 - DNA, 1029 bp, Artificial Sequence
  derived and/or modified sequence
atggccagcgtgaccagagccgtgttcggcgagctgcccagcggcggcggcaccgtggagaagttccagctgcagagcgacctgctgagagtggacatcatcagctggggctgcaccatcaccgccctggaggtgaaggacagacagggcagagccagcgacgtggtgctgggcttcgccgagctggagggctacctgcagaagcagccctacttcggcgccgtgatcggcagagtggccaacagaatcgccaagggcaccttcaaggtggacggcaaggagtaccacctggccatcaacaaggagcccaacagcctgcacggcggcgtgagaggcttcgacaaggtgctgtggacccccagagtgctgagcaacggcgtgcagttcagcagaatcagccccgacggcgaggagggctaccccggcgagctgaaggtgtgggtgacctacaccctggacggcggcgagctgatcgtgaactacagagcccaggccagccaggccacccccgtgaacctgaccaaccacagctacttcaacctggccggccaggccagccccaacatcaacgaccacgaggtgaccatcgaggccgacacctacctgcccgtggacgagaccctgatccccaccggcgaggtggcccccgtgcagggcaccgccttcgacctgagaaagcccgtggagctgggcaagcacctgcaggacttccacctgaacggcttcgaccacaacttctgcctgaagggcagcaaggagaagcacttctgcgccagagtgcaccacgccgccagcggcagagtgctggaggtgtacaccacccagcccggcgtgcagttctacaccggcaacttcctggacggcaccctgaagggcaagaacggcgccgtgtaccccaagcacagcggcttctgcctggagacccagaactggcccgacgccgtgaaccagcccagattcccccccgtgctgctgagacccggcgaggagtacgaccacaccacctggttcaagttcagcgtggcctag

SEQ ID NO: 237388 - protein, 591 aa, Artificial Sequence
  derived and/or modified sequence
MCAASASPDNLVFHMKNEMRNIKYKPVDYQQLRALTEAKKLASASAKLKIRKAMLTSKLSKEQTLIKQHKQVWWQEYQRLNEVRCKMESEIKSLLNEENIGNECLCDLTNFEQELSEQQCTYLKNVINPIQQLRADLKYRQHHTLQHSHPHIEFNSMKVLEEVDFVKKQLKTVFERLRLEQQRIENDLSDWSIKILDHSLEEKTNPLSELPIELESLECPYPDLKSSILSEFYKFTQKYQKKLQDFNLQLEDIYRNCQLSEEDHWIYQAILDQYPGDLFGRRTLYLDMLQRYFPHKSRHDLVEHEKYCDQYRFAIEQQNILISNWNKNKKDFIQKAVLTLTEACATHEMESMLAKDKKKQQELCADLKAKVRQWRAHQEEVARLEMEISARRREKEEEKEKLWKKKELLQRAEKKKKIKKYWAKKKQKWQEMEMRDLQRLEELKKLIAEQSLKDRERVKYRQELLERRLMEKKEVALQEAHEDKERARRLEALRKQVAVVAQFDPVRMMSDTMASKARMGIEIEEEFILQKPLFTLNTYNEQQIISDPRLRFELALREAGLHRTLYAKEILPKISPQKPPRKDMESTVFKI

SEQ ID NO: 237389 - DNA, 1776 bp, Artificial Sequence
  derived and/or modified sequence
atgtgcgccgccagcgccagccccgacaacctggtgttccacatgaagaacgagatgagaaacatcaagtacaagcccgtggactaccagcagctgagagccctgaccgaggccaagaagctggccagcgccagcgccaagctgaagatcagaaaggccatgctgaccagcaagctgagcaaggagcagaccctgatcaagcagcacaagcaggtgtggtggcaggagtaccagagactgaacgaggtgagatgcaagatggagagcgagatcaagagcctgctgaacgaggagaacatcggcaacgagtgcctgtgcgacctgaccaacttcgagcaggagctgagcgagcagcagtgcacctacctgaagaacgtgatcaaccccatccagcagctgagagccgacctgaagtacagacagcaccacaccctgcagcacagccacccccacatcgagttcaacagcatgaaggtgctggaggaggtggacttcgtgaagaagcagctgaagaccgtgttcgagagactgagactggagcagcagagaatcgagaacgacctgagcgactggagcatcaagatcctggaccacagcctggaggagaagaccaaccccctgagcgagctgcccatcgagctggagagcctggagtgcccctaccccgacctgaagagcagcatcctgagcgagttctacaagttcacccagaagtaccagaagaagctgcaggacttcaacctgcagctggaggacatctacagaaactgccagctgagcgaggaggaccactggatctaccaggccatcctggaccagtaccccggcgacctgttcggcagaagaaccctgtacctggacatgctgcagagatacttcccccacaagagcagacacgacctggtggagcacgagaagtactgcgaccagtacagattcgccatcgagcagcagaacatcctgatcagcaactggaacaagaacaagaaggacttcatccagaaggccgtgctgaccctgaccgaggcctgcgccacccacgagatggagagcatgctggccaaggacaagaagaagcagcaggagctgtgcgccgacctgaaggccaaggtgagacagtggagagcccaccaggaggaggtggccagactggagatggagatcagcgccagaagaagagagaaggaggaggagaaggagaagctgtggaagaagaaggagctgctgcagagagccgagaagaagaagaagatcaagaagtactgggccaagaagaagcagaagtggcaggagatggagatgagagacctgcagagactggaggagctgaagaagctgatcgccgagcagagcctgaaggacagagagagagtgaagtacagacaggagctgctggagagaagactgatggagaagaaggaggtggccctgcaggaggcccacgaggacaaggagagagccagaagactggaggccctgagaaagcaggtggccgtggtggcccagttcgaccccgtgagaatgatgagcgacaccatggccagcaaggccagaatgggcatcgagatcgaggaggagttcatcctgcagaagcccctgttcaccctgaacacctacaacgagcagcagatcatcagcgaccccagactgagattcgagctggccctgagagaggccggcctgcacagaaccctgtacgccaaggagatcctgcccaagatcagcccccagaagccccccagaaaggacatggagagcaccgtgttcaagatctag

SEQ ID NO: 237390 - DNA, 900 bp, Artificial Sequence
  derived and/or modified sequence
atggagagcgagatcaagagcctgctgaacgaggagaacatcggcaacgagtgcctgtgcgacctgaccaacttcgagcaggagctgagcgagcagcagtgcacctacctgaagaacgtgatcaaccccatccagcagctgagagccgacctgaagtacagacagcaccacaccctgcagcacagccacccccacatcgagttcaacagcatgaaggtgctggaggaggtggacttcgtgaagaagcagctgaagaccgtgttcgagagactgagactggagcagcagagaatcgagaacgacctgagcgactggagcatcaagatcctggaccacagcctggaggagaagaccaaccccctgagcgagctgcccatcgagctggagagcctggagtgcccctaccccgacctgaagagcagcatcctgagcgagttctacaagttcacccagaagtaccagaagaagctgcaggacttcaacctgcagctggaggacatctacagaaactgccagctgagcgaggaggaccactggatctaccaggccatcctggaccagtaccccggcgacctgttcggcagaagaaccctgtacctggacatgctgcagagatacttcccccacaagagcagacacgacctggtggagcacgagaagtactgcgaccagtacagattcgccatcgagcagcagaacatcctgatcagcaactggaacaagaacaagaaggacttcatccagaaggccgtgctgaccctgaccgaggcctgcgccacccacgagatggagagcatgctggccaaggacaagaagaagcagcaggagctgtgcgccgacctgaaggccaagagccaggtgtgcctgtaccagcagcacgagaacggcctgatccagtag

SEQ ID NO: 237391 - DNA, 3122 bp, Artificial Sequence
  derived and/or modified sequence
atagagaccgatgctgttcagcgcgagagggcctggagagggtgggtgtgagagagaaggtgtctcaggtctcgggcgcgggagggggtggcggagaggacagggagattccccagcgctggctctgaaatctggggcaggctttccttgccttactgccaatcccaactgtgcctggtagggtttgtccctggcgtcaaaggtaggaacagctgagcccttagatgtacccctgacggcgagagcccaggagtgggcgtttcacttttcctgcgtttggggagtccctgaggctatgccctttgacctttgacatgtgtgcagcttctgcttctccagataatctggtattccatatgaaaaatgagatgagaaacatcaagtacaaaccagtagactatcaacaattgcgtgcattaactgaagcaaagaaattggcttctgcctctgcaaagctaaagatcagaaaagcaatgttgacttcaaagttatccaaagaacaaacactaataaaacaacacaagcaagtgtggtggcaggaataccagaggctgaatgaagtcagatgtaaaatggaatctgaaataaaatcccttctcaatgaagagaacattggaaatgaatgtctttgtgaccttacaaattttgagcaagagctatcagaacaacagtgcacatatcttaaaaatgtaataaatcctattcagcagctgagagcagatctaaaatacagacagcatcacactttgcagcattcacacccacatattgagtttaactccatgaaagtattggaagaggttgactttgtgaagaaacaattgaaaactgtctttgaaagacttaggctggagcaacagagaatagaaaatgatctttcagactggagtataaagattctagatcattctttggaagaaaagactaacccgcttagtgaactgcccattgaattagaaagtttggaatgcccataccctgatttgaaatcttcaattctcagtgagttctataagtttacacagaaatatcagaagaagcttcaagactttaatctgcagttggaagacatatacagaaactgtcaactaagtgaagaagaccactggatttaccaggctattttggatcagtaccctggagatctctttggaagaaggactctgtatctggacatgttacaaagatattttcctcacaaatctaggcatgatttggttgaacacgagaaatattgtgaccaatatcgctttgctatagagcagcaaaatatcctgatatcaaattggaataaaaataagaaagactttatacagaaggctgtgctgacactcactgaggcttgtgcaacacatgaaatggagagcatgttggctaaggacaagaaaaagcaacaggaattgtgtgctgatctgaaagccaaggttcgtcaatggcgagcccaccaagaagaggtagcaagactggaaatggaaatttctgccagaagaagagaaaaggaagaggagaaagagaaactgtggaagaagaaggaattgttgcaaagagcagagaagaaaaaaaaaataaaaaaatactgggccaagaaaaaacagaagtggcaagaaatggaaatgagagatcttcagcgtctagaagaactgaagaaattaatcgctgaacagtcactaaaagacagagaaagggttaaatatagacaagaattattggaaaggcgtttgatggagaaaaaggaagtggcccttcaagaagctcatgaagacaaagagagagcacggcggctagaagcccttaggaaacaggttgctgttgttgctcaatttgatcctgttagaatgatgtcagatacaatggcatcaaaagctagaatgggcattgaaattgaagaagaatttattcttcaaaagccactcttcacattgaatacatacaatgaacagcagataatttctgaccctagacttcgcttcgagttagcacttcgagaagctggacttcatagaacactttatgctaaagagatattaccaaaaattagtcctcaaaaacctccaagaaaggacatggagtctactgtatttaaaatatagagctcatcctcaaattctatatgtaaagagcatttttctttgaaaacatgtatatggataataataattactactttctaaaatgtttgaaatatcagacatagaaatcatagcatctattaaaacaactttgcctttcttttgtgattcttagaattttatgcactatatttcctgtatctttaagttatatttaatagtactaaattcccccaaattatggaacttaattatggcacatatagtacttatactataatttagtaaactacatgttggaggttatgttatcctataaaaagagctcaaaataactttgtgagaattataaattatgtagctgctacctgctaatgttcatttctgcttgttatttcagaatttgactttttaattatggaagcttcattatcattaatacttctattatttcttgattattataagaggagactcaacctttctctaaatttagaaaccaatttggtacaccatgtttactgcaaaccaatcatccaaacaatttcattttgcaaattagcccttaagaataaattagaaattagaaatagcatttcaagcatgggaatatctgttttggtttggaaatatatatatttgtgtgattgtttagaagaaatatttaaaatttcataatatttggaatgctgtcaaaaattccaaattatctattaaatatttagatgattttatagaaaaggagcatttaaaataaaactcaaacataaatatttgactatttctaaaaaataatttttcaagcagaataacaagttagtgttgttgaaagttgccattgttacagttaagattaccccactcctttttctgtctattgcagctccctgacatttcccacctacctcccaggggttgcagcctctgtgcaattactggaataatgtaaaaaaaaaaaagcccaatccaactagtggaatctttgactttatgattgtccccaacatcatggaaataaaaaatacaagtacagtcccgttagaataaatcttc

SEQ ID NO: 237392 - DNA, 1447 bp, Artificial Sequence
  derived and/or modified sequence
atagagaccgatgctgttcagcgcgagagggcctggagagggtgggtgtgagagagaaggtgtctcaggtctcgggcgcgggagggggtggcggagaggacagggagattccccagcgctggctctgaaatctggggcaggctttccttgccttactgccaatcccaactgtgcctggtagggtttgtccctggcgtcaaaggtaggaacagctgagcccttagatgtacccctgacggcgagagcccaggagtgggcgtttcacttttcctgcgtttggggagtccctgaggctatgccctttgacctttgacatgtgtgcagcttctgcttctccagatgtaaaatggaatctgaaataaaatcccttctcaatgaagagaacattggaaatgaatgtctttgtgaccttacaaattttgagcaagagctatcagaacaacagtgcacatatcttaaaaatgtaataaatcctattcagcagctgagagcagatctaaaatacagacagcatcacactttgcagcattcacacccacatattgagtttaactccatgaaagtattggaagaggttgactttgtgaagaaacaattgaaaactgtctttgaaagacttaggctggagcaacagagaatagaaaatgatctttcagactggagtataaagattctagatcattctttggaagaaaagactaacccgcttagtgaactgcccattgaattagaaagtttggaatgcccataccctgatttgaaatcttcaattctcagtgagttctataagtttacacagaaatatcagaagaagcttcaagactttaatctgcagttggaagacatatacagaaactgtcaactaagtgaagaagaccactggatttaccaggctattttggatcagtaccctggagatctctttggaagaaggactctgtatctggacatgttacaaagatattttcctcacaaatctaggcatgatttggttgaacacgagaaatattgtgaccaatatcgctttgctatagagcagcaaaatatcctgatatcaaattggaataaaaataagaaagactttatacagaaggctgtgctgacactcactgaggcttgtgcaacacatgaaatggagagcatgttggctaaggacaagaaaaagcaacaggaattgtgtgctgatctgaaagccaagtctcaggtatgtctttatcagcagcatgaaaatggactaatacagtaaattggtaccagtagagtgaagtgttgctgaaaagatacccgaaaatgtggaagtgactttggaactggtatcaggcagaggttggaacagtgtggaaggctcagaagaagacgggaaaatgtgggaaagtttggaacctcctagagactttttgaatggttttgacaaaaatgctgatagtgatatgaacaatgaggtcca

SEQ ID NO: 237393 - DNA, 1776 bp, Artificial Sequence
  derived and/or modified sequence
atgtgtgcggcatccgccagtcccgataatctggttttccacatgaagaacgaaatgcgaaatatcaagtacaagcccgtagactatcagcagctgcgggccctgaccgaggctaagaagcttgcctctgcctcggccaagcttaagatacgcaaagccatgctaaccagcaagctgtctaaagagcagactttaattaagcagcacaaacaagtatggtggcaggaataccagcgcttgaacgaggtgagatgtaagatggaatccgagattaagagcctcctgaatgaggagaacatcgggaatgagtgcctttgtgatctcactaattttgagcaggaactgagcgagcagcagtgcacttacttgaaaaacgttatcaatcccatccagcagttaagggcagatctaaaataccggcaacaccacacactgcaacactctcaccctcacatagaattcaacagtatgaaggtgctggaggaggtggatttcgttaaaaagcagctgaaaaccgtctttgaaaggctcaggcttgaacaacagcgcatcgaaaacgacttatcagactggtctatcaagattctggaccattcacttgaggagaagacgaatccactttccgaactccccatcgaactcgaaagcttagagtgcccatacccggacctgaaatcctcaatcctcagtgaattctacaagtttacccagaagtatcagaagaagctccaggattttaatctgcaactcgaagacatctatagaaactgtcaattaagcgaagaggatcattggatctaccaggcaatcttagatcaataccccggtgacctgttcggcagaagaaccctgtacctggatatgctgcagaggtactttccacacaagtccaggcatgacctggtggagcacgagaagtattgtgatcagtaccgctttgctatcgagcaacagaacatactcatctctaattggaataagaacaaaaaagacttcattcagaaagccgttctgaccttaactgaggcctgtgccacacacgaaatggaaagtatgctggcaaaagataaaaaaaagcagcaggagctctgcgccgatctgaaagcaaaagtgagacagtggagagcccaccaggaggaagtggcccggctagaaatggaaatttccgcccggaggcgagagaaggaagaagaaaaggagaagctgtggaagaagaaggagctgcttcagagagcagagaagaaaaagaaaatcaagaagtattgggccaagaagaagcaaaagtggcaggaaatggaaatgagggatctgcaacgtcttgaggaactgaagaagctgatagccgaacaatctctgaaggaccgagaacgcgtgaagtatcggcaagaattactggaacgacggctaatggagaagaaggaagtggccctacaggaggcccacgaggataaggagcgcgcccggcgtttggaggccctgcggaagcaggtcgcggtcgtggcgcaatttgaccctgtcagaatgatgagcgacactatggcttccaaggcacgcatgggaatcgaaatcgaggaggaatttatcttgcagaagcctctgttcacattgaacacctacaacgagcagcagatcataagtgaccccaggctgcggtttgaactcgctctacgcgaggccggcctacacaggacactgtacgctaaggagattctcccaaaaatttctccccagaagcctcctagaaaagacatggaaagcaccgtgttcaaaatatag

SEQ ID NO: 237394 - DNA, 900 bp, Artificial Sequence
  derived and/or modified sequence
atggagtccgagattaaatccttgctgaatgaagaaaacattggaaacgaatgtctgtgcgaccttactaacttcgagcaggagttatccgaacaacagtgcacgtacctgaaaaatgtaataaaccccatccagcagctgcgcgctgatttgaagtaccggcaacatcataccttacaacattcacacccacacatcgagttcaacagcatgaaggtacttgaagaagtagactttgtcaaaaaacagttgaagaccgtttttgagagattaagattagagcagcagcgcatcgagaacgacctctccgattggtcaattaagattctggatcactcattagaggagaaaaccaatccattgtctgagctgccaatcgagctggagagtcttgagtgcccttaccccgatttaaaatctagcattctttcggagttctataaatttacacagaagtaccaaaagaagctccaggactttaatttgcaactggaagacatttaccgcaattgtcagttaagcgaggaagatcattggatctatcaagccatcctggaccagtatcccggcgaccttttcggacgcaggacactgtacctggatatgctacagcgatatttccctcacaaatcaaggcacgatttggtcgagcatgagaagtactgcgaccaatataggtttgcgattgaacagcaaaacatcttgatctctaattggaataagaataagaaggactttatacagaaagccgtcttgacactgactgaggcgtgtgccacacatgagatggagtctatgctcgctaaagacaagaagaagcagcaggagttgtgcgccgacttgaaagcaaaaagccaggtatgcctgtaccaacagcacgagaacggactaatccaatag

SEQ ID NO: 237395 - DNA, 1776 bp, Artificial Sequence
  derived and/or modified sequence
atgtgtgccgccagcgccagcccagacaacctggtgttccacatgaagaatgagatgaggaacatcaagtacaagcctgtggactaccagcagctgcgggccctgacagaggccaagaagctggccagcgccagcgccaagctgaagatcaggaaggccatgctgaccagcaagctgagcaaggagcagaccctcatcaagcagcacaagcaggtgtggtggcaggagtaccagaggctgaatgaggtgcgctgcaagatggagagcgagatcaagagcctgctgaatgaggagaacattggaaatgaatgtctgtgtgacctgaccaactttgagcaggagctgtctgagcagcagtgcacctacctgaagaatgtcatcaaccccatccagcagctgcgggctgacctgaagtaccggcagcaccacaccctgcagcacagccacccccacatcgagttcaacagcatgaaggtgctggaggaggtggactttgtgaagaagcagctgaagacagtgtttgagcggctgcggctggagcagcagagaattgaaaatgacctgagtgactggagcatcaagatcctggaccacagcctggaggagaagaccaaccccctgtctgagctgcccatcgagctggagagcctggagtgcccctacccagacctgaagagcagcatcctgtctgagttctacaagttcacccagaagtaccagaagaagctgcaggacttcaacctgcagctggaggacatctacagaaactgccagctgtctgaggaggaccactggatctaccaggccatcctggaccagtacccaggggacctgtttggaagaaggaccctgtacctggacatgctgcagcgctacttcccccacaagagcagacatgacctggtggagcacgagaagtactgtgaccagtacagatttgccatcgagcagcagaacatcctgatcagcaactggaacaagaacaagaaggacttcatccagaaggctgtgctgaccctgacagaggcctgtgccacccatgagatggagagcatgctggccaaggacaagaagaagcagcaggagctgtgtgccgacctgaaggccaaggtgcggcagtggagggcccaccaggaggaggtggcccggctggagatggagatcagcgcccggcggcgggagaaggaggaggagaaggagaagctgtggaagaagaaggagctgctgcagagagctgagaagaagaagaagatcaagaagtactgggccaagaagaagcagaagtggcaggagatggagatgagggacctgcagaggctggaggagctgaagaagctgattgctgagcagagcctgaaggaccgggagcgggtgaagtaccggcaggagctgctggagcggcggctgatggagaagaaggaggtggccctgcaggaggcccacgaggacaaggagcgggcccggcggctggaggccctgaggaagcaggtggccgtggtggcccagtttgatcctgtgaggatgatgtctgacaccatggccagcaaggccaggatgggcattgaaattgaggaggagttcatcctgcagaagcccctcttcaccctgaacacctacaatgagcagcagatcatcagtgacccccggctgcgctttgagctggccctgcgggaggccggcctgcacaggaccctgtatgccaaggagatcctgcccaagatcagcccccagaagccacccaggaaggacatggagagcacagtgttcaagatctag

SEQ ID NO: 237396 - DNA, 900 bp, Artificial Sequence
  derived and/or modified sequence
atggagagcgagatcaagagcctgctgaatgaggagaacattggaaatgaatgtctgtgtgacctgaccaactttgagcaggagctgtctgagcagcagtgcacctacctgaagaatgtcatcaaccccatccagcagctgcgggctgacctgaagtaccggcagcaccacaccctgcagcacagccacccccacatcgagttcaacagcatgaaggtgctggaggaggtggactttgtgaagaagcagctgaagacagtgtttgagcggctgcggctggagcagcagagaattgaaaatgacctgagtgactggagcatcaagatcctggaccacagcctggaggagaagaccaaccccctgtctgagctgcccatcgagctggagagcctggagtgcccctacccagacctgaagagcagcatcctgtctgagttctacaagttcacccagaagtaccagaagaagctgcaggacttcaacctgcagctggaggacatctacagaaactgccagctgtctgaggaggaccactggatctaccaggccatcctggaccagtacccaggggacctgtttggaagaaggaccctgtacctggacatgctgcagcgctacttcccccacaagagcagacatgacctggtggagcacgagaagtactgtgaccagtacagatttgccatcgagcagcagaacatcctgatcagcaactggaacaagaacaagaaggacttcatccagaaggctgtgctgaccctgacagaggcctgtgccacccatgagatggagagcatgctggccaaggacaagaagaagcagcaggagctgtgtgccgacctgaaggccaagagccaggtgtgcctgtaccagcagcatgaaaatggcctcatccagtag

SEQ ID NO: 237397 - DNA, 1776 bp, Artificial Sequence
  derived and/or modified sequence
atgtgcgccgccagcgccagccccgacaacctggtgttccacatgaagaacgaaatgaggaacatcaagtacaagccagttgactaccagcagctgcgggccctgactgaggcaaaaaaactagcttcagcaagtgctaaactgaagattagaaaggcgatgctgacctctaagctttctaaggagcagacactgattaagcagcataagcaagtctggtggcaggagtaccagcgactcaatgaggtgcggtgcaaaatggaatccgaaatcaagagccttctgaacgaggaaaatatcggaaacgagtgcctgtgcgatctaacaaacttcgaacaggaactgagcgagcagcagtgcacatacctgaaaaacgtgattaacccaatccagcagttaagggcagatcttaagtaccggcaacatcacactctgcagcactcccatccccacatcgaattcaatagcatgaaagtgcttgaggaagtggactttgtgaaaaagcagctcaagactgtgttcgagcgcctcagactcgaacaacaaagaatagagaacgacctgtccgattggagtattaaaatcctggatcactccttggaggagaagacaaatcccctgtccgagttgcctattgaattggaatctctggaatgcccctacccggacttgaagtcttcgatcctctctgagttctataaatttactcaaaagtatcagaaaaagctccaggacttcaatctacagctggaggacatctacagaaactgccagctttcggaggaggaccattggatctatcaggcgatattagaccagtaccccggggacttatttggccggagaaccctttatttggacatgctgcaaaggtactttcctcacaaatcccgacacgatttggtcgagcacgagaaatactgtgaccagtatagattcgcgattgagcagcaaaatattctgatcagcaattggaacaaaaacaagaaggactttatccagaaagcagtactcacattgactgaggcttgcgctacacatgaaatggaatcaatgcttgccaaggataaaaagaaacagcaggagctgtgcgccgatctcaaggcaaaggtgagacagtggagagcccaccaagaggaggttgcgagacttgaaatggagatctccgctcgacgccgggaaaaggaggaggagaaggaaaaactatggaaaaaaaaagagctccttcagagagccgaaaaaaagaagaagatcaagaagtattgggctaaaaagaagcagaagtggcaggagatggaaatgagggatcttcagcggcttgaagaactgaagaagttaatcgccgagcagagcctcaaagatcgcgaacgggtaaagtaccgccaagagctgctcgaaaggcgcctgatggagaaaaaggaggtggctttgcaggaggcccacgaggacaaagagagggctagaagactcgaggcactacgcaaacaggtcgcagtcgttgcacagttcgatcccgtcaggatgatgtctgataccatggcatccaaagcgcgcatgggaattgagattgaggaagagttcattctgcaaaaacccctgtttaccttgaacacctataacgagcagcagatcatttccgatcccaggctcagattcgagctggccctgcgggaagctggtcttcaccgtacactgtacgcgaaggaaatactgcctaagatctccccccagaagccgcccaggaaagatatggaaagtactgtcttcaaaatctag

SEQ ID NO: 237398 - DNA, 900 bp, Artificial Sequence
  derived and/or modified sequence
atggagagcgagatcaagagcctgctgaacgaggagaacatcggcaatgaatgcctgtgcgacctcacaaattttgaacaggagctcagcgagcagcagtgtacctatctgaagaacgtgattaatccaatccaacaattgagagcagatctaaagtatcggcagcatcacacactgcagcacagccacccacacatcgagttcaacagcatgaaggttcttgaggaagttgattttgtgaaaaagcagcttaagactgtcttcgaaaggctaaggcttgaacagcaacgaatcgagaacgacctcagcgattggtccataaaaatcctggaccactctttagaggagaagactaaccccttaagtgagttacctatagagctggaatcactcgagtgtccttatcccgatctcaagtcttctattctgtccgaattctataaatttacacagaagtatcaaaaaaaactgcaggactttaacctgcagctggaagacatctatcgaaactgccaactaagtgaggaggaccactggatttaccaggccattctggaccagtatcccggagacctgttcgggcgccggactctctatctcgatatgttgcagcgttatttcccccataagtcgcggcacgatctggtcgagcacgagaaatactgtgaccagtaccggttcgcaatcgaacagcagaatatcttgatttctaactggaacaagaataaaaaggactttattcaaaaagcggtgttgactcttacagaagcttgtgcaacccatgaaatggagtcaatgctcgccaaagacaaaaaaaaacaacaggagttgtgtgctgacctgaaggctaagtctcaggtttgcttgtatcaacagcatgagaatggtctgatccagtag

SEQ ID NO: 237399 - DNA, 1776 bp, Artificial Sequence
  derived and/or modified sequence
atgtgtgctgctagtgcctccccagataatcttgtctttcatatgaaaaacgagatgagaaacatcaaatataagcccgtggactaccagcagcttagggcgttaaccgaggccaagaaactcgcaagcgcatcagcaaaattgaagattagaaaggccatgctgacttccaaactctcaaaagagcagacactgattaagcagcacaaacaggtgtggtggcaagagtaccagaggctaaatgaagtccgatgtaaaatggagagcgagattaaaagtcttcttaatgaagagaacatcggtaacgagtgcctgtgcgatctgactaatttcgaacaggagttatctgagcagcaatgcacttatctgaaaaacgtgattaaccccatccagcagctcagggcagaccttaaataccgacaacaccatacccttcaacatagccatccccacattgagtttaattcgatgaaagtactcgaagaagttgacttcgtgaaaaaacagctcaagactgtgttcgaacggctacggttggagcagcaacggatagagaacgacctgagcgattggtccatcaaaatactcgaccatagtctagaggagaaaactaaccccctttcagagctccctattgagctggagtccctggaatgcccctacccggaccttaaatccagtattttgagtgaattctataagtttactcaaaaataccagaagaagcttcaggacttcaatctgcaactggaggatatttaccgcaactgccagctctcagaagaagatcactggatataccaggctatcctggaccagtatcccggagacttgttcggaagacgcacactgtatctcgatatgctgcaacggtatttccctcacaagagccggcacgacctggtggaacatgaaaaatactgcgatcagtacaggttcgcaatcgagcagcagaacatcttaatttccaactggaacaagaataagaaagacttcattcagaaggccgttcttacactcaccgaagcttgtgcaacacacgaaatggaatccatgcttgccaaagataaaaagaagcagcaggagctgtgtgccgacctcaaagcgaaagttaggcagtggcgcgctcatcaggaagaagttgcacggctcgaaatggagatcagcgcgagaaggcgcgagaaagaagaggaaaaagagaagctctggaagaaaaaagaactgctgcaaagggcagaaaaaaaaaaaaagattaagaaatactgggcgaaaaagaaacaaaagtggcaggagatggaaatgcgggatctccaacggttagaggagctgaagaagttgatagcggagcagtctttaaaggacagggaaagggttaaatatagacaggagcttctggaacgaagattaatggaaaagaaggaggtcgcattgcaggaagcacacgaagacaaagaaagagcccgaagattggaggccttacgcaagcaggtcgctgtggtagcccagtttgaccctgttagaatgatgtctgataccatggccagcaaagcgaggatgggcatagaaatcgaggaagagtttatcttgcaaaagccattatttacactgaacacgtataatgaacagcagataattagcgacccgaggctcagatttgaactggctctccgggaggccggactccaccggaccctatacgccaaggaaatcttaccaaagatcagtccacagaaaccacctagaaaagatatggagtccacagtgttcaagatctag

SEQ ID NO: 237400 - DNA, 900 bp, Artificial Sequence
  derived and/or modified sequence
atggaaagcgagataaaatctctcctgaatgaggagaacattggcaatgagtgtctatgcgatctgactaatttcgagcaggagctctcggagcaacaatgcacttacctgaagaacgtcattaaccccatccagcagctgcgggctgatttaaagtatcgccagcatcacactcttcaacactcccatccacatatagagttcaacagtatgaaagtgttggaggaggtagatttcgtaaagaagcagcttaaaacggtcttcgaaaggcttaggctagagcagcagcggatcgaaaacgacctgagtgattggtcgatcaagatactggaccattccctggaggagaagactaaccccctcagcgagctgcccatagaacttgagagtctcgaatgtccataccctgatctgaagtccagcatcttgtctgaattctataagtttacgcagaaataccaaaaaaaactgcaggactttaaccttcagctggaagatatctatcggaactgccagttgagtgaggaggaccactggatctaccaagcaatccttgatcagtaccccggtgacctgttcggtcgccgtacgctctatctggacatgctgcaacgctattttccgcacaagagcagacatgatttggtggagcacgagaagtactgtgaccagtacagattcgctatcgagcagcagaacattctgataagtaattggaataaaaacaagaaggactttatccagaaagcggtcctcacgctgaccgaggcctgcgcaacacatgagatggagtcaatgctcgctaaggataaaaagaagcagcaggagctttgtgccgacctcaaggctaagtcacaggtctgcctgtaccaacagcacgagaatgggcttatccagtag

SEQ ID NO: 237401 - protein, 224 aa, Artificial Sequence
  derived and/or modified sequence
MRVSGVLRLLALIFAIVTTWMFIRSYMSFSMKTIRLPRWLAASPTKEIQVKKYKCGLIKPCPANYFAFKICSGAANVVGPTMCFEDRMIMSPVKNNVGRGLNIALVNGTTGAVLGQKAFDMYSGDVMHLVKFLKEIPGGALVLVASYDDPGTKMNDESRKLFSDLGSSYAKQLGFRDSWVFIGAKDLRGKSPFEQFLKNSPDTNKYEGWPELLEMEGCMPPKPF

SEQ ID NO: 237402 - protein, 102 aa, Artificial Sequence
  derived and/or modified sequence
MRVSGVLRLLALIFAIVTTWMFIRSYMSFSMKTIRLPRWLAASPTKEIQVKKYKCGLIKPCPANYFAFKICSGAANVVGPTMCFEDRMIMSPVKNNVGRGLN

SEQ ID NO: 237403 - DNA, 675 bp, Artificial Sequence
  derived and/or modified sequence
atgcgagtcagcggtgtgttaaggttactggcactcatcttcgcgattgtcaccacctggatgtttattcgctcttatatgagctttagcatgaagaccataaggctgcctaggtggcttgctgcgtcgcctacaaaagaaatacaggtgaaaaaatacaaatgtggcttgataaaaccctgtccagccaactacttcgctttcaagatttgttccggcgctgctaacgtggtcggccctactatgtgttttgaggaccggatgatcatgagtccagttaaaaacaatgttgggagaggcttaaacatagcgttagtgaatgggactactggcgctgtgttagggcaaaaggcatttgatatgtactctggagatgtgatgcatctcgtgaagtttttgaaagagatcccaggtggggcactcgtcctggtggcctcctatgacgaccctgggaccaaaatgaatgatgaaagtcggaaactcttttccgatctaggctcctcttacgcgaaacagctggggtttagggattcatgggttttcatcggggcaaaggatctccggggtaagagtccatttgagcagttcctcaaaaacagtcctgataccaataagtatgaaggctggcctgaattactagaaatggaggggtgcatgccacccaagcctttctag

SEQ ID NO: 237404 - DNA, 309 bp, Artificial Sequence
  derived and/or modified sequence
atgcgggtgagcggggtactacgtctgctcgctctcatttttgctatcgttacaacctggatgttcatccgatcctatatgtccttttccatgaaaaccattaggctgccccgttggctggctgccagtcccaccaaggagatccaggtgaagaaatacaagtgcggcctgatcaagccatgtccagccaattacttcgcctttaagatctgttcaggcgctgcgaacgtggtcggtcctacaatgtgttttgaggatcgtatgatcatgtcgcccgtgaagaataatgtgggcaggggcctgaactag

SEQ ID NO: 237405 - DNA, 675 bp, Artificial Sequence
  derived and/or modified sequence
atgcgggtcagcggtgttctgcgacttctggctcttatctttgccattgttacaacctggatgttcattcgttcctatatgtctttctcaatgaagacaatacgcctgccacgatggctcgcagcctcacctacaaaagagatccaagtgaaaaagtataaatgcgggttgattaaaccttgtcctgctaattattttgccttcaaaatatgttccggcgccgccaacgtcgttgggcctaccatgtgtttcgaagatcgcatgattatgagccctgtgaagaacaacgtaggcaggggcctgaacatcgcactggtcaacggtacaacgggagctgtcctcggacagaaggccttcgacatgtatagcggcgacgtcatgcatctggtgaagtttctcaaagagatccccggtggcgccctggtacttgtggcttcctacgacgatcccgggactaaaatgaatgatgagagcaggaagctcttcagcgacctcggatcctcctatgccaaacaattaggatttcgggattcttgggtatttattggtgcaaaagatctgcgaggcaagagccctttcgaacagtttttgaagaattccccagacacaaacaaatacgaaggatggcccgagctcctggaaatggaaggatgcatgcccccaaagcccttctag

SEQ ID NO: 237406 - DNA, 309 bp, Artificial Sequence
  derived and/or modified sequence
atgcgggttagtggggtgttacggctgctggctctgatcttcgcaatcgttaccacctggatgttcatcagatcttacatgagcttttctatgaaaaccattcgcctaccaagatggcttgccgccagccccaccaaagaaattcaggtgaaaaaatataagtgcggactgataaaaccatgcccagcaaattattttgcctttaagatctgctctggagccgctaatgtggtgggaccaacaatgtgctttgaggatcggatgatcatgagcccagtaaaaaataacgtggggagaggcctgaattag

SEQ ID NO: 237407 - DNA, 675 bp, Artificial Sequence
  derived and/or modified sequence
atgcgtgtgtctggcgtgctcagactgctggccctcatcttcgctattgtaacaacatggatgtttatcagaagctacatgtccttttctatgaaaaccatccggctgcctcgttggctggcagcctctccaaccaaagaaatccaagtgaaaaagtataagtgtggtctcatcaagccctgtccagcgaattatttcgccttcaaaatctgctctggtgctgcaaatgtggtgggacctaccatgtgtttcgaggaccgaatgattatgtctcccgttaagaacaatgtaggcagggggttgaacatcgcactagtcaacggtacgacaggagccgtcttgggacagaaggctttcgatatgtattccggcgatgtcatgcatctggtcaaatttctgaaagagatcccagggggtgcgctggttctggtggcttcatatgatgatcctggtactaagatgaacgacgaatctagaaaattgtttagcgacctcggctcaagttatgccaaacagcttggattcagagattcctgggtctttattggcgcgaaagaccttagaggtaagagccctttcgagcaatttctcaagaacagcccagacacaaacaagtatgagggatggcctgagctactggagatggaaggctgtatgccaccgaaaccattctag

SEQ ID NO: 237408 - DNA, 309 bp, Artificial Sequence
  derived and/or modified sequence
atgagagtgtctggcgttctgcggctacttgccctcattttcgccattgtgaccacatggatgtttatcaggagctatatgagtttttctatgaaaacaatccgactgccacgttggctggcagcatcccccacaaaagaaatacaggtgaagaaatacaagtgcggcttgatcaagccctgccccgccaattactttgcatttaagatttgttcaggcgctgctaatgtggtcggacctacaatgtgcttcgaagataggatgattatgtctcccgtcaaaaataacgtaggtagaggcctcaactag

SEQ ID NO: 237409 - DNA, 449 bp, Artificial Sequence
  derived and/or modified sequence
ccagagcactcacgggctgccagggtgagcaggctagaaactcacgacaccagatttcctgctcagcatggacaggacagcaagaggctaaccctctgcccaggtggaagctgaccccaagccacccttcacctggacaggatgagagtgtcaggtgtgcttcgcctcctggccctcatctttgccatagtcacgacatggatgtttattcgaagctacatgagcttcagcatgaaaaccatccgtctgccacgctggctggcagcctcgcccaccaaggagatccaggttaaaaagtacaagtgtggcctcatcaagccctgcccagccaactactttgcgtttaaaatctgcagtggggccgccaacgtcgtgggccctactatgtgctttgaagaccgcatgatcatgagtcctgtgaaaaacaatgtgggcagaggcctaaacat

SEQ ID NO: 237410 - DNA, 675 bp, Artificial Sequence
  derived and/or modified sequence
atgagagtgagcggcgtgctgagactgctggccctgatcttcgccatcgtgaccacctggatgttcatcagaagctacatgagcttcagcatgaagaccatcagactgcccagatggctggccgccagccccaccaaggagatccaggtgaagaagtacaagtgcggcctgatcaagccctgccccgccaactacttcgccttcaagatctgcagcggcgccgccaacgtggtgggccccaccatgtgcttcgaggacagaatgatcatgagccccgtgaagaacaacgtgggcagaggcctgaacatcgccctggtgaacggcaccaccggcgccgtgctgggccagaaggccttcgacatgtacagcggcgacgtgatgcacctggtgaagttcctgaaggagatccccggcggcgccctggtgctggtggccagctacgacgaccccggcaccaagatgaacgacgagagcagaaagctgttcagcgacctgggcagcagctacgccaagcagctgggcttcagagacagctgggtgttcatcggcgccaaggacctgagaggcaagagccccttcgagcagttcctgaagaacagccccgacaccaacaagtacgagggctggcccgagctgctggagatggagggctgcatgccccccaagcccttctag

SEQ ID NO: 237411 - DNA, 309 bp, Artificial Sequence
  derived and/or modified sequence
atgagagtgagcggcgtgctgagactgctggccctgatcttcgccatcgtgaccacctggatgttcatcagaagctacatgagcttcagcatgaagaccatcagactgcccagatggctggccgccagccccaccaaggagatccaggtgaagaagtacaagtgcggcctgatcaagccctgccccgccaactacttcgccttcaagatctgcagcggcgccgccaacgtggtgggccccaccatgtgcttcgaggacagaatgatcatgagccccgtgaagaacaacgtgggcagaggcctgaactag

SEQ ID NO: 237412 - DNA, 675 bp, Artificial Sequence
  derived and/or modified sequence
atgcgagtgagtggcgttctccgactcttagccctcatcttcgctattgtgactacatggatgttcatccggtcgtatatgtctttctccatgaagaccatcaggcttcctcgctggctggccgcctctccaaccaaggagattcaagtgaagaagtacaaatgcggtctgatcaaaccctgtcccgctaattatttcgctttcaaaatttgtagcggcgctgcaaatgtggtcggccccaccatgtgtttcgaagaccggatgattatgtcacccgttaaaaacaacgtcgggaggggcctgaacatcgctctggtcaatggcaccacaggcgcagtgcttggccagaaggctttcgacatgtactccggtgatgtaatgcatttggtgaaatttctgaaggagatccccgggggggctttagtcctcgtggcctcctatgatgatccgggaaccaaaatgaacgacgaatcaagaaagctttttagtgatctcggtagcagctacgcgaaacaactgggattcagggactcatgggtttttatcggcgccaaggatctgcgtggaaaatctccgttcgagcagtttctcaaaaactcaccggacaccaacaagtatgagggttggcccgagctcttagaaatggagggttgtatgccaccaaaacccttttag

SEQ ID NO: 237413 - DNA, 1319 bp, Artificial Sequence
  derived and/or modified sequence
gttgatggcaaacttcctcaaaggaggggcagagcctgcgcagggcaggagcagctggcccactggcggcccgcaacactccgtctcaccctctgggcccactgcatctagaggagggccgtctgtgaggccactacccctccagcaactgggaggtgggactgtcagaagctggcccagggtggtggtcagctgggtcagggacctacggcacctgctggaccacctcgccttctccatcgaagcagggaagtgggagcctcgagccctcgggtggaagctgaccccaagccacccttcacctggacaggatgagagtgtcaggtgtgcttcgcctcctggccctcatctttgccatagtcacgacatggatgtttattcgaagctacatgagcttcagcatgaaaaccatccgtctgccacgctggctggcagcctcgcccaccaaggagatccaggttaaaaagtacaagtgtggcctcatcaagccctgcccagccaactactttgcgtttaaaatctgcagtggggccgccaacgtcgtgggccctactatgtgctttgaagaccgcatgatcatgagtcctgtgaaaaacaatgtgggcagaggcctaaacatcgccctggtgaatggaaccacgggagctgtgctgggacagaaggcatttgacatgtactctggagatgttatgcacctagtgaaattccttaaagaaattccggggggtgcactggtgctggtggcctcctacgacgatccagggaccaaaatgaacgatgaaagcaggaaactcttctctgacttggggagttcctacgcaaaacaactgggcttccgggacagctgggtcttcataggagccaaagacctcaggggtaaaagcccctttgagcagttcttaaagaacagcccagacacaaacaaatacgagggatggccagagctgctggagatggagggctgcatgcccccgaagccattttagggtggctgtggctcttcctcagccaggggcctgaagaagctcctgcctgacttaggagtcagagcccggcaggggctgaggaggaggagcagggggtgctgcgtggaaggtgctgcaggtccttgcacgctgtgtcgcgcctctcctcctcggaaacagaaccctcccacagcacatcctacccggaagaccagcctcagagggtccttctggaaccagctgtctgtggagagaatggggtgctttcgtcagggactgctgacggctggtcctgaggaaggacaaactgcccagacttgagcccaattaaattttatttttgctggttttgaa

SEQ ID NO: 237414 - DNA, 309 bp, Artificial Sequence
  derived and/or modified sequence
atgagagtgagcggtgtcctgcgcctgttggcccttatctttgccatcgtcacaacctggatgttcattaggagctatatgtcattctctatgaagactatacgtctgcctagatggctggctgcttcacctactaaagaaatccaagtgaaaaagtacaaatgcggcctgataaaaccctgccctgccaattattttgccttcaaaatctgttcaggggctgccaacgttgtcggaccaactatgtgcttcgaagatagaatgataatgtccccagtaaagaataacgtggggcgcgggctgaactag

SEQ ID NO: 237415 - DNA, 675 bp, Artificial Sequence
  derived and/or modified sequence
atgagggtgtctggagtgctgcggctgctggccctgatctttgccatcgtgaccacctggatgttcatccgcagctacatgtccttctccatgaagaccatccggctgccccgctggctggccgccagccccaccaaggagatccaggtgaagaagtacaagtgtggcctcatcaagccctgcccagccaactactttgccttcaagatctgcagcggggccgccaacgtggtgggccccaccatgtgctttgaggacaggatgatcatgagccctgtgaagaacaacgtgggccggggcctgaacatcgccctggtgaatggcaccaccggggctgtgctgggccagaaggcctttgacatgtacagcggagatgtgatgcacctggtgaagttcctgaaggagatccctggaggagccctggtgctggtggccagctatgatgaccccggcaccaagatgaatgatgagagcaggaagctgttcagtgacctgggcagcagctatgccaagcagctgggcttccgggacagctgggtgttcatcggggccaaggacctgcggggcaagagcccctttgagcagttcctgaagaacagcccagacaccaacaagtatgagggctggccagagctgctggagatggagggctgcatgccacccaagcccttctag

SEQ ID NO: 237416 - DNA, 309 bp, Artificial Sequence
  derived and/or modified sequence
atgagggtgtctggagtgctgcggctgctggccctgatctttgccatcgtgaccacctggatgttcatccgcagctacatgtccttctccatgaagaccatccggctgccccgctggctggccgccagccccaccaaggagatccaggtgaagaagtacaagtgtggcctcatcaagccctgcccagccaactactttgccttcaagatctgcagcggggccgccaacgtggtgggccccaccatgtgctttgaggacaggatgatcatgagccctgtgaagaacaacgtgggccggggcctgaactag

SEQ ID NO: 237417 - DNA, 675 bp, Artificial Sequence
  derived and/or modified sequence
atgcgggtgagcggcgtgctgcggctgctggccctgatcttcgccattgtgacaacctggatgttcatacgctcttatatgagcttctctatgaagactatcagactgccgaggtggctcgcagcatccccaacaaaagagatccaggttaagaagtataaatgtggtcttatcaagccctgtcccgccaactactttgcatttaaaatctgtagtggcgctgcaaatgtggtagggcctacgatgtgctttgaggacaggatgatcatgagccccgtcaagaacaatgtagggagaggactgaatatcgctttagtaaacgggacgaccggcgccgtgctaggacagaaagcatttgacatgtatagcggggacgtaatgcatctggtgaagtttttaaaagaaatccctggtggagccctagtcctagttgcctcatatgatgatcctggaactaaaatgaatgatgagtccagaaaactgttttctgatttgggatcctcttatgccaaacaattagggttccgcgatagttgggtgttcataggcgcaaaagatctgcgtggcaagtctccctttgaacaatttctaaagaattcccccgatacaaataagtacgaagggtggccagagctattagaaatggaagggtgcatgcctccaaagcccttttag

SEQ ID NO: 237418 - DNA, 309 bp, Artificial Sequence
  derived and/or modified sequence
atgcgggtgagcggcgtgctgcggctgctggccctgatcttcgccatagtgacaacctggatgttcattaggtcctacatgagcttcagtatgaaaacaatccgtctgccgcggtggctggcagcctccccaacaaaggaaatccaggtgaagaagtacaagtgcggcctgatcaagccatgtcccgcaaattactttgcttttaaaatttgctcgggcgccgcaaacgttgtcgggccgacaatgtgcttcgaggacagaatgatcatgagccctgttaagaataacgtagggcgcggactcaactag

SEQ ID NO: 237419 - RNA, 675 nt, Artificial Sequence
  derived and/or modified sequence
augcgggucagcgguguucugcgacuucuggcucuuaucuuugccauuguuacaaccuggauguucauucguuccuauaugucuuucucaaugaagacaauacgccugccacgauggcucgcagccucaccuacaaaagagauccaagugaaaaaguauaaaugcggguugauuaaaccuuguccugcuaauuauuuugccuucaaaauauguuccggcgccgccaacgucguugggccuaccauguguuucgaagaucgcaugauuaugagcccugugaagaacaacguaggcaggggccugaacaucgcacuggucaacgguacaacgggagcuguccucggacagaaggccuucgacauguauagcggcgacgucaugcaucuggugaaguuucucaaagagauccccgguggcgcccugguacuuguggcuuccuacgacgaucccgggacuaaaaugaaugaugagagcaggaagcucuucagcgaccucggauccuccuaugccaaacaauuaggauuucgggauucuuggguauuuauuggugcaaaagaucugcgaggcaagagcccuuucgaacaguuuuugaagaauuccccagacacaaacaaauacgaaggauggcccgagcuccuggaaauggaaggaugcaugcccccaaagcccuucuag

SEQ ID NO: 237420 - RNA, 309 nt, Artificial Sequence
  derived and/or modified sequence
augcggguuagugggguguuacggcugcuggcucugaucuucgcaaucguuaccaccuggauguucaucagaucuuacaugagcuuuucuaugaaaaccauucgccuaccaagauggcuugccgccagccccaccaaagaaauucaggugaaaaaauauaagugcggacugauaaaaccaugcccagcaaauuauuuugccuuuaagaucugcucuggagccgcuaauguggugggaccaacaaugugcuuugaggaucggaugaucaugagcccaguaaaaaauaacguggggagaggccugaauuag

SEQ ID NO: 237421 - RNA, 675 nt, Artificial Sequence
  derived and/or modified sequence
augcgugugucuggcgugcucagacugcuggcccucaucuucgcuauuguaacaacauggauguuuaucagaagcuacauguccuuuucuaugaaaaccauccggcugccucguuggcuggcagccucuccaaccaaagaaauccaagugaaaaaguauaaguguggucucaucaagcccuguccagcgaauuauuucgccuucaaaaucugcucuggugcugcaaauguggugggaccuaccauguguuucgaggaccgaaugauuaugucucccguuaagaacaauguaggcaggggguugaacaucgcacuagucaacgguacgacaggagccgucuugggacagaaggcuuucgauauguauuccggcgaugucaugcaucuggucaaauuucugaaagagaucccagggggugcgcugguucugguggcuucauaugaugauccugguacuaagaugaacgacgaaucuagaaaauuguuuagcgaccucggcucaaguuaugccaaacagcuuggauucagagauuccugggucuuuauuggcgcgaaagaccuuagagguaagagcccuuucgagcaauuucucaagaacagcccagacacaaacaaguaugagggauggccugagcuacuggagauggaaggcuguaugccaccgaaaccauucuag

SEQ ID NO: 237422 - RNA, 309 nt, Artificial Sequence
  derived and/or modified sequence
augagagugucuggcguucugcggcuacuugcccucauuuucgccauugugaccacauggauguuuaucaggagcuauaugaguuuuucuaugaaaacaauccgacugccacguuggcuggcagcaucccccacaaaagaaauacaggugaagaaauacaagugcggcuugaucaagcccugccccgccaauuacuuugcauuuaagauuuguucaggcgcugcuaauguggucggaccuacaaugugcuucgaagauaggaugauuaugucucccgucaaaaauaacguagguagaggccucaacuag

SEQ ID NO: 237423 - protein, 348 aa, Artificial Sequence
  derived and/or modified sequence
MLCPWRTANLGLLLILTIFLVAEAEGAAQPNNSLMLQTSKENHALASSSLCMDEKQITQNYSKVLAEVNTSWPVKMATNAVLCCPPIALRNLIIITWEIILRGQPSCTKAYKKETNETKETNCTDERITWVSRPDQNSDLQIRTVAITHDGYYRCIMVTPDGNFHRGYHLQVLVTPEVTLFQNRNRTAVCKAVAGKPAAHISWIPEGDCATKQEYWSNGTVTVKSTCHWEVHNVSTVTCHVSHLTGNKSLYIELLPVPGAKKSAKLYIPYIILTIIILTIVGFIWLLKVNGCRKYKLNKTESTPVVEEDEMQPYASYTEKNNPLYDTTNKVKASEALQSEVDTDLHTL

SEQ ID NO: 237424 - DNA, 1047 bp, Artificial Sequence
  derived and/or modified sequence
atgctttgtccgtggagaacagctaacttaggcctgttactgatcctgaccatatttctggtagctgaagccgagggtgccgctcaacctaataactcactgatgcttcaaacaagcaaagagaaccatgccctcgcatctagctcactttgtatggatgagaaacaaatcacacagaattatagcaaagttctggccgaggtcaatacttcatggccagtgaaaatggccaccaacgctgtactgtgctgcccccccatcgccttacgtaacttgatcatcatcacctgggagatcattttgcgagggcagccttcatgcactaaagcttataaaaaggaaaccaatgagacaaaggaaaccaattgtactgacgagcggattacctgggtatctaggccagaccagaactcagatctacagattaggacagtcgccattactcacgacggttactatcgttgcattatggtgacccccgacggtaatttccacagagggtatcatttgcaagtcctggtaaccccagaagttacactgtttcagaacagaaatcgtaccgcagtgtgcaaggcagtggccggcaaaccagctgcccatatctcttggatccccgaaggggattgtgcaacaaaacaagaatactggagcaacggcacagtcaccgtcaaaagcacctgccactgggaggtccacaatgtctccacagtgacttgccacgtttcacacctcaccggtaataagtctttatatatcgaactactgccagtacctggcgccaagaaatctgccaaactgtacataccctatatcatcctaacaatcatcatactcaccatcgtgggatttatctggcttttgaaggttaatggatgcaggaaatataagctaaataaaactgagagcactccagttgtggaggaagacgaaatgcagccgtatgcttcatataccgaaaaaaacaatccgctctacgatacaacgaataaagtcaaggcatcagaggcccttcagtctgaggtagatactgatctccacaccctgtag

SEQ ID NO: 237425 - DNA, 1047 bp, Artificial Sequence
  derived and/or modified sequence
atgctgtgcccctggaggacagccaacctgggcctgctgctgatcctgaccatcttcctggtggccgaggccgagggcgccgcccagcccaacaacagcctgatgctgcagaccagcaaagaaaatcatgccctggccagcagcagcctgtgcatggatgagaagcagatcacccagaactacagcaaggtgctggccgaggtgaacacctcctggcctgtgaagatggccaccaatgctgtgctgtgctgcccccccatcgccctgaggaacctgatcatcatcacctgggagatcatcctgcggggccagcccagctgcaccaaggcctacaagaaggagaccaatgagaccaaggagaccaactgcacagatgagcgcatcacctgggtgtccaggccagaccagaacagcgacctgcagatcagaacagtggccatcacccatgatggctactaccgctgcatcatggtgaccccagatggcaacttccaccggggctaccacctgcaggtgctggtgaccccagaggtgaccctcttccagaacagaaacagaacagctgtgtgcaaggctgtggccggcaagccagctgcccacatctcctggatccctgagggggactgtgccaccaagcaggagtactggagcaatggcaccgtgacagtgaagagcacctgccactgggaggtgcacaacgtgtccacagtgacctgccacgtgagccacctgactggaaacaagagcctgtacatcgagctgctgcctgtgcctggggccaagaagagcgccaagctgtacatcccctacatcatcctgaccatcatcatcctgaccatcgtgggcttcatctggctgctgaaggtgaatggctgcaggaagtacaagctgaacaagacagagagcacccctgtggtggaggaggatgagatgcagccctatgccagctacacagagaagaacaaccccctgtatgacaccaccaacaaggtgaaggccagcgaggccctgcagagcgaggtggacacagacctgcacaccctgtag

SEQ ID NO: 237426 - DNA, 1047 bp, Artificial Sequence
  derived and/or modified sequence
atgctgtgcccctggcggaccgccaacctgggcctgctgctgatcctcacaatttttctcgtggcagaagctgagggcgcagcacagcctaataattcactgatgttacagactagcaaagagaatcacgctctggcctcatcatctctgtgtatggacgagaaacaaataactcagaactatagcaaggtcctggctgaagtgaacacttcttggcccgttaagatggcaactaatgctgtgctttgctgcccccccatagccctgcggaacctcattataataacatgggagataatcctgcgtggtcagccatcctgtaccaaggcttataagaaggagaccaacgagactaaggagactaactgtaccgatgagcgaattacatgggtgtccagaccagatcagaactcggacttgcagatccgaactgtcgccattactcacgatgggtattacagatgcatcatggtcacccccgacggcaacttccatcggggctaccacttgcaagttctggttacccctgaggtgaccctcttccagaatagaaaccggactgctgtttgcaaggcagtggccggtaaacccgctgcacacatcagctggattcccgaaggcgactgtgccactaagcaagagtattggtctaatggtaccgtgaccgtgaaatctacctgtcattgggaagtgcataacgtttctaccgtgacttgccacgtctcccatcttaccggaaacaaaagcctttatatagagctcctacccgtgcctggggcgaaaaaaagtgccaaactgtacattccttacatcatactgaccataattatcctgactatcgtggggttcatttggctcctcaaagtcaacggttgcagaaaatataaattaaacaagacagagagcactcctgttgtggaagaggacgagatgcagccatacgctagttacacggagaagaataatccgctttacgacacgacaaataaggtgaaagcatctgaggcactccagtccgaagtcgataccgatctgcacacactatag

SEQ ID NO: 237427 - DNA, 1047 bp, Artificial Sequence
  derived and/or modified sequence
atgctatgcccctggagaacagctaacctcgggctcctgttaatcttgaccatcttcctggtggccgaagctgagggcgctgctcagcctaataacagcctgatgcttcagacatccaaggagaaccacgcactcgcatccagttctctctgcatggatgagaagcagattacccagaactacagcaaagtactggcagaagttaatactagttggccagtaaaaatggccaccaacgctgtcctttgctgtcctcctatagctctgaggaaccttatcattattacctgggagataatattgcgaggacagccgtcctgtactaaagcatacaagaaagaaaccaatgaaactaaggaaacaaactgcactgatgagcggataacctgggtgtccagaccggatcaaaatagcgacctgcaaatcaggacagttgcaataactcacgacgggtattataggtgtataatggtcacgccagatggcaactttcaccgaggctatcatctgcaggtgttggttactcccgaggttaccctattccagaacaggaaccgtactgcagtgtgcaaagccgttgcaggaaagcccgctgcacacatatcctggatcccagagggggattgcgctaccaagcaagaatactggtcaaatggaacagtcacagtaaaaagcacctgccactgggaggtacacaacgtgtctaccgtgacgtgtcacgtgagtcacttgacaggtaataagtccctgtatatcgaactcttgcctgttcctggagccaaaaagagcgccaagctgtatatcccctatattatattgacgatcattattctgaccatcgtcggctttatttggctccttaaggtgaacggctgtcggaagtacaaacttaacaagacagagtcaacgcccgtcgtggaagaggatgagatgcagccatatgcctcctacacagagaagaataatcctctatatgacactaccaacaaggtgaaggcgagcgaggctttgcaaagcgaggtcgataccgacctccatacactgtag

SEQ ID NO: 237428 - DNA, 2299 bp, Artificial Sequence
  derived and/or modified sequence
gtctttgcttcagggcttcatacaggaaatctattgctgtgtcaagttccagagaaaagcttctgttcgtccaagttactaaccaggctaaaccacatagacgtgaaggaaggggctagaaggaagggagtgccccactgttgatggggtaagaggatcctgtactgagaagttgaccagagagggtctcaccatgcgcacagttccttctgtacctgtgtggaggaaaagtactgagtgaagggcagaaaaagagaaaacagaaatgctctgcccttggagaactgctaacctagggctactgttgattttgactatcttcttagtggccgaagcggagggtgctgctcaaccaaacaactcattaatgctgcaaactagcaaggagaatcatgctttagcttcaagcagtttatgtatggatgaaaaacagattacacagaactactcgaaagtactcgcagaagttaacacttcatggcctgtaaagatggctacaaatgctgtgctttgttgccctcctatcgcattaagaaatttgatcataataacatgggaaataatcctgagaggccagccttcctgcacaaaagcctacaagaaagaaacaaatgagaccaaggaaaccaactgtactgatgagagaataacctgggtctccagacctgatcagaattcggaccttcagattcgtaccgtggccatcactcatgacgggtattacagatgcataatggtaacacctgatgggaatttccatcgtggatatcacctccaagtgttagttacacctgaagtgaccctgtttcaaaacaggaatagaactgcagtatgcaaggcagttgcagggaagccagctgcgcatatctcctggatcccagagggcgattgtgccactaagcaagaatactggagcaatggcacagtgactgttaagagtacatgccactgggaggtccacaatgtgtctaccgtgacctgccacgtctcccatttgactggcaacaagagtctgtacatagagctacttcctgttccaggtgccaaaaaatcagcaaaattatatattccatatatcatccttactattattattttgaccatcgtgggattcatttggttgttgaaagtcaatggctgcagaaaatataaattgaataaaacagaatctactccagttgttgaggaggatgaaatgcagccctatgccagctacacagagaagaacaatcctctctatgatactacaaacaaggtgaaggcatctgaggcattacaaagtgaagttgacacagacctccatactttataagttgttggactctagtaccaagaaacaacaacaaacgagatacattataattactgtctgattttcttacagttctagaatgaagacttatattgaaattaggttttccaaggttcttagaagacattttaatggattctcattcatacccttgtataattggaatttttgattcttagctgctaccagctagttctctgaagaactgatgttattacaaagaaaatacatgcccatgaccaaatattcaaattgtgcaggacagtaaataatgaaaaccaaatttcctcaagaaataactgaagaaggagcaagtgtgaacagtttcttgtgtatcctttcagaatattttaatgtacatatgacatgtgtatatgcctatggtatatgtgtcaatttatgtgtccccttacatatacatgcacatatctttgtcaaggcaccagtgggaacaatacactgcattactgttctatacatatgaaaacctaataatataagtcttagagatcattttatatcatgacaagtagagctacctcattctttttaatggttatataaaattccattgtatagttatatcattatttaattaaaaacaaccctaatgatggatatttagattcttttaagttttgtttatttcttttaagttttgtttgtggtataaacaataccacatagaatgtttcttgtgcatatatctctttgtttttgagtatatctgtaggataactttcttgagtggaattgtcaggtcaaagggtttgtgcattttactattgatatatatgttaaattgtgtcaaatatatatgtcaaattccctccaacattgtttaaatgtgcctttccctaaatttctattttaataactgtactattcctgcttctacagttgccactttctctttttaatcaaccagattaaatatgatgtgagattataataagaattatactatttaataaaaatggatttata

SEQ ID NO: 237429 - DNA, 1047 bp, Artificial Sequence
  derived and/or modified sequence
atgctgtgcccctggagaaccgccaacctgggcctgctgctgatcctgaccatcttcctggtggccgaggccgagggcgccgcccagcccaacaacagcctgatgctgcagaccagcaaggagaaccacgccctggccagcagcagcctgtgcatggacgagaagcagatcacccagaactacagcaaggtgctggccgaggtgaacaccagctggcccgtgaagatggccaccaacgccgtgctgtgctgcccccccatcgccctgagaaacctgatcatcatcacctgggagatcatcctgagaggccagcccagctgcaccaaggcctacaagaaggagaccaacgagaccaaggagaccaactgcaccgacgagagaatcacctgggtgagcagacccgaccagaacagcgacctgcagatcagaaccgtggccatcacccacgacggctactacagatgcatcatggtgacccccgacggcaacttccacagaggctaccacctgcaggtgctggtgacccccgaggtgaccctgttccagaacagaaacagaaccgccgtgtgcaaggccgtggccggcaagcccgccgcccacatcagctggatccccgagggcgactgcgccaccaagcaggagtactggagcaacggcaccgtgaccgtgaagagcacctgccactgggaggtgcacaacgtgagcaccgtgacctgccacgtgagccacctgaccggcaacaagagcctgtacatcgagctgctgcccgtgcccggcgccaagaagagcgccaagctgtacatcccctacatcatcctgaccatcatcatcctgaccatcgtgggcttcatctggctgctgaaggtgaacggctgcagaaagtacaagctgaacaagaccgagagcacccccgtggtggaggaggacgagatgcagccctacgccagctacaccgagaagaacaaccccctgtacgacaccaccaacaaggtgaaggccagcgaggccctgcagagcgaggtggacaccgacctgcacaccctgtag

SEQ ID NO: 237430 - protein, 316 aa, Artificial Sequence
  derived and/or modified sequence
MALQTLQSSWVTFRKILSHFPEELSLAFVYGSGVYRQAGPSSDQKNAMLDFVFTVDDPVAWHSKNLKKNWSHYSFLKVLGPKIITSIQNNYGAGVYYNSLIMCNGRLIKYGVISTNVLIEDLLNWNNLYIAGRLQKPVKIISVNEDVTLRSALDRNLKSAVTAAFLMLPESFSEEDLFIEIAGLSYSGDFRMVVGEDKTKVLNIVKPNIAHFRELYGSILQENPQVVYKSQQGWLEIDKSPEGQFTQLMTLPKTLQQQINHIMDPPGKNRDVEETLFQVAHDPDCGDVVRLGLKKSVIYSSLKLHKMWKGWLRKTS

SEQ ID NO: 237431 - DNA, 951 bp, Artificial Sequence
  derived and/or modified sequence
atggccctgcagaccctgcagagcagctgggtgaccttcagaaagatcctgagccacttccccgaggagctgagcctggccttcgtgtacggcagcggcgtgtacagacaggccggccccagcagcgaccagaagaacgccatgctggacttcgtgttcaccgtggacgaccccgtggcctggcacagcaagaacctgaagaagaactggagccactacagcttcctgaaggtgctgggccccaagatcatcaccagcatccagaacaactacggcgccggcgtgtactacaacagcctgatcatgtgcaacggcagactgatcaagtacggcgtgatcagcaccaacgtgctgatcgaggacctgctgaactggaacaacctgtacatcgccggcagactgcagaagcccgtgaagatcatcagcgtgaacgaggacgtgaccctgagaagcgccctggacagaaacctgaagagcgccgtgaccgccgccttcctgatgctgcccgagagcttcagcgaggaggacctgttcatcgagatcgccggcctgagctacagcggcgacttcagaatggtggtgggcgaggacaagaccaaggtgctgaacatcgtgaagcccaacatcgcccacttcagagagctgtacggcagcatcctgcaggagaacccccaggtggtgtacaagagccagcagggctggctggagatcgacaagagccccgagggccagttcacccagctgatgaccctgcccaagaccctgcagcagcagatcaaccacatcatggacccccccggcaagaacagagacgtggaggagaccctgttccaggtggcccacgaccccgactgcggcgacgtggtgagactgggcctgaagaagagcgtgatctacagcagcctgaagctgcacaagatgtggaagggctggctgagaaagaccagctag

SEQ ID NO: 237432 - DNA, 951 bp, Artificial Sequence
  derived and/or modified sequence
atggctctgcagaccctgcaatccagctgggtcacctttagaaagattctcagccattttcccgaggagttgagcttggccttcgtgtatgggtcaggggtgtaccggcaggccggcccgagcagtgatcagaagaacgccatgttagatttcgtcttcaccgtggacgatccagtagcgtggcattccaaaaacctcaaaaagaactggagccactattcctttttaaaagttcttggtccaaagatcataacttcaatccagaacaattatggcgccggagtctattacaactcgctgatcatgtgcaacggaagactgatcaaatacggtgtcatcagtaccaatgtgctcatcgaagatctgctgaattggaataacctgtacattgccggccgccttcagaaacccgtcaaaatcatctccgttaatgaagatgtcactcttcgatcagcactggaccggaacctgaaatccgctgtgaccgccgccttcctgatgttaccagagtccttttcagaagaggacctgttcatagagattgccggcctctcctattcaggggactttcgcatggtggtgggcgaggataaaacgaaggtgctcaacatcgtcaaacccaacattgcgcatttccgcgagttgtatggaagtatacttcaggaaaaccctcaggttgtgtataagtctcagcagggctggctcgaaatcgataaatctcctgagggacagttcacccagcttatgacactcccaaagacactgcagcagcagatcaaccacattatggacccccctgggaagaacagagatgtggaggagaccctgtttcaagtcgctcatgatcccgattgtggagacgtagttagactgggcctgaaaaaatccgtgatctattcgagcctcaaactccacaaaatgtggaagggttggcttcgaaaaacatcatag

SEQ ID NO: 237433 - DNA, 951 bp, Artificial Sequence
  derived and/or modified sequence
atggccctgcagaccctgcagagctcctgggtgaccttcaggaagatcctgagccacttccctgaggagctgagcctggcctttgtgtatggcagcggcgtgtaccggcaggccggccccagcagtgaccagaagaatgccatgctggactttgtgttcaccgtggatgatcctgtggcctggcacagcaagaacctgaagaagaactggagccactacagcttcctgaaggtgctgggccccaagatcatcaccagcatccagaacaactatggagctggggtgtactacaacagcctcatcatgtgcaatggccgcctcatcaagtatggagtcatcagcaccaacgtgctgattgaggacctgctgaactggaacaacctgtacatcgccggccgcctgcagaagcctgtgaagatcatctctgtgaatgaagatgtgaccctgcggagcgccctggacaggaacctgaagtctgctgtgacagctgccttcctgatgctgcctgagagcttctctgaagaagatctcttcattgaaattgctggcctgagctacagcggggacttcaggatggtggtgggggaggacaagaccaaggtgctgaacatcgtgaagcccaacatcgcccacttccgggagctgtatggcagcatcctgcaggagaacccccaggtggtgtacaagagccagcagggctggctggagattgacaagagccctgagggccagttcacccagctgatgaccctgcccaagaccctgcagcagcagatcaaccacatcatggaccccccaggcaagaacagagatgtggaggagaccctcttccaggtggcccatgaccctgactgtggagatgtggtgcggctgggcctgaagaagagcgtcatctacagcagcctgaagctgcacaagatgtggaagggctggctgaggaagaccagctag

SEQ ID NO: 237434 - DNA, 951 bp, Artificial Sequence
  derived and/or modified sequence
atggccctgcagaccctgcagagcagctgggtgaccttccggaagattttgtcccacttccccgaagaattgagcctcgcattcgtttacggctccggcgtctataggcaagctggccccagctcagatcaaaagaatgcaatgttggatttcgtgtttacggtggacgaccctgtagcttggcactcaaaaaacctcaaaaagaactggagtcattactctttccttaaggtgctaggtccaaagattattactagcatccaaaacaattacggtgcaggcgtctattataactccctaattatgtgcaacgggcgcctcatcaagtatggcgtgatcagtaccaatgttcttattgaggacctcctcaactggaataatctgtacattgctggcagactccagaaacccgtgaaaataattagcgtgaacgaagatgtaaccttacgcagtgccctcgataggaacctgaagagtgcggtcacagctgcttttctaatgctccccgaatccttttcagaggaggacctgtttatagaaatagccgggctatcttactctggcgacttccgtatggtagtgggggaagacaagaccaaagtcctgaatatcgtcaagccaaacattgcccatttccgagagctgtacggaagcatcctgcaagaaaatccccaagtggtatacaagagccagcagggatggcttgaaattgataagtcccccgaggggcagttcactcagctgatgacactgccaaaaaccctccagcaacagattaatcatatcatggaccctcctggcaaaaatcgcgatgtggaagaaactcttttccaagtggcccatgatcccgattgcggggacgtggtgcggttagggctgaaaaagagtgtcatttacagtagcctcaaacttcataaaatgtggaaaggttggcttagaaagacttcttag

SEQ ID NO: 237435 - DNA, 951 bp, Artificial Sequence
  derived and/or modified sequence
atggctcttcagactcttcagtcctcctgggtgacctttcgaaagatcctaagtcacttcccagaggaactgtccctggcatttgtgtatggtagcggggtatataggcaagcaggccctagcagcgaccagaaaaacgccatgttggactttgtttttacagtcgacgatcccgtcgcttggcatagcaagaacttgaaaaagaattggagtcactattcgttcttgaaagtgctggggccaaagatcattacttctatccagaataattacggcgctggggtctactataattcactcatcatgtgcaatggtaggcttataaagtatggagtgataagcacaaacgtattgatagaggacctcttgaactggaataatctctacatcgccggtagactgcagaaaccggtgaaaataatctccgtcaatgaagatgtgacactacgatcagcccttgacagaaacctcaaaagtgccgtgactgccgcatttctgatgttacccgagagtttctccgaagaggatttgtttattgagatcgctggcctgtcatattctggcgacttccgaatggtagtaggcgaagataagacgaaggttttgaacatagtgaaacccaatattgcgcattttcgcgaattatacgggagtatcttacaggagaaccctcaagtggtctataagagtcaacaaggctggctggaaattgacaagtccccagagggacagtttactcagctcatgaccctgccgaagaccctgcagcaacagatcaatcacattatggaccccccagggaaaaaccgcgacgttgaagaaaccttgtttcaggtggcgcacgaccccgactgcggggacgtggtacggctgggactgaagaagtcggtgatatacagcagcctgaagcttcacaaaatgtggaagggatggctcaggaagacatcctag

SEQ ID NO: 237436 - DNA, 1297 bp, Artificial Sequence
  derived and/or modified sequence
gaagcgcctgtgcgtgcgtggggcgtagcaagggacggaagctctgcctgtgcgaccgccgcccacccgagcctatctgggctgcgtcttctcgccgctgctcttcgtggcccaacgccccaatccttgcgtgtgcttgcagtcccaccccacactcagccttgtgtccctcgatccagtctccgacttccatttcccaccctaaaccgcctacccggtgtctgttccccgcccggttgtcctcgccctgctgcgctgagtgtcccctgttagcctcgaccccatggcgctgcagacgctgcagagctcgtgggtgaccttccgcaagatcctgtctcacttccccgaggagctgagtctggctttcgtctacggctccggggtgtaccgccaggcagggccgagttcagaccagaagaatgctatgctggactttgtgttcacagtagatgaccctgtcgcatggcattcaaagaacctgaagaaaaattggagtcactactctttcctaaaagttttagggcccaagattatcacgtccatccagaataactatggcgctggagtttactacaattcattgatcatgtgtaatggtaggcttatcaaatatggagttattagcactaacgttctgattgaagatctcctcaactggaataacttatacattgctggacgactccaaaaaccggtgaaaattatctcagtgaacgaggatgtcactcttagatcagccctcgatagaaatctgaagagtgctgtgaccgctgctttcctcatgctccccgaaagcttttctgaagaagacctcttcatagagattgccggtctctcctattcaggtgactttcggatggtggttggagaagataaaacaaaagtgttgaatattgtgaagcccaatatagcccactttcgagagctctatggcagcatactacaggaaaatcctcaagtggtgtataaaagccagcaaggctggctggagatagataaaagcccagaaggacagttcactcagctgatgacattgcccaaaaccttacagcaacagataaatcatattatggaccctcctggaaaaaacagagatgtggaagaaactttattccaagtggctcatgatcccgactgtggagatgtggtgcgactaggcctgaagaagtcagtgatttatagttcactaaaactgcacaaaatgtggaaagggtggctgaggaaaacatcctgattttgcttgcttttatatatgttatgtgtagatgaataaagtgtttgatcctttttgacagaa

SEQ ID NO: 237437 - protein, 266 aa, Artificial Sequence
  derived and/or modified sequence
MKLRSSHNASKTLNANNMETLIECQSEGDIKEHPLLASCESEDSICQLIEVKKRKKVLSWPFLMRRLSPASDFSGALETDLKASLFDQPLSIICGDSDTLPRPIQDILTILCLKGPSTEGIFRRAANEKARKELKEELNSGDAVDLERLPVHLLAVVFKDFLRSIPRKLLSSDLFEEWMGALEMQDEEDRIEALKQVADKLPRPNLLLLKHLVYVLHLISKNSEVNRMDSSNLAICIGPNMLTLENDQSLSFEAQKDLNNKVCSAY

SEQ ID NO: 237438 - DNA, 801 bp, Artificial Sequence
  derived and/or modified sequence
atgaagctgagaagcagccacaacgccagcaagaccctgaacgccaacaacatggagaccctgatcgagtgccagagcgagggcgacatcaaggagcaccccctgctggccagctgcgagagcgaggacagcatctgccagctgatcgaggtgaagaagagaaagaaggtgctgagctggcccttcctgatgagaagactgagccccgccagcgacttcagcggcgccctggagaccgacctgaaggccagcctgttcgaccagcccctgagcatcatctgcggcgacagcgacaccctgcccagacccatccaggacatcctgaccatcctgtgcctgaagggccccagcaccgagggcatcttcagaagagccgccaacgagaaggccagaaaggagctgaaggaggagctgaacagcggcgacgccgtggacctggagagactgcccgtgcacctgctggccgtggtgttcaaggacttcctgagaagcatccccagaaagctgctgagcagcgacctgttcgaggagtggatgggcgccctggagatgcaggacgaggaggacagaatcgaggccctgaagcaggtggccgacaagctgcccagacccaacctgctgctgctgaagcacctggtgtacgtgctgcacctgatcagcaagaacagcgaggtgaacagaatggacagcagcaacctggccatctgcatcggccccaacatgctgaccctggagaacgaccagagcctgagcttcgaggcccagaaggacctgaacaacaaggtgtgcagcgcctactag

SEQ ID NO: 237439 - DNA, 801 bp, Artificial Sequence
  derived and/or modified sequence
atgaagctcagatctagccacaacgcaagcaaaacactgaacgccaataacatggaaacacttatagaatgccagtctgagggcgatattaaggagcatcctttgctcgccagctgcgagtctgaggactctatttgtcagcttatcgaagtgaaaaagcgcaagaaagtcttatcctggcctttcttgatgcgccgactgagtcccgctagcgacttttctggggccctcgaaaccgacctcaaagctagcttgttcgatcagcctctgtctatcatttgcggggattccgataccttgccaaggcccatccaggacatccttacaattctgtgcttgaagggtccgagtaccgagggcatttttcgtcgcgccgctaacgagaaggcacgaaaagagctgaaggaggagttgaatagtggcgacgcagttgatctggaaagactccccgttcacctcctggcagtggttttcaaagacttcctgcgctccatccctcgcaagctacttagctccgacttgttcgaggaatggatgggggctctggagatgcaggacgaggaggacagaattgaggctcttaagcaggtagcagataaacttccgcggcccaacctcttgcttttgaagcacttggtctatgttctgcacctaataagtaagaactccgaggtgaatcgaatggattcctcaaatttggcaatatgtatcggtcctaatatgctcactctggaaaatgaccagagcctgtcatttgaggcccagaaggacctgaacaataaagtttgctcagcgtactag

SEQ ID NO: 237440 - DNA, 801 bp, Artificial Sequence
  derived and/or modified sequence
atgaagctgcggagcagccacaatgccagcaagaccctgaatgccaacaacatggagaccctgattgagtgccagagcgagggggacatcaaggagcaccccctgctggccagctgtgagagcgaggacagcatctgccagctgattgaggtgaagaagaggaagaaggtgctgtcctggcccttcctgatgaggcggctgagccctgccagtgacttcagcggggccctggagacagacctgaaggccagcctgtttgaccagcccctgagcatcatctgtggggacagcgacaccctgccccggcccatccaggacatcctgaccatcctgtgcctgaagggccccagcacagagggcatcttcagaagagctgccaatgagaaggccaggaaggagctgaaggaggagctgaacagcggagatgctgtggacctggagcggctgcctgtgcacctgctggccgtggtgttcaaggacttcctgcggagcatccccaggaagctgctgagcagtgacctgtttgaggagtggatgggcgccctggagatgcaggatgaggaggacagaattgaggccctgaagcaggtggccgacaagctgccccggcccaacctgctgctgctgaagcacctggtgtatgtgctgcacctgatcagcaagaacagcgaggtgaacaggatggacagcagcaacctggccatctgcatcggccccaacatgctgaccctggagaatgaccagagcctgagctttgaggcccagaaggacctgaacaacaaggtgtgcagcgcctactag

SEQ ID NO: 237441 - DNA, 801 bp, Artificial Sequence
  derived and/or modified sequence
atgaagctgcggagcagccacaacgccagcaagaccctgaacgccaacaatatggaaacactgatcgaatgccagtctgagggagatatcaaggagcatcccctcttagctagttgtgagtccgaggattcaatttgtcagttgattgaagtgaaaaagcgcaagaaagttctttcctggccattcctcatgcgtaggctgagtccagcctcagatttcagcggcgcactcgaaacagacttaaaggcttcactctttgatcagcctttgtctattatctgtggcgattccgatacgctccctaggccaatacaggacattcttacaatcctctgcctcaaggggccttccactgagggtattttcagaagggccgccaacgagaaagcccgaaaagagctcaaggaagaactgaacagcggggacgccgtcgacctggaacgcctgccagtccacctcctggcggtggtgtttaaggacttcctgaggagcatcccccgcaagctgctgagttccgacctgtttgaagaatggatgggcgcgctggaaatgcaggacgaggaagatcgtatagaggctttaaaacaggtagccgacaagcttccgcgccctaatctgttgctactgaaacaccttgtttatgtcctacatctgattagcaaaaacagcgaagtgaacaggatggattcttccaatttagctatctgcatcggccccaacatgctgacattggaaaatgaccagtctctgagttttgaagcacagaaagaccttaacaacaaagtgtgctctgcctattag

SEQ ID NO: 237442 - DNA, 801 bp, Artificial Sequence
  derived and/or modified sequence
atgaaactgaggtcctcacacaacgctagtaaaactctgaacgctaacaacatggagactctgatagagtgtcaatcagagggggacattaaggaacatcctctactggcgtcttgtgaaagtgaggactccatttgccaacttatcgaggtaaaaaaaagaaagaaggtgctaagctggccatttctgatgcggagactgtcaccagcatccgatttcagcggggctctggagaccgatctaaaggcctctctgtttgaccagcccctgagtatcatttgtggggactctgatacactaccacgcccaattcaggatattcttactatcctgtgtttgaagggaccttccaccgaggggatcttccgccgagccgcaaacgaaaaagccaggaaagaactgaaggaggagttaaactctggcgacgctgtggatctcgagaggttgcctgtccatttattagccgttgtatttaaggattttctgcgcagcatccctcggaaacttctctcgtcagatctatttgaagagtggatgggtgctttggagatgcaggacgaggaggatcggatcgaagcgctcaaacaggtggccgataagctcccaaggcctaacctgttattattgaagcatctggtgtacgtgctgcacttgatcagcaaaaattccgaggtaaataggatggattcttctaatctggccatctgcattggcccaaatatgttgaccctcgagaacgaccagagcttgtcatttgaggctcagaaagacctgaataacaaggtctgttctgcctattag

SEQ ID NO: 237443 - DNA, 1183 bp, Artificial Sequence
  derived and/or modified sequence
ataatgcagagcatgtgaagggagaccggctcggtctctctctctcccagtggactagaaggagcagagagttatgctgtttctcccattctttacagctcaccggatgtaaaagaactctggctagagaccctccaaggacagaggcacagccacacgggagtgaaatccacccctggacagtcagccgcaatactgatgaagctgagaagcagccacaatgcttcaaaaacactaaacgccaataatatggagacactaatcgaatgtcaatcagagggtgatatcaaggaacatcccctgttggcatcatgtgagagtgaagacagtatttgccagctcattgaagttaagaagagaaagaaggtgctgtcctggccctttctcatgagaaggctctcccctgcatcagatttttctggggctttggagacagacttgaaagcatcgctatttgatcagcccttgtcaattatctgcggtgacagtgacacactccccagacccatccaggacattctcactattctatgccttaaaggcccttcaacggaagggatattcaggagagcagccaacgagaaagcccgtaaggagctgaaggaggagctcaactctggggatgcggtggatctggagaggctccccgtgcacctcctcgctgtggtctttaaggacttcctcagaagtatcccccggaagctactttcaagcgacctctttgaggagtggatgggtgctctggagatgcaggacgaggaggacagaatcgaggccctgaaacaggttgcagataagctcccccggcccaacctcctgctactcaagcacttggtctatgtgctgcacctcatcagcaagaactctgaggtgaacaggatggactccagcaatctggccatctgcattggacccaacatgctcaccctggagaatgaccagagcctgtcatttgaagcccagaaggacctgaacaacaaggtttgttctgcttactgatgagaaatccccaacttatgatctcaccatctgtttgccaagtccaggcaataaaatgcttcagaatgtctccaactgactcagaatcacagtgaaaatataaaatgcaaaatgcttttgtcatagttccactctctcagatacatgtatctaatgaaactgaataaatccgtgtcttctgtca

SEQ ID NO: 237444 - protein, 1300 aa, Artificial Sequence
  derived and/or modified sequence
MGTGPAQTPRSTRAGPEPSPAPPGPGDTGDSDVTQEGSGPAGIRGGETVIRAGMGDSPGRGAPERRHKAQPGRARKYEWRPEGPTSMGSLGQREDLQDEDRNSAFTWKVQANNRAYNGQFKEKVILCWQRKKYKTNVIRTAKYNFYSFLPLNLYEQFHRVSNLFFLIIIILQSIPDISTLPWFSLSTPMVCLLFIRATRDLVDDMGRHKSDRAINNRPCQILMGKSFKQKKWQDLCVGDVVCLRKDNIVPADMLLLASTEPSSLCYVETVDIDGETNLKFRQALMVTHKELATIKKMASFQGTVTCEAPNSRMHHFVGCLEWNDKKYSLDIGNLLLRGCRIRNTDTCYGLVIYAGFDTKIMKNCGKIHLKRTKLDLLMNKLVVVIFISVVLVCLVLAFGFGFSVKEFKDHHYYLSGVHGSSVAAESFFVFWSFLILLSVTIPMSMFILSEFIYLGNSVFIDWDVQMYYKPQDVPAKARSTSLNDHLGQVEYIFSDKTGTLTQNILTFNKCCISGRVYGPDSEATTRPKENPYLWNKFADGKLLFHNAALLHLVRTNGDEAVREFWRLLAICHTVMVRESPRERPDQLLYQAASPDEGALVTAARNFGYVFLSRTQDTVTIMELGEERVYQVLAIMDFNSTRKRMSVLVRKPEGAICLYTKGADTVIFERLHRRGAMEFATEEALAAFAQETLRTLCLAYREVAEDIYEDWQQRHQEASLLLQNRAQALQQLLGATAIEDRLQDGVPETIKCLKKSNIKIWVLTGDKQETAVNIGFACELLSENMLILEEKEISRILETYWENSNNLLTRESLSQVKLALVINGDFLDKLLVSLRKEPRALAQNVNMDEAWQELGQSRRDFLYARRLSLLCRRFGLPLAAPPAQDSRARRSSEVLQERAFVDLASKCQAVICCRVTPKQKALIVALVKKYHQVVTLAIGDGANDINMIKTADVGVGLAGQEGMQAVQNSDFVLGQFCFLQRLLLVHGRWSYVRICKFLRYFFYKSMASMMVQVWFACYNGFTGQPLYEGWFLALFNLLYSTLPVLYIGLFEQDVSAEQSLEKPELYVVGQKDELFNYWVFVQAIAHGVTTSLVNFFMTLWISRDTAGPASFSDHQSFAVVVALSCLLSITMEVILIIKYWTALCVATILLSLGFYAIMTTTTQSFWLFRVSPTTFPFLYADLSVMSSPSILLVVLLSVSINTFPVLALRVIFPALKELRAKEEKVEEGPSEEIFTMEPLPHVHRESRARRSSYAFSHREGYANLITQGTILRRGPGVSSDIASESLDPSDEEAASSPKESQ

SEQ ID NO: 237445 - protein, 578 aa, Artificial Sequence
  derived and/or modified sequence
MGDSPGRGAPERRHKAQPGRARKYEWRPEGPTSMGSLGQREDLQDEDRNSAFTWKVQANNRAYNGQFKEKVILCWQRKKYKTNVIRTAKYNFYSFLPLNLYEQFHRVSNLFFLIIIILQSIPDISTLPWFSLSTPMVCLLFIRATRDLVDDMGRHKSDRAINNRPCQILMGKSFKQKKWQDLCVGDVVCLRKDNIVPADMLLLASTEPSSLCYVETVDIDGETNLKFRQALMVTHKELATIKKMASFQGTVTCEAPNSRMHHFVGCLEWNDKKYSLDIGNLLLRGCRIRNTDTCYGLVIYAGFDTKIMKNCGKIHLKRTKLDLLMNKLVVVIFISVVLVCLVLAFGFGFSVKEFKDHHYYLSGVHGSSVAAESFFVFWSFLILLSVTIPMSMFILSEFIYLGNSVFIDWDVQMYYKPQDVPAKARSTSLNDHLGQVEYIFSDKTGTLTQNILTFNKCCISGRVYGAAPTPELPAGSSIFKGLRVPENQSHVWPHAQHLRPNLNQGTVARWPGFLWRGPGKFFFFLRQSLTLSTQAGMQWCNLGSLQSPPPRFKRFSWLSLPSSWDYRHLPPHLIFLYF

SEQ ID NO: 237446 - DNA, 3903 bp, Artificial Sequence
  derived and/or modified sequence
atgggtactgggcccgcacagacacctcggagtactagagccggaccagagccttccccagctcccccaggacctggcgacacgggcgactccgacgtcactcaggaaggaagtggacctgctggaattaggggcggggagaccgttatacgtgctggcatgggcgattctcccgggcggggagctcctgagcgcaggcacaaggcccaaccaggaagggctagaaagtatgagtggcgacctgagggaccaaccagcatgggatctctggggcaacgagaggacctgcaagacgaggataggaattccgcatttacttggaaggttcaggccaacaatcgcgcatacaacgggcagttcaaagagaaagtcatactgtgttggcagcgaaagaaatacaaaacaaatgtcattagaactgcgaagtacaacttttactcttttttgccactgaacttgtatgagcaattccaccgggtgagtaacctcttcttccttattataattatattgcaatcgattcccgatatcagcacactgccctggttctcactctcaaccccgatggtgtgtctgttgttcatcagggccacccgcgatctcgtggatgacatgggcagacataaatccgatagggccatcaataatcgaccatgtcagatcttgatgggcaagtcctttaagcaaaagaaatggcaagatctctgcgtgggggacgtggtttgcttgcgtaaggacaacatagtgcccgcagatatgctgctgcttgcaagcactgagccaagctccctctgttatgtcgaaaccgtggatatcgatggcgagactaacttgaaattcaggcaggctctgatggttacacataaggaactggccactattaaaaagatggcctcattccaagggactgtgacgtgcgaggcaccgaactcacggatgcaccacttcgtgggttgtcttgaatggaacgataaaaagtactcactggatatcgggaacttgctactgaggggctgtcgcatcaggaatactgatacgtgttacggcctagttatctatgctggcttcgatacaaagatcatgaaaaactgcgggaagattcatctcaaacggaccaagcttgacctgctgatgaacaaactggttgtagtgatttttatatccgtggtgttagtctgtttggtgctcgcctttggcttcggatttagcgttaaggaattcaaggaccaccactactaccttagcggagtccacggttccagtgtcgctgctgagtcgttctttgtcttctggtctttcttgatccttttatccgtcactatccccatgtctatgttcatcctgagcgaattcatatacctggggaacagcgtttttatcgattgggatgtccaaatgtactacaagcctcaggacgtccctgccaaagctcgatccacctccctgaatgaccacctggggcaggtcgaatacatctttagtgacaagactggcacattgacccagaacatcctcacattcaataagtgttgcatatcgggccgggtatacggcccagactcggaagctaccactaggccaaaagagaatccctacctgtggaataagttcgccgatggcaagctgcttttccataatgctgccctgctgcacctcgtccggacaaacggggatgaggccgtacgggagttctggcgactcctggccatttgtcacacggtaatggtccgcgaaagtccccgtgaacgaccagaccaactcctgtaccaggcagccagccccgacgagggcgcactggtcactgctgccaggaattttggctatgtttttctgtcccggacccaggatacagttactatcatggaattgggagaagaaagggtctaccaagttttagcaataatggattttaattcgacacgcaaacggatgtccgtcctggtcaggaaacccgagggcgccatttgcctatatacaaaaggagccgataccgtgatcttcgaacgactgcaccgccgaggagctatggagtttgccaccgaggaagcactcgccgccttcgctcaggaaacattaagaaccctctgtttagcttaccgcgaggtcgccgaagacatttacgaggactggcagcagagacatcaggaggcctccttgttacttcagaatcgtgcccaggccctgcagcagctgctgggtgccaccgcgatagaggacaggctccaggatggagtgccagaaacaatcaaatgtctcaagaaatccaatattaaaatttgggtcctcaccggtgataagcaggaaacggccgtgaacatcggatttgcctgcgagctgttgtccgagaacatgctgatcctggaagagaaagagattagtaggatcctggaaacttactgggagaattctaacaacctcctgacccgcgaatcactctcacaggttaagttagcgctggttattaatggtgatttcctcgacaaactcctggtgagtctacgaaaggagccccgtgctcttgcccagaatgtgaacatggacgaagcctggcaagagcttggtcagagtaggcgggactttctgtacgcaaggaggctgtccctgttgtgccgcaggttcggtttgcctcttgctgctcctcccgcgcaagacagccgggctagacgcagtagtgaggtgcttcaggagcgggcttttgtggacctggcctcgaaatgtcaggctgtgatctgttgtagagttactccaaaacagaaggccctgatcgtcgcgcttgtgaaaaaataccatcaggtggtcactctggccataggagatggcgcaaacgatattaacatgattaagaccgccgacgtcggcgtcggtcttgccggtcaggaggggatgcaggctgtgcagaattctgatttcgtactcgggcaattctgcttcctccagaggctgttactggtacatgggagatggtcttatgtaagaatctgcaaatttctgcggtatttcttctataagtcaatggcctctatgatggtgcaggtctggtttgcatgctataacggctttaccggccagccattatacgagggttggttcttagccctgttcaatctgttgtactcaactctgccagtcctttacattggtctttttgagcaggatgttagcgcagagcagagtctcgagaagcccgagttgtatgtggtgggacagaaggacgagctctttaattattgggtgttcgtgcaggctatcgcacacggcgtaacaacgtcactggtgaacttttttatgacgctctggatctctagggacaccgcaggccccgcgagcttcagtgaccatcagtccttcgccgtagtagtggccctgagctgccttttaagtatcactatggaagtgatcctcatcatcaagtattggacagccctgtgtgtggcaaccatcttgctgtcccttggcttttatgctattatgaccactacaacacaatctttttggcttttccgcgttagccctaccacattcccattcctgtacgccgatctctcagtgatgagctctccttctattctgctggttgtgttgctcagcgtgtccataaatacctttcccgtgctggctctgcgagtaattttcccggccctgaaggagctccgggctaaggaagaaaaagtggaggaaggacccagcgaagaaattttcaccatggagccactgccccatgttcatagggaaagcagggccaggagaagttcgtacgcattctctcaccgggagggatatgcaaacctgattacacaggggaccattttgagaaggggccccggggtgtcaagcgacattgcctctgagtcactggacccgagcgacgaagaagcagcctctagcccaaaagaatcccagtag

SEQ ID NO: 237447 - DNA, 3903 bp, Artificial Sequence
  derived and/or modified sequence
atgggcactggacctgcccagacccccaggagcacccgggccggccctgagcccagccctgcccctcctggccctggggacaccggggacagtgatgtgacccaggagggcagcggccctgctggcatccggggcggggagaccgtcatccgggccggcatgggagacagccctggccgcggggcccctgagaggaggcacaaggcccagcccggccgggccaggaaatatgagtggaggcctgagggccccacctccatgggcagcctgggccagcgggaggacctgcaggatgaagatagaaattctgccttcacctggaaggtgcaggccaacaacagagcctacaacggccagttcaaggagaaggtgatcctgtgctggcagaggaagaagtacaagaccaacgtcatcagaacagccaagtacaacttctacagcttcctgcccctgaacctgtatgagcagttccaccgggtgagcaacctcttcttcctgatcatcatcatcctgcagagcatcccagacatcagcaccctgccctggttcagcctgagcacccccatggtgtgcctgctcttcatccgggccacccgggacctggtggatgacatgggccgccacaagagtgaccgggccatcaacaaccggccctgccagatcctgatgggcaagagcttcaagcagaagaagtggcaggacctgtgtgtgggagatgtggtgtgcctgaggaaggacaacatcgtgcctgctgacatgctgctgctggccagcacagagcccagcagcctgtgctacgtggagaccgtggacattgatggagagaccaacctgaagttccggcaggccctgatggtgacccacaaggagctggccaccatcaagaagatggccagcttccagggcaccgtgacctgtgaggcccccaacagcaggatgcaccactttgtgggctgcctggagtggaatgacaagaagtacagcctggacatcggcaacctgctgctgcggggctgccgcatccggaacacagacacctgctacggcctggtgatctatgccggctttgacaccaagatcatgaagaactgtgggaagatccacctgaagaggaccaagctggacctgctgatgaacaagctggtggtggtgatcttcatctctgtggtgctggtgtgcctggtgctggccttcggcttcggcttctctgtgaaggagttcaaggaccaccactactacctgtctggagtgcacggcagctctgtggccgctgagagcttctttgtgttctggagcttcctgatcctgctgtctgtgaccatccccatgtccatgttcatcctgtctgagttcatctacctgggcaacagcgtcttcatcgactgggatgtgcagatgtactacaagccccaggatgtgcctgccaaggcccggagcaccagcctgaatgaccacctgggccaggtggagtacatcttcagtgacaagacaggcaccctgacccagaacatcctgaccttcaacaagtgctgcatcagcggccgggtgtatggcccagattctgaggccaccacccggcccaaggagaacccctacctgtggaacaagtttgctgatggcaagctgctcttccacaatgctgccctgctgcacctggtgaggaccaatggagatgaggccgtgcgggagttctggaggctgctggccatctgccacacagtgatggtgcgggagagcccccgggagaggccagaccagctgctgtaccaggccgccagcccagatgaaggagccctggtgacagctgccaggaactttggctacgtgttcctgagcaggacccaggacacagtgaccatcatggagctgggggaggagcgggtgtaccaggtgctggccatcatggacttcaacagcaccaggaagaggatgtctgtgctggtgaggaagccagagggcgccatctgcctgtacaccaagggagctgacaccgtcatctttgagcggctgcaccggcggggggccatggagtttgccacagaggaggccctggccgcctttgcccaggagaccctgcggaccctgtgcctggcctaccgggaggtggccgaggacatctatgaggactggcagcagaggcaccaggaggccagcctgctgctgcagaacagagcccaggccctgcagcagctgctgggcgccacagccatcgaggaccggctgcaggatggagtgcctgagaccatcaagtgcctgaagaagagcaacatcaagatctgggtgctgactggagacaagcaggagacagctgtgaacattggatttgcctgtgagctgctgtctgagaacatgctgatcctggaggagaaggagatcagccgcatcctggagacctactgggagaacagcaacaacctgctgacccgggagagcctgagccaggtgaagctggccctggtgatcaacggggacttcctggacaagctgctggtgtccctgaggaaggagccccgggccctggcccagaatgtgaacatggatgaggcctggcaggagctgggccagagcagaagagacttcctgtatgcccggcggctgagcctgctgtgcagaagatttggcctgcccctggccgcccccccagcccaggacagccgggcccggcgcagcagcgaggtgctgcaggagcgggcctttgtggacctggccagcaagtgccaggccgtcatctgctgccgggtgacccccaagcagaaggccctgattgtggccctggtgaagaagtaccaccaggtggtgaccctggccatcggagatggagccaatgacatcaacatgatcaagacagcagatgtgggcgtgggcctggccggccaggagggcatgcaggccgtgcagaacagcgactttgtgctgggccagttctgcttcctgcagaggctgctgctggtgcacggccgctggagctatgtgcgcatctgcaagttcctgcgctacttcttctacaagtccatggcctccatgatggtgcaggtgtggtttgcctgctacaacggcttcaccggccagcccctgtatgagggctggttcctggccctcttcaacctgctgtacagcaccctgcctgtgctgtacatcggcctgtttgagcaggatgtgtctgctgagcagagcctggagaagccagagctgtatgtggtgggccagaaggatgagctgttcaactactgggtgtttgtgcaggccatcgcccatggagtgaccaccagcctggtgaacttcttcatgaccctgtggatcagccgggacacagctggccctgccagcttcagtgaccaccagagctttgctgtggtggtggccctgagctgcctgctgagcatcaccatggaggtgatcctgatcatcaagtactggacagccctgtgtgtggccaccatcctgctgagcctgggcttctacgccatcatgaccaccaccacccagagcttctggctgttccgggtgagccccaccaccttccccttcctgtatgctgacctgtctgtgatgagcagccccagcatcctgctggtggtgctgctgtctgtgtccatcaacaccttccctgtgctggccctgcgggtcatcttccctgccctgaaggagctgcgggccaaggaggagaaggtggaggagggccccagcgaggagatcttcaccatggagcccctgccccacgtgcaccgggagagccgggcccggcgcagcagctatgccttcagccaccgggagggctacgccaacctgatcacccagggcaccatcctgcggcggggccctggggtgtccagtgacatcgccagcgagagcctggaccccagtgatgaggaggccgccagcagccccaaggagagccagtag

SEQ ID NO: 237448 - DNA, 3903 bp, Artificial Sequence
  derived and/or modified sequence
atgggcaccggccccgcccagaccccccggagcacccgggccggcccagaaccaagtcccgctcctcctggacccggagacaccggagactccgacgttactcaagagggctccgggccagccggtattcgggggggggagaccgttattcgagccggcatgggtgattcgcccggccggggcgcacccgagcgccgacacaaggcacagccagggcgcgcgaggaaatacgagtggaggcctgaagggcccaccagtatgggctccctgggacagagagaagaccttcaggacgaggatcgcaacagtgcctttacctggaaagtgcaggccaacaacagagcatacaacggacagtttaaagagaaagtgatcctgtgctggcagaggaagaagtacaagaccaacgtgatcagaactgctaagtacaacttctactcttttctgcctctgaacttgtatgagcagtttcatcgcgtgtctaacctgtttttcttgataatcattatcctgcaatccatccccgatattagcactctcccatggttcagcctgagtacccccatggtgtgcttgctcttcatccgtgccaccagggatctggtggatgacatgggcagacataagtccgaccgggctatcaacaaccgcccttgccagatccttatgggcaaatcttttaaacagaagaagtggcaggacctgtgcgtgggagacgtagtatgcctgcgaaaggacaacatcgttcctgcagacatgctgttactcgcatctaccgagccatcatcactttgctatgtagagaccgtggacatagatggcgaaacaaacctgaagttcagacaggcattgatggttacgcacaaggagcttgcaactatcaaaaagatggcctccttccagggcacggttacgtgcgaagctcccaactcccgcatgcaccacttcgtgggttgccttgaatggaacgataaaaaatactccttggacatcggcaacctgttactccgcggctgcaggatccgcaacaccgatacctgctacgggttggtgatatacgccggtttcgacacaaaaatcatgaagaactgtggcaagattcatttgaagagaactaagctggatttgttgatgaacaagctggttgtggtaattttcatctctgtggtcttagtctgcctggtgctcgcatttggctttgggttctctgttaaggagttcaaggatcaccactactatttgagcggcgtccatggcagcagtgtagccgcagaaagtttcttcgtgttctggagttttttgattctgctctcggtgactatcccaatgtctatgttcatcctctctgagttcatttaccttggcaattcggtgttcatagactgggacgtgcagatgtactataagccacaagatgttcctgccaaagctaggtccacttctctcaacgatcatctgggtcaggtcgagtatattttttcggataaaacaggcacactcactcagaatattttgacctttaacaagtgttgtatcagtggaagagtatatggccccgattctgaagccacgacacggcctaaggagaacccatatctgtggaacaagtttgctgatggaaaactcttattccacaatgccgcccttctgcatttagtgaggaccaatggagatgaggctgttagggagttctggcgtcttttggcaatctgtcacaccgttatggtgcgtgagagtcctcgggaaagacccgaccagctgctgtatcaggcagcctcgccagacgagggcgccctggtcacagctgcccgcaacttcggatacgtttttttgtctaggacccaggacaccgtcacaattatggaacttggcgaggaaagagtatatcaggtgctggcaataatggattttaattctactaggaagcggatgtcagtgctggtacgcaaacctgagggagcaatatgtttgtacaccaaaggcgccgatacagtaatttttgagaggctgcaccgccggggagccatggagttcgccactgaggaagcgttggccgctttcgcgcaggaaaccctgagaaccttatgccttgcctatagagaggtcgcagaggacatctacgaggactggcagcagagacaccaagaggcctcactactgttgcagaaccgcgcccaggccctgcaacaacttctgggggctactgccattgaggacagactgcaggatggggtacctgagacaataaagtgtcttaagaaaagcaatatcaaaatttgggtgcttacgggcgacaagcaagaaactgcagtcaacatcggttttgcatgcgagttgctgtccgaaaatatgctgattctggaggaaaaggaaatttcgaggattctggagacgtactgggagaactcgaacaacctgctgacccgcgagtctttaagtcaagtcaagctggccctggttattaacggagatttcctcgacaaactcctcgtgtccctgcggaaggagccacgggcattggcacaaaacgtcaacatggatgaggcctggcaggagctgggacaatctaggagagatttcctgtacgcaaggaggctgagcctcttgtgtcgccgatttggcttgcccttggcagctcctccagcccaggactcaagggcccggcggtcatcagaggtcttgcaggagcgggcttttgtggacttagctagcaaatgtcaagccgtcatctgctgccgagtcacaccgaagcagaaagccctcattgtcgcgttggtcaaaaaatatcatcaggtcgtcaccttagccattggagacggggcgaatgacataaatatgatcaagactgcggacgtgggggttggtcttgccggccaagagggtatgcaggctgtccagaatagtgactttgttctgggccagttctgctttcttcagcgactgttgctggtccatggaaggtggtcctatgtgaggatctgcaagttcttgaggtactttttctacaaaagtatggcctctatgatggtccaagtctggttcgcatgctacaatggatttaccggacaacccttgtacgaggggtggttccttgctctattcaatttgctctacagcactctgccagtgttatatatcggcctctttgagcaagacgtctccgccgaacagtccctggagaagcccgagctttacgttgtcggccaaaaagacgagcttttcaattactgggtttttgtgcaggccatcgcccacggggtcactaccagcctggtaaacttttttatgaccctgtggatctcaagagacaccgccggtcctgcctctttttcagatcaccagtcatttgctgtcgtcgttgccctgtcttgtttactctctataacgatggaagtgattctgattatcaaatattggaccgctctgtgtgttgccaccatcttactgagccttgggttctatgctataatgacaaccacaacccagagcttttggctcttccgcgtaagtccaactacgtttccattcctgtatgctgacctctcagtgatgagcagccctagcattctcttagtagtgcttctgagcgtttccattaacactttccccgtcctggcattgagggttatattccctgccttaaaagaactccgcgcgaaggaagagaaagtcgaggaaggcccatcagaagagatcttcacaatggagccattgcctcacgttcacagggagagccgtgcgcgccgttcaagttatgccttttcacacagagagggctacgctaatctgatcacccagggaacaatcctcaggcgagggcccggcgtctcgagtgatattgcctctgaatcactggacccttccgacgaagaagcggcctccagcccaaaggagtcccagtag

SEQ ID NO: 237449 - DNA, 3903 bp, Artificial Sequence
  derived and/or modified sequence
atgggtaccggacccgctcagacgccgaggtctacaagggccggaccagaacccagcccagccccacccggtccaggggacactggtgactcagacgtgacccaggagggctccgggccagctggaatccgtggtggcgagactgttattcgcgcaggcatgggagatagtcccggacggggagctccagagaggaggcataaggcccagcccggacgggcaagaaagtacgagtggaggccagaaggcccaacctccatgggctccctcgggcagagagaagacttgcaggacgaagatcgtaatagcgcatttacatggaaagtccaggccaacaaccgggcttacaacggccagttcaaggaaaaggtgatcttgtgctggcagaggaaaaaatacaaaacaaacgtgatacgtaccgcgaaatacaatttttattctttcctgcccttaaacctttacgagcagtttcatagggttagcaacctgtttttcctgattataataatcttgcaatctataccagacattagcacactcccttggttttctctgagcacacctatggtgtgtctgttatttatacgggcaacccgggacctggttgacgacatggggagacacaagtccgaccgggctataaataacaggccatgccagatcctgatgggaaaatctttcaaacagaagaaatggcaggacctctgcgtgggcgatgtggtgtgcctcagaaaggataatattgtccccgctgatatgctgctgttggcatcaacagagccttcgagcctatgttacgttgagacagtggacattgatggggaaaccaacctcaagttccgccaagctctgatggtgactcacaaagaactggcgaccataaagaaaatggcatcattccagggaacagtgacttgcgaagcccctaattctcgtatgcaccactttgtgggttgcctggagtggaacgacaaaaaatatagtctcgacatagggaatctgctactgagaggctgccggatccggaatacagatacctgttatgggctagtaatctatgccggattcgatactaagatcatgaagaattgtgggaagatccatttgaaaagaaccaaactggacttattaatgaataaactggtcgttgtcatatttatcagcgtggttctggtttgtcttgttttggcttttggattcggattctctgtgaaggaattcaaagaccaccactactacttgagcggggtgcatgggagctccgtggctgcagaatcttttttcgtgttttggtcctttctgatattgctgtctgtgacgattcccatgagtatgtttatcttgtcggagtttatctacctcggcaacagcgtcttcatcgactgggatgtgcagatgtactataaacctcaggacgtgcccgctaaggcgagatctacgtccctgaacgatcaccttggtcaggttgagtacatcttctctgataaaacaggaacactgactcagaacatactgacatttaacaagtgctgtatctcaggtagagtttatggaccggattctgaggccacaacacgtcctaaagagaatccttatctatggaacaaattcgctgatggcaaactcttatttcacaacgccgctctcttgcatttagttcgcacaaacggggacgaggccgtaagagagttttggcgcctgcttgctatttgtcacaccgtgatggttagagagagcccaagggagcgacctgatcagttgttatatcaggccgcatcccccgacgagggagcattggtcacagccgcacgtaactttggttacgtcttccttagtaggacacaagatacagtgactatcatggaactgggggaagagcgggtctatcaagttctagcaattatggatttcaacagtactaggaaacgaatgtccgtgttagtgagaaaaccagagggcgctatttgtttgtacacaaaaggcgctgataccgtgatcttcgaaaggctccatcgccgaggtgccatggagttcgcaacagaagaagctttagcagctttcgcccaggagacactgcgaacactgtgcctcgcgtacagggaagtggccgaagatatttacgaggattggcagcaaagacatcaggaggccagcttactcctgcaaaatagagcacaagctctacagcagctgctaggagcgacagcgatcgaggatagactgcaggacggcgtcccagagaccatcaaatgcttgaagaaatctaatatcaagatctgggtactcaccggagacaaacaggagacagcggtcaacatcggattcgcatgcgagttgctgtctgagaacatgttaatcctggaagaaaaagagatctcccgcattttagaaacatactgggagaactctaacaacctgctgacaagagagtcactgtctcaggtaaagcttgcgttggtgatcaacggagacttcctcgataagctcctcgtaagcctgagaaaggagccacgggcactggcacaaaacgtgaacatggatgaagcttggcaagaactgggacagagtcgtagggactttctatacgcccgacggctgtctctcctgtgtaggcggtttggcctgccactggcagccccacccgctcaagatagtcgcgctcgccgaagcagcgaggtactgcaagaaagagcttttgttgacctcgcatctaagtgtcaggcggtgatttgttgcagggtgacccccaagcagaaagcccttattgtggcacttgtgaagaaataccatcaggtggttacactggctattggtgatggtgcaaacgacatcaatatgatcaagaccgcggatgtgggcgtcgggcttgcaggccaggaggggatgcaggcggtacagaacagcgactttgtcctgggtcaattctgctttctccagaggctactgctcgtgcatgggagatggagttacgtaagaatttgcaagttccttcggtattttttttataagtctatggcatccatgatggtgcaggtgtggtttgcctgttacaacggattcactggacagcccttgtacgagggatggtttttagctctgttcaatctcctgtacagcactctcccagtcttatacatagggctattcgaacaggatgtcagtgccgagcagtccttggagaaacccgaattgtacgtcgttggtcaaaaggatgagctgtttaattattgggtctttgtgcaggcaatagcgcatggcgttaccacctcacttgtcaattttttcatgacactctggatcagccgagacactgccggaccggcatcattttctgaccaccagagctttgctgtagtggtggcactttcatgtttgctttctatcactatggaggtcattttgataatcaagtattggacagccctgtgcgtagccacgattctcctgtccctcggattctacgccataatgactacaactactcagtcattttggctttttagagtaagtccaaccacgtttccgttcttatacgctgatttgtctgtcatgagttcccctagcatcctgttagttgtcctcttatccgtatcaataaacacatttccagtgctagctcttagggtgatcttccccgctctaaaggagctgcgggcaaaggaggaaaaagtggaggaaggcccttctgaggagatttttactatggaacccctacctcatgttcaccgggagagcagagccaggcgatcctcttatgccttttcccacagggagggctacgctaatctgattactcagggtaccattctgcgacggggacccggagtaagttccgacatcgcctcggagtctctggatcccagcgacgaggaggccgcaagttcacccaaagagtctcagtag

SEQ ID NO: 237450 - DNA, 5095 bp, Artificial Sequence
  derived and/or modified sequence
gtttcaggaccgttggcaccgggctaacggttccaccacgtccgccgccctggacgcccgcggcctgcccccccctgcctctcctgcgccgatacacttcgagtggattctggccatttgagcattctctccaactctccaatccccagtctgcccccacgggggtctcccccacctctcccccgtcccacagcctaaacccctcttcgccctgaacctcccttttcctcatgcggtgaatgggcactggccccgctcagactcccaggagcaccagagctggccctgagccaagccctgccccaccaggacctggggacacgggtgactcagacgtgactcaggaaggctcaggtcctgctggcatccgcggaggtgagacggtgatcagagctgggatgggagactccccaggcagaggggcacctgagaggaggcacaaggcccagcctggccgggctaggaagtatgaatggagaccagaaggccccaccagcatgggcagcctcggccagagagaagatctccaagatgaggacaggaactcagcattcacctggaaggtccaggccaacaaccgtgcctacaacgggcagttcaaggagaaggtgatcctgtgctggcaaaggaagaaatacaagaccaatgtcatccgcacggccaagtacaacttctactcgttcctgccgctgaacctgtacgagcagttccaccgcgtgtccaacctgttcttcctcatcatcatcatcctgcagagcattcccgacatctccacgctgccctggttctcgctcagtacccctatggtctgcctcctcttcatccgtgccacccgggacctggtggacgacatggggagacacaagagtgacagagccatcaacaacagaccctgccagattctgatggggaagagcttcaagcagaagaaatggcaggatctgtgcgtgggggatgtggtctgtctccgcaaggacaacatcgtcccagccgacatgctcttgctggccagcacggagcccagcagcctgtgctatgtggagacggtggacattgacggggagaccaacttgaagttcagacaggccctgatggtcacccacaaagaactggccactataaagaagatggcgtcctttcaaggcacagtgacgtgtgaggcgcctaacagtcggatgcaccacttcgtggggtgcctggaatggaatgacaagaaatactccctggacattggcaacctcctcctccgaggctgcaggattcgcaacacagacacctgctatggactggtcatttatgctggttttgacacaaaaattatgaagaactgtggcaagatccatttgaagagaaccaagctggacctcctgatgaacaagctggtggttgtgatcttcatctccgtggtgcttgtctgcctggtgttggccttcggcttcggtttctcagtcaaagaattcaaagaccaccactactacctctcgggggtgcatgggagcagcgtggccgcagagtccttcttcgtcttctggagcttcctcatcctgctcagcgtcaccatcccgatgtccatgttcatcctgtccgagttcatctacctggggaacagcgtcttcatcgactgggacgtgcagatgtactacaagccgcaggacgtgcctgccaaggcccgcagcaccagcctcaacgaccacctgggccaggtggaatacatcttctcggacaagacgggcacgctcacgcagaacatcttgaccttcaacaagtgctgcatcagcggccgcgtctatgggccggattcagaggccacgacccgacctaaggagaacccctacctctggaacaagttcgccgacgggaagctgctcttccacaatgcggccctgctgcacctcgtgcggaccaacggggacgaggccgtgcgggagttctggcgcctgctggccatctgccacacggtgatggtgcgggagagcccccgtgagcgcccagaccagctgttgtaccaggcggcctcccccgacgagggggcgctggtcaccgcagcccggaacttcggctacgtgttcctgtcccgcacccaggacaccgtcacgatcatggagctgggggaggaacgggtctaccaggtcctggccataatggacttcaacagcacgcgcaaacggatgtcggtgctggttcgaaagccagagggcgccatctgcctgtacaccaagggcgccgacacggtcatcttcgaacgcttgcacaggaggggggcaatggaatttgccacagaggaggccttggctgcctttgcccaggagaccctgcggacactgtgcctggcctacagggaggtggctgaggacatttacgaggactggcagcagcgccaccaggaggccagcctcctgctgcagaaccgggcacaggccctgcaacagctgctgggagccacagccatcgaggacagactccaggacggtgtccctgaaaccatcaaatgtctcaagaagagcaacatcaaaatatgggtgctcaccggggacaagcaggaaacggctgtgaacatcggcttcgcctgcgagctgctgtcagagaatatgctcattctggaggagaaggagattagccgcatcctggagacctactgggaaaacagtaacaaccttctaaccagggagtccctgtcgcaggtcaagctggccttggtcattaacggagacttcctggacaaactgctggtgtccctgcggaaggagccgcgcgccctggcgcagaacgtgaacatggacgaggcgtggcaggagctcggccagtccaggagggatttcctctacgccaggcgcctgtccctgctgtgccggaggttcgggctcccgctggctgcaccgccagcccaggactccagagcccgccgtagctccgaggtgctgcaggagcgcgccttcgtggacctggcgtccaagtgccaggcggtcatctgctgccgcgtgacgcccaagcagaaggccctgatcgtggccctggtcaagaagtaccaccaggtggtgaccctggccatcggggacggtgccaacgacatcaacatgatcaagaccgcggacgtgggcgtggggctggcgggccaggagggcatgcaggcagttcagaacagcgacttcgtgctcggccagttctgcttcctgcagcgcctcctgctggtgcacggccgctggtcctacgtgcggatctgcaagttcctgcgctacttcttctacaagagcatggccagcatgatggtgcaggtctggtttgcctgctacaacggcttcaccggccagcccctgtatgaaggatggttcctggctcttttcaacctcctgtacagcaccctgccagttctctacattgggctctttgagcaggacgtgagcgcagagcagagcctggagaagccggagctgtacgtggtggggcagaaggacgagctcttcaactactgggtcttcgtccaagccatcgcccatggtgtgaccacctctctggtcaacttcttcatgacactgtggatcagccgcgacacggcgggacccgccagcttcagcgaccaccagtcctttgcggtcgtggtggccctgtcttgcctgctgtccatcaccatggaggtcattcttatcatcaagtactggaccgccctgtgcgtggcgaccatcctcctcagccttggtttctacgccatcatgactaccaccacccagagcttctggctcttcagagtatcccccacgaccttcccgtttctgtatgccgacctcagcgtgatgtcctctccctccatcctgctggtggtcctgctgagtgtgtccataaacaccttccctgtcctggccctccgagtcatcttcccagccctcaaggagctacgtgccaaggaggagaaggtggaggagggccccagcgaggagattttcaccatggagcccttgcctcatgtacaccgggagtctcgtgcccgccgttccagctatgctttctcccaccgtgagggatatgcaaacctcatcactcagggcacaattctgcggaggggaccaggggtcagcagtgacatagcatctgaatccctagacccatctgatgaagaggcagcttcgagcccaaaagagtcacagtgacacctcaggaagatgtccttcctggggaagaagaagcaccagccacaggggcaggtgtcctcccaggaagtacagctcccccctacacctagctcatcattttctatggatagacaatccgctcttcatccagaaaaccaacctgccctccccaaatatgtgctcaccagcagcaacaggctatctgagtctttccaagagcaattgccaagggcacaggagaggtcattgtcacccaagcagaggccaccttctcctgagaagttgctgttgaccaaggagaggtcacattcttttcaggagaaatcactgttgcacagagaaagccagctgtcgtcatttgagagccagccacagcctctggggagccagtcatttctttcaggccagctgacgttggagagccagccagactcctcggaggagaagtcagcatttttgaagccctccacaccgttccggaagagctggcaaaaggagcctcacacccccaaggaggggacggtgccacttccagacaagacccacaaatctcaggtggagactctgccaccaagtctggaagaatcgtccacgtccacgagcgagcagcctatggaggtggagctgtggcccgcggagaagcagtcatcatcatccatggagtggctgctggtgcccggggaggagcagctatccttgcccccagaggagcagtcattgccctctgcggaggggaccagggttcagcagtgacgtagcatctgaatccctagacccatctgatgaagaggcatcttcgagcccaaaggagtcacgctggcatatcaggaagatgtccttcctgggaagaagaagctccagccagttctgctgcaagtcaaccagcatgcagggggccttcctctaaagacaaggactccacatgcttttctttttctaataaaccagggtccatctgaccccagcgctaa

SEQ ID NO: 237451 - DNA, 3903 bp, Artificial Sequence
  derived and/or modified sequence
atgggcaccggccccgcccagacccccagaagcaccagagccggccccgagcccagccccgccccccccggccccggcgacaccggcgacagcgacgtgacccaggagggcagcggccccgccggcatcagaggcggcgagaccgtgatcagagccggcatgggcgacagccccggcagaggcgcccccgagagaagacacaaggcccagcccggcagagccagaaagtacgagtggagacccgagggccccaccagcatgggcagcctgggccagagagaggacctgcaggacgaggacagaaacagcgccttcacctggaaggtgcaggccaacaacagagcctacaacggccagttcaaggagaaggtgatcctgtgctggcagagaaagaagtacaagaccaacgtgatcagaaccgccaagtacaacttctacagcttcctgcccctgaacctgtacgagcagttccacagagtgagcaacctgttcttcctgatcatcatcatcctgcagagcatccccgacatcagcaccctgccctggttcagcctgagcacccccatggtgtgcctgctgttcatcagagccaccagagacctggtggacgacatgggcagacacaagagcgacagagccatcaacaacagaccctgccagatcctgatgggcaagagcttcaagcagaagaagtggcaggacctgtgcgtgggcgacgtggtgtgcctgagaaaggacaacatcgtgcccgccgacatgctgctgctggccagcaccgagcccagcagcctgtgctacgtggagaccgtggacatcgacggcgagaccaacctgaagttcagacaggccctgatggtgacccacaaggagctggccaccatcaagaagatggccagcttccagggcaccgtgacctgcgaggcccccaacagcagaatgcaccacttcgtgggctgcctggagtggaacgacaagaagtacagcctggacatcggcaacctgctgctgagaggctgcagaatcagaaacaccgacacctgctacggcctggtgatctacgccggcttcgacaccaagatcatgaagaactgcggcaagatccacctgaagagaaccaagctggacctgctgatgaacaagctggtggtggtgatcttcatcagcgtggtgctggtgtgcctggtgctggccttcggcttcggcttcagcgtgaaggagttcaaggaccaccactactacctgagcggcgtgcacggcagcagcgtggccgccgagagcttcttcgtgttctggagcttcctgatcctgctgagcgtgaccatccccatgagcatgttcatcctgagcgagttcatctacctgggcaacagcgtgttcatcgactgggacgtgcagatgtactacaagccccaggacgtgcccgccaaggccagaagcaccagcctgaacgaccacctgggccaggtggagtacatcttcagcgacaagaccggcaccctgacccagaacatcctgaccttcaacaagtgctgcatcagcggcagagtgtacggccccgacagcgaggccaccaccagacccaaggagaacccctacctgtggaacaagttcgccgacggcaagctgctgttccacaacgccgccctgctgcacctggtgagaaccaacggcgacgaggccgtgagagagttctggagactgctggccatctgccacaccgtgatggtgagagagagccccagagagagacccgaccagctgctgtaccaggccgccagccccgacgagggcgccctggtgaccgccgccagaaacttcggctacgtgttcctgagcagaacccaggacaccgtgaccatcatggagctgggcgaggagagagtgtaccaggtgctggccatcatggacttcaacagcaccagaaagagaatgagcgtgctggtgagaaagcccgagggcgccatctgcctgtacaccaagggcgccgacaccgtgatcttcgagagactgcacagaagaggcgccatggagttcgccaccgaggaggccctggccgccttcgcccaggagaccctgagaaccctgtgcctggcctacagagaggtggccgaggacatctacgaggactggcagcagagacaccaggaggccagcctgctgctgcagaacagagcccaggccctgcagcagctgctgggcgccaccgccatcgaggacagactgcaggacggcgtgcccgagaccatcaagtgcctgaagaagagcaacatcaagatctgggtgctgaccggcgacaagcaggagaccgccgtgaacatcggcttcgcctgcgagctgctgagcgagaacatgctgatcctggaggagaaggagatcagcagaatcctggagacctactgggagaacagcaacaacctgctgaccagagagagcctgagccaggtgaagctggccctggtgatcaacggcgacttcctggacaagctgctggtgagcctgagaaaggagcccagagccctggcccagaacgtgaacatggacgaggcctggcaggagctgggccagagcagaagagacttcctgtacgccagaagactgagcctgctgtgcagaagattcggcctgcccctggccgccccccccgcccaggacagcagagccagaagaagcagcgaggtgctgcaggagagagccttcgtggacctggccagcaagtgccaggccgtgatctgctgcagagtgacccccaagcagaaggccctgatcgtggccctggtgaagaagtaccaccaggtggtgaccctggccatcggcgacggcgccaacgacatcaacatgatcaagaccgccgacgtgggcgtgggcctggccggccaggagggcatgcaggccgtgcagaacagcgacttcgtgctgggccagttctgcttcctgcagagactgctgctggtgcacggcagatggagctacgtgagaatctgcaagttcctgagatacttcttctacaagagcatggccagcatgatggtgcaggtgtggttcgcctgctacaacggcttcaccggccagcccctgtacgagggctggttcctggccctgttcaacctgctgtacagcaccctgcccgtgctgtacatcggcctgttcgagcaggacgtgagcgccgagcagagcctggagaagcccgagctgtacgtggtgggccagaaggacgagctgttcaactactgggtgttcgtgcaggccatcgcccacggcgtgaccaccagcctggtgaacttcttcatgaccctgtggatcagcagagacaccgccggccccgccagcttcagcgaccaccagagcttcgccgtggtggtggccctgagctgcctgctgagcatcaccatggaggtgatcctgatcatcaagtactggaccgccctgtgcgtggccaccatcctgctgagcctgggcttctacgccatcatgaccaccaccacccagagcttctggctgttcagagtgagccccaccaccttccccttcctgtacgccgacctgagcgtgatgagcagccccagcatcctgctggtggtgctgctgagcgtgagcatcaacaccttccccgtgctggccctgagagtgatcttccccgccctgaaggagctgagagccaaggaggagaaggtggaggagggccccagcgaggagatcttcaccatggagcccctgccccacgtgcacagagagagcagagccagaagaagcagctacgccttcagccacagagagggctacgccaacctgatcacccagggcaccatcctgagaagaggccccggcgtgagcagcgacatcgccagcgagagcctggaccccagcgacgaggaggccgccagcagccccaaggagagccagtag

SEQ ID NO: 237452 - protein, 429 aa, Artificial Sequence
  derived and/or modified sequence
MGFLEEEGRWNLSFSGAGYLGAHHVGATECLRQRAPRLLQGARRIYGSSSGALNAVSIVCGKSVDFCCSHLLGMVGQLERLSLSILHPAYAPIEHVKQQLQDALPPDAHVLASQRLGISLTRWPDGRNFLVTDFATCDELIQALVCTLYFPFYCGLIPPEFRGERYIDGALSNNLPFADCPSTITVSPFHGTVDICPQSTSPNLHELNVFNFSFQISTENFFLGLICLIPPSLEVVADNCRQGYLDALRFLERRGLTKEPVLWTLVSKEPPAPADGNWDAGCDQRWKGGLSLNWKVPHVQVKDVPNFEQLSPELEAALKKACTRDPSRWARFWHSGPGQVLTYLLLPCTLPFEYIYFRSRRLVVWLPDVPADLWWMQGLLRNMALEVFSRTKAQLLGPISPPATRVLETSPLQPQIAPHREELGPTHQA

SEQ ID NO: 237453 - DNA, 1290 bp, Artificial Sequence
  derived and/or modified sequence
atggggtttctggaggaagagggtcgttggaacttaagctttagcggagccgggtacttgggagcccaccatgtgggcgccaccgaatgcttacgtcagcgggccccgagactgcttcagggagccaggagaatctatgggtcttccagcggcgcactcaacgctgtgtcaattgtttgtggcaaaagcgtcgacttctgctgttctcatctgctcggcatggtgggacagctggagcgcctcagtctatccattttgcaccctgcctacgccccaatcgagcacgtgaaacagcagctgcaggacgcccttcctccagatgcccatgttctggcgtctcagcgcctggggattagtctgacccggtggccagatggcaggaacttcttggtcaccgactttgctacctgtgacgagctgattcaagccctagtgtgtaccctatactttcctttctattgtggtttgatccctcccgagtttcgcggcgagaggtatatcgacggcgccctgtctaacaatcttccttttgctgattgcccgtccacaatcaccgtgtctccctttcatggcaccgtggatatttgtcctcaaagtacttccccaaacttgcatgagctcaacgtgttcaacttcagcttccagatctctaccgaaaatttctttctgggcttgatttgtctgatccccccctctctcgaagtcgtggctgataactgccgacagggataccttgatgcgctccgcttcctcgaaagaaggggtttgactaaggaacctgtactgtggactctcgtcagcaaggagccacctgcacctgccgatgggaactgggacgcaggttgtgaccaaagatggaaggggggcctgtccctgaattggaaggtgcctcatgtgcaggtcaaggacgtccctaattttgaacaactgtcgccggagctcgaagcagcgctcaagaaagcttgcacacgggatccgtctcgttgggcacgtttctggcacagcgggcctgggcaggttctgacgtacctcctgctaccctgtaccttgccttttgagtatatttacttcagatcccggaggctggtggtgtggttgccagacgttcctgcggatctttggtggatgcagggccttctccgaaatatggctctagaagtgttctcacggaccaaggcccagctcctgggacccatttcaccccctgcaacacgcgttctggagactagtcctctgcaaccgcagattgccccgcaccgcgaggagctgggccctactcatcaagcgtag

SEQ ID NO: 237454 - DNA, 1290 bp, Artificial Sequence
  derived and/or modified sequence
atgggcttcctggaggaggagggccgctggaacctgtccttctctggagctggctacctgggcgcccaccacgtgggcgccacagaatgtctgcggcagagggccccccggctgctgcagggcgcccggcgcatctacggcagcagcagcggggccctgaatgctgtgtccatcgtgtgtgggaagtctgtggacttctgctgcagccacctgctgggcatggtgggccagctggagcggctgagcctgagcatcctgcacccagcctatgcccccattgaacatgtgaagcagcagctgcaggatgccctgcccccagatgcccacgtgctggccagccagaggctgggcatcagcctgacccgctggccagatggaagaaacttcctggtgacagactttgccacctgtgatgagctgatccaggccctggtgtgcaccctgtacttccccttctactgcggcctcatccccccagagttccggggggagcgctacattgatggagccctgagcaacaacctgccctttgctgactgccccagcaccatcaccgtgagccccttccacggcaccgtggacatctgcccccagagcaccagccccaacctgcacgagctgaatgtgttcaacttctccttccagatcagcacagagaacttcttcctgggcctcatctgcctgatcccccccagcctggaggtggtggccgacaactgccggcagggctacctggatgccctgcgcttcctggagcggcggggcctgaccaaggagcctgtgctgtggaccctggtgtccaaggagcccccagccccagcagatggcaactgggatgctggctgtgaccagcgctggaagggcggcctgagcctgaactggaaggtgccccacgtgcaggtgaaggatgtgcccaactttgagcagctgagccctgagctggaggccgccctgaagaaggcctgcacccgggaccccagccgctgggcccgcttctggcacagcggccctggccaggtgctgacctacctgctgctgccctgcaccctgccctttgagtacatctacttccgcagccggcggctggtggtgtggctgcctgatgtgcctgctgacctgtggtggatgcagggcctgctgaggaacatggccctggaggtgttcagcaggaccaaggcccagctgctgggccccatcagccccccagccaccagggtgctggagaccagccccctgcagccccagatcgccccccaccgggaggagctgggccccacccaccaggcctag

SEQ ID NO: 237455 - DNA, 1290 bp, Artificial Sequence
  derived and/or modified sequence
atgggcttcctggaggaggagggccggtggaacctgagcttcagcggggctggctatcttggagcgcaccatgtgggcgctaccgagtgccttagacagcgagcgccaaggctactccagggtgcccgacgtatctatggatcctcatcaggcgccctgaatgcagtgtctatcgtctgtggaaagagcgtcgatttttgctgcagccatctgttaggaatggttggacagcttgagcggttgagcttgagcatcctacatcctgcttacgcgcccattgagcacgtcaaacagcagttacaggacgcattgccacctgacgctcacgtgttggccagccagagacttggcatttctctaacccgatggcccgatggccgcaacttcttagttaccgatttcgccacctgcgatgagctaatccaggcactcgtatgtaccctgtattttccattttattgtgggttgatcccacctgaattccggggtgaacggtacattgatggagctctgtcaaataatttaccgttcgcagactgtcccagcacgatcactgtctctccttttcacggaacagttgacatctgtccccagtctacatctcccaatctgcacgagcttaatgtgtttaatttctccttccaaatctctacggagaacttcttcctgggcctcatatgcttaatacctccatccctggaagtcgttgcggacaattgcaggcaggggtacctggatgccctgcggtttctagaacggcgcggcctcacgaaggaacccgtgctctggactctcgtcagtaaggagccccctgccccagctgacgggaactgggatgcgggctgtgaccagcgctggaaaggtggtctcagccttaactggaaagtgccccatgtgcaggtcaaagatgtgcctaactttgagcaattgagccctgaacttgaagctgccttgaagaaggcctgcacacgggatccctcccggtgggcaagattttggcattccgggccaggccaggtgctgacctacctgcttctcccttgtacactgcccttcgaatatatttattttcgctcaagacgcttagtggtgtggctgcccgacgtgcctgccgacctgtggtggatgcaggggctactacggaatatggctctggaggtgttctccaggactaaagctcagttactgggcccaatttcccccccagccacccgggtgctggagacatctcctctgcagccacagatcgctccccaccgagaggagttgggacctactcaccaggcatag

SEQ ID NO: 237456 - DNA, 2537 bp, Artificial Sequence
  derived and/or modified sequence
accagccccagcccggctccctccagagcccacatttgggcccagccccgtccaaggctgcatcccggccctatcccgggtcacggagtgacccttcctcgtcccgatcaccccgcccggtccacccgccatgggcttcttagaggaggagggcagatggaacctgtccttctccggcgccggctacctgggcgcccaccacgtgggcgccaccgaatgcctgcgccagcgagccccgcgcctcctccagggcgcccgccgcatctacggttcctcgtctggggcgctcaacgcagtcagcatcgtctgcggcaagtcggtcgacttctgctgctcccacctcctgggcatggttgggcagttggagcggctgagcctaagcatcctgcacccggcctacgcgcccatcgagcacgtcaagcagcagctgcaggatgctctgccccccgacgcccacgtcctggcctcccagcggctgggcatttcgctgacccgctggcctgacggacgcaacttcttggtcactgacttcgccacctgcgatgagctcatccaggccttggtctgcaccttatactttcctttctactgcgggctgatcccccccgagttcagaggggagcgctacatcgatggggctctgagcaacaacttgccctttgcagactgcccctccaccatcacggtgtcgcccttccatgggacagtggacatctgcccccagagcacctcccccaacctgcatgagctgaacgtcttcaacttcagcttccaaatctccactgagaacttcttcctggggctcatatgtctcataccccccagcctcgaggtagtggccgacaactgcagacaaggctacctggatgccctgaggttcctggagagacgtggactcaccaaggaaccagtgctatggacgctggtgtctaaggaacccccagccccggctgacggaaactgggatgctggctgtgaccaacgctggaaggggggcctgtctctcaactggaaagtgccccatgtgcaagtcaaggatgtacccaactttgagcagctctcaccagagctggaggctgcactgaagaaagcatgtacgagggatcccagccggtgggcccgcttctggcactcggggcctggacaggtgctgacgtacctgctgctaccctgcacactgcccttcgagtacatctacttccgcagcagaaggttggtggtgtggctgcccgatgtgccggcggacttgtggtggatgcagggcctgctgaggaacatggccctcgaggttttctccaggaccaaggcccagctccttgggcccatcagccctccggccactcgcgtcctggaaacaagccccctccaaccccagatagctcctcatagagaggagctcgggcccacccaccaggcctgagggggccgagcagggccagcccagtgactggtgtcccttgattcctgctctggcctttgtcctgtgtgcccacatctgccccagcgggaagaggccctgccaatctccgtggagaccctgcagcttggagcccgttccttggggcgcagcctgtcagcatgtccccggtcactgtgtacccaggtcacctgccctccctcttgccccgtctcatcagggagagaaaggaggacagccacagagacacatgtcttactttcagaatttccacggggggactaggagggcagcattgctggggagaggggctcctgttctgccgtggagctgcccacggagcacctcacagaagattgagaaagtgcctgatgcccgcgtcagagaccagaggagccaactgagatgatggggtgggggtgctccccccagactttctcagtcctgcagcggcccttgggggtgacccccggcatctaccccactcaggaaaccttgacttctgaattcctatcaggtccagagggtggaaggccctggcaggaagcaggaggaggaggagaggggggtccaggtcttttcaggatcccagctgtgggtgcttctgttgggcccagtggcccctgctatccccacagcctcattcctgcagaaggtttgtgacgtagctgtgcctgtacctggggcagagaggatgccagggacaccaggcctctggcctctccacgagtcactgctctccccattggcagcacgggacccatgctgtgcccccggccaggccctgaggaaatgctcagcctcagtggagatggggaggttagagagatggaggcgtgagtgagaacgggaagcaaaggaatacacgtgggaactaaagagaaaaatgaccagcctgggcagcatagcaagaccctgtctctaaaaaaaataataaaaacttagctgggcatggtggtgcatgcctgtggtcctggctacttgggaggctgaggatggaggatcatttgagcccaggaggtcgaggctgcagtgaaccgtgatcacgccactgcaccccagcccaggcaacaaagtgagcccctgtctctaaataaataaagagacaataagccactca

SEQ ID NO: 237457 - DNA, 1290 bp, Artificial Sequence
  derived and/or modified sequence
atgggcttcctcgaagaagaagggaggtggaatctttccttcagtggagctgggtacctgggcgctcatcacgtgggagcaacagaatgtctccgtcagagagcgcctcgcctgcttcagggcgctcggagaatttatggaagttcgagcggggctctgaatgccgtgtctatcgtttgtggcaagtccgtggacttctgttgttcgcacctcctcggcatggttggccaactcgagcggctgtcgctgtccattctacacccagcttacgcgccaattgagcacgtgaagcagcagctgcaggacgctctgccaccggatgctcatgttcttgcatcgcaaaggctgggaattagcttgacacgctggcccgacgggagaaattttctagtgaccgactttgccacttgtgatgaattgatccaggctctagtgtgcacgctttactttccattctactgtgggctcattccgccagaatttaggggtgaacgctacattgacggtgcactatcgaacaacctgccatttgctgattgtcctagcaccattacagtgtcccccttccacgggacggtggatatctgcccgcagtccacgtcaccaaatctgcacgagctgaacgttttcaacttttcatttcagatcagcactgagaatttttttctgggactgatttgtttaataccgccatctctggaggtggttgcggataattgtcgccagggctatctggacgctctgagatttttggaacgcagggggctgaccaaagagcctgtactctggactttggtgagcaaagaaccacccgctcccgcagatgggaattgggatgccggttgcgaccagcggtggaaaggagggctgtctctgaattggaaggttcctcacgtgcaggtaaaagacgtgcctaattttgaacaactctccccggagcttgaggccgcactcaaaaaggcctgtactagggatccctcaaggtgggctcggttttggcacagtgggccaggccaggtgctgacttatctgctgctgccctgcaccctgccatttgagtatatatacttccggtctaggaggcttgtggtgtggctgcctgacgtacccgctgatttatggtggatgcagggcttgttaagaaatatggcacttgaagtcttttctcgcacaaaggcacagctgctcggtccaatctctccacctgccaccagagttctggagacatcccctctccagccccagatcgccccacaccgggaagaactggggcctacacatcaggcatag

SEQ ID NO: 237458 - DNA, 1290 bp, Artificial Sequence
  derived and/or modified sequence
atgggcttcctggaggaggagggcagatggaacctgagcttcagcggcgccggctacctgggcgcccaccacgtgggcgccaccgagtgcctgagacagagagcccccagactgctgcagggcgccagaagaatctacggcagcagcagcggcgccctgaacgccgtgagcatcgtgtgcggcaagagcgtggacttctgctgcagccacctgctgggcatggtgggccagctggagagactgagcctgagcatcctgcaccccgcctacgcccccatcgagcacgtgaagcagcagctgcaggacgccctgccccccgacgcccacgtgctggccagccagagactgggcatcagcctgaccagatggcccgacggcagaaacttcctggtgaccgacttcgccacctgcgacgagctgatccaggccctggtgtgcaccctgtacttccccttctactgcggcctgatcccccccgagttcagaggcgagagatacatcgacggcgccctgagcaacaacctgcccttcgccgactgccccagcaccatcaccgtgagccccttccacggcaccgtggacatctgcccccagagcaccagccccaacctgcacgagctgaacgtgttcaacttcagcttccagatcagcaccgagaacttcttcctgggcctgatctgcctgatcccccccagcctggaggtggtggccgacaactgcagacagggctacctggacgccctgagattcctggagagaagaggcctgaccaaggagcccgtgctgtggaccctggtgagcaaggagccccccgcccccgccgacggcaactgggacgccggctgcgaccagagatggaagggcggcctgagcctgaactggaaggtgccccacgtgcaggtgaaggacgtgcccaacttcgagcagctgagccccgagctggaggccgccctgaagaaggcctgcaccagagaccccagcagatgggccagattctggcacagcggccccggccaggtgctgacctacctgctgctgccctgcaccctgcccttcgagtacatctacttcagaagcagaagactggtggtgtggctgcccgacgtgcccgccgacctgtggtggatgcagggcctgctgagaaacatggccctggaggtgttcagcagaaccaaggcccagctgctgggccccatcagcccccccgccaccagagtgctggagaccagccccctgcagccccagatcgccccccacagagaggagctgggccccacccaccaggcctag

SEQ ID NO: 237459 - DNA, 897 bp, Artificial Sequence
  derived and/or modified sequence
atgtctgacgcaaatttggatagctcaaagaagaactttctggaaggggaagtggacgatgaggagtctgtgatactcacgctcgtgccggtgaaggacgacgcaaatatggagcaaatggaaccgtcagtgtccagtactagcgatgtcaagttggaaaagcccaaaaagtacaacccaggccacctcctccagacaaatgaacagttcaccgcgccccagaaggcaaggtgcaagatacctgcattgcctcttccaacaattctgccgccaatcaataaggtttgcagggataccctgagggattggtgccagcaactgggactgtcgactaatggaaaaaagattgaagtctacctgagactacaccgccatgcttaccctgaacagcggcaggatatgcctgaaatgtctcaggagactcggctccagcggtgcagcagaaagcggaaggccgtgactaaaagggcgcggctccagcggagttacgaaatgaacgagcgtgccgaagagaccaataccgtggaagtgattacatccgctcctggggcaatgttggcaagctgggctaggattgcggcacgcgccgtccaacccaaggcactgaattcatgttcaatccctgtcagcgtggaggcttttctgatgcaagcatccggtgtgcgctggtgcgtggttcatggtcgcctgctaagcgccgacacaaaaggctgggttagactgcaattccatgctgggcaggcgtgggttcctactacccacagaaggatgatctcattgttcttactgcctgcctgtatcttcccctcgcccggcatcgaggataacatgctgtgtcctgattgcgccaaacgcaataagaaaatgatgaaaaggctgatgactgtggagaagtag

SEQ ID NO: 237460 - DNA, 897 bp, Artificial Sequence
  derived and/or modified sequence
atgtctgatgccaacctggacagcagcaagaagaacttcctggagggggaggtggatgatgaggagagcgtcatcctgaccctggtgcctgtgaaggatgatgccaacatggagcagatggagcccagcgtgagcagcaccagtgatgtgaagctggagaagcccaagaagtacaaccctggccacctgctgcagaccaatgagcagttcaccgccccccagaaggcccgctgcaagatcccagccctgcccctgcccaccatcctgccccccatcaacaaggtgtgccgggacaccctgcgggactggtgccagcagctgggcctgagcaccaacgggaagaagattgaggtgtacctgcggctgcacagacatgcctacccagagcagaggcaggacatgcctgagatgagccaggagacccggctgcagcgctgcagcaggaagaggaaggctgtgaccaagagggcccggctgcagaggagctatgagatgaatgaaagagctgaggagaccaacacagtggaggtgatcaccagcgcccctggggccatgctggcctcctgggccagaattgctgcccgggctgtgcagcccaaggccctgaacagctgcagcatccctgtgtctgtggaggccttcctgatgcaggccagcggcgtgcgctggtgtgtggtgcacggccgcctgctgtctgctgacaccaagggctgggtgcggctgcagttccacgccggccaggcctgggtgcccaccacccacaggaggatgatcagcctcttcctgctgcctgcctgcatcttccccagccctggcatcgaggacaacatgctgtgcccagactgtgccaagaggaacaagaagatgatgaagaggctgatgacagtggagaagtag

SEQ ID NO: 237461 - DNA, 897 bp, Artificial Sequence
  derived and/or modified sequence
atgagcgacgccaacctggacagcagcaagaagaacttcctggagggtgaggtggacgatgaggagtctgttatcctgaccttagtccctgtgaaggatgacgctaacatggaacagatggagccatccgtcagctctaccagcgacgtgaaactagagaagccaaaaaaatataaccctggacatctactgcagaccaacgagcagttcaccgcacctcaaaaggctagatgcaagattccggcattgccactccccaccatcttaccacctataaataaggtttgtagagacactctccgggattggtgccaacagcttggactgtctactaacggcaagaagattgaggtgtacctgagactgcatagacacgcttacccagaacagcgtcaggacatgcctgaaatgagtcaggaaaccaggttacagcgctgctccagaaagcggaaggccgtgacgaagcgcgctaggctgcagaggtcatatgagatgaacgaaagggccgaggagacaaataccgtcgaggtcatcacctctgcacctggggcaatgctcgcttcttgggcccgcatcgcagcaagggcagtgcaacccaaggccctgaactcttgcagcatcccagtctcggtcgaagcttttctgatgcaggcctcaggggtgagatggtgcgtagtccatggacgcttgttgagcgccgatacgaagggttgggtgcggctgcagttccatgccggccaggcttgggtgccaacgacccatcggagaatgatcagtttgtttcttttgccagcctgtatctttccctctccggggattgaggacaatatgctgtgtccggattgcgctaagcgaaataagaaaatgatgaagagactgatgaccgtagagaagtag

SEQ ID NO: 237462 - DNA, 897 bp, Artificial Sequence
  derived and/or modified sequence
atgtcggacgctaacctcgattcaagtaagaagaacttcctcgaaggggaagtagacgacgaggagagcgtcattctcacccttgtgcctgtcaaggacgatgcgaatatggaacagatggagccgtcagtgtcttctacatcagatgttaagctagaaaagccgaagaaatacaatccgggtcacttgctgcagactaatgagcagttcactgccccacaaaaagccagatgtaagattccagccctccctttacccaccatcctcccaccaatcaacaaggtttgccgtgatacactgcgggactggtgtcagcagctgggtctgtccaccaatggaaagaagatcgaggtgtacttaagactccaccggcacgcctaccctgagcagcggcaggatatgcctgagatgtcccaggagacccgactacaacggtgctctagaaaaagaaaggcagttactaaacgagccaggctgcagcggagctacgagatgaatgaacgcgcagaagagaccaacacggtggaagtcatcacaagcgccccaggggctatgctagctagttgggctcgtatcgctgcacgcgctgttcagcccaaggctctcaattcttgctccatccctgtcagtgttgaagcgtttctgatgcaggcttcaggtgttcggtggtgcgttgttcacggtagactcctgagtgctgacactaagggctgggtcagattacaattccacgccggtcaggcatgggtcccgaccactcacaggcgcatgatcagcctatttctcctgccggcttgcatctttccctcccccggaattgaagataacatgctgtgtccagattgcgcaaagcgcaataagaaaatgatgaagcggctgatgactgtcgaaaaatag

SEQ ID NO: 237463 - DNA, 897 bp, Artificial Sequence
  derived and/or modified sequence
atgagcgacgccaacctggacagcagcaagaagaacttcctggagggcgaggtggacgacgaggagagcgtgatcctgaccctggtgcccgtgaaggacgacgccaacatggagcagatggagcccagcgtgagcagcaccagcgacgtgaagctggagaagcccaagaagtacaaccccggccacctgctgcagaccaacgagcagttcaccgccccccagaaggccagatgcaagatccccgccctgcccctgcccaccatcctgccccccatcaacaaggtgtgcagagacaccctgagagactggtgccagcagctgggcctgagcaccaacggcaagaagatcgaggtgtacctgagactgcacagacacgcctaccccgagcagagacaggacatgcccgagatgagccaggagaccagactgcagagatgcagcagaaagagaaaggccgtgaccaagagagccagactgcagagaagctacgagatgaacgagagagccgaggagaccaacaccgtggaggtgatcaccagcgcccccggcgccatgctggccagctgggccagaatcgccgccagagccgtgcagcccaaggccctgaacagctgcagcatccccgtgagcgtggaggccttcctgatgcaggccagcggcgtgagatggtgcgtggtgcacggcagactgctgagcgccgacaccaagggctgggtgagactgcagttccacgccggccaggcctgggtgcccaccacccacagaagaatgatcagcctgttcctgctgcccgcctgcatcttccccagccccggcatcgaggacaacatgctgtgccccgactgcgccaagagaaacaagaagatgatgaagagactgatgaccgtggagaagtag

SEQ ID NO: 237464 - protein, 470 aa, Artificial Sequence
  derived and/or modified sequence
MDRGEKIQLKRVFGYWWGTSFLLINIIGAGIFVSPKGVLAYSCMNVGVSLCVWAGCAILAMTSTLCSAEISISFPCSGAQYYFLKRYFGSTVAFLNLWTSLFLGSGVVAGQALLLAEYSIQPFFPSCSVPKLPKKCLALAMLWIVGILTSRGVKEVTWLQIASSVLKVSILSFISLTGVVFLIRGKKENVERFQNAFDAELPDISHLIQAIFQGYFAYSGGACFTLIAGELKKPRTTIPKCIFTALPLVTVVYLLVNISYLTVLTPREILSSDAVAITWADRAFPSLAWIMPFAISTSLFSNLLISIFKSSRPIYLASQEGQLPLLFNTLNSHSSPFTAVLLLVTLGSLAIILTSLIDLINYIFFTGSLWSILLMIGILRRRYQEPNLSIPYKVFLSFPLATIVIDVGLVVIPLVKSPNVHYVYVLLLVLSGLLFYIPLIHFKIRLAWFEKMTCYLQLLFNICLPDVSEE

SEQ ID NO: 237465 - DNA, 1413 bp, Artificial Sequence
  derived and/or modified sequence
atggacagaggcgagaagatccagctgaagagagtgttcggctactggtggggcaccagcttcctgctgatcaacatcatcggcgccggcatcttcgtgagccccaagggcgtgctggcctacagctgcatgaacgtgggcgtgagcctgtgcgtgtgggccggctgcgccatcctggccatgaccagcaccctgtgcagcgccgagatcagcatcagcttcccctgcagcggcgcccagtactacttcctgaagagatacttcggcagcaccgtggccttcctgaacctgtggaccagcctgttcctgggcagcggcgtggtggccggccaggccctgctgctggccgagtacagcatccagcccttcttccccagctgcagcgtgcccaagctgcccaagaagtgcctggccctggccatgctgtggatcgtgggcatcctgaccagcagaggcgtgaaggaggtgacctggctgcagatcgccagcagcgtgctgaaggtgagcatcctgagcttcatcagcctgaccggcgtggtgttcctgatcagaggcaagaaggagaacgtggagagattccagaacgccttcgacgccgagctgcccgacatcagccacctgatccaggccatcttccagggctacttcgcctacagcggcggcgcctgcttcaccctgatcgccggcgagctgaagaagcccagaaccaccatccccaagtgcatcttcaccgccctgcccctggtgaccgtggtgtacctgctggtgaacatcagctacctgaccgtgctgacccccagagagatcctgagcagcgacgccgtggccatcacctgggccgacagagccttccccagcctggcctggatcatgcccttcgccatcagcaccagcctgttcagcaacctgctgatcagcatcttcaagagcagcagacccatctacctggccagccaggagggccagctgcccctgctgttcaacaccctgaacagccacagcagccccttcaccgccgtgctgctgctggtgaccctgggcagcctggccatcatcctgaccagcctgatcgacctgatcaactacatcttcttcaccggcagcctgtggagcatcctgctgatgatcggcatcctgagaagaagataccaggagcccaacctgagcatcccctacaaggtgttcctgagcttccccctggccaccatcgtgatcgacgtgggcctggtggtgatccccctggtgaagagccccaacgtgcactacgtgtacgtgctgctgctggtgctgagcggcctgctgttctacatccccctgatccacttcaagatcagactggcctggttcgagaagatgacctgctacctgcagctgctgttcaacatctgcctgcccgacgtgagcgaggagtag

SEQ ID NO: 237466 - DNA, 1413 bp, Artificial Sequence
  derived and/or modified sequence
atggaccgaggtgagaaaatccagctgaaacgcgtgtttggttactggtgggggacatccttcctgctcatcaacattattggcgcaggtattttcgtcagtccaaaaggagtcctggcctactcctgcatgaatgtcggggtgtccctgtgtgtgtgggcaggctgcgcaattctggccatgacttccacactctgctcggccgaaatctcaattagtttcccgtgtagcggagcccagtactactttctgaagcgatacttcggcagcacagttgccttcctgaacctgtggacgtctctgtttctagggagcggcgtggttgctggccaggcccttttgcttgctgagtattctattcaaccatttttcccgtcttgttctgttcccaaacttccaaagaagtgcttggccctggcaatgctgtggattgtggggatactcacttcaagaggcgtcaaggaggtcacctggttgcagatagcttccagcgtactcaaggtgtctatcttatcatttatctctctgactggcgtggtcttcttgatccgcggcaagaaagaaaatgtggagagatttcagaatgccttcgacgccgaactgccagacatcagccatttaatacaggctatcttccagggatattttgcatatagcggcggagcctgtttcactctgattgctggagagctgaaaaagcctcgtacaaccattccaaagtgcatcttcacagcacttccgctggtgaccgtggtttatctgcttgtcaatatttcctacctgacagttctgacaccccgggagatactgagcagcgacgccgttgctatcacctgggccgaccgggccttcccctctctggcatggattatgccttttgccatctctaccagtttgtttagcaatttactcatatccatattcaaaagctcccgtccaatctatttggctagtcaggagggccagcttcctctgcttttcaacacattgaatagccactcgtcacctttcacagcagtgctgctgcttgtgacattgggatctctggctatcatcctcacttctctgatcgacttgatcaactatattttcttcacagggtcactgtggtctatcctcctgatgatcggtatcctccgcaggagataccaggagcctaacttgagcattccatataaggtgtttctgtcctttcccctggcgactattgtcatcgacgtggggttggttgtgatcccgctcgtgaagtcccccaatgttcactatgtgtacgtacttctgctcgttctgtcaggcctcctgttttatattcccctgattcacttcaaaataaggctggcatggtttgagaaaatgacctgctaccttcagctgctgttcaacatctgcctaccagatgtgtccgaagagtag

SEQ ID NO: 237467 - DNA, 1413 bp, Artificial Sequence
  derived and/or modified sequence
atggacagaggagagaagatccagctgaagagggtgtttggctactggtggggcaccagcttcctgctgatcaacatcattggagctggcatctttgtgagccccaagggcgtgctggcctacagctgcatgaatgtgggcgtgtccctgtgtgtgtgggccggctgtgccatcctggccatgaccagcaccctgtgcagcgctgagatcagcatctccttcccctgcagcggggcccagtactacttcctgaagcgctacttcggcagcacagtggccttcctgaacctgtggaccagcctcttcctgggcagcggcgtggtggccggccaggccctgctgctggccgagtacagcatccagcccttcttccccagctgcagcgtgcccaagctgcccaagaagtgcctggccctggccatgctgtggatcgtgggcatcctgaccagccggggcgtgaaggaggtgacctggctgcagatcgccagctctgtgctgaaggtgtccatcctgtccttcatcagcctgactggagtggtgttcctgatccggggcaagaaggaaaatgtggagcgcttccagaatgcctttgatgctgagctgcctgacatcagccacctgatccaggccatcttccagggctactttgcctacagcggcggggcctgcttcaccctgattgctggggagctgaagaagcccaggaccaccatccccaagtgcatcttcaccgccctgcccctggtgacagtggtgtacctgctggtgaacatctcctacctgactgtgctgaccccccgggagatcctgagcagtgatgctgtggccatcacctgggccgaccgggccttccccagcctggcctggatcatgccctttgccatcagcaccagcctcttcagcaacctgctgatcagcatcttcaagagcagccggcccatctacctggccagccaggagggccagctgcccctgctcttcaacaccctgaacagccacagcagccccttcaccgctgtgctgctgctggtgaccctgggcagcctggccatcatcctgaccagcctgattgacctgatcaactacatcttcttcaccggcagcctgtggagcatcctgctgatgattggcatcctgcggcggcgctaccaggagcccaacctgagcatcccctacaaggtgttcctgtccttccccctggccaccatcgtgattgatgtgggcctggtggtgatccccctggtgaagagccccaacgtgcactacgtgtatgtgctgctgctggtgctgagcggcctgctcttctacatccccctcatccacttcaagatccggctggcctggtttgagaagatgacctgctacctgcagctgctcttcaacatctgcctgcctgatgtgtctgaggagtag

SEQ ID NO: 237468 - DNA, 1413 bp, Artificial Sequence
  derived and/or modified sequence
atggaccggggcgagaagatccagctgaagcgggtgttcggctactggtgggggacgagcttcctgcttatcaacataattggcgccggaatattcgtgagcccaaagggagttctggcttactcgtgcatgaatgtgggggtttctctgtgtgtctgggccggctgcgccatccttgcgatgacgagcactctgtgcagcgctgaaattagcattagctttccatgcagtggcgcccagtattacttccttaagcgttactttggcagtaccgtggccttcctcaatttgtggacatcccttttcctgggctcaggagttgtagccggtcaggcactactcttagctgaatatagcatacagccattttttccttcctgtagcgtgccaaagctgcccaaaaagtgcctggctctcgccatgctgtggattgttggaatccttacttcccgaggcgtgaaggaggtgacatggctccagatagcatccagcgtcctcaaggtgtctattttatccttcatttccctcaccggcgtagtgttcttgattagaggcaagaaggaaaacgttgagcggttccagaatgccttcgacgcagagctgcctgacatctcccatcttatccaggctatcttccaggggtacttcgcctattccggcggagcctgtttcactcttattgccggggaattgaagaagccgcgcactactatccctaaatgcatattcactgccctcccactggtcaccgtggtatacctcctagtaaatatctcttacctgacagtgctcacaccccgggagatcctatcgagcgacgccgtggctatcacgtgggcagacagagctttcccttccctggcatggatcatgccttttgccatctctacctcgctatttagtaatcttttaatatccatattcaagagtagccgcccgatctacctagcatcccaggaggggcagctgcccctcctgtttaatacactaaattcccacagctctcccttcacagctgtcctgcttctcgttaccctgggcagtctcgccatcatcctaacatccttaatagatctcattaattacatctttttcaccggctccctttggtccattctactgatgatcggaatattgaggagaaggtatcaggagcccaacttgtccatcccgtataaggtgttcttgtcttttccgctggccacaatcgtcatcgacgtggggctggttgtgatccctcttgtcaagagtccgaacgtgcactacgtgtacgtcttgcttctggtgctgtctgggttgctcttctacatccccctgatacacttcaagatccggctggcatggttcgagaagatgacctgttatctccagcttcttttcaatatttgcttacctgacgtgagcgaggaatag

SEQ ID NO: 237469 - DNA, 1413 bp, Artificial Sequence
  derived and/or modified sequence
atggacaggggcgagaagattcagctgaagcgcgtattcgggtactggtggggcacttcttttctgctaatcaacattatcggtgcaggcatctttgtgagccccaaaggagtgttggcatatagctgtatgaacgttggagtgtccctgtgtgtttgggcgggttgcgccattcttgccatgactagcacgctgtgctccgcagagatcagtatcagcttcccatgttccggcgctcagtattactttttaaagaggtattttggaagcactgtcgccttcttgaacttgtggacttccctgttcttggggagtggagtggtcgccggtcaggctctgttgctcgcagagtatagtatacaacccttttttccgagttgtagcgtgcctaagttaccgaagaagtgcctcgctctcgcaatgctgtggatagtaggcatcctcaccagtaggggcgttaaggaagtgacctggttgcagatcgcatctagtgtgttaaaagtgtccattctttctttcatctctctgaccggtgtcgtgtttctcattcggggaaagaaggagaacgtggagaggttccagaatgcctttgacgctgaactccctgatatttcgcatctgatacaagctatcttccagggctacttcgcatatagtggtggagcctgctttacgctcatcgcaggcgagctgaaaaagcccaggaccaccatccccaagtgcattttcaccgcactgcctcttgtcacagtagtttacctgctcgtgaatataagctacctgacagtccttacccccagggagatcctctcgtcagatgcagtggccattacgtgggccgatcgcgctttcccatccctcgcatggattatgccatttgcgatcagtacttcactgttctccaacctgttgatatcgatatttaaatccagtcgcccaatctatttggcctctcaggaggggcagctcccattgctgttcaatacccttaactcccacagttccccgttcacagccgtgctgctacttgtcacattgggttccctggccattattctgacctccctgatcgacttgatcaactatatcttcttcaccggttctttatggagtatactactgatgatcggtattctgcgccgtcggtatcaggaacctaacctgtctatcccttataaagtgtttctgtctttcccactcgccacaatcgtgatcgacgtgggcctggtcgtcattcccttggtgaaatcccccaacgtacactacgtctatgtgttgctcttagtgctgtccggtcttcttttctacattccattaatacattttaagattagacttgcctggttcgagaagatgacgtgttatctccaactcctcttcaacatttgtttgccagatgtcagcgaggagtag

SEQ ID NO: 237470 - DNA, 1878 bp, Artificial Sequence
  derived and/or modified sequence
agaattattttatttcaggaatccatcaacatcctttgcagctacataggcaggaaaatctagaaattgtaatttatatagaattttaaaactcttcaattacaatggatagaggggagaaaatacagctcaagagagtgtttggatattggtggggcacaagttttttgcttattaatatcattggtgcaggaatttttgtgtcccccaaaggtgtgttggcatactcttgcatgaacgtgggagtctccctgtgcgtttgggctggctgtgccatactggccatgacatcaactctttgctctgcagagataagtataagcttcccatgcagtggagctcaatactattttctcaagagatactttggctccacggttgcttttttgaatctctggacatccttgtttctggggtcaggggtagttgctggccaagctctgctccttgctgagtacagcatccagcctttttttcccagctgctctgtcccaaagctgcctaagaaatgtctggcattggccatgttgtggattgtaggaattctgacttctcgtggtgtgaaagaagtgacttggcttcagatagctagctcagtgctgaaagtgtccatacttagcttcatttccctaactggagtagtgttcctgataagagggaaaaaggagaatgtagaacgatttcagaatgcttttgatgctgaacttccagatatctctcaccttatacaagccatcttccaaggatattttgcatattcaggcggggcatgctttacacttatagcaggggagctgaagaagcccagaacaacaattcccaaatgcatatttactgcgttacctctggtgactgtagtttatttactggttaacatttcctatctgactgttctgacacccagggaaattctctcttcagatgctgtagctatcacatgggctgatcgagcttttccctcattagcatggattatgccttttgctatttctacctcattatttagcaaccttctgatttctatatttaaatcatcgagaccaatatatcttgcaagccaagagggccagctgcctttgctatttaatacacttaatagtcactcttctccatttacagctgtgctactacttgtcactttgggatcccttgcaattatcttaacaagtctaattgatttgataaactatatttttttcacgggttcattatggtctatattattaatgataggaatactaaggcggagataccaggaacccaatctatctataccttataaggtgtttttgtcatttccattagcaacaatagtcatcgacgtgggcttggttgtgataccattggtaaagtctccaaatgtgcattatgtctacgtgcttctgttagttctcagcggattactattttacatacctttaatacattttaaaataagattggcttggtttgagaagatgacttgctatttacaattactatttaatatttgcctccctgatgtgtctgaggaatagatgtcggaagtgcaaactcttaaaaaattggccttctaaaaaacatatatcagattccaaatcaaggttaaacatatgatagaacattcatggtgaaattcctatggtaaatatttttttctcaaatgaaataagtaatgtatacaaaagtgcctaagacagtacctggcttcagagtcactaagaaattgctaaaagctctgcttcgcatggtaaaaaacttaagtcctggtttgcgtagcttgatagagtgattatacaacttccattctctcactttttttttctgtatcccaccccttttctactgaatttgtggggatcctataataaaagtgaatgactaaaaattttaaaagca

SEQ ID NO: 237471 - protein, 106 aa, Artificial Sequence
  derived and/or modified sequence
MATPGPVIPEVPFEPSKPPVIEGLSPTVYRNPESFKEKFVRKTRENPVVPIGCLATAAALTYGLYSFHRGNSQRSQLMMRTRIAAQGFTVAAILLGLAVTAMKSRP

SEQ ID NO: 237472 - protein, 106 aa, Artificial Sequence
  derived and/or modified sequence
MATLGFVTPEAPFESSKPPIFEGLSPTVYSNPEGFKEKFLRKTRENPVVPIGFLCTAAVLTNGLYCFHQGNSQCSRLMMHTQIAAQGFTIAAILLGLAATAMKSPP

SEQ ID NO: 237473 - DNA, 321 bp, Artificial Sequence
  derived and/or modified sequence
atggccacccccggccccgtgatccccgaggtgcccttcgagcccagcaagccccccgtgatcgagggcctgagccccaccgtgtacagaaaccccgagagcttcaaggagaagttcgtgagaaagaccagagagaaccccgtggtgcccatcggctgcctggccaccgccgccgccctgacctacggcctgtacagcttccacagaggcaacagccagagaagccagctgatgatgagaaccagaatcgccgcccagggcttcaccgtggccgccatcctgctgggcctggccgtgaccgccatgaagagcagaccctag

SEQ ID NO: 237474 - DNA, 321 bp, Artificial Sequence
  derived and/or modified sequence
atggccaccctgggcttcgtgacccccgaggcccccttcgagagcagcaagccccccatcttcgagggcctgagccccaccgtgtacagcaaccccgagggcttcaaggagaagttcctgagaaagaccagagagaaccccgtggtgcccatcggcttcctgtgcaccgccgccgtgctgaccaacggcctgtactgcttccaccagggcaacagccagtgcagcagactgatgatgcacacccagatcgccgcccagggcttcaccatcgccgccatcctgctgggcctggccgccaccgccatgaagagccccccctag

SEQ ID NO: 237475 - DNA, 321 bp, Artificial Sequence
  derived and/or modified sequence
atggcgacaccaggtccggtgatcccagaggtgcctttcgagcctagcaaaccacccgtaattgaaggcttgtcaccaaccgtttatcgcaatcctgagtctttcaaggagaaattcgtaaggaagactagggaaaatcctgtcgtcccaattggctgccttgcaacagcagctgccttgacttatggtctttactcttttcaccgcggaaatagccagcgaagccagctgatgatgcggacccggatagccgctcaggggttcaccgtagcggcaatcctcctcggactggccgtcacagccatgaagagccgcccctag

SEQ ID NO: 237476 - DNA, 321 bp, Artificial Sequence
  derived and/or modified sequence
atggcaaccctcggatttgtaacaccagaagcacccttcgaaagctctaagcctcctatttttgaaggattgtcccccacggtgtacagcaatcctgagggattcaaggagaaatttctgcgtaagacccgggagaatccagtggtgccgataggctttctttgcacagccgcagtgttaactaacggcctgtattgttttcaccagggcaattcacagtgcagcaggctgatgatgcatacccagatcgctgcgcaagggttcacgatagccgctattctgctcggcctggctgctaccgcaatgaagtcccccccctag

SEQ ID NO: 237477 - DNA, 668 bp, Artificial Sequence
  derived and/or modified sequence
ccgcccctttcatgaccttcaccgggaggctgaggtcggagtcccgattttctcctgctgctgtggcccggacatggcgactcccggccctgtgattccggaggtcccctttgaaccatcgaagcctccagtcattgaggggctgagccccactgtttacaggaatccagagagtttcaaggaaaagttcgttcgcaagacccgcgagaacccggtggtacccataggttgcctggccacggcggccgccctcacctacggcctctactccttccaccggggcaacagccagcgctctcagctcatgatgcgcacccggatcgccgcccagggtttcacggtcgcagccatcttgctgggtctggctgtcactgctatgaagtctcgaccctaagcccagggtctggccttgaaagctccgcagaaatgattccaaaacccagggagcaaccactggccctaccgtgggacttactccctcctctcctttgagaggcccatgtgtcgctggggaggaagtgaccctttgtgtaactgtaaccgaaagttttttcaaaaatcctagatgctgttgtttgaatgttacatacttctatttgtgccacatctcccctccactcccctgcttaataaactctaaaaatccacttgtatttaattcagtatca

SEQ ID NO: 237478 - DNA, 1085 bp, Artificial Sequence
  derived and/or modified sequence
ggaggactgtgaggaagcgggggaaggaagtaaatcgccgagtgacctaaggaatcagggggaggattagggtctgctccacagaaggcttacctctgaaagagtcggggagggaatgcgcagccactcgctgcctttatcccgagaagcccctaacacccctcgccgtggtctgtacatggtctgtacctccggccgcgctggctggtaggccagccacctgggatggcagcctagttctcccgccaccttaccctgccctgactctaatctgcatttaattcagtccttcttccgggagatttcggcggagaatttctttctcgccttagctactgaggtcaaacctgaaataggctgtagactccaccagctgggtaagaatgggaagaagatcagaaaacctaaactttggttgatggactattttgcccaggcaaaagcagggaatctatgaggaatatgaagacattcgtcgggagaactctgttggcactttccactgttccatctgtggcctaggcatggcgactctcggctttgtgactccggaggccccctttgaatcatcgaagccccccatctttgaggggcttagccccactgtttacagcaatccagagggtttcaaggaaaagttccttcgcaagacccgcgagaatccggtggtacccataggtttcctgtgcacggcggccgtcctcaccaacggcctctactgcttccaccagggcaacagccaatgttcacggcttatgatgcacacccagatcgccgcccagggcttcaccattgcagccatcttgctgggtctagctgccaccgctatgaagtctccaccctgagcccagggtcttgaaaactctgcagaaatcattccaaaacccaggagcaaccactggccctaccatgggacttactctctcctctcctttgagaggtccctgtgtcgttgggggaggaagtgacccttcctgtaaccataactgaaagattttttcaaaaatcccagattctgttgtttgaatgttacatatttctatttgtgccacatcttccctccactcccctgcttaataaactct

SEQ ID NO: 237479 - DNA, 321 bp, Artificial Sequence
  derived and/or modified sequence
atggccaccccaggccctgtgattcctgaggtgccctttgagcccagcaagccccctgtgattgagggcctgagccccaccgtgtacagaaatcctgagagcttcaaggagaagtttgtgaggaagaccagagaaaatcctgtggtgcccatcggctgcctggccacagctgctgccctgacctacggcctgtacagcttccaccggggcaacagccagaggagccagctgatgatgaggaccagaattgctgcccagggcttcaccgtggccgccatcctgctgggcctggccgtgacagccatgaagagccggccctag

SEQ ID NO: 237480 - DNA, 321 bp, Artificial Sequence
  derived and/or modified sequence
atggccaccctgggctttgtgaccccagaggccccctttgagagcagcaagccacccatctttgagggcctgagccccaccgtgtacagcaaccctgagggcttcaaggagaagttcctgaggaagaccagagaaaatcctgtggtgcccatcggcttcctgtgcacagctgctgtgctgaccaacggcctgtactgcttccaccagggcaacagccagtgcagccggctgatgatgcacacccagattgctgcccagggcttcaccatcgccgccatcctgctgggcctggccgccacagccatgaagagccccccatag

SEQ ID NO: 237481 - DNA, 321 bp, Artificial Sequence
  derived and/or modified sequence
atggccacccccggccccgtgatccccgaggtgcccttcgagcccagtaaaccgccagtcattgaaggactgtcgccaaccgtttataggaacccagaatcattcaaagaaaaattcgtaaggaagacccgcgaaaatcccgtggtgccgatcggctgtctggccactgccgccgcgctgacctatggactttactctttccaccggggaaactctcagcggtcccagttaatgatgcgaacccgaatcgctgcacaaggttttacagtggctgctatcctgctaggacttgccgttacagccatgaaaagtcgcccttag

SEQ ID NO: 237482 - DNA, 321 bp, Artificial Sequence
  derived and/or modified sequence
atggccaccctgggcttcgtgacccccgaggcccccttcgagagctccaagcctcccatctttgagggtctgtccccaaccgtgtattccaaccctgagggtttcaaagaaaaattcctgagaaaaaccagagaaaacccagtggttcccatagggttcctgtgcactgctgctgtgctgaccaacggcttgtattgcttccaccagggtaattcacagtgctctcgcctgatgatgcatactcagattgccgcacagggctttaccatagctgccatcctcctaggattggcagctacagctatgaagtctcccccttag

SEQ ID NO: 237483 - DNA, 321 bp, Artificial Sequence
  derived and/or modified sequence
atggctactccaggccctgtgatccccgaggtaccatttgagccgagtaaaccgcctgtcattgaaggcctgtcacctaccgtttatcgcaatccagaatcttttaaagaaaaattcgtcagaaaaacgagggagaatcccgtcgtgcctatcggctgtttggccacagctgccgcactgacctacggactctacagcttccaccggggtaacagccagcgctctcagctaatgatgaggacacgaatcgctgcccaaggattcactgtggcggcaatcctgcttggacttgctgtgactgccatgaagagtcgcccttag

SEQ ID NO: 237484 - DNA, 321 bp, Artificial Sequence
  derived and/or modified sequence
atggctacgcttggctttgtgactccagaggccccattcgagtcctctaagccccctatttttgaaggtttatcccctacagtgtactcgaatccagaaggtttcaaggagaagtttctccggaaaacacgggagaatccagtggtcccaatagggttcctgtgtacagcagccgtgctaactaacggtttgtactgctttcaccagggaaactcgcagtgttcccggctcatgatgcacacccagatcgccgcacagggcttcacgatagcggcaatcctgttaggcctggccgcaaccgcaatgaagagcccaccctag

SEQ ID NO: 237485 - protein, 887 aa, Artificial Sequence
  derived and/or modified sequence
MAGRVPSLLVLLVFPSSCLAFRSPLSVFKRFKETTRPFSNECLGTTRPVVPIDSSDFALDIRMPGVTPKQSDTYFCMSMRIPVDEEAFVIDFKPRASMDTVHHMLLFGCNMPSSTGSYWFCDEGTCTDKANILYAWARNAPPTRLPKGVGFRVGGETGSKYFVLQVHYGDISAFRDNNKDCSGVSLHLTRLPQPLIAGMYLMMSVDTVIPAGEKVVNSDISCHYKNYPMHVFAYRVHTHHLGKVVSGYRVRNGQWTLIGRQSPQLPQAFYPVGHPVDVSFGDLLAARCVFTGEGRTEATHIGGTSSDEMCNLYIMYYMEAKHAVSFMTCTQNVAPDMFRTIPPEANIPIPVKSDMVMMHEHHKETEYKDKIPLLQQPKREEEEVLDQGDFYSLLSKLLGEREDVVHVHKYNPTEKAESESDLVAEIANVVQKKDLGRSDAREGAEHERGNAILVRDRIHKFHRLVSTLRPPESRVFSLQQPPPGEGTWEPEHTGDFHMEEALDWPGVYLLPGQVSGVALDPKNNLVIFHRGDHVWDGNSFDSKFVYQQIGLGPIEEDTILVIDPNNAAVLQSSGKNLFYLPHGLSIDKDGNYWVTDVALHQVFKLDPNNKEGPVLILGRSMQPGSDQNHFCQPTDVAVDPGTGAIYVSDGYCNSRIVQFSPSGKFITQWGEESSGSSPLPGQFTVPHSLALVPLLGQLCVADRENGRIQCFKTDTKEFVREIKHSSFGRNVFAISYIPGLLFAVNGKPHFGDQEPVQGFVMNFSNGEIIDIFKPVRKHFDMPHDIVASEDGTVYIGDAHTNTVWKFTLTEKLEHRSVKKAGIEVQEIKGKGSGGLNLGNFFASRKGYSRKGFDRLSTEGSDQEKEDDGSESEEEYSAPLPALAPSSS

SEQ ID NO: 237486 - DNA, 2664 bp, Artificial Sequence
  derived and/or modified sequence
atggctggcagagtcccctcacttttggtgctcctggtgtttcctagcagttgtttggccttcaggagcccactgtccgtctttaagcgatttaaggagacaacaaggcccttcagcaacgaatgtttggggactaccagaccagtcgtgcccatagattctagtgactttgctctcgacatcaggatgcctggagttactcccaagcagtcggacacttatttttgtatgagcatgagaatccctgtcgatgaggaagctttcgtcatcgatttcaagcctagggctagcatggatacagtgcatcatatgctgttgtttgggtgtaatatgccatccagcacaggaagttactggttctgcgacgaaggcacctgcaccgacaaggcgaacatactgtacgcttgggcgagaaacgctccacccacccgattgccaaaaggagtgggattccgcgtcgggggtgaaacagggagtaagtatttcgtgctacaggtccattatggggatatcagtgcatttagggacaacaacaaggattgtagcggcgtcagcctccacctaaccagactcccgcagcctttgattgctggtatgtatcttatgatgtccgtcgacactgtgatccctgctggcgaaaaggtagtcaattctgatataagctgccactacaagaactaccctatgcacgtgtttgcctatcgagttcacacacaccatctcggcaaagttgtttccgggtacagggtgcgaaatggacagtggacactgatcgggcggcagagccctcagctgccccaggccttctacccagtgggccatcctgtagatgtctccttcggagacctcctcgccgcaaggtgtgtgtttacaggggaggggagaaccgaagctacacatattggcggtacctcaagtgatgagatgtgtaacctgtatattatgtattacatggaagcaaagcacgccgtgagctttatgacatgtacccaaaatgttgctccagatatgttccgcaccattccccccgaagcaaatatccctatcccagtgaagagcgatatggttatgatgcatgaacaccataaggagaccgagtacaaggataagattcccttgttgcagcagcctaaacgcgaggaggaggaagtactagatcaaggcgacttttatagcctgctaagcaaactgttgggagaacgtgaggacgttgtgcatgttcacaagtacaatcccacagagaaagccgagagtgagagcgatttggtggctgagatcgccaatgtggtccagaagaaggacctggggaggagcgatgccagagagggcgctgagcatgagaggggcaatgccatcctggtcagagataggatacacaagttccatcggttggttagtactttgaggcctcccgaatcacgcgtgttctctctgcagcagcctccaccgggggaagggacctgggagcccgagcacaccggcgacttccacatggaagaagcattggactggccaggcgtgtacctcctaccaggtcaggtctctggcgtggcgctcgatcccaagaacaatctggtcatctttcaccgaggcgatcacgtatgggatggcaatagtttcgatagcaagttcgtctaccagcaaatcgggctggggcctatcgaagaggacactatcctggtcattgaccctaacaacgccgcggtactacagtccagtgggaaaaatctattttatttaccacatggcttgtccatcgacaaggacgggaactactgggtgactgacgttgcgttgcaccaggttttcaagctcgaccccaataacaaggaaggtccggtgctgatcctgggccgcagtatgcagcctgggtcggaccagaatcacttctgccagccaaccgatgtcgccgttgatcccggtactggagcgatctatgtctcagatgggtattgcaacagtcgtatcgtacagttcagcccctcaggtaaattcatcacacaatggggggaggaatcatccggatcaagcccgctgcccggtcagtttactgtcccccactctctggccctggtgccactgttaggtcagctgtgcgtagccgatcgcgaaaatggaagaattcaatgtttcaaaaccgatactaaagagtttgtgagggagatcaagcactccagttttgggagaaatgtatttgccatttcctatatcccagggttattgtttgccgtcaatggaaagccacactttggcgatcaggaaccagtgcagggattcgtaatgaacttttccaatggagaaatcattgatatttttaagcccgtacggaaacatttcgatatgccgcatgacatcgtagcctcggaggatgggaccgtatatattggagatgcccatactaatacagtgtggaaattcacactcacagagaagttagagcaccggtcagtgaaaaaagcgggcatagaggtgcaggagatcaagggaaagggatccggaggccttaacttgggcaacttcttcgcgagccggaaaggatactcccgaaaggggttcgaccggctcagcacggagggcagcgaccaggagaaagaggatgatggcagtgaatcagaagaagaatatagcgccccactgccagcgctcgcacctagtagttcttag

SEQ ID NO: 237487 - DNA, 2664 bp, Artificial Sequence
  derived and/or modified sequence
atggccggccgggtgcccagcctgctggtgctgctggtgttccccagcagctgcctggccttccgcagccccctgagcgtcttcaagcgcttcaaggagaccacccggcccttcagcaatgaatgtctgggcaccaccaggcctgtggtgcccatcgacagcagtgactttgccctggacatccgcatgcctggggtgacccccaagcagagcgacacctacttctgcatgtccatgagaattcctgtggatgaggaggccttcgtcatcgacttcaagccccgggcctccatggacacagtgcaccacatgctgctgtttggctgcaacatgcccagcagcacaggcagctactggttctgtgatgagggcacctgcacagacaaggccaacatcctgtatgcctgggccagaaatgccccacccacccggctgcccaagggcgtgggcttccgggtgggcggggagaccggcagcaagtactttgtgctgcaggtgcactacggggacatcagcgccttccgggacaacaacaaggactgcagcggcgtgtccctgcacctgacccggctgccccagcccctgattgctggcatgtacctgatgatgtctgtggacaccgtcatcccagctggggagaaggtggtgaacagcgacatcagctgccactacaagaactaccccatgcacgtgtttgcctacagagtgcacacccaccacctgggcaaggtggtgtctggctacagagtgagaaatggccagtggaccctcatcggccggcagagcccccagctgccccaggccttctaccctgtgggccaccctgtggatgtgtcctttggagacctgctggccgcccgctgtgtgttcaccggggagggccgcacagaggccacccacatcggcggcaccagcagtgatgagatgtgcaacctgtacatcatgtactacatggaggccaagcatgctgtgtccttcatgacctgcacccagaatgtggccccagacatgttccgcaccatccccccagaggccaacatccccatccctgtgaagagtgacatggtgatgatgcatgagcaccacaaggagacagagtacaaggacaagatccccctgctgcagcagcccaagcgggaggaggaggaggtgctggaccagggcgacttctacagcctgctgagcaagctgctgggggagcgggaggatgtggtgcacgtgcacaagtacaaccccacagagaaggccgagagcgagagtgacctggtggccgagatcgccaacgtggtgcagaagaaggacctgggccgcagtgatgcccgggagggcgctgagcacgagagaggaaatgccatcctggtgcgggaccgcatccacaagttccaccggctggtgtccaccctgcggcccccagagagcagggtcttcagcctgcagcagcccccacctggagagggcacctgggagcctgagcacactggagacttccacatggaggaggccctggactggccaggagtgtacctgctgcccggccaggtgtctggagtggccctggaccccaagaacaacctggtgatcttccacagaggagaccacgtgtgggatggcaacagctttgacagcaagtttgtgtaccagcagatcggcctgggccccatcgaggaggacaccatcctggtgattgaccccaacaatgctgctgtgctgcagagcagcggcaagaacctcttctacctgccccacggcctgagcattgacaaggatggcaactactgggtgacagatgtggccctgcaccaggtgttcaagctggaccccaacaacaaggagggccctgtgctgatcctgggccgctccatgcagcccggcagtgaccagaaccacttctgccagcccacagatgtggccgtggaccccggcaccggggccatctacgtgtctgatggctactgcaacagccgcatcgtgcagttcagccccagcggcaagttcatcacccagtggggcgaggagagcagcggcagcagccccctgcccggccagttcaccgtgccccacagcctggccctggtgcccctgctgggccagctgtgtgtggccgaccgggagaatggccgcatccagtgcttcaagacagacaccaaggagtttgtgcgggagatcaagcacagcagctttggaagaaatgtgtttgccatctcctacatccctggcctgctgtttgctgtgaatggcaagccccactttggagaccaggagcctgtgcagggctttgtgatgaacttcagcaatggagagatcatcgacatcttcaagcctgtgaggaagcactttgacatgcctcatgacatcgtggcctctgaagatggcaccgtgtacatcggagatgcccacaccaacacagtgtggaagttcaccctgacagagaagctggagcacaggtctgtgaagaaggccggcatcgaggtgcaggagatcaagggcaagggcagcggcggcctgaacctgggcaacttctttgccagcaggaagggctacagcaggaagggctttgaccggctgagcacagagggcagtgaccaggagaaggaggatgatggcagcgagagcgaggaggagtacagcgcccccctgcctgccctggcccccagcagcagctag

SEQ ID NO: 237488 - DNA, 2664 bp, Artificial Sequence
  derived and/or modified sequence
atggccggccgggtgcccagcctgctggtgctgctggtgttcccctctagctgcttagcattccgctcccccctctccgtatttaagcggtttaaggaaacaacacgtccattcagcaacgagtgtttgggaacaacgcgcccggtggtgcctattgattcgtcggacttcgctctggatattaggatgcccggtgtgacccccaagcagtcagatacctacttttgtatgtctatgcggattccggtggatgaagaggccttcgtgattgactttaagccccgggctagcatggacaccgtccaccacatgctgcttttcggttgcaatatgccgagcagtacaggcagctactggttctgtgatgaggggacatgcactgataaggccaatattctctatgcctgggccagaaacgcaccacctacacgcctccccaagggagtgggtttcagagtcggcggcgaaactggtagtaagtactttgtgttgcaagtccactacggagacatatcggccttccgcgacaataataaggactgtagcggagtgtctctgcacctgaccagactgcctcagccattgattgccgggatgtacctgatgatgtcggtggacactgtaattccagccggggaaaaggtggtcaactctgacatctcttgtcactacaagaactatcctatgcacgttttcgcgtacagagtccacacacatcacctggggaaggtggtgagtggttatagggtgcgtaacggtcagtggacccttatcgggcggcagtctccccagctgccacaggccttttacccagttggacatcccgtggatgtatctttcggggatttacttgctgcccgctgtgtgttcactggcgagggccgcacggaggccacacacattggcggcacaagcagtgatgagatgtgtaacctatacattatgtattacatggaggccaaacatgccgtaagctttatgacatgcacccaaaacgtggcccctgacatgttccgcaccatacccccagaggcaaatattccaatcccagtgaagtcagacatggttatgatgcatgagcatcacaaagagaccgagtacaaggataagatccctttgttgcaacagccaaaacgggaggaggaagaggtcctggaccagggcgatttttacagcctcctgagtaaactgctcggcgagagggaggatgtggtgcatgtgcataaatataatcccacagagaaagctgagagcgaaagcgatcttgttgccgagatcgccaacgtcgtgcagaagaaagacctgggacggtccgacgcccgggagggtgcagagcacgagcgcggaaatgcaatactggttcgggacaggatccacaagtttcacaggttggtttccacgcttcggcccccagagagccgagtgttttcactccagcagcctcctcctggagaagggacgtgggagccagaacatactggcgacttccatatggaggaggcgcttgattggcccggagtgtacctgctgcctggacaagtgtcgggcgtcgcgttagaccccaaaaacaacctagttatttttcataggggggatcatgtttgggatggaaacagtttcgattctaagtttgtgtatcagcagatcgggctgggacccatcgaagaagatactattctggtgatcgaccccaacaatgctgctgttctacagtcctcgggaaagaatctcttttacttgccccacggactatccattgacaaggatggaaactattgggttacagatgtggcgttacaccaagttttcaaactggacccgaataacaaagaaggtccagtgctgatcctcggccgcagcatgcagccaggttccgatcaaaatcatttctgccaacccacagacgtggccgtggaccctggaacgggagctatttacgtgtcagacggatactgtaattcccgcatagtgcagtttagccctagtgggaagttcatcacacagtggggagaggaatcgagcgggtcttccccactgcccggacagtttaccgtaccccatagtctggcgctggttcccttgctgggtcagctctgtgtggcagatcgcgagaatggccgcatccagtgctttaaaaccgatacaaaggagtttgttcgggagataaagcattcctccttcggccgaaatgtgttcgcaatatcttacatccctggtctgctattcgcagtcaatggaaaaccccattttggcgatcaggaacccgtacaggggtttgttatgaatttctccaatggcgagatcatcgatattttcaaaccagtacgaaagcattttgatatgccccacgacatcgttgcgagcgaggacgggacagtttacataggcgatgcccacactaacacagtctggaagtttacattgacggagaaactggagcacaggagcgtcaagaaggccgggatcgaagtgcaagagattaaggggaagggcagcggggggctgaatctcggtaacttcttcgcctcccggaagggatacagtcgcaagggattcgatcgcctgagcactgagggtagcgaccaggagaaggaagatgacggctccgagagcgaagaagaatacagcgctcccctacccgctctggccccatcaagctcatag

SEQ ID NO: 237489 - DNA, 3302 bp, Artificial Sequence
  derived and/or modified sequence
aatgtattaaagaacctcagctgggatttgctgaggacaaatgctgtaacgtgttagtcatccattatctgcttctatttttgcaggttctgaatgatgactgacgcgggtttgggtgatacccctcacagcccctgtcattccggagtcataaggcacccgcgcgtctagccccagcgccagggcacgcgagcggcgctggagggaggaaagcttccgcctgcgggccggacaaaagtcccgcctgcccacggctttttgcccgccgctcgtgaccgagacgcctcgccgcggccagctcgctgctctcgctggcggatggtgtgtggccgccgcaggacgcccgccgtgcccgggccatgaagtagcggctgctggcggcgccgctgcccaaccgccagccccagccccgcgctgcgctgcccggtcctctcccggcggggtcgtatcggcgtggacatggctggccgcgtccctagcctgctagttctccttgtttttccaagcagctgtttggctttccgaagcccactttctgtctttaagaggtttaaagaaactaccagaccattttccaatgaatgtcttggtaccaccagacccgtagttcctattgattcatcagattttgcattggatattcgcatgcctggggttacacctaaacagtccgatacatacttctgcatgtctatgcgaataccagtggatgaggaagccttcgtgattgacttcaagcctcgagccagcatggatactgtccatcacatgttactttttggatgcaatatgccttcatccactggaagttactggttttgtgatgaaggaacctgtacagataaagccaatattctgtatgcctgggcgagaaatgctccccctacccggctccccaaaggtgttggattcagagttggaggagagactggaagtaaatactttgtactacaggtacactatggggatattagtgcttttagagataataacaaggactgttctggtgtgtccttacacctcacacgtctgccacagcctttaattgctggcatgtaccttatgatgtctgttgacactgttatcccagcaggagaaaaagtggtgaattctgacatttcatgccattataaaaattatccaatgcatgtctttgcctatagagttcacactcaccatttaggtaaggtagtaagtggatacagagtaagaaatggacagtggacactgattggacggcagagccctcagctgccacaggctttctaccctgtggggcatccagttgatgtaagttttggtgacctactggctgcaagatgtgtattcactggtgaaggaaggacagaagccacacacattggtggcacgtctagtgatgaaatgtgcaacttatacattatgtattacatggaagccaagcatgcagtttctttcatgacctgtacccagaatgtagctccagatatgttcagaaccataccaccagaggccaacattccaattcccgtgaagtctgatatggttatgatgcatgaacatcataaagaaacagaatataaagataagattcctttactacagcagccaaaacgagaagaagaagaagtgttagaccagggtgatttctattcactactttccaagctgctaggagaaagggaagatgttgttcatgtgcacaaatataatcctacagaaaaggcagaatcagagtcagacctggtagctgagattgcaaatgtagtccaaaaaaaggatcttggtcgatctgatgccagagagggtgcagaacatgagaggggtaatgctattcttgtcagagacagaattcacaaattccacagactagtatctaccttgaggccaccagagagcagagttttctcattacagcagcccccacctggtgaaggcacctgggaaccagaacacacaggagatttccacatggaagaggcactggattggcctggagtatacttgttaccaggccaggtttctggggtggctctagaccctaagaataacctggtgattttccacagaggtgaccatgtctgggatggaaactcgtttgacagcaagtttgtttaccagcaaataggactcggaccaattgaagaagacactattcttgtcatagatccaaataatgctgcagtactccagtccagtggaaaaaatctgttttacttgccacatggcttgagtatagataaagatgggaattattgggtcacagacgtggctctccatcaggtgttcaaactggatccaaacaataaagaaggccctgtattaatcctgggaaggagcatgcaaccaggcagtgaccagaatcacttctgtcaacccactgatgtggctgtggatccaggcactggagccatttatgtatcagatggttactgcaacagcaggattgtgcagttttcaccaagtggaaagttcatcacacagtggggagaagagtcttcagggagcagtcctctgccaggccagttcactgttcctcacagcttggctcttgtgcctcttttgggccaattatgtgtggcagaccgggaaaatggtcggatccagtgttttaaaactgacaccaaagaatttgtgagagagattaagcattcatcatttggaagaaatgtatttgcaatttcatatataccaggcttgctctttgcagtgaatgggaagcctcattttggggaccaagaacctgtacaaggatttgtgatgaacttttccaatggggaaattatagacatcttcaagccagtgcgcaagcactttgatatgcctcatgatattgttgcatctgaagatgggactgtgtacattggagatgctcataccaacaccgtgtggaagttcaccttgactgagaaattggaacatcgatcagttaaaaaggctggcattgaggtccaggaaatcaaaggaaagggaagtggaggcttaaaccttggtaatttctttgcaagccgtaagggctacagtcgaaaagggtttgaccggcttagcactgagggcagtgaccaagagaaagaggatgatggaagtgaatcagaagaggagtattcagcacctctgcctgcgctcgcaccttcctcctcctgaaaaccaagctttgatttagattgagtaagatttacccagaatgtcagattcctttccctttagcacgtttaaagttctgtgtatttaattgtaaactgtactagtctgtgtgggactgtacacactttatttacttcgttttggttaagttggcttctgtttctagttgaggagtttcc

SEQ ID NO: 237490 - DNA, 2664 bp, Artificial Sequence
  derived and/or modified sequence
atggcaggccgtgtcccatctctgctggtgctcctggtcttccctagctcttgcttagcctttcggtctcccctgagtgttttcaagaggttcaaagagacaacccgtccattctctaacgaatgcctcggcaccactcggccagtggttcctatcgatagctccgatttcgcgctagatatccgaatgccaggggtgactcccaaacaaagcgatacatatttctgcatgtctatgcggattccggtcgatgaagaggcctttgtaattgacttcaagccacgcgcttctatggacacagtgcatcatatgctgctgttcggctgcaatatgccatctagcacgggttcttactggttctgtgatgagggcacgtgcaccgataaggctaacattctgtacgcctgggctcgcaacgcccctcccacacgcctcccaaagggagtcggctttcgcgtcggcggagagactggttctaaatatttcgtgttacaggttcattacggcgacattagtgcattcagggataacaataaggactgttccggcgtgagcttgcatctcacgcgactcccacaaccgctgatagccggtatgtacttgatgatgagcgttgataccgtcattcccgcaggggagaaggttgtaaatagtgacatttcgtgtcattataagaattatccaatgcacgttttcgcctatcgggtgcatacccaccacttaggcaaggtggtgagcggctaccgcgtgcgaaacggccagtggactttgatcggcagacagagcccccaactgccgcaggccttttatcctgtcggacacccagtcgatgtttcgttcggggatctgttagccgcacggtgtgttttcacaggcgaggggagaaccgaggccactcacattggagggacttcgtcggatgaaatgtgcaacctctacatcatgtactatatggaggctaagcacgccgtgtcttttatgacatgcacacagaacgtggctcctgatatgttcagaactataccacctgaagccaacattcctattccagtaaagagtgatatggtgatgatgcacgagcatcacaaggagacagaatacaaggacaagatcccccttctgcagcagccaaaacgggaagaagaggaggttctagatcaaggggacttctactccttactgtccaaactgctgggagaaagggaggacgtagtgcacgtgcacaagtacaatccaacagaaaaggctgagtcagagtcggatctcgttgccgaaattgcaaatgttgttcagaagaaagacctcggcagaagcgacgcccgagagggagccgagcatgaaagaggaaacgccatcctggtccgggaccgtatccacaaatttcatcggctggtgagcaccctacgacctcccgagtcccgagtcttcagcctccagcagcccccacccggagagggcacttgggagccagaacatactggtgacttccacatggaggaagctctagactggccaggcgtttacctcctgcctggacaggtgtctggagtcgcgctggatccgaaaaataatctagtgatcttccaccgtggggaccacgtgtgggatgggaattccttcgactctaagtttgtctatcagcagattgggcttggaccaattgaggaggacacaatacttgtgatcgaccctaacaatgctgcggttttacaatcgtctgggaagaacctcttttatttgccacacggcctgagtatcgacaaggatgggaattactgggtgaccgatgtcgcccttcaccaagtcttcaaactggaccccaataacaaggaaggacccgtgctgatactcgggaggtctatgcagcccggttctgatcagaaccacttttgtcagcccaccgatgtggccgtcgatcccggtactggagccatttatgtatcagacgggtactgcaattcaagaattgttcaattctctccgagtggaaaatttattacccagtggggagaggagtcgagcggaagcagcccattgcccggtcagtttacagtcccccatagcctggcactggttcctcttctggggcaattgtgcgtggcagacagggaaaatggcagaattcagtgtttcaagacagacacaaaagagttcgttcgagaaatcaagcatagtagctttggtaggaacgtgttcgccatttcttacattcctggactcctgtttgctgtgaacggtaagccccatttcggagaccaggagcccgtccaggggtttgtcatgaactttagcaatggcgagatcatcgacatcttcaagcctgtccgtaagcatttcgatatgccccacgacatcgttgcgagcgaagatggaaccgtgtacatcggagacgcccacacgaacacagtgtggaaatttaccttaacagaaaagctagagcataggtctgtaaagaaggcaggaatagaggtccaggaaataaagggcaagggatctggcggtctgaacctgggaaacttctttgcgagcagaaaggggtactcccgcaaaggatttgatcgtttgtccaccgaaggatccgaccaggagaaggaggatgatggctcagagagcgaagaagagtatagtgctccgctccctgcgctggctcccagctctagttag

SEQ ID NO: 237491 - DNA, 2664 bp, Artificial Sequence
  derived and/or modified sequence
atggccggcagagtgcccagcctgctggtgctgctggtgttccccagcagctgcctggccttcagaagccccctgagcgtgttcaagagattcaaggagaccaccagacccttcagcaacgagtgcctgggcaccaccagacccgtggtgcccatcgacagcagcgacttcgccctggacatcagaatgcccggcgtgacccccaagcagagcgacacctacttctgcatgagcatgagaatccccgtggacgaggaggccttcgtgatcgacttcaagcccagagccagcatggacaccgtgcaccacatgctgctgttcggctgcaacatgcccagcagcaccggcagctactggttctgcgacgagggcacctgcaccgacaaggccaacatcctgtacgcctgggccagaaacgccccccccaccagactgcccaagggcgtgggcttcagagtgggcggcgagaccggcagcaagtacttcgtgctgcaggtgcactacggcgacatcagcgccttcagagacaacaacaaggactgcagcggcgtgagcctgcacctgaccagactgccccagcccctgatcgccggcatgtacctgatgatgagcgtggacaccgtgatccccgccggcgagaaggtggtgaacagcgacatcagctgccactacaagaactaccccatgcacgtgttcgcctacagagtgcacacccaccacctgggcaaggtggtgagcggctacagagtgagaaacggccagtggaccctgatcggcagacagagcccccagctgccccaggccttctaccccgtgggccaccccgtggacgtgagcttcggcgacctgctggccgccagatgcgtgttcaccggcgagggcagaaccgaggccacccacatcggcggcaccagcagcgacgagatgtgcaacctgtacatcatgtactacatggaggccaagcacgccgtgagcttcatgacctgcacccagaacgtggcccccgacatgttcagaaccatcccccccgaggccaacatccccatccccgtgaagagcgacatggtgatgatgcacgagcaccacaaggagaccgagtacaaggacaagatccccctgctgcagcagcccaagagagaggaggaggaggtgctggaccagggcgacttctacagcctgctgagcaagctgctgggcgagagagaggacgtggtgcacgtgcacaagtacaaccccaccgagaaggccgagagcgagagcgacctggtggccgagatcgccaacgtggtgcagaagaaggacctgggcagaagcgacgccagagagggcgccgagcacgagagaggcaacgccatcctggtgagagacagaatccacaagttccacagactggtgagcaccctgagaccccccgagagcagagtgttcagcctgcagcagcccccccccggcgagggcacctgggagcccgagcacaccggcgacttccacatggaggaggccctggactggcccggcgtgtacctgctgcccggccaggtgagcggcgtggccctggaccccaagaacaacctggtgatcttccacagaggcgaccacgtgtgggacggcaacagcttcgacagcaagttcgtgtaccagcagatcggcctgggccccatcgaggaggacaccatcctggtgatcgaccccaacaacgccgccgtgctgcagagcagcggcaagaacctgttctacctgccccacggcctgagcatcgacaaggacggcaactactgggtgaccgacgtggccctgcaccaggtgttcaagctggaccccaacaacaaggagggccccgtgctgatcctgggcagaagcatgcagcccggcagcgaccagaaccacttctgccagcccaccgacgtggccgtggaccccggcaccggcgccatctacgtgagcgacggctactgcaacagcagaatcgtgcagttcagccccagcggcaagttcatcacccagtggggcgaggagagcagcggcagcagccccctgcccggccagttcaccgtgccccacagcctggccctggtgcccctgctgggccagctgtgcgtggccgacagagagaacggcagaatccagtgcttcaagaccgacaccaaggagttcgtgagagagatcaagcacagcagcttcggcagaaacgtgttcgccatcagctacatccccggcctgctgttcgccgtgaacggcaagccccacttcggcgaccaggagcccgtgcagggcttcgtgatgaacttcagcaacggcgagatcatcgacatcttcaagcccgtgagaaagcacttcgacatgccccacgacatcgtggccagcgaggacggcaccgtgtacatcggcgacgcccacaccaacaccgtgtggaagttcaccctgaccgagaagctggagcacagaagcgtgaagaaggccggcatcgaggtgcaggagatcaagggcaagggcagcggcggcctgaacctgggcaacttcttcgccagcagaaagggctacagcagaaagggcttcgacagactgagcaccgagggcagcgaccaggagaaggaggacgacggcagcgagagcgaggaggagtacagcgcccccctgcccgccctggcccccagcagcagctag

SEQ ID NO: 237492 - protein, 1872 aa, Artificial Sequence
  derived and/or modified sequence
MGPGCDLLLRTAATITAAAIMSDTDSDEDSAGGGPFSLAGFLFGNINGAGQLEGESVLDDECKKHLAGLGALGLGSLITELTANEELTGTDGALVNDEGWVRSTEDAVDYSDINEVAEDESRRYQQTMGSLQPLCHSDYDEDDYDADCEDIDCKLMPPPPPPPGPMKKDKDQDSITGEKVDFSSSSDSESEMGPQEATQAESEDGKLTLPLAGIMQHDATKLLPSVTELFPEFRPGKVLRFLRLFGPGKNVPSVWRSARRKRKKKHRELIQEEQIQEVECSVESEVSQKSLWNYDYAPPPPPEQCLSDDEITMMAPVESKFSQSTGDIDKVTDTKPRVAEWRYGPARLWYDMLGVPEDGSGFDYGFKLRKTEHEPVIKSRMIEEFRKLEENNGTDLLADENFLMVTQLHWEDDIIWDGEDVKHKGTKPQRASLAGWLPSSMTRNAMAYNVQQGFAATLDDDKPWYSIFPIDNEDLVYGRWEDNIIWDAQAMPRLLEPPVLTLDPNDENLILEIPDEKEEATSNSPSKESKKESSLKKSRILLGKTGVIKEEPQQNMSQPEVKDPWNLSNDEYYYPKQQGLRGTFGGNIIQHSIPAVELRQPFFPTHMGPIKLRQFHRPPLKKYSFGALSQPGPHSVQPLLKHIKKKAKMREQERQASGGGEMFFMRTPQDLTGKDGDLILAEYSEENGPLMMQVGMATKIKNYYKRKPGKDPGAPDCKYGETVYCHTSPFLGSLHPGQLLQAFENNLFRAPIYLHKMPETDFLIIRTRQGYYIRELVDIFVVGQQCPLFEVPGPNSKRANTHIRDFLQVFIYRLFWKSKDRPRRIRMEDIKKAFPSHSESSIRKRLKLCADFKRTGMDSNWWVLKSDFRLPTEEEIRAMVSPEQCCAYYSMIAAEQRLKDAGYGEKSFFAPEEENEEDFQMKIDDEVRTAPWNTTRAFIAAMKGKCLLEVTGVADPTGCGEGFSYVKIPNKPTQQKDDKEPQPVKKTVTGTDADLRRLSLKNAKQLLRKFGVPEEEIKKLSRWEVIDVVRTMSTEQARSGEGPMSKFARGSRFSVAEHQERYKEECQRIFDLQNKVLSSTEVLSTDTDSSSAEDSDFEEMGKNIENMLQNKKTSSQLSREREEQERKELQRMLLAAGSAASGNNHRDDDTASVTSLNSSATGRCLKIYRTFRDEEGKEYVRCETVRKPAVIDAYVRIRTTKDEEFIRKFALFDEQHREEMRKERRRIQEQLRRLKRNQEKEKLKGPPEKKPKKMKERPDLKLKCGACGAIGHMRTNKFCPLYYQTNAPPSNPVAMTEEQEEELEKTVIHNDNEELIKVEGTKIVLGKQLIESADEVRRKSLVLKFPKQQLPPKKKRRVGTTVHCDYLNRPHKSIHRRRTDPMVTLSSILESIINDMRDLPNTYPFHTPVNAKVVKDYYKIITRPMDLQTLRENVRKRLYPSREEFREHLELIVKNSATYNGPKHSLTQISQSMLDLCDEKLKEKEDKLARLEKAINPLLDDDDQVAFSFILDNIVTQKMMAVPDSWPFHHPVNKKFVPDYYKVIVNPMDLETIRKNISKHKYQSRESFLDDVNLILANSVKYNGPESQYTKTAQEIVNVCYQTLTEYDEHLTQLEKDICTAKEAALEEAELESLDPMTPGPYTPQPPDLYDTNTSLSMSRDASVFQDESNMSVLDIPSATPEKQVTQEGEDGDGDLADEEEGTVQQPQASVLYEDLLMSEGEDDEEDAGSDEEGDNPFSAIQLSESGSDSDVGSGGIRPKQPRMLQENTRMDMENEESMMSYEGDGGEASHGLEDSNISYGSYEEPDPKSNTQDTSFSSIGGYEVSEEEEDEEEEEQRSGPSVLSQVHLSEDEEDSEDFHSIAGDSDLDSDE

SEQ ID NO: 237493 - DNA, 5619 bp, Artificial Sequence
  derived and/or modified sequence
atgggccccggctgcgacctgctgctgagaaccgccgccaccatcaccgccgccgccatcatgagcgacaccgacagcgacgaggacagcgccggcggcggccccttcagcctggccggcttcctgttcggcaacatcaacggcgccggccagctggagggcgagagcgtgctggacgacgagtgcaagaagcacctggccggcctgggcgccctgggcctgggcagcctgatcaccgagctgaccgccaacgaggagctgaccggcaccgacggcgccctggtgaacgacgagggctgggtgagaagcaccgaggacgccgtggactacagcgacatcaacgaggtggccgaggacgagagcagaagataccagcagaccatgggcagcctgcagcccctgtgccacagcgactacgacgaggacgactacgacgccgactgcgaggacatcgactgcaagctgatgcccccccccccccccccccccggccccatgaagaaggacaaggaccaggacagcatcaccggcgagaaggtggacttcagcagcagcagcgacagcgagagcgagatgggcccccaggaggccacccaggccgagagcgaggacggcaagctgaccctgcccctggccggcatcatgcagcacgacgccaccaagctgctgcccagcgtgaccgagctgttccccgagttcagacccggcaaggtgctgagattcctgagactgttcggccccggcaagaacgtgcccagcgtgtggagaagcgccagaagaaagagaaagaagaagcacagagagctgatccaggaggagcagatccaggaggtggagtgcagcgtggagagcgaggtgagccagaagagcctgtggaactacgactacgcccccccccccccccccgagcagtgcctgagcgacgacgagatcaccatgatggcccccgtggagagcaagttcagccagagcaccggcgacatcgacaaggtgaccgacaccaagcccagagtggccgagtggagatacggccccgccagactgtggtacgacatgctgggcgtgcccgaggacggcagcggcttcgactacggcttcaagctgagaaagaccgagcacgagcccgtgatcaagagcagaatgatcgaggagttcagaaagctggaggagaacaacggcaccgacctgctggccgacgagaacttcctgatggtgacccagctgcactgggaggacgacatcatctgggacggcgaggacgtgaagcacaagggcaccaagccccagagagccagcctggccggctggctgcccagcagcatgaccagaaacgccatggcctacaacgtgcagcagggcttcgccgccaccctggacgacgacaagccctggtacagcatcttccccatcgacaacgaggacctggtgtacggcagatgggaggacaacatcatctgggacgcccaggccatgcccagactgctggagccccccgtgctgaccctggaccccaacgacgagaacctgatcctggagatccccgacgagaaggaggaggccaccagcaacagccccagcaaggagagcaagaaggagagcagcctgaagaagagcagaatcctgctgggcaagaccggcgtgatcaaggaggagccccagcagaacatgagccagcccgaggtgaaggacccctggaacctgagcaacgacgagtactactaccccaagcagcagggcctgagaggcaccttcggcggcaacatcatccagcacagcatccccgccgtggagctgagacagcccttcttccccacccacatgggccccatcaagctgagacagttccacagaccccccctgaagaagtacagcttcggcgccctgagccagcccggcccccacagcgtgcagcccctgctgaagcacatcaagaagaaggccaagatgagagagcaggagagacaggccagcggcggcggcgagatgttcttcatgagaaccccccaggacctgaccggcaaggacggcgacctgatcctggccgagtacagcgaggagaacggccccctgatgatgcaggtgggcatggccaccaagatcaagaactactacaagagaaagcccggcaaggaccccggcgcccccgactgcaagtacggcgagaccgtgtactgccacaccagccccttcctgggcagcctgcaccccggccagctgctgcaggccttcgagaacaacctgttcagagcccccatctacctgcacaagatgcccgagaccgacttcctgatcatcagaaccagacagggctactacatcagagagctggtggacatcttcgtggtgggccagcagtgccccctgttcgaggtgcccggccccaacagcaagagagccaacacccacatcagagacttcctgcaggtgttcatctacagactgttctggaagagcaaggacagacccagaagaatcagaatggaggacatcaagaaggccttccccagccacagcgagagcagcatcagaaagagactgaagctgtgcgccgacttcaagagaaccggcatggacagcaactggtgggtgctgaagagcgacttcagactgcccaccgaggaggagatcagagccatggtgagccccgagcagtgctgcgcctactacagcatgatcgccgccgagcagagactgaaggacgccggctacggcgagaagagcttcttcgcccccgaggaggagaacgaggaggacttccagatgaagatcgacgacgaggtgagaaccgccccctggaacaccaccagagccttcatcgccgccatgaagggcaagtgcctgctggaggtgaccggcgtggccgaccccaccggctgcggcgagggcttcagctacgtgaagatccccaacaagcccacccagcagaaggacgacaaggagccccagcccgtgaagaagaccgtgaccggcaccgacgccgacctgagaagactgagcctgaagaacgccaagcagctgctgagaaagttcggcgtgcccgaggaggagatcaagaagctgagcagatgggaggtgatcgacgtggtgagaaccatgagcaccgagcaggccagaagcggcgagggccccatgagcaagttcgccagaggcagcagattcagcgtggccgagcaccaggagagatacaaggaggagtgccagagaatcttcgacctgcagaacaaggtgctgagcagcaccgaggtgctgagcaccgacaccgacagcagcagcgccgaggacagcgacttcgaggagatgggcaagaacatcgagaacatgctgcagaacaagaagaccagcagccagctgagcagagagagagaggagcaggagagaaaggagctgcagagaatgctgctggccgccggcagcgccgccagcggcaacaaccacagagacgacgacaccgccagcgtgaccagcctgaacagcagcgccaccggcagatgcctgaagatctacagaaccttcagagacgaggagggcaaggagtacgtgagatgcgagaccgtgagaaagcccgccgtgatcgacgcctacgtgagaatcagaaccaccaaggacgaggagttcatcagaaagttcgccctgttcgacgagcagcacagagaggagatgagaaaggagagaagaagaatccaggagcagctgagaagactgaagagaaaccaggagaaggagaagctgaagggcccccccgagaagaagcccaagaagatgaaggagagacccgacctgaagctgaagtgcggcgcctgcggcgccatcggccacatgagaaccaacaagttctgccccctgtactaccagaccaacgccccccccagcaaccccgtggccatgaccgaggagcaggaggaggagctggagaagaccgtgatccacaacgacaacgaggagctgatcaaggtggagggcaccaagatcgtgctgggcaagcagctgatcgagagcgccgacgaggtgagaagaaagagcctggtgctgaagttccccaagcagcagctgccccccaagaagaagagaagagtgggcaccaccgtgcactgcgactacctgaacagaccccacaagagcatccacagaagaagaaccgaccccatggtgaccctgagcagcatcctggagagcatcatcaacgacatgagagacctgcccaacacctaccccttccacacccccgtgaacgccaaggtggtgaaggactactacaagatcatcaccagacccatggacctgcagaccctgagagagaacgtgagaaagagactgtaccccagcagagaggagttcagagagcacctggagctgatcgtgaagaacagcgccacctacaacggccccaagcacagcctgacccagatcagccagagcatgctggacctgtgcgacgagaagctgaaggagaaggaggacaagctggccagactggagaaggccatcaaccccctgctggacgacgacgaccaggtggccttcagcttcatcctggacaacatcgtgacccagaagatgatggccgtgcccgacagctggcccttccaccaccccgtgaacaagaagttcgtgcccgactactacaaggtgatcgtgaaccccatggacctggagaccatcagaaagaacatcagcaagcacaagtaccagagcagagagagcttcctggacgacgtgaacctgatcctggccaacagcgtgaagtacaacggccccgagagccagtacaccaagaccgcccaggagatcgtgaacgtgtgctaccagaccctgaccgagtacgacgagcacctgacccagctggagaaggacatctgcaccgccaaggaggccgccctggaggaggccgagctggagagcctggaccccatgacccccggcccctacaccccccagccccccgacctgtacgacaccaacaccagcctgagcatgagcagagacgccagcgtgttccaggacgagagcaacatgagcgtgctggacatccccagcgccacccccgagaagcaggtgacccaggagggcgaggacggcgacggcgacctggccgacgaggaggagggcaccgtgcagcagccccaggccagcgtgctgtacgaggacctgctgatgagcgagggcgaggacgacgaggaggacgccggcagcgacgaggagggcgacaaccccttcagcgccatccagctgagcgagagcggcagcgacagcgacgtgggcagcggcggcatcagacccaagcagcccagaatgctgcaggagaacaccagaatggacatggagaacgaggagagcatgatgagctacgagggcgacggcggcgaggccagccacggcctggaggacagcaacatcagctacggcagctacgaggagcccgaccccaagagcaacacccaggacaccagcttcagcagcatcggcggctacgaggtgagcgaggaggaggaggacgaggaggaggaggagcagagaagcggccccagcgtgctgagccaggtgcacctgagcgaggacgaggaggacagcgaggacttccacagcatcgccggcgacagcgacctggacagcgacgagtag

SEQ ID NO: 237494 - DNA, 5619 bp, Artificial Sequence
  derived and/or modified sequence
atggggccgggttgcgatttgctcctgaggactgccgcaactatcacagccgctgcaataatgtctgatactgatagcgacgaggactctgcaggaggagggcccttctccctggctgggtttctcttcggcaatattaatggagcaggccaattggagggcgaaagcgtactcgacgatgaatgcaaaaaacacctggcaggtctgggcgcactggggcttggctccctgatcacagagctaacagctaatgaagaactgacggggaccgacggcgccctggtgaacgacgagggatgggtgaggtcaaccgaggacgccgtggattacagtgacataaatgaagtggccgaggatgaaagtaggaggtaccaacaaaccatgggttccctgcagcctctctgccatagtgactacgacgaagacgattatgatgcagactgcgaggacattgactgtaagctgatgccgcctcccccaccaccgcccggacctatgaagaaggacaaggatcaggattccatcactggtgaaaaagtggacttctcgtcaagcagtgactccgaatctgagatgggcccgcaggaggcaacacaggcggagagcgaagatggcaagctgaccctgcctcttgccggcattatgcaacacgatgccaccaagctgctcccttcggtgacggaactcttccccgagttccggccaggcaaagttctgcgctttctgaggctattcgggcccggaaagaatgtgccttcggtgtggagatctgctaggagaaagaggaaaaaaaagcaccgcgagttgatacaggaggaacagattcaggaggtcgaatgcagcgtggagagtgaggtgtcacagaagtcgctgtggaactatgattacgctcctccccccccacccgaacagtgtttgtccgatgatgagattaccatgatggctcctgttgagagcaagttttcccaaagcacaggtgatattgataaggtgacggacactaagcctagggtggccgaatggcgttatggtccagctcggctctggtatgatatgttgggtgtccctgaggacggtagcggtttcgactatggcttcaaactacggaaaaccgagcacgagccagtgatcaagtctcggatgattgaggaattccgcaagctggaggagaataacggcactgacctgctcgctgacgagaacttcctgatggttacacagttgcattgggaggatgacatcatttgggatggggaagacgtgaagcacaaaggtacgaaacctcagcgtgccagcttggctggatggttaccatcttctatgacccggaacgccatggcctacaatgtacagcagggttttgctgccaccctggacgatgataaaccctggtactctatctttcctatcgacaacgaagatctggtatacgggcggtgggaagacaatattatttgggatgcccaggcaatgccccgtcttttagagccccccgtactgaccctcgatccaaatgacgagaacctgatcctggaaattccagatgagaaggaggaggcaaccagcaattcaccctcaaaggagtcgaagaaagaaagctctttgaagaagtcccgcatactgcttgggaaaactggcgtgatcaaagaggaacctcaacagaacatgtcccagcccgaagtgaaagatccttggaatctgtccaacgacgaatactattatcctaagcaacagggcctgcgtggtactttcggtggcaatattatccaacatagcatcccagctgtggaattgcggcaacccttcttccctacacacatgggcccgataaagctgcgacagttccataggccaccacttaaaaagtactcttttggagccctgtcacagcccggtccccactcagtccagcccctcctcaagcacattaaaaagaaagcaaaaatgagggagcaggaacggcaggccagcggtggcggcgaaatgttctttatgcggaccccgcaggacctgaccggcaaggatggggatcttattcttgcagaatactcagaagagaatggccctctgatgatgcaggtcgggatggccactaagattaaaaactactacaagagaaaaccaggaaaagaccccggggcaccagactgtaagtatggagagaccgtgtattgtcacacaagccctttcctggggtccctgcaccccgggcaattgcttcaggcgttcgaaaataatctgttccgcgcccctatctatttgcataagatgccagagaccgattttctgattatccgtacaagacaaggctattatattagagagttggtggacatttttgtggtcggacaacagtgccccctgtttgaggtgcccggacccaatagtaagcgggccaacacccacattcgtgattttcttcaggtgttcatttacagattattctggaaaagcaaagaccgacctagaaggatccgtatggaagatattaagaaggcctttcccagccacagcgagtccagcattcggaaaagattgaaactgtgcgcggactttaagaggactggcatggattccaactggtgggttctgaagagcgatttcagattgccaaccgaggaagagatcagagccatggttagtcctgaacaatgctgtgcatactatagcatgatcgccgctgaacagcggctaaaggatgccgggtacggtgaaaagtcctttttcgctcctgaggaagagaatgaggaggatttccaaatgaaaatcgatgacgaagtgaggactgccccctggaacactacccgggcattcatcgctgccatgaaagggaaatgcctgttagaggtgacaggcgtggccgaccccactggctgcggcgagggtttctcttacgtgaaaatcccaaacaagcccacccaacagaaggacgacaaagagcctcagcccgtgaaaaaaacggtgactgggacagacgcggacctcaggcgactgagcttgaaaaacgccaaacaactgctcagaaagtttggcgtccctgaagaggaaattaaaaagttatccagatgggaggttatcgatgtcgtcaggacaatgtcgactgagcaagcccgaagtggcgagggtcccatgtcaaaattcgcaagaggcagtcggtttagtgtcgccgaacatcaggagcggtataaggaagagtgccaaaggatctttgaccttcagaacaaagtgctgagttcaaccgaagttctttcaacagataccgatagtagcagcgccgaggactccgacttcgaggagatggggaaaaatattgagaatatgctccagaataagaagacctctagtcagctgtctcgagaacgtgaagaacaggaaagaaaagagctccagaggatgctactggctgcgggcagtgccgcctctggcaacaaccatcgcgatgatgacaccgcttccgttacttcactcaactctagtgcaaccggccggtgccttaagatttatcgcactttcagagatgaggagggaaaagagtatgtgcgctgcgaaacagtacggaagccagccgtcatcgacgcctatgtcaggattcggaccactaaagatgaagagtttattagaaaatttgcgctgtttgatgaacagcacagggaagaaatgcgtaaagaacgccgccgtattcaggaacagctccgcagattgaagaggaaccaggagaaggaaaagttaaagggcccccctgaaaaaaagcccaagaaaatgaaggagaggcctgacctcaagttgaaatgcggagcctgcggtgcaattgggcatatgaggaccaacaagttctgcccattgtattaccagaccaatgcccccccgtccaatcccgtggctatgactgaggagcaggaagaagaactggagaaaaccgtgattcataacgataatgaggaactcattaaagtggaaggcaccaaaatagtgctgggaaaacagctgatagaaagtgccgatgaggtcagaagaaagtcactggtgttaaagtttcctaagcagcagctgcccccaaagaagaagcgtcgcgtgggcaccaccgtgcactgcgactacctgaatcgtcctcataagagtatccatcgtcggcgaactgaccccatggtcacactatccagcatcctggaaagtattattaatgatatgcgggacctgcccaatacctatcctttccacaccccagtaaacgctaaggtggtgaaggactactacaagattattacgaggccaatggacctgcagaccctgcgggagaatgtcaggaagcggctgtacccctcgagggaagaattcagggagcacctggagctgatcgtgaagaatagcgcaacttacaacggtcctaagcatagtctcactcagatcagccagtccatgctcgacctgtgcgacgaaaagctgaaggaaaaagaggataaactagctcgactcgagaaggctatcaatcctcttctagacgacgacgaccaagttgctttttccttcattttagataatatagtgacgcaaaagatgatggccgtgcccgacagttggcccttccatcatccggtgaacaagaaatttgtgccggattattataaagtgatagtgaatcctatggatctggagactatccgaaagaacattagcaaacataagtaccagtctcgcgagagcttcctcgacgatgtcaacctgattttagctaactcagttaagtacaacgggcctgagtcccagtacaccaagaccgcgcaagagatcgtaaacgtgtgttatcagaccctgaccgaatacgacgagcatctgactcagctcgagaaagatatctgcaccgcaaaggaggcggcattggaagaagctgagctggagtcccttgaccctatgacacctggcccttacacacctcaaccaccagacctgtatgatacgaataccagcctctccatgagccgcgacgcttcagtgtttcaggacgagagcaatatgagcgtgctggacatcccgagtgccactcccgagaaacaggtgacccaggaaggcgaagacggggacggagacctggcagacgaggaggagggtacagtccagcagccccaggcgtccgtgctgtatgaggatttactcatgtccgaaggtgaggatgatgaggaggacgctgggtccgatgaggagggcgacaatccattctctgcgatccagctgagcgagtcaggctccgattctgatgtaggaagtgggggtatcagacccaaacaaccccgcatgcttcaggaaaatacccgaatggacatggaaaacgaagagagtatgatgagctatgagggagatgggggggaagccagccatggcctggaggactctaatatctcatatggctcctacgaagaaccagatccaaaatccaacacccaggatacttcgttctcttcaatcggtggatacgaggtgagtgaggaggaggaggacgaggaagaggaagaacaacgctccgggccctcagtcttgagccaagtgcatctgtctgaggatgaggaggacagtgaggacttccactctattgccggcgatagtgaccttgatagcgatgagtag

SEQ ID NO: 237495 - DNA, 5619 bp, Artificial Sequence
  derived and/or modified sequence
atgggccctggctgtgacctgctgctgaggacagctgccaccatcacagctgctgccatcatgtctgacacagacagtgatgaggacagcgctgggggcggccccttcagcctggccggcttcctgtttggaaacatcaatggagctggccagctggagggggagagcgtgctggatgatgagtgcaagaagcacctggccggcctgggcgccctgggcctgggcagcctcatcacagagctgacagccaatgaggagctgaccggcacagatggagccctggtgaatgatgagggctgggtgcgcagcacagaagatgctgtggactacagcgacatcaatgaggtggccgaggatgagagccgccgctaccagcagaccatgggcagcctgcagcccctgtgccacagcgactatgatgaagatgattatgatgctgactgtgaagatattgactgcaagctgatgcctcctcctcctcctcctcctggccccatgaagaaggacaaggaccaggacagcatcaccggggagaaggtggacttcagcagcagcagtgacagcgagagcgagatgggcccccaggaggccacccaggccgagagtgaagatggcaagctgaccctgcccctggccggcatcatgcagcatgatgccaccaagctgctgcccagcgtgacagagctgtttcctgagttccggcctgggaaggtgctgcgcttcctgcggctgtttggacctgggaagaatgtgcccagcgtgtggaggtctgcccggaggaagaggaagaagaagcaccgggagctgatccaggaggagcagatccaggaggtggagtgcagcgtggagagcgaggtgtcccagaagagcctgtggaactatgactatgcccctcctcctcctcctgagcagtgcctgagtgatgatgagatcaccatgatggcccctgtggagagcaagttcagccagagcactggagacatcgacaaggtgacagacaccaagccccgggtggccgagtggaggtatggccctgcccggctgtggtatgacatgctgggcgtgcctgaagatggcagcggctttgattatggcttcaagctgaggaagacagaacatgagcctgtgatcaagagcaggatgattgaggagttcaggaagctggaggagaacaacggcacagacctgctggctgatgagaacttcctgatggtgacccagctgcactgggaggatgacatcatctgggatggagaagatgtgaagcacaagggcaccaagccccagagggccagcctggccggctggctgcccagctccatgaccagaaatgccatggcctacaacgtgcagcagggctttgctgccaccctggatgatgacaagccctggtacagcatcttccccatcgacaatgaagacctggtgtatggccgctgggaggacaacatcatctgggatgcccaggccatgccccggctgctggagccccctgtgctgaccctggaccccaatgatgaaaatctcatcctggagatcccagatgagaaggaggaggccaccagcaacagccccagcaaggagagcaagaaggagagcagcctgaagaagagccgcatcctgctgggcaagacaggagtcatcaaggaggagccccagcagaacatgagccagcctgaggtgaaggacccctggaacctgagcaatgatgagtactactaccccaagcagcagggcctgcggggcaccttcggcggcaacatcatccagcacagcatcccagctgtggagctgcggcagcccttcttccccacccacatgggccccatcaagctgcggcagttccaccggccccccctgaagaagtacagctttggagccctgagccagcccggcccccacagcgtgcagcccctgctgaagcacatcaagaagaaggccaagatgagggagcaggagcggcaggccagcggcggcggggagatgttcttcatgaggaccccccaggacctgaccgggaaggatggagacctgatcctggccgagtacagcgaggagaatggccccctgatgatgcaggtgggcatggccaccaagatcaagaactactacaagaggaagccaggcaaggaccccggggccccagactgcaagtatggagagaccgtgtactgccacaccagccccttcctgggcagcctgcaccctggccagctgctgcaggcctttgagaacaacctcttccgggcccccatctacctgcacaagatgcctgagacagacttcctgatcatccgcacccggcagggctactacatccgggagctggtggacatctttgtggtgggccagcagtgccccctgtttgaggtgcccggccccaacagcaagagggccaacacccacatccgggacttcctgcaggtgttcatctaccgcctcttctggaagagcaaggaccggccccggcgcatccgcatggaggacatcaagaaggccttccccagccacagcgagagcagcatcaggaagaggctgaagctgtgtgccgacttcaagaggacaggcatggacagcaactggtgggtgctgaagagtgacttccggctgcccacagaggaggagatccgggccatggtgtccccagagcagtgctgtgcctactacagcatgattgctgctgagcagaggctgaaggatgctggctatggagagaagagcttctttgcccctgaggaggagaatgaggaggacttccagatgaagattgatgatgaggtgaggacagccccctggaacaccacccgggccttcatcgccgccatgaagggcaagtgcctgctggaggtgactggagtggccgaccccaccggctgtggggagggcttctcctatgtgaagatccccaacaagcccacccagcagaaggatgacaaggagccccagcctgtgaagaagacagtgactggaacagatgctgacctgcggcggctgagcctgaagaatgccaagcagctgctgaggaagtttggagtgcctgaggaggagatcaagaagctgagccgctgggaggtgattgatgtggtgaggaccatgagcacagagcaggcccggtctggagagggccccatgagcaagtttgcccggggcagccgcttctctgtggccgagcaccaggagcgctacaaggaggagtgccagaggatctttgacctgcagaacaaggtgctgagcagcacagaggtgctgagcacagacacagacagcagcagcgcagaagattctgactttgaggagatgggcaagaacatcgagaacatgctgcagaacaagaagaccagcagccagctgagccgggagcgggaggagcaggagaggaaggagctgcagaggatgctgctggccgccggcagcgctgccagcggcaacaaccacagagatgatgacacagcctctgtgaccagcctgaacagcagcgccaccggccgctgcctgaagatctaccgcaccttcagagatgaggagggcaaggagtatgtgcgctgtgagaccgtgaggaagccagctgtgattgatgcctacgtgcgcatccgcaccaccaaggatgaggagttcatcaggaagtttgccctgtttgatgagcagcaccgggaggagatgaggaaggagcggcggcgcatccaggagcagctgcggcggctgaagaggaaccaggagaaggagaagctgaagggccccccagagaagaagcccaagaagatgaaggagaggccagacctgaagctgaagtgtggggcctgtggggccatcggccacatgaggaccaacaagttctgccccctgtactaccagaccaatgccccacccagcaaccctgtggccatgacagaggagcaggaggaggagctggagaagacagtcatccacaatgacaatgaggagctgatcaaggtggagggcaccaagatcgtgctgggcaagcagctgattgagagcgcagatgaggtgcggaggaagagcctggtgctgaagttccccaagcagcagctgccccccaagaagaagagaagagtgggcaccaccgtgcactgtgactacctgaaccggccccacaagagcatccacagaagaagaacagaccccatggtgaccctgagcagcatcctggagagcatcatcaatgacatgagggacctgcccaacacctaccccttccacacccctgtgaatgccaaggtggtgaaggactactacaagatcatcacccggcccatggacctgcagaccctgcgggagaatgtgaggaagaggctgtaccccagccgggaggagttccgggagcacctggagctgattgtgaagaacagcgccacctacaacggccccaagcacagcctgacccagatcagccagagcatgctggacctgtgtgatgagaagctgaaggagaaggaggacaagctggcccggctggagaaggccatcaaccccctgctggatgatgatgaccaggtggccttctccttcatcctggacaacatcgtgacccagaagatgatggctgtgcctgacagctggcccttccaccaccctgtgaacaagaagtttgtgcctgactactacaaggtgattgtgaaccccatggacctggagaccatcaggaagaacatcagcaagcacaagtaccagagccgggagagcttcctggatgatgtgaacctgatcctggccaacagcgtgaagtacaatggacctgagagccagtacaccaagacagcccaggagatcgtgaatgtgtgctaccagaccctgacagaatatgatgagcacctgacccagctggagaaggacatctgcacagccaaggaggccgccctggaggaggccgagctggagagcctggaccccatgaccccaggcccctacaccccccagcccccagacctgtatgacaccaacaccagcctgtccatgagcagagatgcctctgtgttccaggatgagagcaacatgtctgtgctggacatccccagcgccaccccagagaagcaggtgacccaggagggggaggatggagatggagacctggctgatgaggaggagggcaccgtgcagcagccccaggcctctgtgctgtatgaggacctgctgatgtctgagggggaggatgatgaggaggatgctggcagtgatgaggagggggacaaccccttcagcgccatccagctgtctgagagcggcagtgacagtgatgtgggcagcggcggcatccggcccaagcagcccaggatgctgcaggagaacaccaggatggacatggagaatgaggagagcatgatgtcctatgaaggagatggaggagaggccagccacggcctggaggacagcaacatctcctatggcagctatgaggagccagaccccaagagcaacacccaggacaccagcttcagcagcatcggcggctatgaggtgtctgaggaggaggaggatgaggaggaggaggagcagaggagcggccccagcgtgctgagccaggtgcacctgtctgaagatgaggaggacagcgaggacttccacagcattgctggggacagcgacctggacagtgatgaatag

SEQ ID NO: 237496 - DNA, 5619 bp, Artificial Sequence
  derived and/or modified sequence
atgggccccggctgcgacctgctgctgcggaccgccgccaccatcacagccgccgccattatgagcgatactgactctgatgaggatagtgccggcggtgggcccttttcactggccggcttcctcttcgggaatattaatggcgccggtcaattggaaggagagtccgtcctggacgacgaatgtaagaaacatctggccggtctcggagccctgggactggggtccctgatcaccgagctcactgccaatgaggaactgacaggaacggacggcgccttggtcaacgacgagggctgggtgagatctaccgaagatgcggttgattactcggatatcaatgaggtggctgaagacgaatcccggcggtatcagcaaacaatgggtagcttacagcccctgtgccatagtgactacgatgaggacgactacgatgcagattgtgaagatattgactgtaagctgatgcccccacccccacccccgcccgggccaatgaaaaaggacaaagaccaggacagtataacgggtgaaaaagtggacttctcttcttcttccgactccgagtcagaaatgggcccacaggaagccacccaggccgagtctgaagatggtaaactcaccctaccactggccggcatcatgcaacatgacgcaaccaaactgctcccaagcgttacagaactgtttccagagttccgtcccggcaaggtgctgagattcctccgactgttcgggcccggaaaaaacgtgccaagtgtgtggcggagtgcccggagaaagcgcaaaaagaagcacagggagctgatacaggaggagcaaatccaggaggttgagtgcagcgtggagagcgaagtgagccaaaaatctttgtggaattatgattacgccccaccacccccccccgagcagtgcctctccgatgatgaaatcacaatgatggccccagtggagtcgaagttctctcagtccacaggagatattgacaaagttactgatactaaaccaagggtcgcggaatggcggtacggcccagctagactgtggtatgatatgctgggggttccggaagacgggagtggattcgattacggatttaagctcagaaagaccgaacacgaaccagtgataaagagccggatgattgaagagtttagaaaactggaggagaacaatggaactgacctgctcgcagacgaaaactttctgatggtaactcagttgcattgggaagacgatattatttgggacggcgaagacgtgaaacataagggaacaaaaccacagcgcgcctctctggctggctggttgccttcttctatgactagaaatgctatggcctacaatgttcagcagggctttgccgcaacattagacgatgacaaaccatggtactcaatcttccctattgataatgaggacctggtgtatggcagatgggaggacaatattatctgggatgcacaggcaatgcctagactgctggaacctccagttttgactctggaccctaatgatgagaacttaattcttgagatcccagacgagaaagaggaagcgacgtctaactctccgagcaaagaatccaagaaagaatcctcattgaaaaagtccaggattctgctgggaaagaccggtgtgattaaggaggagccacagcaaaacatgtcccagcctgaggtgaaggatccatggaatttgagtaacgatgagtattactatcccaaacaacaggggctcagggggacattcggcggcaatatcattcagcattcaatacctgctgtagaactgcggcagccctttttccctactcacatgggacccattaaactgcgacagttccatagaccaccactaaagaaatatagcttcggagccctcagccagcccggcccccacagcgttcagccgctgctgaaacacattaaaaaaaaggccaagatgcgcgagcaggaaagacaagcctcaggtggtggcgagatgtttttcatgcgcacaccgcaggatctgaccggtaaggacggcgatctgatccttgcggaatatagcgaggaaaacggtcccctgatgatgcaggtgggaatggcaacgaagatcaagaactactacaagcgcaaaccgggcaaagatccaggggcgccagattgtaaatatggggagacagtctactgtcacacctcacccttcctggggagtctgcaccctggccagctcctccaagctttcgaaaataatctgttcagagcccccatctatctgcataaaatgccagagacagatttcttaatcatcagaacgagacaggggtattatatacgcgagctggtggacattttcgtggtgggccagcagtgtccgctgtttgaggttcccggccccaattccaagcgcgcaaatacccacatccgggattttctgcaggtatttatctatagactcttttggaagagcaaggataggcctaggcgcataaggatggaagatattaagaaagcgtttcctagccactcagagtccagcatccgcaaacggttgaaactctgtgcggactttaagcgcacagggatggatagcaattggtgggtcttgaaaagcgacttccgtcttcctacagaggaagaaattcgagccatggtcagtcccgagcaatgttgtgcctactacagcatgatagccgctgagcaaagactcaaagacgcaggctatggcgaaaaaagctttttcgccccagaagaagagaacgaggaggatttccaaatgaagatagatgacgaggtccgcaccgcaccttggaataccacccgagcctttattgctgcaatgaaggggaagtgcctccttgaagttacaggggtggcagacccaacaggctgcggagaaggcttttcctacgtgaagatccccaataagcccactcagcagaaggatgataaggagcctcagcccgtgaagaagactgtcacgggtaccgacgcagatcttagacgcttgtcgctcaagaatgcgaaacagctgcttaggaagtttggtgtccccgaagaggagattaagaaactgtctagatgggaagttatcgatgtcgttaggaccatgagtactgagcaggcaaggtctggcgagggaccaatgtccaaattcgccagggggtctagattttccgttgcagagcaccaggagcggtacaaagaggaatgtcagcggatattcgatctgcaaaacaaagtcctgtctagtacagaagtgttaagcacagatactgattcttcttcggcagaggattcagattttgaagaaatggggaagaacattgagaacatgctacagaacaagaaaacctcgagtcagctgtcacgggagcgtgaggagcaggagagaaaagaactccagaggatgttgctggctgctgggagcgctgcttccggcaataaccacagagacgatgacactgcttccgtcacgtctctaaattcgagcgccaccgggagatgtctcaaaatttacaggacctttagggatgaggaaggcaaagaatatgtacggtgcgagacggtaagaaaacctgcagtgatcgacgcctacgttagaatccgcactacaaaggacgaggagttcatccggaagttcgcgctattcgatgagcagcacagagaggaaatgcgcaaggagcgcaggcgtatccaggaacagctgcggagactgaaacggaatcaggagaaagaaaagctgaaaggcccccccgagaagaaacccaaaaagatgaaggagagaccagacctgaaacttaagtgtggcgcttgtggtgctattgggcacatgcgtaccaataagttttgccccctttactatcaaacaaatgctcccccctccaatcccgtcgcaatgaccgaggaacaagaggaagaattggaaaaaactgtgatccataatgacaacgaagaactgataaaggttgaggggaccaagattgtgctgggtaaacaactgatcgagagcgctgacgaagtgaggagaaagagtctggtgctcaagtttccaaaacaacagctgccaccaaagaaaaaacggcgtgtgggaacaactgttcattgcgactatctgaaccgccctcacaagtccatacaccggcgccgaacagatcccatggtcactctgtcttctatcctcgagagcataattaatgacatgcgagatttaccaaacacgtatcccttccatacacccgtgaatgctaaggtggtgaaagactactacaagattatcactcgacctatggatcttcaaacgttacgcgaaaacgtacggaaacgtctttatccctctcgggaagagttccgcgaacaccttgagttgatcgttaagaacagtgcaacgtataacggtcccaagcactccttgacacagatctctcagtccatgctcgatctgtgtgacgaaaaactaaaggaaaaggaggataaattggcccgtctcgagaaggcaattaatcccctgctcgacgatgacgaccaggtcgctttctcttttatactggataacatcgttactcaaaagatgatggccgtccccgactcctggccgttccaccaccctgtgaataaaaagtttgttcctgactactataaggttatcgtgaaccctatggatctcgaaactatcaggaagaacatcagtaagcacaagtaccagtcgagagagtcttttcttgatgacgtgaatctgatcctggcgaatagcgtgaagtataatgggcccgaatcccagtacacaaaaaccgcccaagagattgtcaacgtgtgctaccagacactaaccgagtacgacgaacatctgactcagctcgagaaagacatttgcactgctaaagaagcagcactggaagaagcagaactggagagcctcgaccccatgacgccagggccttacacgcctcagccacctgacctttatgatacaaatacatcactctcaatgtcgcgggatgcgagcgtcttccaggacgagagtaatatgagcgtgcttgacatcccttctgccacccccgaaaaacaagtgacccaggaaggagaggacggagacggggacctggccgatgaggaggagggtaccgttcagcagccgcaggcctccgtgctgtatgaggatctcctgatgagtgagggtgaggacgatgaggaagatgctggatcagacgaggagggtgataacccgttttccgcaatccagctgtctgagtccggatcggactctgatgtgggatctgggggcatccggccaaagcagcctagaatgctccaggaaaacacacggatggacatggagaacgaggagtccatgatgtcctacgaaggagacggtggcgaagcatcccacggcctggaagatagtaatatttcatatggctcgtacgaggaaccggaccccaagagcaacacacaggacacatccttctcctcaattggcgggtatgaagtctccgaagaggaagaagatgaggaagaggaggagcagagatcaggcccatcggtgctctctcaggtccacctgtcagaggatgaagaggactctgaagatttccatagcattgccggtgattctgacctggacagcgacgaatag

SEQ ID NO: 237497 - DNA, 5618 bp, Artificial Sequence
  derived and/or modified sequence
atgggacctggatgtgatctgctgctgaggaccgccgctacaatcactgccgcagccatcatgtctgataccgattctgatgaggactctgcaggcggtggtccgttctccttagcagggtttcttttcgggaatattaacggcgcaggacagcttgaaggggagtccgtgctggacgatgagtgcaagaagcatctcgctgggctgggcgctttaggcctcggaagtctgataacagaattaacagccaatgaagagctgacagggacagacggtgcactcgtgaacgacgaagggtgggtacgttccacagaagatgctgtggattacagtgatatcaacgaggttgcagaggacgagagtaggagataccagcagacaatgggctccctgcagcccttatgtcattctgattatgatgaggacgactatgacgcagattgcgaagatatcgactgtaagcttatgccacctccccctcctccccctggaccaatgaagaaggacaaagatcaagacagcatcaccggggagaaggtggactttagtagctcttctgatagtgaaagcgagatgggcccacaagaggctacacaggctgagagtgaggacggaaagctgaccctccctctggccggaataatgcagcatgatgccaccaaattgttgcccagtgtgacagagctgttccccgagttccgcccaggtaaggtgctgcgcttcctgagactgttcgggcctggtaaaaacgtaccctcagtctggcggagcgcacgcaggaagagaaagaagaaacacagggagctgatacaggaagagcagatacaggaggtggagtgttccgttgagtccgaagtgagtcagaagtccttgtggaactatgactacgcaccccctccacctcctgagcagtgcctttcagatgacgaaatcacgatgatggcccctgtggaatctaagttctctcagagtacaggcgacattgacaaggtgacagataccaagccccgtgttgccgagtggcgatatgggcctgcaaggctgtggtacgatatgctgggcgtgcctgaggacgggagcggtttcgattatggctttaagcttagaaagacagagcacgagcccgttataaagagtaggatgatagaggagtttaggaaactcgaggaaaataacggcaccgacttgctcgcagacgaaaacttcttaatggttacacagctgcactgggaggatgacataatatgggatggggaagatgttaagcacaagggtacaaagccgcagcgcgcttcactggcaggatggctgccttcatctatgacacgaaatgctatggcctacaatgtacagcagggtttcgccgctaccctggacgatgataagccttggtatagcatattccctattgataacgaggacctggtttacggcagatgggaagataacatcatctgggacgctcaggccatgccgaggttgttggaaccccctgttctgacattggatcctaatgacgagaatctgatcttagagattcccgacgagaaagaggaagcaacaagcaattcaccttctaaggagtccaaaaaggagagctcactcaaaaagagccggattttattaggaaagacaggcgtgattaaagaggagccccagcagaacatgagccaaccggaggtcaaagatccttggaatttgtctaatgatgagtactattaccctaagcaacaaggtttgaggggaactttcggcggaaatataatccaacactcgattcctgcggtggagctgcgacaacctttctttcctacacacatggggcctattaaactgaggcaattccatcgcccaccacttaagaaatatagcttcggcgcactatcccagccgggaccacactctgtacagcctctgctgaaacatattaaaaagaaagctaagatgcgcgaacaggaacgccaggcctcaggaggaggagagatgttctttatgagaactcctcaagacctcacagggaaggatggagatctcatccttgctgaatactccgaagagaatggaccactgatgatgcaggtcggtatggctactaaaataaaaaattattacaagcggaagccagggaaggatcctggcgcacccgattgcaaatacggtgagacggtgtactgccacacctccccattcctcggctcactgcacccaggacagctgctgcaggctttcgagaacaacctgtttagggcccctatatatctgcataaaatgcctgagacagatttcctaatcatacggacacgccaagggtactacattcgggagctcgtggacatattcgtagttggccagcagtgcccactatttgaagtgcccggacctaacagcaaaagagctaatactcacatcagagattttctacaggttttcatctacaggcttttctggaagtctaaagacaggcctcggagaattcggatggaagacatcaagaaggcattcccatctcacagcgaaagctcaatcagaaagagactgaaactctgcgccgattttaagaggaccgggatggattccaactggtgggtgctgaagagtgatttccgcctgcccacggaggaggaaatccgtgcaatggtatccccagaacaatgctgtgcgtactacagcatgattgcagccgaacagagactcaaagacgcgggttatggcgagaaaagttttttcgctccagaggaagagaatgaggaggactttcagatgaagattgacgacgaagtccgaaccgcgccttggaataccacacgcgctttcattgccgctatgaagggtaagtgtctgctagaagttacaggggttgccgaccctacaggatgcggagaaggattcagctatgtaaagatacctaataagcctacccagcagaaggatgataaagagccacaaccagtgaagaagactgtgacaggaacagacgcggacctaaggaggctatctttgaagaacgcgaagcagctcctccgcaagtttggcgtgcccgaagaggagattaagaagttgtctaggtgggaggtcatcgatgtggtgaggactatgtccactgaacaggccaggtctggcgagggccctatgagcaagtttgccagggggtccaggttctcagtggcagaacaccaggaacggtataaagaggagtgccaaagaatatttgatctgcagaacaaggtcttaagttctacagaggtcttgagtacagatacagactctagctccgcagaagattctgacttcgaagaaatgggcaaaaacatcgaaaatatgctccagaacaagaagaccagcagccaactctctcgcgagcgcgaggagcaagaacggaaggagctgcaaaggatgttgctggcggcaggcagcgctgcctccggaaataaccacagggatgacgacactgcaagcgtgacgtcactgaattcttcagcaacagggaggtgtctgaagatctacagaacattccgagacgaggagggcaaggaatatgtaaggtgcgagactgtgcgtaagcctgcggtgattgacgcgtacgtgagaattagaaccacaaaggacgaggagtttattagaaaattcgcactcttcgacgaacaacacagggaggaaatgcgcaaagaacgtcgccgaatccaagagcagctgcggagactgaagcggaaccaggagaaagagaaattgaagggcccaccagagaagaagcccaagaagatgaaggagcgacctgatcttaagctgaaatgtggcgcttgcggcgctattggccacatgcgaactaacaaattctgtccgctgtattatcaaaccaatgctcctcctagcaaccccgtcgccatgactgaagaacaagaggaggaattggaaaaaaccgtgatccacaatgataacgaggaactcatcaaggtggagggaaccaagatcgtcctaggcaagcagctaatagaatcggcagatgaagtgcggaggaaatctttggtgctgaagttccccaagcagcagttgccacctaagaagaaacgacgagtcggcaccaccgtccactgcgactaccttaatcgccctcataaatcaattcacaggaggcgaacagaccccatggtcactctctcttctatcttggagagtattatcaacgacatgcgcgacctgcctaacacatatcccttccacacacctgtgaacgcaaaagttgttaaggactattataaaatcatcactagacctatggacctgcagacactgcgggaaaatgtcaggaaacgactgtacccctcccgcgaagagtttcgcgaacatttggaactgatcgtcaagaactccgccacatacaacggaccaaagcacagcctgacccagatttctcagtccatgttagatttatgcgacgagaaattaaaagagaaagaggataagctggctagactggagaaggctataaatccacttctcgacgatgatgatcaggtggcgttttcctttattctggacaacatagtaacccaaaagatgatggccgtacctgactcgtggcccttccaccaccccgttaataagaagtttgtgcccgattattataaggttattgtgaacccgatggacctggaaacaatccggaagaatatctctaaacataaatatcagtcgagagagtcgtttctcgacgacgtgaacctgattctagctaacagcgtgaagtataacggcccagagtcccagtacaccaagactgctcaagagattgtgaacgtgtgctatcagaccctgaccgagtatgatgagcacctgacccagctggagaaggatatctgcaccgccaaggaagctgccctggaagaagccgagctggagtccctggatccaatgacgccgggtccctatactccacagcctccggatctgtatgatactaacactagcctgtctatgagtcgggatgcttccgtgtttcaagatgaaagtaacatgagtgttctggatattccttcagccacccctgagaaacaggtgactcaagaaggcgaagatggtgacggagacctggctgatgaagaggagggtacagtgcagcagccccaggctagtgtcctgtatgaggacctactaatgtctgagggcgaagacgatgaggaggatgccggatctgatgaagagggggataacccttttagcgccatccagttgtccgagtctggatcggacagtgacgttggaagcgggggaattcggcctaagcaaccccgaatgctccaagagaacactagaatggacatggaaaacgaggagtcgatgatgtcgtacgagggagacggcggagaggctagccatggccttgaggattcaaatattagctacggttcttatgaagaacctgatcccaaatctaacacccaggatacttcattctcctctatcggtgggtacgaggtgtctgaagaagaggaggacgaggaagaagaggaacagcgctcaggtcccagcgttcttagccaggttcacctgagtgaggacgaagaggactctgaagatttccattctatcgctggtgactcagacctggattccgatgagta

SEQ ID NO: 237498 - DNA, 7629 bp, Artificial Sequence
  derived and/or modified sequence
aagggagctcagtaagtcacttctgggcgactgttgttttatttccggtctatgggacccggctgcgatttgctgctgcggacagcagctaccatcactgctgccgccatcatgtcagacacggacagcgacgaagattccgctggaggcggcccattttctttagcgggtttccttttcggcaacatcaatggagccgggcagctggagggggaaagcgtcttggatgatgaatgtaagaagcacttggcaggcttgggggctttggggctgggcagcctgatcactgaactcacggcaaatgaagaattgaccgggactgacggtgccttggtaaatgatgaagggtgggttaggagtacagaagatgctgtggactattcagacatcaatgaggtggcagaagatgaaagccgaagataccagcagacgatggggagcttgcagcccctttgccactcagattatgatgaagatgactatgatgctgattgtgaagacattgattgcaagttgatgcctcctccacctccacccccgggaccaatgaagaaggataaggaccaggattctattactggtgagaaagtggacttcagtagttcctctgactcagaatctgagatgggacctcaggaagcaacacaggcagaatctgaagatggaaagctgacccttccattggctgggattatgcagcatgatgccaccaagctgttgccaagtgtcacagaactttttccagaatttcgacctggaaaggtgttacgttttctacgtctttttggaccagggaagaatgtcccatctgtttggcggagtgctcggagaaagaggaagaagaagcaccgtgagctgatacaggaagagcagatccaggaggtggagtgctcagtagaatcagaagtcagccagaagtctttgtggaactacgactacgctccaccaccacctccagagcagtgtctctctgatgatgaaatcacgatgatggctcctgtggagtccaaattttcccaatcaactggagatatagataaagtgacagataccaaaccaagagtggctgagtggcgttatgggcctgcccgactgtggtatgatatgctgggtgtccctgaagatggcagtgggtttgactatggcttcaaactgagaaagacagaacatgaacctgtgataaaatctagaatgatagaggaatttaggaaacttgaggaaaacaatggcactgatcttctggctgatgaaaacttcctgatggtgacacagctgcattgggaggatgatatcatctgggatggggaggatgtcaaacacaaagggacaaaacctcagcgtgcaagcctggcaggctggcttccttctagcatgactaggaatgcgatggcttacaatgttcagcaaggttttgcagccactcttgatgatgacaaaccttggtactccatttttcccattgacaatgaggatctggtatatggacgctgggaggacaatatcatttgggatgctcaggccatgccccggctgttggaacctcctgttttgacacttgatcccaatgatgagaacctcattttggaaattcctgatgagaaggaagaggccacctctaactccccctccaaggagagtaagaaggaatcatctctgaagaagagtcgaattctcttagggaaaacaggagtcatcaaggaggaaccacagcagaacatgtctcagccagaagtgaaagatccatggaatctctccaatgatgagtattattatcccaagcaacagggtcttcgaggcacctttggagggaatattatccagcattcaattcctgctgtggaattacggcagcccttctttcccacccacatggggcccatcaaactccggcagttccatcgcccacctctgaaaaagtactcatttggtgcactttctcagccaggtccccactcagtccaacctttgctaaagcacatcaaaaaaaaggccaagatgagagaacaagagaggcaagcttcaggtggtggagagatgttttttatgcgcacacctcaggacctcacaggcaaagatggtgatcttattcttgcagaatatagtgaggaaaatggacccttaatgatgcaggttggcatggcaaccaagataaagaactattataaacggaaacctggaaaagatcctggagcaccagattgtaaatatggggaaactgtttactgccatacatctcctttcctgggttctctccatcctggccaattgctgcaagcatttgagaacaacctttttcgtgctccaatttatcttcataagatgccagaaactgatttcttgatcattcggacaagacagggttactatattcgggaattagtggatatttttgtggttggccagcagtgtcccttgtttgaagttcctgggcctaactccaaaagggccaatacgcatattcgagactttctacaggtttttatttaccgccttttctggaaaagtaaagatcggccacggaggatacgaatggaagatataaaaaaagcctttccttcccattcagaaagcagcatccggaagaggctaaagctctgcgctgacttcaaacgcacagggatggactcaaactggtgggtgcttaagtctgattttcgtttaccaacggaagaagagatcagagctatggtgtcaccagagcagtgctgtgcttattatagcatgatagctgcagagcaacgactgaaggatgctggctatggtgagaaatccttttttgctccagaagaagaaaatgaggaagatttccagatgaagattgatgatgaagttcgcactgccccttggaacaccacaagggccttcattgctgccatgaagggcaagtgtctgctagaggtgactggggtggcagatcccacggggtgtggtgaaggattctcctatgtgaagattccaaacaaaccaacacagcagaaggatgataaagaaccgcagccagtgaagaagacagtgacaggaacagatgcagaccttcgtcgcctttccctgaaaaatgccaagcaacttctacgtaaatttggtgtgcctgaggaagagattaaaaagttgtcccgctgggaagtgattgatgtggtgcgcacaatgtcaacagaacaggctcgttctggagaggggcccatgagtaaatttgcccgtggatcaaggttttctgtggctgagcatcaagagcgttacaaagaggaatgtcagcgcatctttgacctacagaacaaggttctgtcatcaactgaagtcttatcaactgacacagacagcagctcagctgaagatagtgactttgaagaaatgggaaagaacattgagaacatgttgcagaacaagaaaaccagctctcagctttcacgtgaacgggaggaacaggagcggaaggaactacagcgaatgctactggcagcaggctcagcagcatccggaaacaatcacagagatgatgacacagcttccgtgactagccttaactcttctgccactggacgctgtctcaagatttatcgcacgtttcgagatgaagaggggaaagagtatgttcgctgtgagacagtccgaaaaccagctgtcattgatgcctatgtgcgcatacggactacaaaagatgaggaattcattcgaaaatttgccctttttgatgaacaacatcgggaagagatgcgaaaagaacggcggaggattcaagagcaactgaggcggcttaagaggaaccaggaaaaggagaagcttaagggtcctcctgagaagaagcccaagaaaatgaaggagcgtcctgacctaaaactgaaatgtggggcatgtggtgccattggacacatgaggactaacaaattctgccccctctattatcaaacaaatgcgccaccttccaaccctgttgccatgacagaagaacaggaggaggagttggaaaagacagtcattcataatgataatgaagaacttatcaaggttgaagggaccaaaattgtcttggggaaacagctaattgagagtgcggatgaggttcgcagaaaatctctggttctcaagtttcctaaacagcagcttcctccaaagaagaaacggcgagttggaaccactgttcactgtgactatttgaatagacctcataagtccatccaccggcgccgcacagaccctatggtgacgctgtcgtccatcttggagtctatcatcaatgacatgagagatcttccaaatacataccctttccacactccagtcaatgcaaaggttgtaaaggactactacaaaatcatcactcggccaatggacctacaaacactccgcgaaaacgtgcgtaaacgcctctacccatctcgggaagagttcagagagcatctggagctaattgtgaaaaatagtgcaacctacaatgggccaaaacactcattgactcagatctctcaatccatgctggatctctgtgatgaaaaactcaaagagaaagaagacaaattagctcgcttagagaaagctatcaaccccttgctggatgatgatgaccaagtggcgttttctttcattctggacaacattgtcacccagaaaatgatggcagttccagattcttggccatttcatcacccagttaataagaaatttgttccagattattacaaagtgattgtcaatccaatggatttagagaccatacgtaagaacatctccaagcacaagtatcagagtcgggagagctttctggatgatgtaaaccttattctggccaacagtgttaagtataatggacctgagagtcagtatactaagactgcccaggagattgtgaacgtctgttaccagacattgactgagtatgatgaacatttgactcaacttgagaaggatatttgtactgctaaagaagcagctttggaggaagcagaattagaaagcctggacccaatgaccccagggccctacacgcctcagcctcctgatttgtatgataccaacacatccctcagtatgtctcgagatgcctctgtatttcaagatgagagcaatatgtctgtcttggatattcccagtgccactccagaaaagcaggtaacacaggaaggtgaagatggagatggtgatcttgcagatgaagaggaaggaactgtacaacagcctcaagccagtgtcctgtatgaggatttgcttatgtctgaaggagaagatgatgaggaagatgctgggagtgatgaagaaggagacaatcctttctctgctatccagctgagtgaaagtggaagtgactctgatgtgggatctggtggaataagacccaaacaaccccgcatgcttcaggagaacacaaggatggacatggaaaatgaagaaagcatgatgtcctatgagggagacggtggggaggcttcccatggtttggaggatagcaacatcagttatgggagctatgaggagcctgatcccaagtcgaacacccaagacacaagcttcagcagcatcggtgggtatgaggtatcagaggaggaagaagatgaggaggaggaagagcagcgctctgggccgagcgtactaagccaggtccacctgtcagaggacgaggaggacagtgaggatttccactccattgctggggacagtgacttggactctgatgaatgaggcttcctttgggcctccttggtcagccttccctgttctccagcctaggtggttcacctttccccaatttgttcatatttgtacagtatctgatcctgaaatcatgaaattaactaacaccttagcctttttaaaagtagtaagtaaatgataataaatcacctctcctaatcttcctggggcaatgtcaccctttgatttaaaacaaagcaaccccctttcccctaccactacggaaaagagcaagctcatttttccgtgtcctcctttatttaactccatttattgcttttggtataatttttccctggggaaggaggggaaattatgaaagaactagtaactttatgtcctcttgatgtattaggaaatttccggccaggcgtggtggctcacacctgtaatctcagcactctgggaggccgaggcgggcagatcacctgaggtcagaagttcgagaccagcttggccaacatggcgaaaccgcatctctactaaaaatacaaaaattagccaggtgtggtggcgtatgcctgttaatcctagctactcgggaggctgaggcaggagaattacttgaacccgggaggcagaggttgcagtgagtggaggtcacgccactgcactccagcctgggcgaaagagtgagattcagtctcaaaaaaaaaaaaatttccaagcatggtatcatctcacttttctaatttacaggctggagcagatgagagccctcctgctgggacagagaattgggttctagtggactctgtgctacacttaaacctgtgagacaaaccgcccattattttattatttaattatgcaatgcctagttcctaaatggattggaggcaaattaccgtaaattttgaaacagcctatatgtcagaaatgataatgttgccacctaaatgttttctgtcccccccaccctccccaggggaaatggtaggaaaatggtaagtttcttagggcaaagactgtgtcttctgtttcttttcatgcttaggatatggttctgtgcatagtaggtactcagtaaatgttcctagaatcataaaatcctcaacagatatgttactgagcatctgcttttcatgataagcactctatcagatccttgggatgcaaaggtaaataagacaaatcccttttacccaaagagctcaccatcaagttgggggagggaaagtggaattcaaaacatgttaataaatcatcatagtactgtgagataagtgcaattaagaagctagttataaagtataggggaaatagaggagtaatcatgtctgaaaagtcaggaaagtcttcctagaggtaatttttaagctgattgttttagaattagtagaagcttgccagatggaaaagtccaggcaaagtgtaacatgaatgggaaaggccacagtctagaaatggcagagtgtgttcctagtttgtttgtttgtttgtttgtacctgccttgttccaggaaggatttaatgtggtttatattccagtcctttaatgctggaagggctgagatgagactgaaagatgggcaggaagtatatcatcacaagctttgtgtttgatgttaatgtgtatgatttttatattatgggaaataagctcttagaggagtgatataatcaggtttgtgttttagaaatctgtgtaatgaatgaatgaagaaagaaattgaagaatcatgtaacatatgtgatcgcatttttgtaaaagaaccatgtgtgtttatatgtgtttatatatatacttgtgtatgcaaaggtaaaagtctgaaaggatatatgctaactgttcacaatgataaccccccaggaatgggattggaggggagggggcttctgtgtttgttatgtatgctgggtgggatattgtgcttttatttctatattgtttgaatttttttacagtatgtattatttttgtaataaaaattttaaaaaattcca

SEQ ID NO: 237499 - DNA, 4827 bp, Artificial Sequence
  derived and/or modified sequence
aagggagctcagtaagtcacttctgggcgactgttgttttatttccggtctatgggacccggctgcgatttgctgctgcggacagcagctaccatcactgctgccgccatcatgtcagacacggacagcgacgaagattccgctggaggcggcccattttctttagcgggtttccttttcggcaacatcaatggagccgggcagctggagggggaaagcgtcttggatgatgaatgtaagaagcacttggcaggcttgggggctttggggctgggcagcctgatcactgaactcacggcaaatgaagaattgaccgggactgacggtgccttggtaaatgatgaagggtgggttaggagtacagaagatgctgtggactattcagacatcaatgaggtggcagaagatgaaagccgaagataccagcagacgatggggagcttgcagcccctttgccactcagattatgatgaagatgactatgatgctgattgtgaagacattgattgcaagttgatgcctcctccacctccacccccgggaccaatgaagaaggataaggaccaggattctattactggtgagaaagtggacttcagtagttcctctgactcagaatctgagatgggacctcaggaagcaacacaggcagaatctgaagatggaaagctgacccttccattggctgggattatgcagcatgatgccaccaagctgttgccaagtgtcacagaactttttccagaatttcgacctggaaaggtgttacgttttctacgtctttttggaccagggaagaatgtcccatctgtttggcggagtgctcggagaaagaggaagaagaagcaccgtgagctgatacaggaagagcagatccaggaggtggagtgctcagtagaatcagaagtcagccagaagtctttgtggaactacgactacgctccaccaccacctccagagcagtgtctctctgatgatgaaatcacgatgatggctcctgtggagtccaaattttcccaatcaactggagatatagataaagtgacagataccaaaccaagagtggctgagtggcgttatgggcctgcccgactgtggtatgatatgctgggtgtccctgaagatggcagtgggtttgactatggcttcaaactgagaaagacagaacatgaacctgtgataaaatctagaatgatagaggaatttaggaaacttgaggaaaacaatggcactgatcttctggctgatgaaaacttcctgatggtgacacagctgcattgggaggatgatatcatctgggatggggaggatgtcaaacacaaagggacaaaacctcagcgtgcaagcctggcaggctggcttccttctagcatgactaggaatgcgatggcttacaatgttcagcaaggttttgcagccactcttgatgatgacaaaccttggtactccatttttcccattgacaatgaggatctggtatatggacgctgggaggacaatatcatttgggatgctcaggccatgccccggctgttggaacctcctgttttgacacttgatcccaatgatgagaacctcattttggaaattcctgatgagaaggaagaggccacctctaactccccctccaaggagagtaagaaggaatcatctctgaagaagagtcgaattctcttagggaaaacaggagtcatcaaggaggaaccacagcagaacatgtctcagccagaagtgaaagatccatggaatctctccaatgatgagtattattatcccaagcaacagggtcttcgaggcacctttggagggaatattatccagcattcaattcctgctgtggaattacggcagcccttctttcccacccacatggggcccatcaaactccggcagttccatcgcccacctctgaaaaagtactcatttggtgcactttctcagccaggtccccactcagtccaacctttgctaaagcacatcaaaaaaaaggccaagatgagagaacaagagaggcaagcttcaggtggtggagagatgttttttatgcgcacacctcaggacctcacaggcaaagatggtgatcttattcttgcagaatatagtgaggaaaatggacccttaatgatgcaggttggcatggcaaccaagataaagaactattataaacggaaacctggaaaagatcctggagcaccagattgtaaatatggggaaactgtttactgccatacatctcctttcctgggttctctccatcctggccaattgctgcaagcatttgagaacaacctttttcgtgctccaatttatcttcataagatgccagaaactgatttcttgatcattcggacaagacagggttactatattcgggaattagtggatatttttgtggttggccagcagtgtcccttgtttgaagttcctgggcctaactccaaaagggccaatacgcatattcgagactttctacaggtttttatttaccgccttttctggaaaagtaaagatcggccacggaggatacgaatggaagatataaaaaaagcctttccttcccattcagaaagcagcatccggaagaggctaaagctctgcgctgacttcaaacgcacagggatggactcaaactggtgggtgcttaagtctgattttcgtttaccaacggaagaagagatcagagctatggtgtcaccagagcagtgctgtgcttattatagcatgatagctgcagagcaacgactgaaggatgctggctatggtgagaaatccttttttgctccagaagaagaaaatgaggaagatttccagatgaagattgatgatgaagttcgcactgccccttggaacaccacaagggccttcattgctgccatgaagggcaagtgtctgctagaggtgactggggtggcagatcccacggggtgtggtgaaggattctcctatgtgaagattccaaacaaaccaacacagcagaaggatgataaagaaccgcagccagtgaagaagacagtgacaggaacagatgcagaccttcgtcgcctttccctgaaaaatgccaagcaacttctacgtaaatttggtgtgcctgaggaagagattaaaaagttgtcccgctgggaagtgattgatgtggtgcgcacaatgtcaacagaacaggctcgttctggagaggggcccatgagtaaatttgcccgtggatcaaggttttctgtggctgagcatcaagagcgttacaaagaggaatgtcagcgcatctttgacctacagaacaaggttctgtcatcaactgaagtcttatcaactgacacagacagcagctcagctgaagatagtgactttgaagaaatgggaaagaacattgagaacatgttgcagaacaagaaaaccagctctcagctttcacgtgaacgggaggaacaggagcggaaggaactacagcgaatgctactggcagcaggctcagcagcatccggaaacaatcacagagatgatgacacagcttccgtgactagccttaactcttctgccactggacgctgtctcaagatttatcgcacgtttcgagatgaagaggggaaagagtatgttcgctgtgagacagtccgaaaaccagctgtcattgatgcctatgtgcgcatacggactacaaaagatgaggaattcattcgaaaatttgccctttttgatgaacaacatcgggaagagatgcgaaaagaacggcggaggattcaagagcaactgaggcggcttaagaggaaccaggaaaaggagaagcttaagggtcctcctgagaagaagcccaagaaaatgaaggagcgtcctgacctaaaactgaaatgtggggcatgtggtgccattggacacatgaggactaacaaattctgccccctctattatcaaacaaatgcgccaccttccaaccctgttgccatgacagaagaacaggaggaggagttggaaaagacagtcattcataatgataatgaagaacttatcaaggttgaagggaccaaaattgtcttggggaaacagctaattgagagtgcggatgaggttcgcagaaaatctctggttctcaagtttcctaaacagcagcttcctccaaagaagaaacggcgagttggaaccactgttcactgtgactatttgaatagacctcataagtccatccaccggcgccgcacagaccctatggtgacgctgtcgtccatcttggagtctatcatcaatgacatgagagatcttccaaatacataccctttccacactccagtcaatgcaaaggttgtaaaggactactacaaaatcatcactcggccaatggacctacaaacactccgcgaaaacgtgcgtaaacgcctctacccatctcgggaagagttcagagagcatctggagctaattgtgaaaaatagtgcaacctacaatgggccaaaacactcattgactcagatctctcaatccatgctggatctctgtgatgaaaaactcaaagagaaagaagacaaattagctcgcttagagaaagctatcaaccccttgctggatgatgatgaccaagtggcgttttctttcattctggacaacattgtcacccagaaaatgatggcagttccagattcttggccatttcatcacccagttaataagaaatttgttccagattattacaaagtgattgtcaatccaatggatttagagaccatacgtaagaacatctccaagcacaagtatcagagtcgggagagctttctggatgatgtaaaccttattctggccaacagtgttaagtataatgggtacatgtgcacaacgtgcaggttt

SEQ ID NO: 237500 - protein, 269 aa, Artificial Sequence
  derived and/or modified sequence
MSAPSATPIFAPGENCSPAWGAAPAAYDAADTHLRILGKPVMERWETPYMHALAAAASSKGGRVLEVGFGMAIAASKVQEAPIDEHWIIECNDGVFQRLRDWAPRQTHKVIPLKGLWEDVAPTLPDGHFDGILYDTYPLSEETWHTHQFNFIKNHAFRLLKPGGVLTYCNLTSWGELMKSKYSDITIMFEVRPPEVPHGSPGSDLGWGWEGAAGATLLPGEGPFLTPWVGWTVLVHLEIKVLCLAQWLPGAVAQVYNPSTVEGRGGQIA

SEQ ID NO: 237501 - DNA, 810 bp, Artificial Sequence
  derived and/or modified sequence
atgagcgcgccatcggccactcccatctttgctcccggtgaaaattgctcgcctgcgtggggggcggcccccgccgcatatgatgcagccgatacacacctgcggatcctcggcaagcccgtgatggagagatgggagaccccatatatgcatgcactagccgccgcagcctcatcaaaagggggtcgcgtgttggaggtgggctttgggatggcgattgcagccagcaaagttcaggaagcccctattgacgaacactggataattgaatgtaatgacggcgtgttccagcgacttcgcgactgggccccacgacagacccacaaagtgatcccactgaagggcctgtgggaagatgtcgcgcccactctgcccgatgggcattttgacggtattttgtatgacacctacccgctgtctgaggaaacgtggcacacacatcaatttaacttcattaaaaaccacgccttcagactgctaaagcccggaggggtgctcacgtattgtaacctcactagttggggagaactgatgaagtctaaatacagcgacattacaataatgttcgaagtgaggcctccagaagtgccccacgggtcgcccggctcagacttgggatgggggtgggagggcgctgcaggggctacactgttgcccggagaaggcccctttcttacaccttgggtcggttggaccgtgttagtgcacttggagatcaaggtactgtgcctggcccaatggctgccgggggcagtggctcaggtctataacccttcaacagtggagggaaggggtggccagatcgcttag

SEQ ID NO: 237502 - DNA, 1301 bp, Artificial Sequence
  derived and/or modified sequence
acaagcccctgcagggagcgggcccgggcggcgcgcgatcgaggtcgggtcgccgtccagcctgcagcatgagcgcccccagcgcgacccccatcttcgcgcccggcgagaactgcagccccgcgtggggggcggcgcccgcggcctacgacgcagcggacacgcacctgcgcatcctgggcaagccggtgatggagcgctgggagaccccctatatgcacgcgctggccgccgccgcctcctccaaagggggccgggtcctggaggtgggctttggcatggccatcgcagcgtcaaaggtgcaggaggcgcccattgatgagcattggatcatcgagtgcaatgacggcgtcttccagcggctccgggactgggccccacggcagacacacaaggtcatccccttgaaaggcctgtgggaggatgtggcacccaccctgcctgacggtcactttgatgggatcctgtacgacacgtacccactctcggaggagacctggcacacacaccagttcaacttcatcaagaaccacgcctttcgcctgctgaagccggggggcgtcctcacctactgcaacctcacctcctggggggagctgatgaagtccaagtactcagacatcaccatcatgtttgaggtgcgcccacctgaagttccccatgggtctccaggaagtgaccttggatgggggtgggaaggggctgctggagccaccttgctacctggggagggtcccttcctgaccccctgggtgggctggactgtgctggttcatttagaaatcaaagtcctttgcctggcgcagtggctgccaggagcagtggctcaggtctataatcccagcactgtggaaggccgaggtgggcagattgcttgagcctaggagttcaagaccagcctgggctacagagcaagacctcatctttcctaaaaaaaaaaaatacaaaaaactagctgggcgtggtggcgtgtgcctgtactcccagctacttgggaggctgaggtaggaggattgcttgggccccaggggcagaggttgcagtgagcccagatcgaaccactgcactccagcctgggtaacagagccagaccctgtctcaagaaaaaagaaagaaagaaagaaagaaagaaaatttaaaaaaaaaatggaaatcaggctgggcgtggtggctcacacctgtgatcccggcacttcggaaggccaaggcgggtggatcacttgagcccaggagtttgagcctagcctggccaacatggcagaatcccatctctactaaaaatacaaaagttagccaggcgt

SEQ ID NO: 237503 - DNA, 810 bp, Artificial Sequence
  derived and/or modified sequence
atgtctgcccccagcgccacccccatctttgcccctggagagaactgcagccctgcctggggcgccgccccagctgcctatgatgctgctgacacccacctgcgcatcctgggcaagcctgtgatggagcgctgggagaccccctacatgcacgccctggccgccgccgccagcagcaagggcggccgggtgctggaggtgggcttcggcatggccatcgccgccagcaaggtgcaggaggcccccattgatgagcactggatcatcgagtgcaatgatggagtcttccagaggctgcgggactgggccccccggcagacccacaaggtgatccccctgaagggcctgtgggaggatgtggcccccaccctgcctgatggccactttgatggcatcctgtatgacacctaccccctgtctgaggagacctggcacacccaccagttcaacttcatcaagaaccacgccttccggctgctgaagccaggcggcgtgctgacctactgcaacctgacctcctggggcgagctgatgaagagcaagtacagcgacatcaccatcatgtttgaggtgcggcccccagaggtgccccacggcagccctggcagtgacctgggctggggctgggagggcgctgctggggccaccctgctgcctggagagggccccttcctgaccccctgggtgggctggacagtgctggtgcacctggagatcaaggtgctgtgcctggcccagtggctgcctggagctgtggcccaggtgtacaaccccagcacagtggagggccggggcggccagatcgcctag

SEQ ID NO: 237504 - DNA, 810 bp, Artificial Sequence
  derived and/or modified sequence
atgagcgcccccagcgccacccccatcttcgcccccggcgagaactgcagccccgcatggggggcagctcccgccgcctacgacgccgccgacacacacctaaggatactcgggaaacctgtaatggagagatgggaaaccccttatatgcacgcattggctgctgccgcttcatcaaaggggggtcgggtgttggaagtggggttcggaatggctatcgccgcctccaaggtccaggaggcccccatcgacgagcattggattatcgaatgtaacgacggtgtgtttcagaggctcagggattgggcgccacgccaaacccataaagtcatacccctgaaaggactctgggaggacgttgcgcctaccctacccgatggacatttcgatggcattctctacgacacttatccactgtccgaggaaacctggcatacacaccaattcaacttcattaagaaccacgccttcagactattaaagccgggcggtgttttgacttattgcaatctgaccagctggggggaactgatgaagtccaaatatagcgacatcacaatcatgtttgaagttcggccccccgaagtcccacacgggtcacccggttcagatctgggatggggctgggagggtgctgccggcgccaccctgctgcctggggaagggccgttcctcacaccgtgggtgggctggacagtgttggtgcatcttgaaattaaggtgctatgtcttgcacagtggttacccggcgccgttgctcaagtttacaacccctctactgtcgaggggaggggtggacagatcgcctag

SEQ ID NO: 237505 - DNA, 810 bp, Artificial Sequence
  derived and/or modified sequence
atgagcgctcctagcgccacccccatttttgctcctggcgaaaattgctcccccgcatggggcgcagctcctgcagcttacgacgcagcagatacacatctcagaatcttaggcaaacctgtcatggagcgatgggaaacgccctatatgcatgcacttgcagccgctgctagcagtaagggcggaagagttcttgaggttggatttgggatggcaatcgcagcctccaaagtgcaggaggcaccgatcgatgagcattggatcattgagtgtaacgacggcgtctttcagcgcctcagagattgggctccacgccagacccataaggtcatccccctaaagggcctgtgggaggatgtggctcccaccctccccgatggacacttcgacggtatcttgtacgacacataccccctgagtgaggagacgtggcatacccaccagtttaactttattaagaatcatgcttttagactcctgaagcccggtggtgtgctaacgtattgtaatttgacttcatggggagagctaatgaaatctaaatactcggatataacaatcatgttcgaagtacgaccccctgaagtgcctcatgggagtcccggttccgacctaggttggggatgggagggggcagccggtgccactctgctgcctggcgagggacccttcctcacaccgtgggtgggatggaccgttctcgtccatcttgaaattaaggtgctgtgtctggcacagtggctgcccggagcagtcgcacaggtgtataatccatccactgttgagggacgcggaggccagatcgcctag

SEQ ID NO: 237506 - DNA, 810 bp, Artificial Sequence
  derived and/or modified sequence
atgagcgcccccagcgccacccccatcttcgcccccggcgagaactgcagccccgcctggggcgccgcccccgccgcctacgacgccgccgacacccacctgagaatcctgggcaagcccgtgatggagagatgggagaccccctacatgcacgccctggccgccgccgccagcagcaagggcggcagagtgctggaggtgggcttcggcatggccatcgccgccagcaaggtgcaggaggcccccatcgacgagcactggatcatcgagtgcaacgacggcgtgttccagagactgagagactgggcccccagacagacccacaaggtgatccccctgaagggcctgtgggaggacgtggcccccaccctgcccgacggccacttcgacggcatcctgtacgacacctaccccctgagcgaggagacctggcacacccaccagttcaacttcatcaagaaccacgccttcagactgctgaagcccggcggcgtgctgacctactgcaacctgaccagctggggcgagctgatgaagagcaagtacagcgacatcaccatcatgttcgaggtgagaccccccgaggtgccccacggcagccccggcagcgacctgggctggggctgggagggcgccgccggcgccaccctgctgcccggcgagggccccttcctgaccccctgggtgggctggaccgtgctggtgcacctggagatcaaggtgctgtgcctggcccagtggctgcccggcgccgtggcccaggtgtacaaccccagcaccgtggagggcagaggcggccagatcgcctag

SEQ ID NO: 237507 - protein, 2325 aa, Artificial Sequence
  derived and/or modified sequence
MATNIEQIFRSFVVSKFREIQQELSSGRNEGQLNGETNTPIEGNQAGDAAASARSLPNEEIVQKIEEVLSGVLDTELRYKPDLKEGSRKSRCVSVQTDPTDEIPTKKSKKHKKHKNKKKKKKKEKEKKYKRQPEESESKTKSHDDGNIDLESDSFLKFDSEPSAVALELPTRAFGPSETNESPAVVLEPPVVSMEVSEPHILETLKPATKTAELSVVSTSVISEQSEQSVAVMPEPSMTKILDSFAAAPVPTTTLVLKSSEPVVTMSVEYQMKSVLKSVESTSPEPSKIMLVEPPVAKVLEPSETLVVSSETPTEVYPEPSTSTTMDFPESSAIEALRLPEQPVDVPSEIADSSMTRPQELPELPKTTALELQESSVASAMELPGPPATSMPELQGPPVTPVLELPGPSATPVPELPGPLSTPVPELPGPPATAVPELPGPSVTPVPQLSQELPGLPAPSMGLEPPQEVPEPPVMAQELPGLPLVTAAVELPEQPAVTVAMELTEQPVTTTELEQPVGMTTVEHPGHPEVTTATGLLGQPEATMVLELPGQPVATTALELPGQPSVTGVPELPGLPSATRALELSGQPVATGALELPGPLMAAGALEFSGQSGAAGALELLGQPLATGVLELPGQPGAPELPGQPVATVALEISVQSVVTTSELSTMTVSQSLEVPSTTALESYNTVAQELPTTLVGETSVTVGVDPLMAPESHILASNTMETHILASNTMDSQMLASNTMDSQMLASNTMDSQMLASSTMDSQMLATSSMDSQMLATSSMDSQMLATSTMDSQMLATSSMDSQMLATSSMDSQMLATSSMDSQMLATSSMDSQMLATSTMDSQMLATSTMDSQMLATSSMDSQMLASGTMDSQMLASGTMDAQMLASGTMDAQMLASSTQDSAMLGSKSPDPYRLAQDPYRLAQDPYRLGHDPYRLGHDAYRLGQDPYRLGHDPYRLTPDPYRMSPRPYRIAPRSYRIAPRPYRLAPRPLMLASRRSMMMSYAAERSMMSSYERSMMSYERSMMSPMAERSMMSAYERSMMSAYERSMMSPMAERSMMSAYERSMMSAYERSMMSPMADRSMMSMGADRSMMSSYSAADRSMMSSYSAADRSMMSSYTADRSMMSMAADSYTDSYTDTYTEAYMVPPLPPEEPPTMPPLPPEEPPMTPPLPPEEPPEGPALPTEQSALTAENTWPTEVPSSPSEESVSQPEPPVSQSEISEPSAVPTDYSVSASDPSVLVSEAAVTVPEPPPEPESSITLTPVESAVVAEEHEVVPERPVTCMVSETPAMSAEPTVLASEPPVMSETAETFDSMRASGHVASEVSTSLLVPAVTTPVLAESILEPPAMAAPESSAMAVLESSAVTVLESSTVTVLESSTVTVLEPSVVTVPEPPVVAEPDYVTIPVPVVSALEPSVPVLEPAVSVLQPSMIVSEPSVSVQESTVTVSEPAVTVSEQTQVIPTEVAIESTPMILESSIMSSHVMKGINLSSGDQNLAPEIGMQEIALHSGEEPHAEEHLKGDFYESEHGINIDLNINNHLIAKEMEHNTVCAAGTSPVGEIGEEKILPTSETKQRTVLDTYPGVSEADAGETLSSTGPFALEPDATGTSKGIEFTTASTLSLVNKYDVDLSLTTQDTEHDMVISTSPSGGSEADIEGPLPAKDIHLDLPSNNNLVSKDTEEPLPVKESDQTLAALLSPKESSGGEKEVPPPPKETLPDSGFSANIEDINEADLVRPLLPKDMERLTSLRAGIEGPLLASDVGRDRSAASPVVSSMPERASESSSEEKDDYEIFVKVKDTHEKSKKNKNRDKGEKEKKRDSSLRSRSKRSKSSEHKSRKRTSESRSRARKRSSKSKSHRSQTRSRSRSRRRRRSSRSRSKSRGRRSVSKEKRKRSPKHRSKSRERKRKRSSSRDNRKTVRARSRTPSRRSRSHTPSRRRRSRSVGRRRSFSISPSRRSRTPSRRSRTPSRRSRTPSRRSRTPSRRSRTPSRRSRTPSRRRRSRSVVRRRSFSISPVRLRRSRTPLRRRFSRSPIRRKRSRSSERGRSPKRLTDLDKAQLLEIAKANAAAMCAKAGVPLPPNLKPAPPPTIEEKVAKKSGGATIEELTEKCKQIAQSKEDDDVIVNKPHVSDEEEEEPPFYHHPFKLSEPKPIFFNLNIAAAKPTPPKSQVTLTKEFPVSSGSQHRKKEADSVYGEWVPVEKNGEENKDDDNVFSSNLPSEPVDISTAMSERALAQKRLSENAFDLEAMSMLNRAQERIDAWAQLNSIPGQFTGSTGVQVLTQEQLANTGAQAWIKKGQILVAVFLPRSVPAVLFTTLLLPRPRISS

SEQ ID NO: 237508 - protein, 2426 aa, Artificial Sequence
  derived and/or modified sequence
MATNIEQIFRSFVVSKFREIQQELSSGRNEGQLNGETNTPIEGNQAGDAAASARSLPNEEIVQKIEEVLSGVLDTELRYKPDLKEGSRKSRCVSVQTDPTDEIPTKKSKKHKKHKNKKKKKKKEKEKKYKRQPEESESKTKSHDDGNIDLESDSFLKFDSEPSAVALELPTRAFGPSETNESPAVVLEPPVVSMEVSEPHILETLKPATKTAELSVVSTSVISEQSEQSVAVMPEPSMTKILDSFAAAPVPTTTLVLKSSEPVVTMSVEYQMKSVLKSVESTSPEPSKIMLVEPPVAKVLEPSETLVVSSETPTEVYPEPSTSTTMDFPESSAIEALRLPEQPVDVPSEIADSSMTRPQELPELPKTTALELQESSVASAMELPGPPATSMPELQGPPVTPVLELPGPSATPVPELPGPLSTPVPELPGPPATAVPELPGPSVTPVPQLSQELPGLPAPSMGLEPPQEVPEPPVMAQELPGLPLVTAAVELPEQPAVTVAMELTEQPVTTTELEQPVGMTTVEHPGHPEVTTATGLLGQPEATMVLELPGQPVATTALELPGQPSVTGVPELPGLPSATRALELSGQPVATGALELPGPLMAAGALEFSGQSGAAGALELLGQPLATGVLELPGQPGAPELPGQPVATVALEISVQSVVTTSELSTMTVSQSLEVPSTTALESYNTVAQELPTTLVGETSVTVGVDPLMAPESHILASNTMETHILASNTMDSQMLASNTMDSQMLASNTMDSQMLASSTMDSQMLATSSMDSQMLATSSMDSQMLATSTMDSQMLATSSMDSQMLATSSMDSQMLATSSMDSQMLATSSMDSQMLATSTMDSQMLATSTMDSQMLATSSMDSQMLASGTMDSQMLASGTMDAQMLASGTMDAQMLASSTQDSAMLGSKSPDPYRLAQDPYRLAQDPYRLGHDPYRLGHDAYRLGQDPYRLGHDPYRLTPDPYRMSPRPYRIAPRSYRIAPRPYRLAPRPLMLASRRSMMMSYAAERSMMSSYERSMMSYERSMMSPMAERSMMSAYERSMMSAYERSMMSPMAERSMMSAYERSMMSAYERSMMSPMADRSMMSMGADRSMMSSYSAADRSMMSSYSAADRSMMSSYTADRSMMSMAADSYTDSYTDTYTEAYMVPPLPPEEPPTMPPLPPEEPPMTPPLPPEEPPEGPALPTEQSALTAENTWPTEVPSSPSEESVSQPEPPVSQSEISEPSAVPTDYSVSASDPSVLVSEAAVTVPEPPPEPESSITLTPVESAVVAEEHEVVPERPVTCMVSETPAMSAEPTVLASEPPVMSETAETFDSMRASGHVASEVSTSLLVPAVTTPVLAESILEPPAMAAPESSAMAVLESSAVTVLESSTVTVLESSTVTVLEPSVVTVPEPPVVAEPDYVTIPVPVVSALEPSVPVLEPAVSVLQPSMIVSEPSVSVQESTVTVSEPAVTVSEQTQVIPTEVAIESTPMILESSIMSSHVMKGINLSSGDQNLAPEIGMQEIALHSGEEPHAEEHLKGDFYESEHGINIDLNINNHLIAKEMEHNTVCAAGTSPVGEIGEEKILPTSETKQRTVLDTYPGVSEADAGETLSSTGPFALEPDATGTSKGIEFTTASTLSLVNKYDVDLSLTTQDTEHDMVISTSPSGGSEADIEGPLPAKDIHLDLPSNNNLVSKDTEEPLPVKESDQTLAALLSPKESSGGEKEVPPPPKETLPDSGFSANIEDINEADLVRPLLPKDMERLTSLRAGIEGPLLASDVGRDRSAASPVVSSMPERASESSSEEKDDYEIFVKVKDTHEKSKKNKNRDKGEKEKKRDSSLRSRSKRSKSSEHKSRKRTSESRSRARKRSSKSKSHRSQTRSRSRSRRRRRSSRSRSKSRGRRSVSKEKRKRSPKHRSKSRERKRKRSSSRDNRKTVRARSRTPSRRSRSHTPSRRRRSRSVGRRRSFSISPSRRSRTPSRRSRTPSRRSRTPSRRSRTPSRRSRTPSRRSRTPSRRRRSRSVVRRRSFSISPVRLRRSRTPLRRRFSRSPIRRKRSRSSERGRSPKRLTDLDKAQLLEIAKANAAAMCAKAGVPLPPNLKPAPPPTIEEKVAKKSGGATIEELTEKCKQIAQSKEDDDVIVNKPHVSDEEEEEPPFYHHPFKLSEPKPIFFNLNIAAAKPTPPKSQVTLTKEFPVSSGSQHRKKEADSVYGEWVPVEKNGEENKDDDNVFSSNLPSEPVDISTAMSERALAQKRLSENAFDLEAMSMLNRAQERIDAWAQLNSIPGQFTGSTGVQVLTQEQLANTGAQAWIKKDQFLRAAPVTGGMGAVLMRKMGWREGEGLGKNKEGNKEPILVDFKTDRKGLVAVGERAQKRSGNFSAAMKDLSGKHPVSALMEICNKRRWQPPEFLLVHDSGPDHRKHFLFRVLRNGALTRPNCMFFLNRY

SEQ ID NO: 237509 - protein, 175 aa, Artificial Sequence
  derived and/or modified sequence
MLPPMALPSVSWMLLSCLMLLSQVQGEEPQRELPSARIRCPKGSKAYGSHCYALFLSPKSWTDADLACQKRPSGNLVSVLSGAEGSFVSSLVKSIGNSYSYVWIGLHDPTQGTEPNGEGWEWSSSDVMNYFAWERNPSTISSPGHCASLSRSTAFLRWKDYNCNVRLPYVCKFTD

SEQ ID NO: 237510 - DNA, 528 bp, Artificial Sequence
  derived and/or modified sequence
atgctccctccaatggcccttccttccgtcagttggatgctcctgagttgtctgatgctgctgagccaagtccaaggagaggaaccacagcgagaattaccgtcggcaaggatccgatgccctaaaggctctaaggcttacggttcccattgttatgccctgttcctcagccccaaatcttggaccgacgcagacttagcctgccagaaaaggcccagtggaaatttggtctctgtgctatcaggagcagaaggatcttttgtttcatccctggtaaaatctattggaaatagttacagctacgtctggataggactgcacgaccctactcaaggaaccgagccgaatggggaagggtgggaatggagctccagcgatgtcatgaattattttgcatgggaacgaaatcctagcacgattagctcccctggacactgcgccagcttgagccggtccactgctttcctccggtggaaggactacaactgtaacgtgagattgccctatgtctgcaagttcactgattag

SEQ ID NO: 237511 - DNA, 528 bp, Artificial Sequence
  derived and/or modified sequence
atgctgccaccaatggcattaccctcagtcagctggatgctactgagttgccttatgttgctttcacaggttcaaggggaagaaccccagcgagagcttccatctgctcgtatccggtgccctaaggggtccaaagcgtatggcagccactgttatgcactctttctttctcccaaatcttggaccgatgcggaccttgcctgccagaagcggccatctggcaatctggtgtccgtcctatccggcgctgaaggcagtttcgtgtcgagtttggtgaagagcattggaaatagctactcatatgtgtggattggtctgcacgatccaacacagggtacagagccgaatggggagggttgggagtggtctagtagcgatgttatgaactactttgcctgggagcgcaaccctagcaccatttccagtcccggacattgcgcaagcctgtctaggagcactgctttcctgcggtggaaggactacaactgtaacgtgcggcttccttatgtttgcaagttcactgactag

SEQ ID NO: 237512 - DNA, 528 bp, Artificial Sequence
  derived and/or modified sequence
atgctccctcccatggcactcccttcggtgtcctggatgctcctctcatgcctgatgctgctcagccaggtccagggcgaggagccacaacgggagttgcctagtgctaggatcaggtgtcccaaaggctctaaagcctatggtagccactgttatgctctgtttctatcccccaagagctggaccgatgccgatctggcctgtcagaaacggccaagcgggaacctagtgtctgtgctgtcaggcgctgaaggctcctttgtctcctccttggttaaatctatcggcaatagctactcatacgtctggataggtctgcatgaccctacacagggaacagagcctaacggggaggggtgggaatggtcttcgtccgacgtcatgaactattttgcctgggaaaggaacccttcaactatatcgagtcccggacactgcgcatccctgagtcgttctactgcctttctccgctggaaggactacaattgcaacgtcaggctcccatacgtgtgtaagttcaccgattag

SEQ ID NO: 237513 - DNA, 785 bp, Artificial Sequence
  derived and/or modified sequence
aaaccataccatatcccaccagagagtcgcagacactatgctgcctcccatggccctgcccagtgtatcttggatgctgctttcctgcctcatgctgctgtctcaggttcaaggtgaagaaccccagagggaactgccctctgcacggatccgctgtcccaaaggctccaaggcctatggctcccactgctatgccttgtttttgtcaccaaaatcctggacagatgcagatctggcctgccagaagcggccctctggaaacctggtgtctgtgctcagtggggctgagggatccttcgtgtcctccctggtgaagagcattggtaacagctactcatacgtctggattgggctccatgaccccacacagggcaccgagcccaatggagaaggttgggagtggagtagcagtgatgtgatgaattactttgcatgggagagaaatccctccaccatctcaagccccggccactgtgcgagcctgtcgagaagcacagcatttctgaggtggaaagattataactgtaatgtgaggttaccctatgtctgcaagttcactgactagtgcaggagggaagtcagcagcctgtgtttggtgtgcaactcatcatgggcatgagaccagtgtgaggactcaccctggaagagaatattcgcttaattcccccaacctgaccacctcattcttatctttcttctgtttcttcctccccgctgtcatttcagtctcttcattttgtcatacggcctaaggctttaaagagcaataaaatttttagtctgca

SEQ ID NO: 237514 - DNA, 528 bp, Artificial Sequence
  derived and/or modified sequence
atgcttcctccgatggcgctaccaagtgtgtcgtggatgttactctcctgtcttatgctattgtcccaagtgcaaggcgaggaacctcagcgagaactgccctcagctcgcatccgctgtccaaaaggtagcaaagcttatggatctcattgttatgcactcttcttgagccctaaatcctggactgacgccgatctcgcatgccagaagcggccatccgggaacttggtcagcgtgttgagtggtgccgaagggtcattcgtatcctcactggtaaagagtataggtaacagctactcatatgtttggatcggcctgcacgacccaactcaggggaccgaaccgaacggagaaggctgggagtggtcttccagtgacgtgatgaattatttcgcctgggagagaaacccatcgacgatctcctcccctggccactgtgccagcttgtcccggagtaccgcgtttctgagatggaaagattataattgcaacgtcagactgccctatgtttgcaagttcactgattag

SEQ ID NO: 237515 - DNA, 528 bp, Artificial Sequence
  derived and/or modified sequence
atgctccctcccatggcactcccctccgttagttggatgctgctgtcatgcctcatgctgctcagccaagtacagggggaagaaccacagcgcgaattgccatcagccagaattcgctgtcccaagggaagcaaagcttacgggagccactgctatgctctattcctcagccctaagagctggaccgacgcagacttagcatgtcaaaaacgacccagcgggaacctggttagtgtgttgtcaggcgccgaaggttcttttgtttcaagtttagtcaaatccattgggaatagctacagttacgtgtggataggccttcacgaccccacccagggaaccgagcctaatggcgagggctgggagtggagcagcagcgatgtgatgaattatttcgcatgggaaagaaatccaagcaccatctcgtctcccggtcactgcgcatcactttcccgatccaccgcattccttagatggaaggactacaattgcaacgtaagactgccctacgtttgtaaatttactgattag

SEQ ID NO: 237516 - DNA, 528 bp, Artificial Sequence
  derived and/or modified sequence
atgcttccacctatggctctgccttctgtttcatggatgctgctttcttgcttgatgctcctgtcacaagtccagggtgaggaacctcaaagggaactgccctctgctagaatcagatgtccaaaaggcagcaaagcatatggaagtcactgctacgcgttgttcctgtcacctaaatcatggacagatgccgaccttgcctgccagaagaggccgtctgggaacctcgtgtcagtcctgtctggagccgagggttcttttgtaagctctttagtcaaaagcataggaaactcctacagctatgtgtggattgggctgcacgacccaactcaaggaaccgagcctaacggggaggggtgggagtggtcttcctccgatgtcatgaattacttcgcttgggaaaggaatccctcaacaattagctcgcccggtcattgcgcttcactttctagatccactgctttcctccgctggaaagattacaactgtaacgtgcgtctcccctatgtgtgcaaatttactgattag

SEQ ID NO: 237517 - DNA, 528 bp, Artificial Sequence
  derived and/or modified sequence
atgcttcctccgatggcgctaccaagtgtgtcgtggatgttactctcctgtcttatgctattgtcccaagtgcaaggcgaggaacctcagcgagaactgccctcagctcgcatccgctgtccaaaaggtagcaaagcttatggatctcattgttatgcactcttcttgagccctaaatcctggactgacgccgatctcgcatgccagaagcggccatccgggaacttggtcagcgtgttgagtggtgccgaagggtcattcgtatcctcactggtaaagagtataggtaacagctactcatacgtctggatcggcctgcacgatccaacccagggcacagaaccaaacggcgaagggtgggagtggtcctcctccgatgtcatgaactattttgcctgggaaaggaacccatctacgattagctctcccggtcactgcgcgtctctctcaaggtccaccgctttcctcaggtggaaggattataactgtaacgtccgcttgccatacgtatgtaaatttaccgactag

SEQ ID NO: 237518 - DNA, 528 bp, Artificial Sequence
  derived and/or modified sequence
atgctccctcccatggcactcccctccgttagttggatgctgctgtcatgcctcatgctgctcagccaagtacagggggaagaaccacagcgcgaattgccatcagccagaattcgctgtcccaagggaagcaaagcttacgggagccactgctatgctctattcctcagccctaagagctggaccgacgcagacttagcatgtcaaaaacgacccagcgggaacctggttagtgtgttgtcaggcgccgaaggttcttttgtttcaagtttagtcaaatccattgggaatagctacagttacgtgtggatcggactccacgaccctacgcaggggacagaacccaacggtgagggctgggaatggagctcgagcgatgttatgaattactttgcttgggagagaaaccccagtaccataagctcacctggacattgcgcatccctgtcacgaagtacagcctttttacgctggaaagattacaattgcaacgtacgcctcccctacgtgtgtaagttcacggactag

SEQ ID NO: 237519 - DNA, 528 bp, Artificial Sequence
  derived and/or modified sequence
atgcttccacctatggctctgccttctgtttcatggatgctgctttcttgcttgatgctcctgtcacaagtccagggtgaggaacctcaaagggaactgccctctgctagaatcagatgtccaaaaggcagcaaagcatatggaagtcactgctacgcgttgttcctgtcacctaaatcatggacagatgccgaccttgcctgccagaagaggccgtctgggaacctcgtgtcagtcctgtctggagccgagggttcttttgtaagctctttagtcaaaagcataggaaactcctacagctatgtttggataggcctacatgacccgacccaggggactgaacctaatggtgagggctgggagtggagttcttcagacgttatgaattattttgcttgggaaagaaatccttcaacaatcagttctccaggccactgcgcgtcactatcacggagtactgcgtttcttagatggaaggactacaactgcaacgttcgtctgccctacgtttgcaagtttacagattag

SEQ ID NO: 237520 - DNA, 528 bp, Artificial Sequence
  derived and/or modified sequence
atgctgccccccatggccctgcccagcgtgagctggatgctgctgagctgcctgatgctgctgagccaggtgcagggcgaggagccccagagagagctgcccagcgccagaatcagatgccccaagggcagcaaggcctacggcagccactgctacgccctgttcctgagccccaagagctggaccgacgccgacctggcctgccagaagagacccagcggcaacctggtgagcgtgctgagcggcgccgagggcagcttcgtgagcagcctggtgaagagcatcggcaacagctacagctacgtgtggatcggcctgcacgaccccacccagggcaccgagcccaacggcgagggctgggagtggagcagcagcgacgtgatgaactacttcgcctgggagagaaaccccagcaccatcagcagccccggccactgcgccagcctgagcagaagcaccgccttcctgagatggaaggactacaactgcaacgtgagactgccctacgtgtgcaagttcaccgactag

SEQ ID NO: 237521 - DNA, 718 bp, Artificial Sequence
  derived and/or modified sequence
cataccatatcccaccagagagtgactcctgattgcctcctcaagtcgcagacactatgctgcctcccatggccctgcccagtgtatcttggatgctgctttcctgcctcatgctgctgtctcaggttcaaggtgaagaaccccagagggaactgccctctgcacggatccgctgtcccaaaggctccaaggcctatggctcccactgctatgccttgtttttgtcaccaaaatcctggacagatgcagatctggcctgccagaagcggccctctggaaacctggtgtctgtgctcagtggggctgagggatccttcgtgtcctccctggtgaagagcattggtaacagctactcatacgtctggattgggctccatgaccccacacagggcaccgagcccaatggagaaggttgggagtggagtagcagtgatgtgatgaattactttgcatgggagagaaatccctccaccatctcaagccccggccactgtgcgagcctgtcgagaagcacagcatttctgaggtggaaagattataactgtaatgtgaggttaccctatgtctgcaagttcactgactagtgcaggagggaagtcagcagcctgtgtttggtgtgcaactcatcatgggcatgagaccagtgtgaggactcaccctggaagagaatattcgcttaattcccccaacctgaccacctcattcttatctttcttct

SEQ ID NO: 237522 - DNA, 528 bp, Artificial Sequence
  derived and/or modified sequence
atgcttcctcccatggctctgccttcagtctcttggatgctcctgtcttgtctcatgctcctgagccaggtgcagggcgaagaaccacaaagggaattaccaagcgctcggatacgttgtcctaagggctccaaggcatacggatctcactgctacgcgttattcttaagcccaaaatcatggacagacgccgatttagcttgtcaaaagcgacccagcgggaatctcgtgtccgtgctatctggagccgagggcagctttgtcagctcacttgtgaaaagtattggaaactcttatagttatgtttggatagggctgcacgacccaacacaaggcactgagcccaacggggagggttgggaatggtcatcatctgacgtgatgaattatttcgcgtgggagcgcaaccctagtacaatctcctcgcccggtcattgtgccagcctcagcaggtctaccgcattcttgagatggaaggactacaactgcaatgtcagattgccttacgtgtgcaagttcacagactag

SEQ ID NO: 237523 - DNA, 528 bp, Artificial Sequence
  derived and/or modified sequence
atgctacctccaatggcactgccatccgttagctggatgttactgagctgtctcatgctgctgtcccaagtccaaggagaagagcctcagagggaactgccaagcgctagaatcagatgtccaaaaggatcaaaagcatatggcagccactgttacgccctgtttctttcaccaaagtcctggaccgacgccgaccttgcatgccagaagagaccgtccgggaatcttgtgtccgtgctgagcggggccgaggggagcttcgtgtcctcactggtgaagtccattggtaattcttacagttatgtctggattgggctacacgaccctacgcagggtactgaacccaacggggaaggctgggagtggagttctagcgatgtgatgaactacttcgcttgggagaggaacccgtcaacaatcagttctcctggtcactgcgcctccctgtctcggtcaactgcatttttgcgctggaaggactataactgtaatgtgagactcccctatgtgtgtaaattcacagattag

SEQ ID NO: 237524 - DNA, 528 bp, Artificial Sequence
  derived and/or modified sequence
atgctgccccccatggcactgccttccgtgtcctggatgctgctgagctgcctgatgctcctgtctcaggtgcaaggcgaggagccgcagcgcgagttgccttctgctcgaatccgctgcccaaaaggctcaaaggcctatgggtctcattgctatgcactgtttctgagcccaaagagctggacagacgccgatttggcttgtcagaagcgacccagtgggaaccttgttagcgtcctgagcggagccgagggatcatttgtaagctctttggtgaagtcaatcggtaactcttatagctacgtgtggatcggtcttcacgatcctactcagggaacggagccaaacggggagggctgggaatggtctagcagtgatgtgatgaactactttgcctgggagcgaaatccctccactattagttctccagggcattgcgcctctctatcgcgaagtacggcgtttcttaggtggaaagactataattgcaatgtgcgcttaccatatgtatgcaaattcacagattag

SEQ ID NO: 237525 - DNA, 528 bp, Artificial Sequence
  derived and/or modified sequence
atgctgccccccatggccctgcccagcgtgtcctggatgctgctgagctgcctgatgctgctgagccaggtgcagggcgaggagccccagcgggagctgcccagcgcccgcatccgctgccccaagggcagcaaggcctacggcagccactgctacgccctcttcctgagccccaagtcctggacagatgctgacctggcctgccagaagaggccttctggcaacctggtgtctgtgctgtctggagctgagggcagctttgtgagcagcctggtgaagagcatcggcaacagctacagctatgtgtggattggcctgcatgaccccacccagggcacagagcccaacggggagggctgggagtggagcagcagtgatgtgatgaactactttgcctgggagaggaaccccagcaccatcagcagccctggccactgtgccagcctgagccgcagcacagccttcctgcgctggaaggactacaactgcaatgtgcggctgccctacgtgtgcaagttcacagactag

SEQ ID NO: 237526 - DNA, 528 bp, Artificial Sequence
  derived and/or modified sequence
atgctgccccccatggccctgcccagcgtgagctggatgctgctgagctgccttatgctcctgtctcaggtgcaaggcgaagagccacagagggagctgccttcagctaggattaggtgcccaaaggggtcgaaagcctacggcagccattgttatgcattgttcctgtcccccaagtcctggactgatgccgacctggcatgtcagaaacggccctcaggcaacctggtttccgtactgagcggagccgaaggctcctttgtgagctccctggttaagagcatcgggaactcttacagttatgtgtggattggactgcacgatcctacgcaaggaactgaacctaatggcgagggttgggaatggagctccagtgatgtcatgaactacttcgcttgggaacggaatcctagcaccattagttctcccgggcactgtgcctccttatcaaggtcaaccgcttttcttcgctggaaggactacaactgcaacgtgcgactgccctatgtgtgcaaatttaccgattag

SEQ ID NO: 237527 - DNA, 528 bp, Artificial Sequence
  derived and/or modified sequence
atgctgccccccatggccctgcccagcgtgagctggatgctgctgagttgtctgatgctcctcagtcaggtgcaaggcgaagagccacagagggagttgccctccgccagaatccggtgtccaaaaggatctaaggcgtacggtagccactgttatgcactcttcctatcccctaaaagctggaccgacgctgacctggcttgtcagaaaagaccgagtgggaatcttgttagcgtgctgtctggggcggagggcagcttcgtctcttctctggtaaaatctattgggaactcttattcctatgtgtggatcggacttcatgaccccacccagggaaccgagcccaatggggagggctgggagtggagttccagtgatgtgatgaactatttcgcttgggaaagaaaccccagtacgatctcatcccccggccactgcgcaagtttaagtcggtcaacagcctttctgagatggaaggactacaattgtaacgttcggttgccttatgtctgtaagttcacagattag

SEQ ID NO: 237528 - DNA, 528 bp, Artificial Sequence
  derived and/or modified sequence
atgctgccccccatggccctgcccagcgtgagctggatgctgctgtcatgtttaatgttgttatctcaagtgcagggggaagagccgcagagggagctcccatccgcccgcatcagatgtcccaagggctccaaggcctatggcagtcactgttatgctctgttcctttcaccaaaatcctggactgatgctgatctcgcatgtcagaagcggccctctgggaacctggtctccgttctgtcaggcgcagagggctcttttgtgagcagcctggtgaaatcaatcggtaactcatacagctacgtttggatcggacttcacgatcctactcagggcactgaacccaacggggaggggtgggaatggtcctctagtgatgtgatgaattacttcgcttgggaaaggaatccatcaacaatcagcagtccaggacactgcgccagtctttcccggtctactgcttttcttcggtggaaggactataattgcaacgtccgactcccgtatgtctgtaaattcaccgattag

SEQ ID NO: 237529 - DNA, 1002 bp, Artificial Sequence
  derived and/or modified sequence
gggagggtcccttcctcagggagcacaggaactctgagactcagcaagggtgtcctgggagggctcggggatgggagagtacacagattcacaactcattcagaactgtagaagatgatggatgtgaccaagatcactttagtcctaggggactagagaaggaaaatgacatgaggcagtggggtatctgtgtgttctcccactgaccacgctttctttagtgactcctgattgcctcctcaagtcgcagacactatgctgcctcccatggccctgcccagtgtatcttggatgctgctttcctgcctcatgctgctgtctcaggttcaaggtgaagaaccccagagggaactgccctctgcacggatccgctgtcccaaaggctccaaggcctatggctcccactgctatgccttgtttttgtcaccaaaatcctggacagatgcagatctggcctgccagaagcggccctctggaaacctggtgtctgtgctcagtggggctgagggatccttcgtgtcctccctggtgaagagcattggtaacagctactcatacgtctggattgggctccatgaccccacacagggcaccgagcccaatggagaaggttgggagtggagtagcagtgatgtgatgaattactttgcatgggagagaaatccctccaccatctcaagccccggccactgtgcgagcctgtcgagaagcacagcatttctgaggtggaaagattataactgtaatgtgaggttaccctatgtctgcaagttcactgactagtgcaggagggaagtcagcagcctgtgtttggtgtgcaactcatcatgggcatgagaccagtgtgaggactcaccctggaagagaatattcgcttaattcccccaacctgaccacctcattcttatctttcttctgtttcttcctccccgctgtcatttcagtctcttcattttgtcatacggcctaaggctttaaagagcaataaaatttttagtctgc

SEQ ID NO: 237530 - RNA, 528 nt, Artificial Sequence
  derived and/or modified sequence
augcuuccuccgauggcgcuaccaagugugucguggauguuacucuccugucuuaugcuauugucccaagugcaaggcgaggaaccucagcgagaacugcccucagcucgcauccgcuguccaaaagguagcaaagcuuauggaucucauuguuaugcacucuucuugagcccuaaauccuggacugacgccgaucucgcaugccagaagcggccauccgggaacuuggucagcguguugaguggugccgaagggucauucguauccucacugguaaagaguauagguaacagcuacucauauguuuggaucggccugcacgacccaacucaggggaccgaaccgaacggagaaggcugggaguggucuuccagugacgugaugaauuauuucgccugggagagaaacccaucgacgaucuccuccccuggccacugugccagcuugucccggaguaccgcguuucugagauggaaagauuauaauugcaacgucagacugcccuauguuugcaaguucacugauuag

SEQ ID NO: 237531 - RNA, 528 nt, Artificial Sequence
  derived and/or modified sequence
augcucccucccauggcacuccccuccguuaguuggaugcugcugucaugccucaugcugcucagccaaguacagggggaagaaccacagcgcgaauugccaucagccagaauucgcugucccaagggaagcaaagcuuacgggagccacugcuaugcucuauuccucagcccuaagagcuggaccgacgcagacuuagcaugucaaaaacgacccagcgggaaccugguuaguguguugucaggcgccgaagguucuuuuguuucaaguuuagucaaauccauugggaauagcuacaguuacguguggauaggccuucacgaccccacccagggaaccgagccuaauggcgagggcugggaguggagcagcagcgaugugaugaauuauuucgcaugggaaagaaauccaagcaccaucucgucucccggucacugcgcaucacuuucccgauccaccgcauuccuuagauggaaggacuacaauugcaacguaagacugcccuacguuuguaaauuuacugauuag

SEQ ID NO: 237532 - RNA, 528 nt, Artificial Sequence
  derived and/or modified sequence
augcuuccaccuauggcucugccuucuguuucauggaugcugcuuucuugcuugaugcuccugucacaaguccagggugaggaaccucaaagggaacugcccucugcuagaaucagauguccaaaaggcagcaaagcauauggaagucacugcuacgcguuguuccugucaccuaaaucauggacagaugccgaccuugccugccagaagaggccgucugggaaccucgugucaguccugucuggagccgaggguucuuuuguaagcucuuuagucaaaagcauaggaaacuccuacagcuauguguggauugggcugcacgacccaacucaaggaaccgagccuaacggggaggggugggaguggucuuccuccgaugucaugaauuacuucgcuugggaaaggaaucccucaacaauuagcucgcccggucauugcgcuucacuuucuagauccacugcuuuccuccgcuggaaagauuacaacuguaacgugcgucuccccuaugugugcaaauuuacugauuag

SEQ ID NO: 237533 - RNA, 528 nt, Artificial Sequence
  derived and/or modified sequence
augcuuccuccgauggcgcuaccaagugugucguggauguuacucuccugucuuaugcuauugucccaagugcaaggcgaggaaccucagcgagaacugcccucagcucgcauccgcuguccaaaagguagcaaagcuuauggaucucauuguuaugcacucuucuugagcccuaaauccuggacugacgccgaucucgcaugccagaagcggccauccgggaacuuggucagcguguugaguggugccgaagggucauucguauccucacugguaaagaguauagguaacagcuacucauacgucuggaucggccugcacgauccaacccagggcacagaaccaaacggcgaagggugggagugguccuccuccgaugucaugaacuauuuugccugggaaaggaacccaucuacgauuagcucucccggucacugcgcgucucucucaagguccaccgcuuuccucagguggaaggauuauaacuguaacguccgcuugccauacguauguaaauuuaccgacuag

SEQ ID NO: 237534 - RNA, 528 nt, Artificial Sequence
  derived and/or modified sequence
augcucccucccauggcacuccccuccguuaguuggaugcugcugucaugccucaugcugcucagccaaguacagggggaagaaccacagcgcgaauugccaucagccagaauucgcugucccaagggaagcaaagcuuacgggagccacugcuaugcucuauuccucagcccuaagagcuggaccgacgcagacuuagcaugucaaaaacgacccagcgggaaccugguuaguguguugucaggcgccgaagguucuuuuguuucaaguuuagucaaauccauugggaauagcuacaguuacguguggaucggacuccacgacccuacgcaggggacagaacccaacggugagggcugggaauggagcucgagcgauguuaugaauuacuuugcuugggagagaaaccccaguaccauaagcucaccuggacauugcgcaucccugucacgaaguacagccuuuuuacgcuggaaagauuacaauugcaacguacgccuccccuacguguguaaguucacggacuag

SEQ ID NO: 237535 - RNA, 528 nt, Artificial Sequence
  derived and/or modified sequence
augcuuccaccuauggcucugccuucuguuucauggaugcugcuuucuugcuugaugcuccugucacaaguccagggugaggaaccucaaagggaacugcccucugcuagaaucagauguccaaaaggcagcaaagcauauggaagucacugcuacgcguuguuccugucaccuaaaucauggacagaugccgaccuugccugccagaagaggccgucugggaaccucgugucaguccugucuggagccgaggguucuuuuguaagcucuuuagucaaaagcauaggaaacuccuacagcuauguuuggauaggccuacaugacccgacccaggggacugaaccuaauggugagggcugggaguggaguucuucagacguuaugaauuauuuugcuugggaaagaaauccuucaacaaucaguucuccaggccacugcgcgucacuaucacggaguacugcguuucuuagauggaaggacuacaacugcaacguucgucugcccuacguuugcaaguuuacagauuag

SEQ ID NO: 237536 - protein, 188 aa, Artificial Sequence
  derived and/or modified sequence
MLCPWRTANLGLLLILTIFLVAEAEGAAQPNNSLMLQTSKENHALASSSLCMDEKQITQNYSKVLAEVNTSWPVKMATNAVLCCPPIALRNLIIITWEIILRGQPSCTKAYKKETNETKETNCTDERITWVSRPDQNSDLQIRTVAITHDGYYRCIMVTPDGNFHRGYHLQVLGKEHHILRYFTSPDL

SEQ ID NO: 237537 - DNA, 567 bp, Artificial Sequence
  derived and/or modified sequence
atgctttgcccctggaggaccgccaacctgggcctactgcttatattaacaatcttcctggtggctgaagccgagggcgctgctcaacctaataatagcctcatgcttcagacgtctaaggagaaccatgctttagctagctcaagcttgtgcatggacgagaaacaaatcacacagaattactcaaaagtcctcgctgaagtgaatacgagttggccagtaaaaatggccactaacgcagttctgtgttgtccccccattgccttaaggaatctgattattatcacgtgggaaattattctccgcgggcagcctagctgtaccaaggcctataaaaaggagacgaatgagacaaaggaaactaattgtaccgatgagcgcattacctgggtcagcagacccgatcagaactccgaccttcaaattcgcacagtggcaattacgcacgacgggtattacagatgtattatggtcacaccagatgggaattttcaccgaggctaccacctgcaggtcctcggaaaggagcaccacatcctgcggtacttcacctcacccgatctgtag

SEQ ID NO: 237538 - DNA, 567 bp, Artificial Sequence
  derived and/or modified sequence
atgctgtgcccctggaggacagccaacctgggcctgctgctgatcctgaccatcttcctggtggccgaggccgagggcgccgcccagcccaacaacagcctgatgctgcagaccagcaaagaaaatcatgccctggccagcagcagcctgtgcatggatgagaagcagatcacccagaactacagcaaggtgctggccgaggtgaacacctcctggcctgtgaagatggccaccaatgctgtgctgtgctgcccccccatcgccctgaggaacctgatcatcatcacctgggagatcatcctgcggggccagcccagctgcaccaaggcctacaagaaggagaccaatgagaccaaggagaccaactgcacagatgagcgcatcacctgggtgtccaggccagaccagaacagcgacctgcagatcagaacagtggccatcacccatgatggctactaccgctgcatcatggtgaccccagatggcaacttccaccggggctaccacctgcaggtgctgggcaaggagcaccacatcctgcgctacttcaccagcccagacctgtag

SEQ ID NO: 237539 - DNA, 567 bp, Artificial Sequence
  derived and/or modified sequence
atgctgtgcccctggcggaccgccaacctgggcctgctgctgatccttacgatctttcttgtggcggaagccgaaggggcggcacagcccaacaactctttaatgttacagacctctaaagagaatcacgcgttagctagcagctccctgtgcatggacgagaagcagattactcagaattacagtaaggttttagcagaagtgaacacctcatggcccgtcaaaatggctaccaacgcagtcctttgctgccccccgattgcgctgcgcaacctgattataatcacttgggaaattatcttgcggggccagcccagctgtacaaaagcctataaaaaggaaacaaacgagacgaaggaaacaaattgcaccgacgagaggatcacttgggttagcaggcctgaccagaactccgacctgcagatccgtacggtggcaatcacgcacgatgggtactatcgctgtattatggtgacgcccgacgggaatttccaccggggataccatctccaagttctggggaaagagcaccacatcttgcgctattttacctccccagacctctag

SEQ ID NO: 237540 - DNA, 567 bp, Artificial Sequence
  derived and/or modified sequence
atgctgtgtccatggcgtacggcaaacctcggcctgctgctcatcctgacaattttcctcgtggccgaagctgaaggtgccgcacagccaaataattctttaatgctgcagactagcaaagaaaaccacgctctggcttcaagcagcctgtgcatggacgaaaagcagatcactcagaattacagtaaggtcctggctgaggtgaacacaagctggcctgttaagatggctaccaacgccgttctgtgctgcccaccaatcgccctaagaaatctcataattatcacctgggagattattctgagaggtcagccttcctgtactaaggcttataaaaaggaaaccaatgaaacaaaagagaccaattgtaccgacgaacgtataacctgggtgagcaggccggatcagaattccgacttgcaaatccgcacggttgctattacccacgatggctattaccgatgcatcatggtgacccctgacggcaatttccaccggggttatcatctgcaagtgctgggaaaggaacaccatattctgcgatacttcaccagccctgatttatag

SEQ ID NO: 237541 - DNA, 847 bp, Artificial Sequence
  derived and/or modified sequence
tgtacctgtgtggaggaaaagtactgagtgaagggcagaaaaagagaaaacagaaatgctctgcccttggagaactgctaacctagggctactgttgattttgactatcttcttagtggccgaagcggagggtgctgctcaaccaaacaactcattaatgctgcaaactagcaaggagaatcatgctttagcttcaagcagtttatgtatggatgaaaaacagattacacagaactactcgaaagtactcgcagaagttaacacttcatggcctgtaaagatggctacaaatgctgtgctttgttgccctcctatcgcattaagaaatttgatcataataacatgggaaataatcctgagaggccagccttcctgcacaaaagcctacaagaaagaaacaaatgagaccaaggaaaccaactgtactgatgagagaataacctgggtctccagacctgatcagaattcggaccttcagattcgtaccgtggccatcactcatgacgggtattacagatgcataatggtaacacctgatgggaatttccatcgtggatatcacctccaagtgttaggtaaggagcatcatatattgaggtatttcacatcaccagatttgtgacggaaacaaatgtctctctgaattccatatgctttatgtgaaaaccgaagcatttttttccctctttcctctctgcagttacacctgaagtgaccctgtttcaaaacaggaatagaactgcagtatgcaaggcagttgcagggaagccagctgcgcatatctcctggatcccagagggcgattgtgccactaagcaagaatactggagcaatggcacagtgactg

SEQ ID NO: 237542 - DNA, 567 bp, Artificial Sequence
  derived and/or modified sequence
atgctgtgcccctggagaaccgccaacctgggcctgctgctgatcctgaccatcttcctggtggccgaggccgagggcgccgcccagcccaacaacagcctgatgctgcagaccagcaaggagaaccacgccctggccagcagcagcctgtgcatggacgagaagcagatcacccagaactacagcaaggtgctggccgaggtgaacaccagctggcccgtgaagatggccaccaacgccgtgctgtgctgcccccccatcgccctgagaaacctgatcatcatcacctgggagatcatcctgagaggccagcccagctgcaccaaggcctacaagaaggagaccaacgagaccaaggagaccaactgcaccgacgagagaatcacctgggtgagcagacccgaccagaacagcgacctgcagatcagaaccgtggccatcacccacgacggctactacagatgcatcatggtgacccccgacggcaacttccacagaggctaccacctgcaggtgctgggcaaggagcaccacatcctgagatacttcaccagccccgacctgtag

SEQ ID NO: 237543 - protein, 165 aa, Artificial Sequence
  derived and/or modified sequence
MLCPWRTANLGLLLILTIFLVAASSSLCMDEKQITQNYSKVLAEVNTSWPVKMATNAVLCCPPIALRNLIIITWEIILRGQPSCTKAYKKETNETKETNCTDERITWVSRPDQNSDLQIRTVAITHDGYYRCIMVTPDGNFHRGYHLQVLGKEHHILRYFTSPDL

SEQ ID NO: 237544 - DNA, 498 bp, Artificial Sequence
  derived and/or modified sequence
atgctttgcccttggcggactgccaacttgggcctgctacttatactgacaatattcttagtagccgcctcatcttctttgtgtatggatgagaaacagattacgcaaaattactcaaaggtgctggccgaggtcaacacaagctggcctgtgaaaatggcaaccaacgccgtactttgctgccctcccattgctctaaggaacctgataataatcacctgggagatcattttacgagggcagccctcatgcacaaaggcttacaagaaggagacaaacgagacgaaggaaaccaactgtacagacgaacggatcacttgggttagccgccccgatcagaacagcgacttacaaattagaactgtcgcaattacccatgatggctattaccggtgtatcatggtcactccagacgggaacttccaccgggggtaccacttgcaagtgttggggaaggaacaccacattcttcggtactttacgagcccagatctctag

SEQ ID NO: 237545 - DNA, 498 bp, Artificial Sequence
  derived and/or modified sequence
atgctgtgcccctggaggacagccaacctgggcctgctgctgatcctgaccatcttcctggtggccgccagcagcagcctgtgcatggatgagaagcagatcacccagaactacagcaaggtgctggccgaggtgaacacctcctggcctgtgaagatggccaccaatgctgtgctgtgctgcccccccatcgccctgaggaacctgatcatcatcacctgggagatcatcctgcggggccagcccagctgcaccaaggcctacaagaaggagaccaatgagaccaaggagaccaactgcacagatgagcgcatcacctgggtgtccaggccagaccagaacagcgacctgcagatcagaacagtggccatcacccatgatggctactaccgctgcatcatggtgaccccagatggcaacttccaccggggctaccacctgcaggtgctgggcaaggagcaccacatcctgcgctacttcaccagcccagacctgtag

SEQ ID NO: 237546 - DNA, 498 bp, Artificial Sequence
  derived and/or modified sequence
atgctgtgcccctggcggaccgccaacctgggcctgctgctgatcctgactatatttctggtggccgccagctcaagcctttgcatggacgagaaacaaattactcagaattatagtaaggtgctggcagaggttaacacctcctggccggtgaagatggcgaccaatgccgtcctgtgttgccccccaatcgccttaaggaatctcataatcattacctgggaaatcatccttaggggccagccctcctgcacaaaggcttacaaaaaagagaccaatgaaacgaaagaaacgaactgcaccgacgaaaggattacttgggtttccagaccggatcagaattcggatcttcagatccgcaccgtagccattacacatgacgggtattacaggtgtatcatggtgacccctgatggcaactttcatcgcggatatcatttgcaagtgctggggaaagagcaccatattctgaggtattttactagccctgacctctag

SEQ ID NO: 237547 - DNA, 498 bp, Artificial Sequence
  derived and/or modified sequence
atgttgtgtccctggcgcacagccaatctcggcctgctactcatactcaccatcttcctagtggccgcatcaagctcactatgtatggacgagaagcagatcactcaaaattactctaaagtcctcgccgaagtgaatacttcttggcccgtgaaaatggctactaacgccgtgctttgctgccccccaatcgctctacggaatctcattattattacctgggagatcattcttaggggccagccctcatgcaccaaggcgtataaaaaagaaaccaatgagacaaaggagaccaactgcacagacgaaaggattacctgggtgagcagaccagaccaaaactcggacttacagatcagaaccgtggctattacccacgatggatactacaggtgcatcatggttactcccgatggcaactttcaccgcggatatcacctgcaagtgctgggtaaagaacatcacattttacggtactttaccagccctgacctctag

SEQ ID NO: 237548 - DNA, 778 bp, Artificial Sequence
  derived and/or modified sequence
tgtacctgtgtggaggaaaagtactgagtgaagggcagaaaaagagaaaacagaaatgctctgcccttggagaactgctaacctagggctactgttgattttgactatcttcttagtggccgcttcaagcagtttatgtatggatgaaaaacagattacacagaactactcgaaagtactcgcagaagttaacacttcatggcctgtaaagatggctacaaatgctgtgctttgttgccctcctatcgcattaagaaatttgatcataataacatgggaaataatcctgagaggccagccttcctgcacaaaagcctacaagaaagaaacaaatgagaccaaggaaaccaactgtactgatgagagaataacctgggtctccagacctgatcagaattcggaccttcagattcgtaccgtggccatcactcatgacgggtattacagatgcataatggtaacacctgatgggaatttccatcgtggatatcacctccaagtgttaggtaaggagcatcatatattgaggtatttcacatcaccagatttgtgacggaaacaaatgtctctctgaattccatatgctttatgtgaaaaccgaagcatttttttccctctttcctctctgcagttacacctgaagtgaccctgtttcaaaacaggaatagaactgcagtatgcaaggcagttgcagggaagccagctgcgcatatctcctggatcccagagggcgattgtgccactaagcaagaatactggagcaatggcacagtgactg

SEQ ID NO: 237549 - DNA, 498 bp, Artificial Sequence
  derived and/or modified sequence
atgctgtgcccctggagaaccgccaacctgggcctgctgctgatcctgaccatcttcctggtggccgccagcagcagcctgtgcatggacgagaagcagatcacccagaactacagcaaggtgctggccgaggtgaacaccagctggcccgtgaagatggccaccaacgccgtgctgtgctgcccccccatcgccctgagaaacctgatcatcatcacctgggagatcatcctgagaggccagcccagctgcaccaaggcctacaagaaggagaccaacgagaccaaggagaccaactgcaccgacgagagaatcacctgggtgagcagacccgaccagaacagcgacctgcagatcagaaccgtggccatcacccacgacggctactacagatgcatcatggtgacccccgacggcaacttccacagaggctaccacctgcaggtgctgggcaaggagcaccacatcctgagatacttcaccagccccgacctgtag

SEQ ID NO: 237550 - protein, 360 aa, Artificial Sequence [sequence omitted]

SEQ ID NO: 237551 - protein, 348 aa, Artificial Sequence
  derived and/or modified sequence
MVRGQVFDVGPRYTNLSYIGEGAYGMVCSAYDNVNKVRVAIKKISPFEHQTYCQRTLREIKILLRFRHENIIGINDIIRAPTIEQMKDVYIVQDLMETDLYKLLKTQHLSNDHICYFLYQILRGLKYIHSANVLHRDLKPSNLLLNTTCDLKICDFGLARVADPDHDHTGFLTEYVATRWYRAPEIMLNSKGYTKSIDIWSVGCILAEMLSNRPIFPGKHYLDQLNHILGILGSPSQEDLNCIINLKARNYLLSLPHKNKVPWNRLFPNADSKALDLLDKMLTFNPHKRIEVEQALAHPYLEQYYDPSDEPIAEAPFKFDMELDDLPKEKLKELIFEETARFQPGYRS

SEQ ID NO: 237552 - protein, 316 aa, Artificial Sequence
  derived and/or modified sequence
MAAAAAAGAGPEMVRGQVFDVGPRYTNLSYIGEGAYGMVCSAYDNVNKVRVAIKKISPFEHQTYCQRTLREIKILLRFRHENIIGINDIIRAPTIEQMKDVYIVQDLMETDLYKLLKTQHLSNDHICYFLYQILRGLKYIHSANVLHRDLKPSNLLLNTTCDLKICDFGLARVADPDHDHTGFLTEYVATRWYRAPEIMLNSKGYTKSIDIWSVGCILAEMLSNRPIFPGKHYLDQLNHILALDLLDKMLTFNPHKRIEVEQALAHPYLEQYYDPSDEPIAEAPFKFDMELDDLPKEKLKELIFEETARFQPGYRS

SEQ ID NO: 237553 - DNA, 1083 bp, Artificial Sequence
  derived and/or modified sequence
atggccgccgccgccgccgccggcgccggccccgagatggtgagaggccaggtgttcgacgtgggccccagatacaccaacctgagctacatcggcgagggcgcctacggcatggtgtgcagcgcctacgacaacgtgaacaaggtgagagtggccatcaagaagatcagccccttcgagcaccagacctactgccagagaaccctgagagagatcaagatcctgctgagattcagacacgagaacatcatcggcatcaacgacatcatcagagcccccaccatcgagcagatgaaggacgtgtacatcgtgcaggacctgatggagaccgacctgtacaagctgctgaagacccagcacctgagcaacgaccacatctgctacttcctgtaccagatcctgagaggcctgaagtacatccacagcgccaacgtgctgcacagagacctgaagcccagcaacctgctgctgaacaccacctgcgacctgaagatctgcgacttcggcctggccagagtggccgaccccgaccacgaccacaccggcttcctgaccgagtacgtggccaccagatggtacagagcccccgagatcatgctgaacagcaagggctacaccaagagcatcgacatctggagcgtgggctgcatcctggccgagatgctgagcaacagacccatcttccccggcaagcactacctggaccagctgaaccacatcctgggcatcctgggcagccccagccaggaggacctgaactgcatcatcaacctgaaggccagaaactacctgctgagcctgccccacaagaacaaggtgccctggaacagactgttccccaacgccgacagcaaggccctggacctgctggacaagatgctgaccttcaacccccacaagagaatcgaggtggagcaggccctggcccacccctacctggagcagtactacgaccccagcgacgagcccatcgccgaggcccccttcaagttcgacatggagctggacgacctgcccaaggagaagctgaaggagctgatcttcgaggagaccgccagattccagcccggctacagaagctag

SEQ ID NO: 237554 - DNA, 1047 bp, Artificial Sequence
  derived and/or modified sequence
atggtgagaggccaggtgttcgacgtgggccccagatacaccaacctgagctacatcggcgagggcgcctacggcatggtgtgcagcgcctacgacaacgtgaacaaggtgagagtggccatcaagaagatcagccccttcgagcaccagacctactgccagagaaccctgagagagatcaagatcctgctgagattcagacacgagaacatcatcggcatcaacgacatcatcagagcccccaccatcgagcagatgaaggacgtgtacatcgtgcaggacctgatggagaccgacctgtacaagctgctgaagacccagcacctgagcaacgaccacatctgctacttcctgtaccagatcctgagaggcctgaagtacatccacagcgccaacgtgctgcacagagacctgaagcccagcaacctgctgctgaacaccacctgcgacctgaagatctgcgacttcggcctggccagagtggccgaccccgaccacgaccacaccggcttcctgaccgagtacgtggccaccagatggtacagagcccccgagatcatgctgaacagcaagggctacaccaagagcatcgacatctggagcgtgggctgcatcctggccgagatgctgagcaacagacccatcttccccggcaagcactacctggaccagctgaaccacatcctgggcatcctgggcagccccagccaggaggacctgaactgcatcatcaacctgaaggccagaaactacctgctgagcctgccccacaagaacaaggtgccctggaacagactgttccccaacgccgacagcaaggccctggacctgctggacaagatgctgaccttcaacccccacaagagaatcgaggtggagcaggccctggcccacccctacctggagcagtactacgaccccagcgacgagcccatcgccgaggcccccttcaagttcgacatggagctggacgacctgcccaaggagaagctgaaggagctgatcttcgaggagaccgccagattccagcccggctacagaagctag

SEQ ID NO: 237555 - DNA, 951 bp, Artificial Sequence
  derived and/or modified sequence
atggccgccgccgccgccgccggcgccggccccgagatggtgagaggccaggtgttcgacgtgggccccagatacaccaacctgagctacatcggcgagggcgcctacggcatggtgtgcagcgcctacgacaacgtgaacaaggtgagagtggccatcaagaagatcagccccttcgagcaccagacctactgccagagaaccctgagagagatcaagatcctgctgagattcagacacgagaacatcatcggcatcaacgacatcatcagagcccccaccatcgagcagatgaaggacgtgtacatcgtgcaggacctgatggagaccgacctgtacaagctgctgaagacccagcacctgagcaacgaccacatctgctacttcctgtaccagatcctgagaggcctgaagtacatccacagcgccaacgtgctgcacagagacctgaagcccagcaacctgctgctgaacaccacctgcgacctgaagatctgcgacttcggcctggccagagtggccgaccccgaccacgaccacaccggcttcctgaccgagtacgtggccaccagatggtacagagcccccgagatcatgctgaacagcaagggctacaccaagagcatcgacatctggagcgtgggctgcatcctggccgagatgctgagcaacagacccatcttccccggcaagcactacctggaccagctgaaccacatcctggccctggacctgctggacaagatgctgaccttcaacccccacaagagaatcgaggtggagcaggccctggcccacccctacctggagcagtactacgaccccagcgacgagcccatcgccgaggcccccttcaagttcgacatggagctggacgacctgcccaaggagaagctgaaggagctgatcttcgaggagaccgccagattccagcccggctacagaagctag

SEQ ID NO: 237556 - DNA, 1083 bp, Artificial Sequence
  derived and/or modified sequence
atggccgctgccgcagcagccggcgctggtcccgaaatggttcgcgggcaggtgtttgatgttggaccaaggtacactaatctctcatatataggagagggagcttacgggatggtctgttcagcatacgacaacgtgaacaaggtgagagtcgccataaagaaaatctctccctttgagcaccagacatactgccagcgcaccctgagggagataaagatactcctccggttccggcacgagaacattatcggtattaacgacataataagggctcctaccattgaacagatgaaggatgtgtacatcgtgcaggatctcatggagactgatctttacaagctactaaaaacacagcatctcagtaacgatcacatctgctacttcctgtatcagatactgagggggctgaagtacattcactctgccaacgtgttacatcgagacctgaaaccaagtaatctacttctcaacaccacctgcgatttaaaaatttgtgactttgggctcgcccgagtggccgatcctgaccacgatcacacaggattcctgacagagtatgtggctactaggtggtacagggcgccagagatcatgctgaatagtaagggttacaccaagtcaatagatatatggtccgttgggtgtatcttggcagaaatgctctcaaacaggcctatcttccccggcaagcactatctggaccagttaaatcatatcctcggcatcctggggagccccagccaagaggatctgaattgtattatcaacctgaaagcgagaaactacctgctctctctaccccacaagaacaaagtaccctggaaccgcttatttcccaacgcagacagcaaggctctggacctactggataaaatgctgacatttaacccccataaacgaattgaagtcgagcaagctctggcccacccctatctcgagcagtattatgatccttctgacgaacctatagctgaggccccctttaaattcgatatggaattagacgatctgcccaaagagaaactaaaagagcttatctttgaagagaccgcccgattccagcctgggtatagaagctag

SEQ ID NO: 237557 - DNA, 1047 bp, Artificial Sequence
  derived and/or modified sequence
atggttcgaggacaggtctttgacgtggggcctaggtacaccaacttgtcctacattggtgagggcgcctacggaatggtatgctccgcttacgacaatgtgaataaagtcagggtagctataaagaagattagcccgtttgagcaccagacgtactgccaacgcacattgagagagataaagatacttctgagatttagacacgagaacatcattggaataaacgatatcatcagggcccccaccatagagcagatgaaggatgtatatattgtccaagatttgatggaaaccgatttatataagttgctaaagactcagcacctctcgaatgaccacatctgctacttcctctatcaaatcctccgcggattaaagtatatacactccgccaatgtgctacacagggacctcaagccctccaacttgttactcaatacgacatgtgaccttaagatctgtgacttcggactggctcgcgtggctgatccagaccatgaccacaccggcttcctgactgagtacgtggcaacacgatggtacagggctcctgaaataatgttaaacagcaaagggtacacgaaatcaatcgacatctggtctgtcggttgtattctggctgagatgctcagtaatagaccaatttttcccggaaagcattaccttgaccagcttaaccatattctcggcattctaggatcaccatcgcaggaggacctcaactgcatcattaaccttaaagctaggaactacctactctctttaccccacaagaataaagtgccctggaaccggttgttccccaatgccgattccaaggcactcgacttattagataagatgctaacattcaatccacacaagaggatcgaagtcgagcaggctctcgcgcacccctaccttgaacaatattacgacccctccgatgagccaatagccgaagctccgttcaagtttgacatggagctagacgatctccctaaagaaaagctcaaagagctgatctttgaggagaccgcgcggtttcagcccggttatcgtagttag

SEQ ID NO: 237558 - DNA, 951 bp, Artificial Sequence
  derived and/or modified sequence
atggcagccgctgcagcggcgggagcagggcccgagatggtgcgcggacaggtctttgatgtgggcccccgatacacaaatcttagctacattggagagggcgcgtacggcatggtgtgctctgcctacgacaacgtgaataaagtaagagtggccataaagaagatcagtcccttcgaacaccaaacctactgtcagagaacacttagggagataaagatactcctcaggttccggcacgagaatatcattggcatcaacgatattatcagggcgcccacaattgagcagatgaaagatgtgtatattgtccaggatcttatggagacagatctgtacaaactcctgaagacgcagcaccttagtaacgaccatatttgctactttctttaccaaatcttacggggactgaagtacattcattccgctaacgttctgcacagagatctgaagccatcgaatctcctgctgaataccacctgcgatctaaaaatttgcgattttggcctggcccgtgtcgctgaccccgaccacgaccacaccggattcctgaccgagtatgtagctaccagatggtatcgcgcacccgaaattatgctcaatagcaagggatatactaaatcaattgacatttggagtgtgggctgcatacttgcggagatgctgtcaaatcggcccatcttcccagggaagcattatctcgatcaactcaatcacatcctggccctggatctgttggacaagatgctcacgttcaacccacacaaaaggattgaggttgaacaagctctcgcccacccatatttagaacagtattatgacccttccgacgaaccaatcgccgaagcaccattcaagttcgacatggaacttgatgatctgccgaaagaaaagctcaaggaactgatatttgaggaaaccgctcgcttccagcctggctatcgcagctag

SEQ ID NO: 237559 - DNA, 1083 bp, Artificial Sequence
  derived and/or modified sequence
atggctgctgctgctgctgctggagctggccctgagatggtgcggggccaggtgtttgatgtgggcccccgctacaccaacctgagctacatcggggagggcgcctacggcatggtgtgcagcgcctatgacaacgtgaacaaggtgcgggtggccatcaagaagatcagcccctttgagcaccagacctactgccagaggaccctgcgggagatcaagatcctgctgcgcttcagacatgagaacatcatcggcatcaatgacatcatccgggcccccaccatcgagcagatgaaggatgtgtacatcgtgcaggacctgatggagacagacctgtacaagctgctgaagacccagcacctgagcaatgaccacatctgctacttcctgtaccagatcctgcggggcctgaagtacatccacagcgccaacgtgctgcaccgggacctgaagcccagcaacctgctgctgaacaccacctgtgacctgaagatctgtgactttggcctggcccgggtggccgaccctgaccatgaccacacaggcttcctgacagaatatgtggccacccgctggtaccgggcccctgagatcatgctgaacagcaagggctacaccaagagcattgacatctggagcgtgggctgcatcctggccgagatgctgagcaaccggcccatcttccctgggaagcactacctggaccagctgaaccacatcctgggcatcctgggcagccccagccaggaggacctgaactgcatcatcaacctgaaggccaggaactacctgctgagcctgccccacaagaacaaggtgccctggaacagactcttccccaatgctgacagcaaggccctggacctgctggacaagatgctgaccttcaacccccacaagagaattgaggtggagcaggccctggcccacccctacctggagcagtactatgaccccagtgatgagcccatcgccgaggcccccttcaagtttgacatggagctggatgacctgcccaaggagaagctgaaggagctgatctttgaggagacagcccgcttccagcccggctaccgctcctag

SEQ ID NO: 237560 - DNA, 1047 bp, Artificial Sequence
  derived and/or modified sequence
atggtgcggggccaggtgtttgatgtgggcccccgctacaccaacctgagctacatcggggagggcgcctacggcatggtgtgcagcgcctatgacaacgtgaacaaggtgcgggtggccatcaagaagatcagcccctttgagcaccagacctactgccagaggaccctgcgggagatcaagatcctgctgcgcttcagacatgagaacatcatcggcatcaatgacatcatccgggcccccaccatcgagcagatgaaggatgtgtacatcgtgcaggacctgatggagacagacctgtacaagctgctgaagacccagcacctgagcaatgaccacatctgctacttcctgtaccagatcctgcggggcctgaagtacatccacagcgccaacgtgctgcaccgggacctgaagcccagcaacctgctgctgaacaccacctgtgacctgaagatctgtgactttggcctggcccgggtggccgaccctgaccatgaccacacaggcttcctgacagaatatgtggccacccgctggtaccgggcccctgagatcatgctgaacagcaagggctacaccaagagcattgacatctggagcgtgggctgcatcctggccgagatgctgagcaaccggcccatcttccctgggaagcactacctggaccagctgaaccacatcctgggcatcctgggcagccccagccaggaggacctgaactgcatcatcaacctgaaggccaggaactacctgctgagcctgccccacaagaacaaggtgccctggaacagactcttccccaatgctgacagcaaggccctggacctgctggacaagatgctgaccttcaacccccacaagagaattgaggtggagcaggccctggcccacccctacctggagcagtactatgaccccagtgatgagcccatcgccgaggcccccttcaagtttgacatggagctggatgacctgcccaaggagaagctgaaggagctgatctttgaggagacagcccgcttccagcccggctaccgctcctag

SEQ ID NO: 237561 - DNA, 951 bp, Artificial Sequence
  derived and/or modified sequence
atggctgctgctgctgctgctggagctggccctgagatggtgcggggccaggtgtttgatgtgggcccccgctacaccaacctgagctacatcggggagggcgcctacggcatggtgtgcagcgcctatgacaacgtgaacaaggtgcgggtggccatcaagaagatcagcccctttgagcaccagacctactgccagaggaccctgcgggagatcaagatcctgctgcgcttcagacatgagaacatcatcggcatcaatgacatcatccgggcccccaccatcgagcagatgaaggatgtgtacatcgtgcaggacctgatggagacagacctgtacaagctgctgaagacccagcacctgagcaatgaccacatctgctacttcctgtaccagatcctgcggggcctgaagtacatccacagcgccaacgtgctgcaccgggacctgaagcccagcaacctgctgctgaacaccacctgtgacctgaagatctgtgactttggcctggcccgggtggccgaccctgaccatgaccacacaggcttcctgacagaatatgtggccacccgctggtaccgggcccctgagatcatgctgaacagcaagggctacaccaagagcattgacatctggagcgtgggctgcatcctggccgagatgctgagcaaccggcccatcttccctgggaagcactacctggaccagctgaaccacatcctggccctggacctgctggacaagatgctgaccttcaacccccacaagagaattgaggtggagcaggccctggcccacccctacctggagcagtactatgaccccagtgatgagcccatcgccgaggcccccttcaagtttgacatggagctggatgacctgcccaaggagaagctgaaggagctgatctttgaggagacagcccgcttccagcccggctaccgctcctag

SEQ ID NO: 237562 - DNA, 11022 bp, Artificial Sequence
  derived and/or modified sequence
aggcaatcggtccgagtggctgtcggctcttcagctctcccgctcggcgtcttccttcctcctcccggtcagcgtcggcggctgcaccggcggcggcgcagtccctgcgggaggggcgacaagagctgagcggcggccgccgagcgtcgagctcagcgcggcggaggcggcggcggcccggcagccaacatggcggcggcggcggcggcgggcgcgggcccggagatggtccgcgggcaggtgttcgacgtggggccgcgctacaccaacctctcgtacatcggcgagggcgcctacggcatggtgtgctctgcttatgataatgtcaacaaagttcgagtagctatcaagaaaatcagcccctttgagcaccagacctactgccagagaaccctgagggagataaaaatcttactgcgcttcagacatgagaacatcattggaatcaatgacattattcgagcaccaaccatcgagcaaatgaaagatgtatatatagtacaggacctcatggaaacagatctttacaagctcttgaagacacaacacctcagcaatgaccatatctgctattttctctaccagatcctcagagggttaaaatatatccattcagctaacgttctgcaccgtgacctcaagccttccaacctgctgctcaacaccacctgtgatctcaagatctgtgactttggcctggcccgtgttgcagatccagaccatgatcacacagggttcctgacagaatatgtggccacacgttggtacagggctccagaaattatgttgaattccaagggctacaccaagtccattgatatttggtctgtaggctgcattctggcagaaatgctttctaacaggcccatctttccagggaagcattatcttgaccagctgaaccacattttgggtattcttggatccccatcacaagaagacctgaattgtataataaatttaaaagctaggaactatttgctttctcttccacacaaaaataaggtgccatggaacaggctgttcccaaatgctgactccaaagctctggacttattggacaaaatgttgacattcaacccacacaagaggattgaagtagaacaggctctggcccacccatatctggagcagtattacgacccgagtgacgagcccatcgccgaagcaccattcaagttcgacatggaattggatgacttgcctaaggaaaagctcaaagaactaatttttgaagagactgctagattccagccaggatacagatcttaaatttgtcaggacaagggctcagaggactggacgtgctcagacatcggtgttcttcttcccagttcttgacccctggtcctgtctccagcccgtcttggcttatccactttgactcctttgagccgtttggaggggcggtttctggtagttgtggcttttatgctttcaaagaatttcttcagtccagagaattcctcctggcagccctgtgtgtgtcacccattggtgacctgcggcagtatgtacttcagtgcacctactgcttactgttgctttagtcactaattgctttctggtttgaaagatgcagtggttcctccctctcctgaatccttttctacatgatgccctgctgaccatgcagccgcaccagagagagattcttccccaattggctctagtcactggcatctcactttatgatagggaaggctactacctagggcactttaagtcagtgacagccccttatttgcacttcaccttttgaccataactgtttccccagagcaggagcttgtggaaataccttggctgatgttgcagcctgcagcaagtgcttccgtctccggaatccttggggagcacttgtccacgtcttttctcatatcatggtagtcactaacatatataaggtatgtgctattggcccagcttttagaaaatgcagtcatttttctaaataaaaaggaagtactgcacccagcagtgtcactctgtagttactgtggtcacttgtaccatatagaggtgtaacacttgtcaagaagcgttatgtgcagtacttaatgtttgtaagacttacaaaaaaagatttaaagtggcagcttcactcgacatttggtgagagaagtacaaaggttgcagtgctgagctgtgggcggtttctggggatgtcccagggtggaactccacatgctggtgcatatacgcccttgagctacttcaaatgtgggtgtttcagtaaccacgttccatgcctgaggatttagcagagaggaacactgcgtctttaaatgagaaagtatacaattctttttccttctacagcatgtcagcatctcaagttcatttttcaacctacagtataacaatttgtaataaagcctccaggagctcatgacgtgaagcactgttctgtcctcaagtactcaaatatttctgatactgctgagtcagactgtcagaaaaagctagcactaactcgtgtttggagctctatccatattttactgatctctttaagtatttgttcctgccactgtgtactgtggagttgactcggtgttctgtcccagtgcggtgcctcctcttgacttccccactgctctctgtggtgagaaatttgccttgttcaataattactgtaccctcgcatgactgttacagctttctgtgcagagatgactgtccaagtgccacatgcctacgattgaaatgaaaactctattgttacctctgagttgtgttccacggaaaatgctatccagcagatcatttaggaaaaataattctatttttagcttttcatttctcagctgtccttttttcttgtttgatttttgacagcaatggagaatgggttatataaagactgcctgctaatatgaacagaaatgcatttgtaattcatgaaaataaatgtacatcttctatcttcacattcatgttaagattcagtgttgctttcctctggatcagcgtgtctgaatggacagtcaggttcaggttgtgctgaacacagaaatgctcacaggcctcactttgccgcccaggcactggcccagcacttggatttacataagatgagttagaaaggtacttctgtagggtcctttttacctctgctcggcagagaatcgatgctgtcatgttcctttattcacaatcttaggtctcaaatattctgtcaaaccctaacaaagaagccccgacatctcaggttggattccctggttctctctaaagagggcctgcccttgtgccccagaggtgctgctgggcacagccaagagttgggaagggccgccccacagtacgcagtcctcaccacccagcccagggtgctcacgctcaccactcctgtggctgaggaaggatagctggctcatcctcggaaaacagacccacatctctattcttgccctgaaatacgcgcttttcacttgcgtgctcagagctgccgtctgaaggtccacacagcattgacgggacacagaaatgtgactgttaccggataacactgattagtcagttttcatttataaaaaagcattgacagttttattactcttgtttctttttaaatggaaagttactattataaggttaatttggagtcctcttctaaatagaaaaccatatccttggctactaacatctggagactgtgagctccttcccattccccttcctggtactgtggagtcagattggcatgaaaccactaacttcattctagaatcattgtagccataagttgtgtgctttttattaatcatgccaaacataatgtaactgggcagagaatggtcctaaccaaggtacctatgaaaagcgctagctatcatgtgtagtagatgcatcattttggctcttcttacatttgtaaaaatgtacagattaggtcatcttaattcatattagtgacacggaacagcacctccactatttgtatgttcaaataagctttcagactaatagcttttttggtgtctaaaatgtaagcaaaaaattcctgctgaaacattccagtcctttcatttagtataaaagaaatactgaacaagccagtgggatggaattgaaagaactaatcatgaggactctgtcctgacacaggtcctcaaagctagcagagatacgcagacattgtggcatctgggtagaagaatactgtattgtgtgtgcagtgcacagtgtgtggtgtgtgcacactcattccttctgctcttgggcacaggcagtgggtgtagaggtaaccagtagctttgagaagctacatgtagctcaccagtggttttctctaaggaatcacaaaagtaaactacccaaccacatgccacgtaatatttcagccattcagaggaaactgttttctctttatttgcttatatgttaatatggtttttaaattggtaacttttatatagtatggtaacagtatgttaatacacacatacatacgcacacatgctttgggtccttccataatacttttatatttgtaaatcaatgttttggagcaatcccaagtttaagggaaatatttttgtaaatgtaatggttttgaaaatctgagcaatccttttgcttatacatttttaaagcatttgtgctttaaaattgttatgctggtgtttgaaacatgatactcctgtggtgcagatgagaagctataacagtgaatatgtggtttctcttacgtcatccaccttgacatgatgggtcagaaacaaatggaaatccagagcaagtcctccagggttgcaccaggtttacctaaagcttgttgccttttcttgtgctgtttatgcgtgtagagcactcaagaaagttctgaaactgctttgtatctgctttgtactgttggtgccttcttggtattgtaccccaaaattctgcatagattatttagtataatggtaagttaaaaaatgttaaaggaagattttattaagaatctgaatgtttattcattatattgttacaatttaacattaacatttatttgtggtatttgtgatttggttaatctgtataaaaattgtaagtagaaaggtttatatttcatcttaattcttttgatgttgtaaacgtactttttaaaagatggattatttgaatgtttatggcacctgacttgtaaaaaaaaaaaactacaaaaaaatccttagaatcattaaattgtgtccctgtattaccaaaataacacagcaccgtgcatgtatagtttaattgcagtttcatctgtgaaaacgtgaaattgtctagtccttcgttatgttccccagatgtcttccagatttgctctgcatgtggtaacttgtgttagggctgtgagctgttcctcgagttgaatggggatgtcagtgctcctagggttctccaggtggttcttcagaccttcacctgtgggggggggggtaggcggtgcccacgcccatctcctcatcctcctgaacttctgcaaccccactgctgggcagacatcctgggcaaccccttttttcagagcaagaagtcataaagataggatttcttggacatttggttcttatcaatattgggcattatgtaatgacttatttacaaaacaaagatactggaaaatgttttggatgtggtgttatggaaagagcacaggccttggacccatccagctgggttcagaactaccccctgcttataactgcggctggctgtgggccagtcattctgcgtctctgctttcttcctctgcttcagactgtcagctgtaaagtggaagcaatattacttgccttgtatatggtaaagattataaaaatacatttcaactgttcagcatagtacttcaaagcaagtactcagtaaatagcaagtctttttaaatgctgctttatttcactaaattttgttgtgaggtgtcactaaaatgcctgcaaacaaacgtaactgctaatctgagaggaaaccctcttactaatcagagaagaaaccctcctgtcagaaaccttcagggaagtgagctgatcacacctaaactgggagtttgcaatggggtatttgaagcactgtgggagtattccactggccctctccctgagagacttaacagtcttccctgttgtccagattctgtataaggcaatcagaataatcatcttccttgttcagcagaggagcctggtcccattttccccactttgtgatgggcttctctcagcggtagctcagcagttccagatggcagtttggaccagcatctaggctggccagttcgctgtgtttacttagaaccaacacgttcagagctggcctggaccatctgaggggaacaggaaacacccctaggctgtggaagcaagtgcagacccccacccccggccctgaagccaagggggcagggtttgggagtggccaaagagaagcagtgcagggatgggttttcctagggacaggcttagcattcctgactctaggaagaaggagcagtgaggcggagaaacagtggaggggatggtggcattgggccccatggggccgagatggacacagggctcgttctcttgagtctggtgccaaggacagctgaagacgacatcattttcaggtggagaggagagagtggagggagatcatgccctgtgatgtgtcttttgcaggtgaaggtgggagacaaggtctctgctgacgatgaggcagagccaccgtgaaagttgtaataggaggactgcccgccgctggaagggcctgcagtgacgctaggacaccctctgcctgcatgtcacgttagctgggctgggcgaagtagaagaccaaggggaagaggtgcagtggggagaccaggtgggatgcaaccacaggaccagtggaggggctgtggcacgtgggcggagactgagtggctgggcatgtgttgtggctgagcatgtggtgtgggcagtggtcctagaccccgccatgtccggacaatgatatagagcgtctcagcatcgccagtctagactgtctatggagagcagaaagttgtctggggctgcctggggaactgtgaggccagctatatcaccgtcgctgatggtgacattacggtggtggcaggagcaaggagagagggaagaaggaccccgtccagctttagtcacaaaatacccaatggaagatgccagtgccaatcctgtgggtttccttgggacttcacactggctttcttatctgctccagatccattcagtagtcactgagttcctgccaaatactttgtagcgccagaagccaggagcggggtctgcagcagggcagtccccattttcaggaaatgcctggagctgctggtccctgagagaaaggaaaacatctttcagccgtacgcaggccaagaaggccaatgtccagtagctttgtgattttttttatatttttttatttatttatttttgagatagagtcttgctctgtcgctcaggctggagtgcagtggcgtgatctccactcactgcaacttccgcctcctggggtcaagcagttctgcctcagcctcccgagtagctgggattacaggcacacgccaccacacccagctaatttttgtgtttttagtagagacggtttcaccatgtcggccaggctggtctcaaactcctgacctcagatgattcagcctcccaaagtgctgggattacaggtgtgagccactgcacccagcctgtgatgtttctgtggggttccacaaatgtgtgtgtgtgtaaaagctgatgattacagcaagaatgtgaacagtagcagttttccatttgaaggcaagttttgtctttatctgggtatcagaaggaccctctgggccattgtcgcttcctgtactcagagccaccctagtactacgggcacacacagaaaacagcagcctgcgtactttcaaaggaaaggcatctttaatcaccaatgcctggaaaaattattttgtttccctcttccttccgtcttgtttcctaacttcttaccaaagtttagagtctgagtttttcgtataataatgtcccacatccacacatcgggcctacagatgctctcccttgaatcgactggaaacatgacaccggttccatgctctggaactgtcacctgtgatgtgctgggctgtgtcccaagcacaggaatcccagcagtttcagctcgatgcagaaccaccatgctccagacacaggcttgggaaagacacgtcaaaattaaaatactaggtaagagaagcacctgattgggtagaagttggagaggaatcctggaattttgtggccagaaggagccactgccccttttgtttagtaagactagacagtaacagaagccagttgtcagctatgaaagtggtgggtgaagcaggggaggctcctctatggtgggaccctggacaagggaagccgaatgtgtgaagaaggggtgcgggggtgtgcggtgccctaggacactagggcaaaggtttcaaacctggaacaaggcactggaggaagatctgctgccagtcagcagtgcgggccctcgagttagcagtccgtgcgcagaggggccagttctgagaccagtttggagagtcaggcagtgacccattggccatgtcataattccttcagcctgcctcctctttaatcccagagagtgctctttcttcatacttcctttaaaatactaaattgttcccattccatggggagctggctaggctttacaggctaggaaatgtaggttttctgagatggaaccatctacacaaggaggaggaaggcactaagactacagatgagacccatgacagggctgagcatttggaagccaaccctggttgcttttcaagaattgctttgtggctgggtgcagtggttcacacctgtaattgcagcactttgggaggctgaggcaggtggattgcttgaacccaggagttcgagaccagcctgggcaacatatgggacaccccaccgcccccggctctgcaaaaaaattaaaaattagccaggcgtggtgtcatgagcctgtggtctcaactactcaggaggctgaggctggaggatcgcttgaacctgggaggtcaaggctccagtgaaccataattgtgccactgcactgcagcctgggcgacaatttgttttctaaattgcttttgaaagtctactgcattacatattccaaaaagcagtggttttcaaatacttttatcaccgatatccttttatgaaatgaaatcagtagaactttctctgctctgaataagcaagggtgggaacctgtctacctcccacagatagcataatgtgcctgccatagaggagccaaaaaatggtgatgggaactgagaggagagcaaatgtcacaaaagactgagcaattgagaaaacaaaacaagaccacagatgactgttaacgcctccacagtggaccaagaaaggacagagagctggcagcatgggcatcactgtctggtcggcagcaggaaggcctcgctagggaattgagtacagtcatctaactagtttaaaagtacaggaaggatgattaaggctattggagaggtcatacaaataggggaggggcaggcaatggctgataagacatgaatttgtaaggcgatgagtattgcagtcagcaaaacaaacgagactgctctcccaacacataactcagcagggaggccaggcattggtttaaccatttaatataaagaagttaaaattacaaatgcgctaagtgcctaaagaagaataagtgcaggaatgagagcagcatggactgccacagttttagaataagcactgtcactgctagattggaaacaaaaatccataaatttggcccggtgtggtggcggacgcctgtagtcccagctacttggaggctgaggcgtgagaatcgcttgaacccgggaggcggaggttgcagtgagccgagatggcgccactgcactccagcctgggcgtcagagtgagaactctgtatcaaaaaataaaaataaaaaaaagtccataaatctgcaatgtctcagttaagaaagaaagactgggccaatgcagatttcaaaccggagaaagtcatactgtcagtgaaggccgcctgtggccggaaggcgccaggggattagcaccctggactcagtgttgctgggaaacagggccccaaggctgggagcacagtgtttaaagggcatctacccaagaagggagcacagggcaaggaggagctgcaggggggcttggctgccaaagtgaattctgaggagagagctattgctgcctacgatatgcaggctgcacagaacacaagtggaatcagcaggcaggagaggcagctaacgacgcagcccgtttcttatttctgttttctcacaagcgatgaaagtggaaaagagggtgagcaggtggcccacacatgtgcctccagtgctgcggcccctccggggaccatcagccaggccccggggagggagccagccacagtgtgtccggctcttctctgaagggaagagagccttgaatagactgaagcgaagacggttctgcaaggacaaggcagaccgaaggcattggttttttttttcagataaggagaattagactcccaagtagacaccagagtcactgtttggttggtgggtgatagtggggtcacagtggctgcctgtgctcccccagggtgagcgtgactgtgctaacctgggtggggcagcatgcacacccctctggcagccctttgttgctcgctgatgacaagtttggatgatcccgccaaacagcttgctaagatgtagtccccagtgttggaggtggggcctgatgggaggtgctacccttgtgagataaggttgtgtaaaagcctgtggcacctccccacactgacgctctcacccctgctctggccatgtgccgcgcctgctcccacttccccttctgccaggagtaaaagcccccgagacctcccagaagccaagcagatgctagtgccatgcttcctctgcagcctgcagaactgtgagccaattaaacctcttttctctataaa

SEQ ID NO: 237563 - DNA, 1487 bp, Artificial Sequence
  derived and/or modified sequence
gcccctccctccgcccgcccgccggcccgcccgtcagtctggcaggcaggcaggcaatcggtccgagtggctgtcggctcttcagctctcccgctcggcgtcttccttcctcctcccggtcagcgtcggcggctgcaccggcggcggcgcagtccctgcgggaggggcgacaagagctgagcggcggccgccgagcgtcgagctcagcgcggcggaggcggcggcggcccggcagccaacatggcggcggcggcggcggcgggcgcgggcccggagatggtccgcgggcaggtgttcgacgtggggccgcgctacaccaacctctcgtacatcggcgagggcgcctacggcatggtgtgctctgcttatgataatgtcaacaaagttcgagtagctatcaagaaaatcagcccctttgagcaccagacctactgccagagaaccctgagggagataaaaatcttactgcgcttcagacatgagaacatcattggaatcaatgacattattcgagcaccaaccatcgagcaaatgaaagatgtatatatagtacaggacctcatggaaacagatctttacaagctcttgaagacacaacacctcagcaatgaccatatctgctattttctctaccagatcctcagagggttaaaatatatccattcagctaacgttctgcaccgtgacctcaagccttccaacctgctgctcaacaccacctgtgatctcaagatctgtgactttggcctggcccgtgttgcagatccagaccatgatcacacagggttcctgacagaatatgtggccacacgttggtacagggctccagaaattatgttgaattccaagggctacaccaagtccattgatatttggtctgtaggctgcattctggcagaaatgctttctaacaggcccatctttccagggaagcattatcttgaccagctgaaccacattttgggtattcttggatccccatcacaagaagacctgaattgtataataaatttaaaagctaggaactatttgctttctcttccacacaaaaataaggtgccatggaacaggctgttcccaaatgctgactccaaagctctggacttattggacaaaatgttgacattcaacccacacaagaggattgaagtagaacaggctctggcccacccatatctggagcagtattacgacccgagtgacgagcccatcgccgaagcaccattcaagttcgacatggaattggatgacttgcctaaggaaaagctcaaagaactaatttttgaagagactgctagattccagccaggatacagatcttaaatttgtcaggtacctggagtttaatacagtgagctctagcaagggaggcgctgccttttgtttctagaatattatgttcctcaaggtccattattttgtattcttttccaagctccttattggaaggtatttttttaaatttagaattaaaaattatttagaaa

SEQ ID NO: 237564 - DNA, 1480 bp, Artificial Sequence
  derived and/or modified sequence
gtcagtctggcaggcaggcaggcaatcggtccgagtggctgtcggctcttcagctctcccgctcggcgtcttccttcctcctcccggtcagcgtcggcggctgcaccggcggcggcgcagtccctgcgggaggggcgacaagagctgagcggcggccgccgagcgtcgagctcagcgcggcggaggcggcggcgggcgcgggcccggagatggtccgcgggcaggtgttcgacgtggggccgcgctacaccaacctctcgtacatcggcgagggcgcctacggcatggtgtgctctgcttatgataatgtcaacaaagttcgagtagctatcaagaaaatcagcccctttgagcaccagacctactgccagagaaccctgagggagataaaaatcttactgcgcttcagacatgagaacatcattggaatcaatgacattattcgagcaccaaccatcgagcaaatgaaagatgtatatatagtacaggacctcatggaaacagatctttacaagctcttgaagacacaacacctcagcaatgaccatatctgctattttctctaccagatcctcagagggttaaaatatatccattcagctaacgttctgcaccgtgacctcaagccttccaacctgctgctcaacaccacctgtgatctcaagatctgtgactttggcctggcccgtgttgcagatccagaccatgatcacacagggttcctgacagaatatgtggccacacgttggtacagggctccagaaattatgttgaattccaagggctacaccaagtccattgatatttggtctgtaggctgcattctggcagaaatgctttctaacaggcccatctttccagggaagcattatcttgaccagctgaaccacattttgggtattcttggatccccatcacaagaagacctgaattgtataataaatttaaaagctaggaactatttgctttctcttccacacaaaaataaggtgccatggaacaggctgttcccaaatgctgactccaaagctctggacttattggacaaaatgttgacattcaacccacacaagaggattgaagtagaacaggctctggcccacccatatctggagcagtattacgacccgagtgacgagcccatcgccgaagcaccattcaagttcgacatggaattggatgacttgcctaaggaaaagctcaaagaactaatttttgaagagactgctagattccagccaggatacagatcttaaatttgtcaggacaagggctcagaggactggacgtgctcagacatcggtgttcttcttcccagttcttgacccctggtcctgtctccagcccgtcttggcttatccactttgactcctttgagccgtttggaggggcggtttctggtagttgtggcttttatgctttcaaagaatttcttcagtccagagaattcctcctggcagccctgtgtgtgtcacccatt

SEQ ID NO: 237565 - DNA, 951 bp, Artificial Sequence
  derived and/or modified sequence
atggcggcggcggcggcggcgggcgcgggcccggagatggtccgcgggcaggtgttcgacgtggggccgcgctacaccaacctctcgtacatcggcgagggcgcctacggcatggtgtgctctgcttatgataatgtcaacaaagttcgagtagctatcaagaaaatcagcccctttgagcaccagacctactgccagagaaccctgagggagataaaaatcttactgcgcttcagacatgagaacatcattggaatcaatgacattattcgagcaccaaccatcgagcaaatgaaagatgtatatatagtacaggacctcatggaaacagatctttacaagctcttgaagacacaacacctcagcaatgaccatatctgctattttctctaccagatcctcagagggttaaaatatatccattcagctaacgttctgcaccgtgacctcaagccttccaacctgctgctcaacaccacctgtgatctcaagatctgtgactttggcctggcccgtgttgcagatccagaccatgatcacacagggttcctgacagaatatgtggccacacgttggtacagggctccagaaattatgttgaattccaagggctacaccaagtccattgatatttggtctgtaggctgcattctggcagaaatgctttctaacaggcccatctttccagggaagcattatcttgaccagctgaaccacattttggctctggacttattggacaaaatgttgacattcaacccacacaagaggattgaagtagaacaggctctggcccacccatatctggagcagtattacgacccgagtgacgagcccatcgccgaagcaccattcaagttcgacatggaattggatgacttgcctaaggaaaagctcaaagaactaatttttgaagagactgctagattccagccaggatacagatcttaa

SEQ ID NO: 237566 - DNA, 1083 bp, Artificial Sequence
  derived and/or modified sequence
atggccgccgccgccgccgccggcgccggccccgagatggtgcggggacaggtgtttgacgtcgggcccagatacacaaatttatcttacatcggggaaggtgcgtacggtatggtctgctcagcatacgataacgtgaacaaggtgagagttgccatcaagaaaatttcccccttcgagcaccagacttattgccaacgcactctcagggaaatcaaaatcctgctcaggttcaggcacgaaaatatcatcggaattaatgatatcatcagggcgccaaccattgagcaaatgaaggatgtgtatattgtacaggatctcatggagacggacctttacaagctgctgaaaacacaacacctctcaaatgatcacatctgctactttctgtatcagatcttacgcggtctcaaatacatccactctgcgaatgtgctgcaccgggatctgaagccctctaatctgctgctaaacacaacttgcgacctaaagatctgtgactttgggcttgcgcgtgtcgccgaccctgatcatgaccacaccggtttcctgaccgaatacgtcgctacaagatggtatcgtgctcctgaaattatgttgaactctaaaggatacacaaagagtatcgatatctggtctgtgggttgcatcttggcggaaatgctctccaacaggccaatatttccgggaaaacattaccttgatcagctcaatcatatcctcgggatcttgggctctccgagccaggaggatctcaactgcatcattaatcttaaggctagaaactacttgctgagccttccacacaaaaacaaggtaccctggaaccgactcttccccaacgctgattccaaggcattggatctgttggacaagatgctgacatttaatcctcacaagcgcatcgaggttgagcaagccttggcccatccatatctggagcagtactacgacccgtcagacgagcccatcgcagaagctcccttcaagtttgatatggagctcgacgatttaccaaaagaaaaactgaaggagctgatttttgaagagaccgcgcgttttcagcccggataccggagctag

SEQ ID NO: 237567 - DNA, 1047 bp, Artificial Sequence
  derived and/or modified sequence
atggtgcggggccaggtgttcgacgtgggcccccggtacaccaacctgtcttacattggggagggggcatacggtatggtatgcagtgcgtacgataacgtaaataaagtaagagtggccattaagaagatatccccctttgagcaccagacgtactgccagcgaaccctacgtgaaataaagattctgctgcgctttcgccacgagaacatcatcggaatcaacgatattatacgggcccccactatcgagcagatgaaagacgtgtatatagtgcaagacctcatggagaccgatctctataagctgttaaaaacacagcacctctctaacgaccacatttgctactttctgtaccaaattcttagggggctgaaatatattcactctgcaaacgtgcttcacagagacctcaaaccgtccaatctgctgctgaatacgacctgtgacctaaagatttgtgacttcggcctggcacgtgtggccgacccggaccatgatcatacagggtttctgacagagtacgttgccacgagatggtaccgtgctcccgagatcatgcttaacagtaaaggctacaccaaatcaatcgatatctggtccgtcgggtgcatcctggccgagatgctgtctaaccgccccatcttcccggggaaacattacctcgaccagcttaatcacatcctcggaatcctgggatcaccttcccaggaagacctcaattgtatcatcaaccttaaagccagaaactacttgctcagtctgccccacaagaataaggtaccttggaatagactatttcctaacgccgattccaaggccctggatttactcgacaagatgctcacttttaatccgcataagaggatcgaggtggagcaggccctagctcacccatatttagagcagtactatgatcccagtgatgaacccattgctgaagccccctttaaattcgatatggaattagatgacctgcccaaggaaaagctaaaggagttgatttttgaagagacagctcgcttccagccaggctacaggagctag

SEQ ID NO: 237568 - DNA, 951 bp, Artificial Sequence
  derived and/or modified sequence
atggccgccgccgccgccgccggcgccggccccgagatggtgcggggacaagtattcgatgtgggccctcgctataccaatctgagttatattggagagggcgcctacggcatggtgtgctccgcttatgacaatgtcaacaaagtacgggtcgccataaagaaaataagtcccttcgagcatcagacctactgccaacgcacactgcgggaaatcaaaattttgcttaggttccggcacgagaacattatcgggatcaatgatattataagagctccaaccatagagcagatgaaagacgtttatatcgtgcaggacttaatggaaacagatctgtataagctcctgaaaactcagcatctctccaacgaccacatttgctactttctgtatcagatcctgagaggcctcaagtatattcactccgcaaatgtcttacatcgagatctgaagccatcaaacctcttgctgaacaccacgtgtgacctcaagatctgcgacttcggcctggcacgcgtggcggaccctgatcatgaccatactgggtttctgaccgaatacgtggccacccgttggtaccgggctccagagattatgcttaacagtaaggggtataccaaatccatagacatctggagcgttggctgtatcctggcagagatgctgtccaacaggccaatctttccgggtaaacattatttggaccagctgaatcatatcttggcactagatctcctggataaaatgctcacttttaacccccacaaaagaatcgaagtcgagcaggccctggcccacccctacctggagcagtactacgatccttccgacgagccaattgccgaggcgccatttaagtttgatatggagctcgacgacctgccaaaagagaaactgaaggaactgatcttcgaggagaccgcccgctttcaacctggatatcggagttag

SEQ ID NO: 237569 - DNA, 1083 bp, Artificial Sequence
  derived and/or modified sequence
atggctgcggctgcagcagccggtgccggaccggaaatggtgcgtggtcaggtctttgatgttggtccgaggtacaccaatctctcctatattggcgagggagcttacggcatggtatgttcagcttatgataatgtgaataaggtcagggttgcaatcaaaaagatttctccattcgagcaccagacttattgtcaacgcacattgagggagatcaagatattactgcgtttccgacacgaaaatatcatcggcattaacgacattatcagggcacctacaatagaacaaatgaaagacgtgtatattgtgcaggatttgatggagaccgacctatacaaactcttgaagacacagcacctctctaatgatcacatatgctattttttgtatcaaatcctgcgcggtctgaaatacatacactctgcaaatgttctccaccgtgacctgaagccgtcaaatctgctgttgaacactacttgcgacctgaagatctgtgacttcggcttggcacgcgtggctgaccctgaccatgatcataccggttttctgaccgagtatgtcgccacaaggtggtatcgtgcacccgagatcatgcttaactctaagggctacacaaaaagcatagatatctggtcagtaggctgcatactcgctgagatgctttctaatcgccctatcttccctggcaagcattatctagaccagctgaaccacatcctagggatcctcggatccccaagtcaggaggacctcaattgcatcatcaacctgaaggctaggaattatctcctgagcctccctcacaaaaacaaggtgccctggaacagactgtttccaaacgctgactccaaagcattagatctcctggataaaatgctgacattcaatccacacaaaaggatcgaagtcgagcaggcccttgcacatccttatctcgaacagtattacgacccatcagatgaacccattgcggaagcaccatttaagtttgacatggagctcgacgatctacctaaagagaaactgaaggaactcatcttcgaagaaaccgccagattccagccgggttatcgtagctag

SEQ ID NO: 237570 - DNA, 1047 bp, Artificial Sequence
  derived and/or modified sequence
atggtaagagggcaagtgttcgacgtcgggcctagatacaccaacctgagttacataggcgagggagcttatgggatggtctgcagcgcttatgacaacgtcaacaaggtgagggtggcgataaagaagatttctcccttcgaacatcagacttactgtcagaggactctgcgcgaaattaaaatcctgctgaggttcaggcatgagaatatcatcggaattaatgatatcatcagggcaccaaccatcgaacaaatgaaggacgtctacatcgtgcaggacctgatggaaactgatctctataagctcttaaagacacagcatttgtcaaacgatcacatttgttattttttataccagattctgcgcggactgaaatatatccacagcgcaaacgtgctgcatcgtgatctgaaaccttctaatctgctcctgaacactacctgtgatctgaagatttgcgactttggattggcacgggtggccgaccctgaccacgaccacaccgggttccttacagaatatgtagccactcgttggtatcgcgcacctgagatcatgctcaattcaaaaggctatacaaaatctatcgacatctggtccgtcgggtgcatactggcggagatgctgtctaaccggcctatcttccccggaaaacactacctggatcagcttaaccatatcctgggaatccttggatccccttcccaggaggacctaaattgtattatcaatctgaaagccaggaattacctgctctctttaccacataaaaacaaggtaccatggaaccgcctcttccccaatgccgactctaaggctttagacctgctcgataaaatgctgaccttcaaccctcataaacgcattgaggtcgagcaggccttagctcacccctacctggagcagtactacgatccatcagacgaacctatagccgaagctccctttaagttcgacatggagctggacgacctcccgaaggagaagctgaaggagctgatatttgaagagaccgccagatttcagcccggataccgctcctag

SEQ ID NO: 237571 - DNA, 951 bp, Artificial Sequence
  derived and/or modified sequence
atggcggctgcggctgcagccggagccggtcctgaaatggtgaggggacaagtgtttgacgtcgggccacgctacaccaacctatcatacatcggggagggagcctacggcatggtgtgcagtgcatatgataatgtgaataaagttcgcgtggccatcaagaagatttcaccctttgagcaccagacgtactgccaacggacactaagggagattaagatactgttacgctttagacatgaaaacattattggaattaacgacattatcagggctccaactattgagcagatgaaagacgtgtatatcgtacaggacctgatggaaacagatctctataagctattaaagacccagcatctgagcaatgaccacatatgttatttcctctaccagatcctcaggggtctgaagtacattcatagcgcaaatgttctgcaccgggatctgaagccttccaacctgttgctgaacaccacgtgtgacctgaaaatctgcgacttcgggctagcaagagtagctgatccagaccatgaccacaccggcttcctcacagagtatgtcgcaacgcggtggtatcgagcccctgagatcatgcttaattcgaaaggctacacaaagtcgattgacatatggtcggttggctgcattttagcggagatgcttagtaaccgacccatattcccagggaagcactacctcgaccagctcaaccatattcttgccttagacctattggataagatgctgaccttcaacccccacaaacgaattgaagttgagcaggccttggcacacccatacctggaacaatactacgaccctagcgacgagcccattgcagaggccccattcaagttcgacatggagctggacgatctgcctaaagagaagctcaaagagcttatcttcgaagaaactgcacgcttccagcccggatacaggagctag

SEQ ID NO: 237572 - DNA, 1083 bp, Artificial Sequence
  derived and/or modified sequence
atggctgctgctgctgcagccggcgccggtcccgagatggtgagaggtcaggtcttcgacgtgggtcccagatatacgaatttgtcatatattggagagggagcttacgggatggtgtgttctgcctatgacaacgtgaacaaggtgcgagtggctatcaaaaagatttctcctttcgaacatcaaacatactgtcaaaggacgctacgggagatcaaaatcctgctgcgtttcaggcacgaaaacataattggtatcaatgatataatcagagcccccactatagagcaaatgaaggacgtgtacattgtgcaagacctgatggaaaccgacctgtacaaactgctcaaaactcagcacctgagcaatgatcacatctgttattttctctaccagatcctgagaggattgaaatatatacactctgcaaacgttctgcatagggaccttaagccgtcaaacctccttttgaatacgacttgcgatctcaaaatttgtgacttcggccttgcacgggttgctgatcctgaccatgatcacacaggatttctgaccgaatatgtggcaacacggtggtaccgcgctccggaaattatgttgaattctaaaggatataccaagtccatcgatatctggtctgtggggtgtatactggcagagatgttgtctaatcggcctattttccctggcaagcactatctggaccaactaaatcatatcctgggcatcctgggatccccctcacaggaggacctgaattgtataattaatctaaaagcacggaattatttactgtctctgcctcacaagaacaaagtgccatggaaccgactattcccaaacgcggatagcaaagcacttgacctattggataaaatgctcaccttcaatccacacaagaggattgaggtggagcaggccctggcccacccgtatctggaacaatactatgacccatccgacgagccaattgccgaggctccttttaaatttgatatggaactggatgacctgcccaaggagaaactcaaggagctgatttttgaagaaactgcccgctttcaacctggctatcgttcctag

SEQ ID NO: 237573 - DNA, 1083 bp, Artificial Sequence
  derived and/or modified sequence
atggccgccgccgccgccgccggcgccggccccgagatggtgcgggggcaagtcttcgacgtcgggcctaggtacacaaacctgtcatacataggagaaggggcttatggaatggtgtgttctgcttatgacaatgtcaataaggtcagagtggccattaaaaaaatcagcccttttgagcatcagacttattgtcagcggacgctccgcgagattaagattctgctgcgttttagacatgagaacattatcgggatcaacgatatcatcagagcacccacaattgagcagatgaaggacgtatacattgtgcaggatttaatggagaccgacctgtacaaattgctgaagacccaacatttgtcaaacgaccacatctgctacttcctgtaccaaattcttcggggactgaaatatattcacagtgcaaacgtgctccaccgcgacttgaaaccatccaacctgctgctaaacacaacttgtgatcttaagatctgtgacttcggcttggctcgcgtagccgaccctgaccacgatcataccgggttcctgaccgagtatgtagccaccaggtggtacagggcacccgagattatgcttaattcgaagggttatacgaaaagcatcgacatatggtctgttggatgtattttggccgaaatgctcagcaaccggcccatcttcccagggaagcactacttggaccagttaaatcacatcctcgggatcttgggctccccttctcaggaagatctgaattgcattattaacctcaaagcaagaaattatctactgtctcttccacataaaaataaggtcccatggaacaggctcttcccgaacgccgacagcaaggccctcgatctgctcgataagatgcttacgtttaatccacataagagaattgaagtggagcaagctctggcacacccctatctggagcagtactacgacccctctgatgaacctatcgccgaagccccattcaaattcgatatggagctggatgacctccccaaggaaaagctcaaagaactaatctttgaagagaccgctcgcttccagcctggctacagatcatag

SEQ ID NO: 237574 - DNA, 1083 bp, Artificial Sequence
  derived and/or modified sequence
atggctgctgccgcagccgcaggtgcaggtccagagatggtgcgtggacaagtgtttgatgtggggccaaggtacacaaacctgagctatattggcgagggggcatatggaatggtatgctccgcctatgataacgttaataaggtgcgggttgcaatcaaaaaaatttccccatttgaacaccagacgtactgtcagagaacgcttcgagaaattaagattctgcttcgcttccggcacgaaaacatcattggcatcaatgacatcatccgcgctcccactatcgagcagatgaaggacgtgtacattgttcaagatctgatggaaacagacctgtataaacttcttaaaacgcagcacctctctaacgaccacatctgctacttcctgtatcagattctcagggggctgaaatatatccactcagctaatgtgctgcaccgggacctgaagccctccaatctcctccttaataccacttgcgacctgaagatctgcgatttcggcctggccagggtggcagacccagaccacgatcacactggattcctcactgagtatgtcgccacaagatggtacagggcgccagaaatcatgttgaacagcaaggggtataccaaatctatcgatatttggtctgtggggtgtatcctggccgaaatgctgtctaacagaccgatcttcccagggaagcattacctagatcagcttaaccacattctcggcattctgggatcacccagtcaggaagatcttaattgcattatcaacttgaaggccagaaactacctgttgtcgctgccccataaaaataaggtcccctggaatcgtcttttccccaacgcggatagtaaggccctcgatttgctggataagatgctaacctttaatccgcataaacggatcgaagtggagcaggcgctggctcatccttacctagaacagtactacgatcctagcgacgagccaatcgcagaggccccatttaagtttgatatggaacttgatgaccttcccaaggagaagctcaaagaactcatctttgaagaaaccgcgcgattccagcccggataccgatcttag

SEQ ID NO: 237575 - protein, 241 aa, Artificial Sequence
  derived and/or modified sequence
MEAAADGPAETQSPVEKDSPAKTQSPAQDTSIMSRNNADTGRVLALPEHKKKRKGNLPAESVKILRDWMYKHRFKAYPSEEEKQMLSEKTNLSLLQISNWFINARRRILPDMLQQRRNDPIIGHKTGKDAHATHLQSTEASVPAKSGPSGPDNVQSLPLWPLPKGQMSREKQPDPESAPSQKLTGIAQPKKKVKVSVTSPSSPELVSPEEHADFSSFLLLVDAAVQRAAELELEKKQEPNP

SEQ ID NO: 237576 - DNA, 726 bp, Artificial Sequence
  derived and/or modified sequence
atggaggccgccgccgacggccccgccgagacccagagccccgtggagaaggacagccccgccaagacccagagccccgcccaggacaccagcatcatgagcagaaacaacgccgacaccggcagagtgctggccctgcccgagcacaagaagaagagaaagggcaacctgcccgccgagagcgtgaagatcctgagagactggatgtacaagcacagattcaaggcctaccccagcgaggaggagaagcagatgctgagcgagaagaccaacctgagcctgctgcagatcagcaactggttcatcaacgccagaagaagaatcctgcccgacatgctgcagcagagaagaaacgaccccatcatcggccacaagaccggcaaggacgcccacgccacccacctgcagagcaccgaggccagcgtgcccgccaagagcggccccagcggccccgacaacgtgcagagcctgcccctgtggcccctgcccaagggccagatgagcagagagaagcagcccgaccccgagagcgcccccagccagaagctgaccggcatcgcccagcccaagaagaaggtgaaggtgagcgtgaccagccccagcagccccgagctggtgagccccgaggagcacgccgacttcagcagcttcctgctgctggtggacgccgccgtgcagagagccgccgagctggagctggagaagaagcaggagcccaacccctag

SEQ ID NO: 237577 - DNA, 726 bp, Artificial Sequence
  derived and/or modified sequence
atggaggcagccgccgatggcccagcagagacgcagagccccgtggagaaagactcaccggccaagactcaatcccctgctcaagatacttctataatgtcaagaaataacgccgatacaggccgagttctcgctctgccagagcataaaaaaaaacggaagggcaatcttcctgctgagagcgtcaaaatcttgagggattggatgtacaaacaccgtttcaaagcctacccctcagaggaagagaagcaaatgttgagcgaaaagacaaatctgagcctgctccagatctctaattggttcattaatgctcgcagacgaattttacctgacatgctgcagcaaaggcggaatgatcctataataggacacaagaccggaaaggacgctcacgccacccatctgcaatccactgaggcaagcgtgcctgccaagagcgggcccagcggtcctgacaacgttcagtcgctgccgctctggccgttgcccaagggacaaatgtcaagagaaaagcaaccagatcctgaatccgctccatctcaaaaactgaccgggatcgcccagcctaaaaagaaagtcaaggtgtctgttactagtccttcctctcctgagctcgtgagccccgaagagcacgcggatttttcatcgtttcttcttttagtagatgccgccgtacaaagggcggctgaacttgaattggagaagaaacaagaacccaatccatag

SEQ ID NO: 237578 - DNA, 726 bp, Artificial Sequence
  derived and/or modified sequence
atggaggcagccgcagacggacccgccgagacacagagtccagtcgagaaggactctccagctaagacccagtcaccagctcaggatacaagcataatgtcccgaaataatgcagatacaggaagggtgttggcactccctgaacataaaaaaaagagaaaaggcaaccttcccgctgagtctgtaaagatccttcgggactggatgtacaagcataggttcaaggcttacccctcagaggaagaaaaacagatgttgtccgagaagactaacttatcactgctacagatttctaactggttcatcaacgcgcgaaggcgaatcctgcccgacatgttacagcagagacggaatgaccctataattgggcacaagaccggaaaggatgcccatgccacccacttgcagagtacggaagccagtgtcccggctaagtctggcccctccggccctgataacgttcagtccctgcccttgtggcctcttccaaaaggtcagatgtcacgggaaaagcagcctgatcccgagtcagcccctagccagaagctgacgggcatcgcccagcccaaaaagaaagtgaaggtcagcgtgacgtcaccttcgagtcccgagcttgtgagtccggaggagcacgccgacttttcttctttccttctcttagttgatgctgctgtccaacgcgccgcagagctggaactggagaaaaaacaggaacctaacccgtag

SEQ ID NO: 237579 - DNA, 726 bp, Artificial Sequence
  derived and/or modified sequence
atggaggccgctgctgatggccctgctgagacccagagccctgtggagaaggacagccctgccaagacccagagccctgcccaggacaccagcatcatgagcagaaataatgctgacaccggccgggtgctggccctgcctgagcacaagaagaagaggaagggcaacctgcctgctgagagcgtgaagatcctgcgggactggatgtacaagcaccgcttcaaggcctaccccagcgaggaggagaagcagatgctgtctgagaagaccaacctgagcctgctgcagatcagcaactggttcatcaatgcccggcggcgcatcctgcctgacatgctgcagcagaggagaaatgaccccatcatcggccacaagacaggcaaggatgcccacgccacccacctgcagagcacagaggcctctgtgcctgccaagagcggccccagcggccctgacaacgtgcagagcctgcccctgtggcccctgcccaagggccagatgagccgggagaagcagcctgaccctgagagcgcccccagccagaagctgaccggcatcgcccagcccaagaagaaggtgaaggtgtctgtgaccagccccagcagccctgagctggtgtccccagaggagcacgccgacttcagcagcttcctgctgctggtggatgctgctgtgcagagagctgctgagctggagctggagaagaagcaggagcccaacccctag

SEQ ID NO: 237580 - DNA, 726 bp, Artificial Sequence
  derived and/or modified sequence
atggaggccgccgccgacggccccgccgagacccagagccccgtggagaaagattcccccgccaaaacacagtcccccgcacaggacacatcaataatgtcacggaataacgccgatactgggagagtgctggctctacctgaacacaagaaaaagaggaagggtaacttgcccgcggagtcggtcaagatattaagggactggatgtataagcatcgcttcaaggcgtatcctagcgaagaggaaaagcagatgctgtctgagaagacaaacctgagcctcctgcagataagcaattggtttattaacgctcgaaggaggattcttcccgatatgttgcaacaacggcggaacgatcctattattggccataaaactggaaaggatgctcacgcgacacatctacagtccacggaggcttccgtaccggccaaatccggcccctcgggcccagacaacgtgcagtctctgccactttggcctctccctaaggggcagatgtcacgcgaaaagcagcctgaccctgaaagtgctcctagccagaagctcacaggcatagcccagcccaagaagaaggttaaggtgtcagttaccagtccttcgagcccggagcttgtctccccagaagaacatgcagatttttcgagcttcttgctgcttgtggatgccgccgttcagcgagcggctgagctcgagctcgagaagaagcaggagcctaacccgtag

SEQ ID NO: 237581 - DNA, 726 bp, Artificial Sequence
  derived and/or modified sequence
atggaggccgccgccgacggccccgccgagacccagagccccgtggagaaggacagcccagccaaaacacagtcaccagcacaggatacaagcatcatgtcccgtaacaacgctgacacgggaagggttcttgctcttccagagcataaaaagaagagaaaaggaaatctccctgctgagagcgtgaagatcctcagagattggatgtacaagcaccgattcaaggcctatccctctgaggaagagaaacaaatgctgtcagagaagacaaatttatcattgttgcagattagcaattggttcattaacgctcggagaagaatcctgcccgacatgctgcagcagagacggaatgaccctatcatcggacataagacaggtaaagatgcccatgctacacatcttcagtcgacagaggcttctgtccccgcaaaatctgggccgtccggccctgacaatgtgcagagcctgcccctttggccgctacccaaggggcagatgagccgagaaaagcaacccgatcctgagagcgctcccagccagaaactgaccggaatagctcagcccaagaagaaggtgaaagtgtccgtgacctcccctagtagccccgaactggtctcacccgaagaacacgccgactttagctccttcttgctgctggtagatgccgctgtgcagcgagccgctgagctggagcttgaaaagaagcaggagccgaatccatag

SEQ ID NO: 237582 - DNA, 726 bp, Artificial Sequence
  derived and/or modified sequence
atggaggcagcagcagacggtcctgcggaaacccagtcgccagtcgagaaggatagcccagccaagacccaaagtcctgcacaggatacatccattatgagcagaaacaatgctgacactggcagagtgctggcgctgccagagcataagaaaaagagaaaagggaacttacctgctgagagcgtgaagatacttcgggattggatgtataaacacaggtttaaagcatacccttctgaggaggaaaagcagatgctgtccgagaagaccaacctgagcctgctccagatcagcaactggtttattaacgccaggcgtcggatcttaccggatatgctgcagcagcgaaggaacgaccccatcattggtcacaagacaggaaaagacgcccacgcgactcatctccaatccaccgaggcgagcgttcctgccaaatccggccctagcggaccagataacgttcagtctctgccattatggcctttaccaaaaggccagatgtcacgcgagaagcagcccgaccccgagtcagccccatcgcagaagttgaccgggattgcccagccgaagaaaaaggttaaggtctccgtgacctcaccaagctcaccagaactcgtgtctcctgaggagcacgcggacttttcatcttttctcctgctcgtcgacgccgcagtgcaacgggctgccgagctggagttagaaaagaagcaagagccaaatccctag

SEQ ID NO: 237583 - DNA, 726 bp, Artificial Sequence
  derived and/or modified sequence
atggaggccgcagccgatggaccagcagagacacaatctccagtggaaaaggatagtccagccaaaacccagtctcccgcacaggacacgagcataatgtcaagaaacaacgctgacaccggcagagtcctcgcccttccagaacataaaaagaaacgtaaaggcaatcttcccgctgagagtgtgaaaattctccgcgactggatgtacaagcacagattcaaggcctacccgtcggaagaagagaagcagatgctgtcagaaaagactaatttatctcttctgcaaatcagcaattggtttataaacgcacggagaaggatccttcccgatatgctgcagcaacgcagaaatgatccaattatcggacacaaaactggaaaggacgcacatgcaacccatctgcagtcaacagaagccagtgtgcctgcaaagtctggcccatcagggcctgataatgtgcagtccctgccactctggcccctgcctaaagggcagatgagtcgggaaaagcagcctgatccagaaagcgcaccgagtcagaaactaactggaattgcccagcccaaaaaaaaggttaaagtgtctgtcacctcgccgagttcacctgagctcgtgagtcctgaggagcacgctgacttcagctcgttcctgctgttggtcgacgctgctgtccagagagctgcggagctagagctcgaaaaaaaacaggaaccaaatccatag

SEQ ID NO: 237584 - DNA, 1008 bp, Artificial Sequence
  derived and/or modified sequence
aagaaaggatgtgacgtcactgagataaccagctcggctgttagcaactctgttagcaacgctgtttgtctttctcggaaacaacagtaacgataagcctcttggaatatggaggccgctgcggacggcccggctgagacccaaagcccggtggaaaaagacagcccggcgaagacccaaagcccagcccaagacacctcaatcatgtcgagaaataacgcagatacaggcagagttcttgccttaccagagcacaagaagaagcgcaagggaaacttgccagccgagtccgttaagatcctccgcgactggatgtataagcatcggtttaaggcctacccttcagaagaagagaagcaaatgctgtcagagaagaccaatttgtctttgttgcagatttctaactggtttatcaatgctcgcagacgcattctcccggatatgcttcaacagcgtagaaacgaccccatcattggccacaaaacgggcaaagatgcccatgccacccacctgcagagcaccgaggcgtctgtgccggccaagtcagggcccagtggtccagacaatgtacaaagcctgcccctgtggcccttgccaaagggccagatgtcaagagagaagcaaccagatccggagtcggcccctagccagaagctcaccggaatagcccagccgaagaaaaaggtcaaggtttctgtcacatccccgtcttctccagaacttgtgtctccagaggagcacgccgacttcagcagcttcctgctgctagtcgatgcagcagtacaaagggctgccgagctggagctagagaagaagcaagagcctaatccatgattgatgatgttccaaaaacccaagtagtcagtcccttatgtactgtggtaaacctgtttatgttcaccccaacttatttgtatgcttatcttttatagaggcatctttctttctagtggttttatgagaaccaatcttaattattgggactaaattctgtcagatatttcagtg

SEQ ID NO: 237585 - DNA, 856 bp, Artificial Sequence
  derived and/or modified sequence
tcggaaacaacaggtgagaattccccttacagacctgcccatgctttctaaagtggctctcccaaacctacctttgtcctaactcagttgtctgtgattctcaatatagtaacgataagcctcttggaatatggaggccgctgcggacggcccggctgagacccaaagcccggtggaaaaagacagcccggcgaagacccaaagcccagcccaagacacctcaatcatgtcgagaaataacgcagatacaggcagagttcttgccttaccagagcacaagaagaagcgcaagggaaacttgccagccgagtccgttaagatcctccgcgactggatgtataagcatcggtttaaggcctacccttcagaagaagagaagcaaatgctgtcagagaagaccaatttgtctttgttgcagatttctaactggtttatcaatgctcgcagacgcattctcccggatatgcttcaacagcgtagaaacgaccccatcattggccacaaaacgggcaaagatgcccatgccacccacctgcagagcaccgaggcgtctgtgccggccaagtcagggcccagtggtccagacaatgtacaaagcctgcccctgtggcccttgccaaagggccagatgtcaagagagaagcaaccagatccggagtcggcccctagccagaagctcaccggaatagcccagccgaagaaaaaggtcaaggtttctgtcacatccccgtcttctccagaacttgtgtctccagaggagcacgccgacttcagcagcttcctgctgctagtcgatgcagcagtacaaagggctgccgagctggagctagagaagaagcaagagcctaatccatga

SEQ ID NO: 237586 - protein, 390 aa, Artificial Sequence
  derived and/or modified sequence
MISLPGPLVTNLLRFLFLGLSALAPPSRAQLQLHLPANRLQAVEGGEVVLPAWYTLHGEVSSSQPWEVPFVMWFFKQKEKEDQVLSYINGVTTSKPGVSLVYSMPSRNLSLRLEGLQEKDSGPYSCSVNVQDKQGKSRGHSIKTLELNVLVPPAPPSCRLQGVPHVGANVTLSCQSPRSKPAVQYQWDRQLPSFQTFFAPALDVIRGSLSLTNLSSSMAGVYVCKAHNEVGTAQCNVTLEVSTGPGAAVVAGAVVGTLVGLGLLAGLVLLYHRRGKALEEPANDIKEDAIAPRTLPWPKSSDTISKNGTLSSVTSARALRPPHGPPRPGALTPTPSLSSQALPSPRLPTTDGAHPQPISPIPGGVSSSGLSRMGAVPVMVPAQSQAGSLV

SEQ ID NO: 237587 - DNA, 1173 bp, Artificial Sequence
  derived and/or modified sequence
atgatcagcttgcctggcccattggtgaccaatcttctgagattcctgttcctggggctctccgccttggccccaccaagccgggcacaactccagctgcacctcccagccaaccggcttcaggccgtggaaggaggggaggtcgtgctgccggcatggtacaccctacacggcgaggtttcatcttcgcagccatgggaggttcccttcgtgatgtggttttttaaacagaaggagaaggaagatcaggtcttgagttacataaatggagtgaccacctctaagccgggcgtttcccttgtctactctatgcccagcagaaatctctccctcaggctggagggtctacaggagaaggacagcgggccctattcctgctcagtaaacgtccaagacaaacagggaaagagcagaggacactccattaaaaccttggagctcaacgtgttggttcctccagcgccaccctcctgcaggcttcagggggtccctcatgtaggagctaatgtcacactctcttgtcagagccccagaagcaaacccgctgtccagtatcagtgggaccgacagcttccatcattccagacttttttcgcacctgcacttgacgtgataaggggttccctttctctaactaacttatcgagctctatggcaggggtgtatgtctgtaaagcacataacgaggtcgggactgctcagtgtaacgtcactctcgaggtgtccacaggcccgggtgccgccgtcgtggccggcgccgttgtgggcactctggttggactcggactgctggctggactcgtccttctgtaccaccgcaggggtaaagctctggaagaacccgccaatgatattaaagaggatgccattgccccaagaacgctcccatggccaaagagttccgatacaatctctaaaaatggtaccctctcttctgttacctcagcccgcgcgctacgtcccccacacggtccacccaggcccggggcgctcacgcctactcccagcctgagtagtcaagcactgccgagcccgcgcttacctaccacagacggggctcatccccagcccatcagtccaattccaggaggtgttagttccagcggactgagccgaatgggagctgtacctgttatggtcccggctcagagtcaggcaggatctttggtgtag

SEQ ID NO: 237588 - DNA, 1173 bp, Artificial Sequence
  derived and/or modified sequence
atgatcagcctgcccggccccctggtgaccaacctgctgcgcttcctgttcctgggcctgagcgccctggccccacccagccgggcccagctgcagctgcacctgcctgccaaccggctgcaggccgtggagggcggggaggtggtgctgcctgcctggtacaccctgcatggagaggtgagcagcagccagccctgggaggtgccctttgtgatgtggttcttcaagcagaaggagaaggaggaccaggtgctgagctacatcaatggagtgaccaccagcaagccaggagtgtccctggtgtacagcatgcccagcaggaacctgagcctgcggctggagggcctgcaggagaaggacagcggcccctacagctgcagcgtgaatgtgcaggacaagcagggcaagagccggggccacagcatcaagaccctggagctgaatgtgctggtgcccccagccccacccagctgccgcctgcagggcgtgccccacgtgggcgccaacgtgaccctgagctgccagagccccaggagcaagccagctgtgcagtaccagtgggaccggcagctgcccagcttccagaccttctttgccccagccctggatgtgatccggggcagcctgagcctgaccaacctgagcagctccatggccggcgtgtatgtgtgcaaggcccacaatgaggtgggcacagcccagtgcaatgtgaccctggaggtgtccactggacctggagctgctgtggtggccggggctgtggtgggcaccctggtgggcctgggcctgctggccggcctggtgctgctgtaccacagaagaggcaaggccctggaggagcccgccaatgacatcaaggaggatgccatcgcccccaggaccctgccctggcccaagagcagtgacaccatcagcaagaatggcaccctgagctctgtgaccagcgcccgggccctgcggccccctcatggcccccccaggcctggggccctgacccccacccccagcctgagcagccaggccctgcccagcccccggctgcccaccacagatggagcccacccccagcccatcagccccatccctgggggcgtgagcagcagcggcctgagcaggatgggcgctgtgcctgtgatggtgcctgcccagagccaggccggcagcctggtgtag

SEQ ID NO: 237589 - DNA, 1173 bp, Artificial Sequence
  derived and/or modified sequence
atgatcagcctgcccggccccctggtgaccaacctgctgcggttcttgttcctgggactgtcagctcttgccccaccttctcgggcccagctgcagctgcacctgccagccaacaggctgcaagcggtggagggcggtgaagtggtcctgccagcttggtatactctgcacggcgaggtgtcttcaagtcagccatgggaggtcccttttgtcatgtggtttttcaaacaaaaagaaaaagaagaccaagtcttgtcatatattaacggggttaccacaagtaaaccgggagtgtcactggtgtactctatgccaagcagaaatcttagcctgagactggagggcctccaagagaaagactctggcccgtattcctgttcagtgaacgtgcaggataaacaagggaaaagtagaggccatagtattaaaactctcgagctgaacgtactggtgccacctgcaccccctagctgcaggcttcagggagtcccgcacgttggtgcaaacgtcaccttgtcctgtcagagtccgcgctctaagccagccgtgcagtaccagtgggatagacagctgccttcattccagacattttttgcgcctgccctggatgttattagaggcagcctcagcctgacaaatttgtcatcctcaatggcaggcgtatatgtctgcaaggcgcataatgaagtcggaactgcccagtgcaacgtgactttggaggtaagcaccggcccgggtgcagccgtagtagccggggccgtggttggcacacttgtaggtttgggattactggccggacttgtcctcctctatcacagaagaggcaaagccctggaagagcctgctaacgatattaaagaggacgccatcgccccaaggacccttccttggcccaaaagctctgatacaattagcaagaacggtaccctgtccagtgtgacctccgcacgcgctcttcggccaccacacggccctcctcggcctggtgcgctcactccaactcccagtctctcttcacaagctctcccaagcccacgcctgccaacaaccgacggtgctcaccctcaacctatatccccaattccaggtggcgtgtcttccagcggcttgagtaggatgggtgcagtcccggtgatggttccagctcagtcacaagcgggaagcctggtgtag

SEQ ID NO: 237590 - DNA, 1173 bp, Artificial Sequence
  derived and/or modified sequence
atgatctccctgcccggaccactcgtgactaaccttctccggttcctcttcttaggactgtccgcgctcgctccaccttcacgggctcagctccagttacatctccccgcaaatcgcctgcaagccgtggaaggcggtgaggtcgtgttgcccgcttggtacactctgcacggagaagtgagttcctcacaaccatgggaagtcccttttgtaatgtggtttttcaagcagaaagaaaaggaagatcaggtgctgagctatataaacggtgtgaccacgtcaaagccaggagtgagtctcgtttattccatgccatcccgcaatctttccctgcgcttagaggggctgcaggagaaggactctggaccctattcatgcagtgttaacgttcaggataagcaaggaaagtctcgcggacactctattaaaacccttgagttgaatgttctagtgcctcctgctccaccaagttgcagactccaaggcgtgccccacgtgggcgctaacgtaactctcagctgtcaatccccccgttcaaagccggcagtccagtatcagtgggacaggcagctcccttcctttcaaacctttttcgcaccagcactcgacgtgataagaggttccctgtctttgacgaatctgagttcctcaatggcaggcgtgtatgtttgtaaggcccataacgaggtcggaactgcgcagtgcaatgttacgcttgaggtctcaaccggacccggtgcagctgtggtggctggagcggtagttggaactctggtcgggttgggcctgcttgccggactggtgctcctttaccaccgtcgcggtaaggccttagaggaacctgcaaatgacataaaggaagatgccatcgccccacggactctgccttggccaaagtccagcgacaccattagcaaaaatgggacactgagtagcgtgacttctgctagagctctcagacccccacatggacccccacggcctggtgctttgacgccaaccccgtcactgtcatcacaggccctccctagccccaggcttcccactacagatggcgcacatccccaacccatctctcccatccccggtggggtctctagctcaggcctgagccgaatgggcgcagtgccagtgatggtgccagcccagtcacaggccggttccctagtttag

SEQ ID NO: 237591 - DNA, 1173 bp, Artificial Sequence
  derived and/or modified sequence
atgatcagcctgcccggccccctggtgaccaacctgctgagattcctgttcctgggcctgagcgccctggccccccccagcagagcccagctgcagctgcacctgcccgccaacagactgcaggccgtggagggcggcgaggtggtgctgcccgcctggtacaccctgcacggcgaggtgagcagcagccagccctgggaggtgcccttcgtgatgtggttcttcaagcagaaggagaaggaggaccaggtgctgagctacatcaacggcgtgaccaccagcaagcccggcgtgagcctggtgtacagcatgcccagcagaaacctgagcctgagactggagggcctgcaggagaaggacagcggcccctacagctgcagcgtgaacgtgcaggacaagcagggcaagagcagaggccacagcatcaagaccctggagctgaacgtgctggtgccccccgccccccccagctgcagactgcagggcgtgccccacgtgggcgccaacgtgaccctgagctgccagagccccagaagcaagcccgccgtgcagtaccagtgggacagacagctgcccagcttccagaccttcttcgcccccgccctggacgtgatcagaggcagcctgagcctgaccaacctgagcagcagcatggccggcgtgtacgtgtgcaaggcccacaacgaggtgggcaccgcccagtgcaacgtgaccctggaggtgagcaccggccccggcgccgccgtggtggccggcgccgtggtgggcaccctggtgggcctgggcctgctggccggcctggtgctgctgtaccacagaagaggcaaggccctggaggagcccgccaacgacatcaaggaggacgccatcgcccccagaaccctgccctggcccaagagcagcgacaccatcagcaagaacggcaccctgagcagcgtgaccagcgccagagccctgagacccccccacggcccccccagacccggcgccctgacccccacccccagcctgagcagccaggccctgcccagccccagactgcccaccaccgacggcgcccacccccagcccatcagccccatccccggcggcgtgagcagcagcggcctgagcagaatgggcgccgtgcccgtgatggtgcccgcccagagccaggccggcagcctggtgtag

SEQ ID NO: 237592 - DNA, 1826 bp, Artificial Sequence
  derived and/or modified sequence
gggctggagccgccctgggtgtcagcggctcggctcccgcgcacgctccggccgtcgcgcagcctcggcacctgcaggtccgtgcgtcccgcggctggcgcccctgactccgtcccggccagggagggccatgatttccctcccggggcccctggtgaccaacttgctgcggtttttgttcctggggctgagtgccctcgcgcccccctcgcgggcccagctgcaactgcacttgcccgccaaccggttgcaggcggtggagggaggggaagtggtgcttccagcgtggtacaccttgcacggggaggtgtcttcatcccagccatgggaggtgccctttgtgatgtggttcttcaaacagaaagaaaaggaggatcaggtgttgtcctacatcaatggggtcacaacaagcaaacctggagtatccttggtctactccatgccctcccggaacctgtccctgcggctggagggtctccaggagaaagactctggcccctacagctgctccgtgaatgtgcaagacaaacaaggcaaatctaggggccacagcatcaaaaccttagaactcaatgtactggttcctccagctcctccatcctgccgtctccagggtgtgccccatgtgggggcaaacgtgaccctgagctgccagtctccaaggagtaagcccgctgtccaataccagtgggatcggcagcttccatccttccagactttctttgcaccagcattagatgtcatccgtgggtctttaagcctcaccaacctttcgtcttccatggctggagtctatgtctgcaaggcccacaatgaggtgggcactgcccaatgtaatgtgacgctggaagtgagcacagggcctggagctgcagtggttgctggagctgttgtgggtaccctggttggactggggttgctggctgggctggtcctcttgtaccaccgccggggcaaggccctggaggagccagccaatgatatcaaggaggatgccattgctccccggaccctgccctggcccaagagctcagacacaatctccaagaatgggaccctttcctctgtcacctccgcacgagccctccggccaccccatggccctcccaggcctggtgcattgacccccacgcccagtctctccagccaggccctgccctcaccaagactgcccacgacagatggggcccaccctcaaccaatatcccccatccctggtggggtttcttcctctggcttgagccgcatgggtgctgtgcctgtgatggtgcctgcccagagtcaagctggctctctggtatgatgaccccaccactcattggctaaaggatttggggtctctccttcctataagggtcacctctagcacagaggcctgagtcatgggaaagagtcacactcctgacccttagtactctgcccccacctctctttactgtgggaaaaccatctcagtaagacctaagtgtccaggagacagaaggagaagaggaagtggatctggaattgggaggagcctccacccacccctgactcctccttatgaagccagctgctgaaattagctactcaccaagagtgaggggcagagacttccagtcactgagtctcccaggcccccttgatctgtaccccacccctatctaacaccacccttggctcccactccagctccctgtattgatataacctgtcaggctggcttggttaggttttactggggcagaggatagggaatctcttattaaaactaacatgaaatatgtgttgttttcatttgcaaatttaaataaagatacataatgtttgtatgagataagaaacaa

SEQ ID NO: 237593 - protein, 328 aa, Artificial Sequence
  derived and/or modified sequence
MEANGSQGTSGSANDSQHDPGKMFIGGLSWQTSPDSLRDYFSKFGEIRECMVMRDPTTKRSRGFGFVTFADPASVDKVLGQPHHELDSKTIDPKVAFPRRAQPKMVTRTKKIFVGGLSANTVVEDVKQYFEQFGKVEDAMLMFDKTTNRHRGFGFVTFENEDVVEKVCEIHFHEINNKMVECKKAQPKEVMFPPGTRGRARGLPYTMDAFMLGMGMLGYPNFVATYGRGYPGFAPSYGYQFPGFPAAAYGPVAAAAVAAARGSGSNPARPGGFPGANSPGPVADLYGPASQDSGVGNYISAASPQPGSGFGHGIAGPLIATAFTNGYH

SEQ ID NO: 237594 - protein, 267 aa, Artificial Sequence
  derived and/or modified sequence
MMRGYIKKVLKNTSYHVNQYLFIQHGWSGSGDQSVLYSCNLMRMVTRTKKIFVGGLSANTVVEDVKQYFEQFGKVEDAMLMFDKTTNRHRGFGFVTFENEDVVEKVCEIHFHEINNKMVECKKAQPKEVMFPPGTRGRARGLPYTMDAFMLGMGMLGYPNFVATYGRGYPGFAPSYGYQFPGFPAAAYGPVAAAAVAAARGSGSNPARPGGFPGANSPGPVADLYGPASQDSGVGNYISAASPQPGSGFGHGIAGPLIATAFTNGYH

SEQ ID NO: 237595 - DNA, 804 bp, Artificial Sequence
  derived and/or modified sequence
atgatgagaggctacatcaagaaggtgctgaagaacaccagctaccacgtgaaccagtacctgttcatccagcacggctggagcggcagcggcgaccagagcgtgctgtacagctgcaacctgatgagaatggtgaccagaaccaagaagatcttcgtgggcggcctgagcgccaacaccgtggtggaggacgtgaagcagtacttcgagcagttcggcaaggtggaggacgccatgctgatgttcgacaagaccaccaacagacacagaggcttcggcttcgtgaccttcgagaacgaggacgtggtggagaaggtgtgcgagatccacttccacgagatcaacaacaagatggtggagtgcaagaaggcccagcccaaggaggtgatgttcccccccggcaccagaggcagagccagaggcctgccctacaccatggacgccttcatgctgggcatgggcatgctgggctaccccaacttcgtggccacctacggcagaggctaccccggcttcgcccccagctacggctaccagttccccggcttccccgccgccgcctacggccccgtggccgccgccgccgtggccgccgccagaggcagcggcagcaaccccgccagacccggcggcttccccggcgccaacagccccggccccgtggccgacctgtacggccccgccagccaggacagcggcgtgggcaactacatcagcgccgccagcccccagcccggcagcggcttcggccacggcatcgccggccccctgatcgccaccgccttcaccaacggctaccactag

SEQ ID NO: 237596 - DNA, 987 bp, Artificial Sequence
  derived and/or modified sequence
atggaggccaatggtagccagggcacatccggtagcgcgaacgactcacagcatgaccctggaaagatgtttatcggcggcctgagctggcagacttctcctgatagtctgagggactatttctcgaagttcggggagatcagagaatgcatggtcatgagagatccaacaacaaagcgcagcaggggattcggttttgtgactttcgccgatcccgctagcgtcgataaggtcttggggcagccccatcacgagctggattccaagacgattgaccccaaggtcgcttttcctaggagagctcaacccaaaatggtcaccagaacgaagaagatctttgtgggaggtctgagcgctaacacggttgtggaggatgtgaagcagtacttcgaacagttcgggaaagttgaggatgccatgcttatgttcgacaagactaccaatagacatcgcgggtttggattcgtcacatttgagaacgaggacgtcgtagaaaaggtgtgtgagatccactttcacgaaataaacaacaagatggttgaatgtaagaaagctcagcccaaagaggtaatgttcccccctggaactcgtggtagggctcgcggattgccctataccatggatgctttcatgctgggcatgggtatgttggggtaccccaatttcgtggccacatatggacggggttatcccggcttcgcaccaagttatggataccaatttcctggctttccagctgccgcttacgggccagttgctgccgctgcggtcgccgctgcccgcgggtctgggtctaacccggcccggccaggtggtttccccggagccaactcacccgggccagtggccgacctgtatgggcctgcctctcaggactctggtgtgggcaattatatctccgctgcttcgcctcagccaggatccggcttcggccacggcatagccgggccgctgatcgccacagcctttaccaacgggtatcactag

SEQ ID NO: 237597 - DNA, 804 bp, Artificial Sequence
  derived and/or modified sequence
atgatgaggggatatattaagaaggtcttgaaaaacacttcctatcacgtgaaccagtatctcttcattcagcacggatggagcgggtctggcgaccagtccgtgctctactcttgtaacctgatgcgcatggtgacacgcacaaagaagatatttgttggtggattatctgccaacaccgttgtcgaagatgtgaagcagtatttcgaacagtttggcaaggttgaagacgcaatgctgatgtttgacaagaccaccaatcggcatcgtggattcggatttgtgacatttgaaaacgaggatgtagtggagaaggtgtgtgaaattcatttccatgaaattaataataagatggtggagtgcaagaaagcacaacctaaagaggttatgtttcctcctggcaccagggggagggctcgtggtttaccctacaccatggacgccttcatgctgggtatgggaatgctgggctaccctaatttcgtcgctacttacggtcggggatatcctgggttcgcaccaagttacggataccagtttcccggattccccgctgcagcttatggtccagtggccgcggccgctgtcgccgcggctcggggctcgggcagcaacccggctcgcccggggggttttcctggtgcaaattcgcccggacctgtggccgacctttatgggcctgcctcccaggactcgggagtcggcaactacatcagcgctgcctctcctcagccaggaagcggatttggtcacggcatcgcggggccacttatagccaccgcttttacaaatgggtaccactag

SEQ ID NO: 237598 - DNA, 987 bp, Artificial Sequence
  derived and/or modified sequence
atggaggccaacggcagccagggcaccagcggcagcgccaatgacagccagcacgaccccgggaagatgtttattggaggcctgtcctggcagaccagcccagacagcctgcgggactacttcagcaagtttggagagatccgggagtgcatggtgatgagggaccccaccaccaagaggagccggggcttcggctttgtgacctttgctgaccctgcctctgtggacaaggtgctgggccagccccaccacgagctggacagcaagaccatcgaccccaaggtggccttcccccggcgggcccagcccaagatggtgaccaggaccaagaagatctttgtgggcggcctgagcgccaacacagtggtggaggatgtgaagcagtactttgagcagtttgggaaggtggaggatgccatgctgatgtttgacaagaccaccaacagacaccggggctttggatttgtgacctttgaaaatgaagatgtggtggagaaggtgtgtgagatccacttccacgagatcaacaacaagatggtggagtgcaagaaggcccagcccaaggaggtgatgtttcctcctggcacccggggccgggcccggggcctgccctacaccatggatgccttcatgctgggcatgggcatgctgggctaccccaactttgtggccacctacggccggggctacccaggctttgcccccagctatggctaccagtttcctggcttccctgctgctgcctacggccctgtggccgctgctgctgtggccgccgcccggggcagcggcagcaacccagcccggcctgggggcttccctggggccaacagccctggccctgtggccgacctgtatggccctgccagccaggacagcggcgtgggcaactacatctctgctgccagcccccagcccggcagcggcttcggccacggcattgctggccccctgattgccacagccttcaccaacggctaccactag

SEQ ID NO: 237599 - DNA, 804 bp, Artificial Sequence
  derived and/or modified sequence
atgatgaggggctacatcaagaaggtgctgaagaacaccagctaccacgtgaaccagtacctgttcatccagcacggctggagcggcagcggggaccagagcgtgctgtacagctgcaacctgatgaggatggtgaccaggaccaagaagatctttgtgggcggcctgagcgccaacacagtggtggaggatgtgaagcagtactttgagcagtttgggaaggtggaggatgccatgctgatgtttgacaagaccaccaacagacaccggggcttcggctttgtgacctttgaaaatgaagatgtggtggagaaggtgtgtgagatccacttccacgagatcaacaacaagatggtggagtgcaagaaggcccagcccaaggaggtgatgttccccccaggcacccggggccgggcccggggcctgccctacaccatggatgccttcatgctgggcatgggcatgctgggctaccccaactttgtggccacctacggccggggctacccaggctttgcccccagctatggctaccagtttcctggcttccctgctgctgcctacggccctgtggccgctgctgctgtggccgccgcccggggcagcggcagcaacccagcccggcctgggggcttccctggggccaacagccctggccctgtggccgacctgtatggccctgccagccaggacagcggcgtgggcaactacatctctgctgccagcccccagcccggcagcggctttggacatggaattgctggccccctcatcgccacagccttcaccaacggctaccactag

SEQ ID NO: 237600 - DNA, 987 bp, Artificial Sequence
  derived and/or modified sequence
atggaggccaacggcagccagggcaccagcggcagcgccaacgactcccagcacgatcctggtaaaatgttcattggagggttgagctggcaaacctctcccgatagtctgcgggattacttcagtaagtttggagagatcagggagtgtatggtgatgagagaccctacaaccaaaagaagtaggggtttcggcttcgtgactttcgccgaccctgcttcagttgataaggttttgggccagcctcatcatgagctggactccaaaacaatcgaccctaaagtggcattccctagaagagctcagcccaagatggtgaccaggacaaagaagatcttcgtaggcggtctgagtgccaacacagtggtggaggatgtcaaacagtactttgagcaatttggaaaagtcgaggatgccatgcttatgtttgataaaactaccaaccgccatcggggctttgggttcgtgacattcgaaaatgaagacgtcgtggaaaaagtgtgtgagatacattttcacgagatcaataacaagatggtcgaatgtaagaaagcgcagcctaaggaagtgatgttcccacccggcactcgaggccgcgcccggggactgccatataccatggacgcatttatgttaggtatgggtatgctcggatatcctaactttgtagccacctacggtcgtggataccctggcttcgccccgagttatggatatcaatttcccgggtttcccgcagccgcctatggacctgttgccgccgctgctgttgcggccgccagagggtcagggtccaatccggcccgaccgggcggattccctggggccaactctcccggtccagtggccgatctttacgggcctgcttcccaggactccggcgttggaaattatatcagtgctgcgtctcctcagcctggttccgggtttgggcatggcatcgcaggacccctgattgccactgcatttaccaatggttaccactag

SEQ ID NO: 237601 - DNA, 804 bp, Artificial Sequence
  derived and/or modified sequence
atgatgcggggctacatcaagaaggtgctgaagaacaccagctaccacgtgaaccaatatttgttcatccagcatggctggagcgggtccggcgatcagtccgtgctgtacagctgcaacctgatgcgcatggtgacgaggacaaaaaagatcttcgtaggggggttgtccgccaacacagtcgttgaggacgtgaagcaatactttgaacaatttggcaaagtcgaggatgccatgctcatgttcgataagaccactaacaggcatcgtggttttggcttcgttactttcgaaaatgaagacgtagtcgaaaaagtgtgtgaaatccattttcacgaaatcaacaataaaatggtggagtgcaagaaggcccaaccaaaagaagtgatgttcccccccggtactcgcggccgagctcgcgggcttccatacacgatggatgcttttatgctggggatgggaatgctgggctatcctaatttcgttgccacctacggccgaggctacccgggcttcgccccaagctacgggtatcagttcccagggtttcccgcagctgcgtatggccccgtcgccgccgccgctgttgccgcagcccgaggcagcggaagcaatcctgcccggcccggggggtttccaggggctaattctcccggccctgtggcagacctctacggacccgctagccaggattccggtgtgggaaattacatttctgctgcttccccccagcccgggtctgggtttggacatgggatcgcaggccccctgatcgctacagcttttaccaacggttatcactag

SEQ ID NO: 237602 - DNA, 987 bp, Artificial Sequence
  derived and/or modified sequence
atggaggcgaatgggagtcagggtactagcggttcggccaatgactcacagcacgaccctggcaagatgtttatcggcggactctcttggcagaccagccccgatagcctgagggattacttctctaagttcggtgaaatcagggaatgtatggtcatgcgcgaccctaccactaaaagaagccggggttttggctttgtgacctttgcagatcctgcttcagttgataaggttctggggcaaccccaccacgagttggactctaaaaccatcgacccgaaggtcgcttttcctcgaagggcacagcctaagatggtgacgagaacaaagaaaatttttgtcggcggattatcggctaataccgtggttgaagacgtcaaacaatattttgagcagttcgggaaagtcgaagatgcaatgcttatgttcgacaaaacaaccaaccgacacagagggtttggtttcgtcacattcgaaaatgaagatgtcgttgagaaggtctgcgagattcacttccatgagataaacaacaaaatggtggagtgcaaaaaagctcagcccaaggaagtgatgtttcccccagggacacgcggtcgggctcggggactgccttacacaatggacgctttcatgcttgggatgggcatgctaggataccccaattttgtggccacctacggtagaggctatcctggatttgccccttcttacgggtatcagttccccggattccctgccgctgcctatggacccgtggctgcggctgctgtggctgctgcgcgtgggtccggaagcaacccagcaaggcccggtggattcccaggggctaatagtcccggacccgttgctgatctgtacgggccagcctcgcaggattcaggggtcgggaattatatttcggcggcatcccctcagcctggaagtggatttggtcacggcatcgccggtcctctgatcgcgaccgcttttacaaacggctatcactag

SEQ ID NO: 237603 - DNA, 804 bp, Artificial Sequence
  derived and/or modified sequence
atgatgaggggatatattaaaaaggtccttaaaaatacctcctatcatgtaaatcaatacctgttcatacaacacgggtggtccgggtctggagaccagtctgtcttgtactcttgcaacctcatgcggatggtcacccggaccaaaaaaatttttgtcgggggactgtccgcaaacacggtggtggaggacgtaaagcagtattttgagcagtttggcaaggtggaggatgctatgctcatgttcgataagaccacaaatagacaccggggatttggcttcgtgactttcgaaaacgaagatgtcgtggaaaaggtctgcgagattcatttccatgaaatcaacaataagatggtcgagtgtaagaaggctcaacccaaggaagtaatgtttcctccaggtaccagaggtagggccagaggtctaccatataccatggacgcctttatgctgggtatggggatgctgggataccccaactttgtcgctacatacgggagaggctacccaggattcgcccctagctacgggtaccaatttcctggcttccctgctgccgcttatgggcctgtggccgcagccgctgttgcggctgccagagggagcgggtctaatcccgctcgccctggcggttttcctggcgctaattcgccgggtccagttgcagatctgtacgggcctgcttcccaagatagtggggtgggaaattatatatctgcagcaagccctcagcctggaagtgggttcggacacggtatcgccggaccactcattgctacagccttcacgaacggctaccattag

SEQ ID NO: 237604 - DNA, 1624 bp, Artificial Sequence
  derived and/or modified sequence
tttctgttgtgtagttctgattttccgaacaggtgtttagatgatgaggggttatattaagaaagtactaaagaatacgtcttatcacgtgaatcagtatctttttattcaacatggatggagtgggagtggagaccaatctgttttatattcctgcaatctgatgaggatggtcacaagaacaaagaaaatatttgtaggcgggttatctgcgaacacagtagtggaagatgtaaagcaatatttcgagcagtttggcaaggtggaagatgcaatgctgatgtttgataaaactaccaacaggcacagagggtttggctttgtcacttttgagaatgaagatgttgtggagaaagtctgtgagattcatttccatgaaatcaataataaaatggtagaatgtaagaaagctcagccgaaagaagtcatgttcccacctgggacaagaggccgggcccggggactgccttacaccatggacgcgttcatgcttggcatggggatgctgggatatcccaacttcgtggcgacctatggccgtggctaccccggatttgctccaagctatggctatcagttcccaggcttcccagcagcggcttatggaccagtggcagcagcggcggtggcggcagcaagaggatcaggctccaacccggcgcggcccggaggcttcccgggggccaacagcccaggacctgtcgccgatctctacggccctgccagccaggactccggagtggggaattacataagtgcggccagcccacagccgggctcgggcttcggccacggcatagctggacctttgattgcaacggcctttacaaatggataccattgagcaggtgctttcgttgccatctcactctgagagcatacctggatgtccaggcaagactgggcgaagtttctgagtggccctttgtttaggtgatgtcctcagacctggacccccaccagcctcactccccatcccaaccagagatggctcacttcggatcgagggttgactacatctcatcatctcacgaatctgctgtaatataagacaacagcttttaaatgtgtatataacccatgatttcggttttgttttgttttgtttttcttgatggtttccctctccctccctctcttcccattctccttttaaatctctttgaatcacatttggtagtgattttgacttagtccagtagtcacatagctttaatatctagttcaaagctaaccatagtataattgttatattaaggagttattttttcttaaaacatttttttttgcttgttttggttctgttctcacttttaaaggatgctgagatggtaatatgactctccatattttggtaccaattctgagactgtatgaattttcaggtggaactttagcacacactgaagcaaagttgtgaagtgcagggcgggaggtgggcgtgagctttctattttgcgttgtagaagaagtgagatgtagtaagctaattaacagactttctagcagttctttttgtgatgtctctttgttaatctgagtctatctattttcggcaataaggtaaggacgacagtgttttgagtgtcctccttttctataagtgctttttttctgttgaaag

SEQ ID NO: 237605 - DNA, 1581 bp, Artificial Sequence
  derived and/or modified sequence
ctcgccgctgccccggctccgccgctcgcagagagattcggaggagcccgggcgggggggaggaggagggggaggagggagcggagatctcggggctcggagccggccgccgctccgctccgatcgctgtggggcttggttttttgggggtgggggggcgggggggctcagatatggaggcaaatgggagccaaggcacctcgggcagcgccaacgactcccagcacgaccccggtaaaatgtttatcggtggactgagctggcagacctcaccagatagccttagagactattttagcaaatttggagaaattagagaatgtatggtcatgagagatcccactacgaaacgctccagaggcttcggtttcgtcacgttcgcagacccagcaagtgtagataaagtattaggtcagccccaccatgagttagattccaagacgattgaccccaaagttgcatttcctcgtcgagcgcaacccaagatggtcacaagaacaaagaaaatatttgtaggcgggttatctgcgaacacagtagtggaagatgtaaagcaatatttcgagcagtttggcaaggtggaagatgcaatgctgatgtttgataaaactaccaacaggcacagagggtttggctttgtcacttttgagaatgaagatgttgtggagaaagtctgtgagattcatttccatgaaatcaataataaaatggtagaatgtaagaaagctcagccgaaagaagtcatgttcccacctgggacaagaggccgggcccggggactgccttacaccatggacgcgttcatgcttggcatggggatgctgggatatcccaacttcgtggcgacctatggccgtggctaccccggatttgctccaagctatggctatcagttcccaggcttcccagcagcggcttatggaccagtggcagcagcggcggtggcggcagcaagaggatcaggctccaacccggcgcggcccggaggcttcccgggggccaacagcccaggacctgtcgccgatctctacggccctgccagccaggactccggagtggggaattacataagtgcggccagcccacagccgggctcgggcttcggccacggcatagctggacctttgattgcaacggcctttacaaatggataccattgagcaggtgctttcgttgccatctcactctgagagcatacctggatgtccaggcaagactgggcgaagtttctgagtggccctttgtttaggtgatgtcctcagacctggacccccaccagcctcactccccatcccaaccagagatggctcacttcggatcgagggttgactacatctcatcatctcacgaatctgctgtaatataagacaacagcttttaaatgtgtatataacccatgatttcggttttgttttgttttgtttttcttgatggtttccctctccctccctctcttcccattctccttttaaatctctttgaatcacatttggtagtgattttgacttagtccagtagtcacatagctttaatatctagttcaaagctaaccatagtataattgttatattaaggagttat

SEQ ID NO: 237606 - DNA, 987 bp, Artificial Sequence
  derived and/or modified sequence
atggaggccaacggcagccagggcaccagcggcagcgccaacgacagccagcacgaccccggcaagatgttcatcggcggcctgagctggcagaccagccccgacagcctgagagactacttcagcaagttcggcgagatcagagagtgcatggtgatgagagaccccaccaccaagagaagcagaggcttcggcttcgtgaccttcgccgaccccgccagcgtggacaaggtgctgggccagccccaccacgagctggacagcaagaccatcgaccccaaggtggccttccccagaagagcccagcccaagatggtgaccagaaccaagaagatcttcgtgggcggcctgagcgccaacaccgtggtggaggacgtgaagcagtacttcgagcagttcggcaaggtggaggacgccatgctgatgttcgacaagaccaccaacagacacagaggcttcggcttcgtgaccttcgagaacgaggacgtggtggagaaggtgtgcgagatccacttccacgagatcaacaacaagatggtggagtgcaagaaggcccagcccaaggaggtgatgttcccccccggcaccagaggcagagccagaggcctgccctacaccatggacgccttcatgctgggcatgggcatgctgggctaccccaacttcgtggccacctacggcagaggctaccccggcttcgcccccagctacggctaccagttccccggcttccccgccgccgcctacggccccgtggccgccgccgccgtggccgccgccagaggcagcggcagcaaccccgccagacccggcggcttccccggcgccaacagccccggccccgtggccgacctgtacggccccgccagccaggacagcggcgtgggcaactacatcagcgccgccagcccccagcccggcagcggcttcggccacggcatcgccggccccctgatcgccaccgccttcaccaacggctaccactag

SEQ ID NO: 237607 - protein, 393 aa, Artificial Sequence
  derived and/or modified sequence
METTMGFMDDNATNTSTSFLSVLNPHGAHATSFPFNFSYSDYDMPLDEDEDVTNSRTFFAAKIVIGMALVGIMLVCGIGNFIFIAALVRYKKLRNLTNLLIANLAISDFLVAIVCCPFEMDYYVVRQLSWEHGHVLCTSVNYLRTVSLYVSTNALLAIAIDRYLAIVHPLRPRMKCQTATGLIALVWTVSILIAIPSAYFTTETVLVIVKSQEKIFCGQIWPVDQQLYYKSYFLFIFGIEFVGPVVTMTLCYARISRELWFKAVPGFQTEQIRKRLRCRRKTVLVLMCILTAYVLCWAPFYGFTIVRDFFPTVFVKEKHYLTAFYIVECIAMSNSMINTLCFVTVKNDTVKYFKKIMLLHWKASYNGGKSSADLDLKTIGMPATEEVDCIRLK

SEQ ID NO: 237608 - DNA, 1182 bp, Artificial Sequence
  derived and/or modified sequence
atggagaccaccatgggcttcatggacgacaacgccaccaacaccagcaccagcttcctgagcgtgctgaacccccacggcgcccacgccaccagcttccccttcaacttcagctacagcgactacgacatgcccctggacgaggacgaggacgtgaccaacagcagaaccttcttcgccgccaagatcgtgatcggcatggccctggtgggcatcatgctggtgtgcggcatcggcaacttcatcttcatcgccgccctggtgagatacaagaagctgagaaacctgaccaacctgctgatcgccaacctggccatcagcgacttcctggtggccatcgtgtgctgccccttcgagatggactactacgtggtgagacagctgagctgggagcacggccacgtgctgtgcaccagcgtgaactacctgagaaccgtgagcctgtacgtgagcaccaacgccctgctggccatcgccatcgacagatacctggccatcgtgcaccccctgagacccagaatgaagtgccagaccgccaccggcctgatcgccctggtgtggaccgtgagcatcctgatcgccatccccagcgcctacttcaccaccgagaccgtgctggtgatcgtgaagagccaggagaagatcttctgcggccagatctggcccgtggaccagcagctgtactacaagagctacttcctgttcatcttcggcatcgagttcgtgggccccgtggtgaccatgaccctgtgctacgccagaatcagcagagagctgtggttcaaggccgtgcccggcttccagaccgagcagatcagaaagagactgagatgcagaagaaagaccgtgctggtgctgatgtgcatcctgaccgcctacgtgctgtgctgggcccccttctacggcttcaccatcgtgagagacttcttccccaccgtgttcgtgaaggagaagcactacctgaccgccttctacatcgtggagtgcatcgccatgagcaacagcatgatcaacaccctgtgcttcgtgaccgtgaagaacgacaccgtgaagtacttcaagaagatcatgctgctgcactggaaggccagctacaacggcggcaagagcagcgccgacctggacctgaagaccatcggcatgcccgccaccgaggaggtggactgcatcagactgaagtag

SEQ ID NO: 237609 - DNA, 1182 bp, Artificial Sequence
  derived and/or modified sequence
atggagacaaccatgggatttatggatgacaatgccacgaataccagtacaagctttctttccgtgctgaatccgcacggagctcacgcaacttcatttccattcaattttagctacagcgactatgatatgcccctggatgaagatgaagacgttaccaattccagaacatttttcgccgctaaaatcgtaattggtatggctctggtgggaatcatgttggtttgcggtatcggaaatttcatcttcatagctgcactcgtgaggtataagaaactccggaatttgacaaatttgcttattgccaacttagccatttccgatttcctggtggccattgtgtgctgccctttcgagatggactactacgtagtaagacaactctcttgggagcacggacacgtgctctgtacatccgtgaattatctacgaaccgtctccctatacgtctcgactaatgctctcctcgctatagcaatagataggtacctcgcgattgttcacccacttcgcccgcgaatgaaatgccaaacggcgacgggactgatcgctctggtgtggactgtgtccattctcatcgctattcccagcgcttactttacaacagaaacggtattagtcatcgtcaaaagccaagaaaagatattttgtggacaaatctggccagtggaccaacagctctattacaagagctattttctcttcattttcggcatcgagtttgtgggcccagtggtgacaatgactttgtgttatgcccgcatcagtcgcgagctctggtttaaggccgtgcctgggttccagactgagcagatccgaaagcggcttcgatgtaggcgcaaaactgtgcttgttctcatgtgcatcctcactgcatacgtgttatgctgggctcctttctacgggttcacgatcgttagagacttcttcccaacagtgttcgttaaggagaagcattatctgacagccttctacattgtcgagtgtattgcaatgagcaatagtatgatcaatacactttgttttgtgactgtgaaaaatgacaccgttaagtactttaaaaagatcatgctgctgcactggaaggcttcctacaacggtggtaaatcgtcagctgacctggacttgaagaccattgggatgccagccacggaggaagtggattgtatcagactgaaatag

SEQ ID NO: 237610 - DNA, 1182 bp, Artificial Sequence
  derived and/or modified sequence
atggaaacaactatggggttcatggatgataacgcaacaaataccagcacgtcttttttaagcgtcctgaaccctcacggggcacatgccactagttttccattcaactttagctacagtgactatgatatgccacttgacgaagatgaagacgtcacgaactccaggaccttttttgccgctaagatcgtgattggcatggcactcgtgggcattatgctggtttgcggaatcgggaacttcatttttatcgcagccctggtgcggtacaagaaactgaggaatctcactaatctgctgatcgctaaccttgccatctcagattttctcgtagccattgtgtgttgtccctttgaaatggattactatgtcgtgagacagttgtcatgggagcatggccatgttttgtgtacatccgtcaattacttgcggaccgtctccctgtatgtctcaacaaatgctctgctggcaatcgccatcgataggtatttggccattgtccatcccctgcgtccaagaatgaagtgtcagaccgctaccggactgattgcgctggtgtggactgtgagcatcctaatcgccataccttcagcctatttcaccaccgaaacagtcctggtcatagtgaaaagtcaggaaaaaatcttctgcgggcagatctggcccgtggatcagcagctctattataaatcctattttctatttatttttggaatcgagttcgtaggacccgtggtcaccatgaccctctgttacgccagaatcagcagagaactctggtttaaagctgtgccgggcttccagaccgagcagattcggaagagactgcgctgtagacgcaagactgtgctcgtgttgatgtgtattctgaccgcctacgttctgtgttgggcacctttctacggattcacaatagtgcgggattttttcccgaccgtgtttgtgaaagagaaacattacctgaccgcgttctacatcgtggagtgcattgcaatgtccaactccatgatcaacacgctctgtttcgtgacagtcaagaatgacactgtgaagtatttcaagaagattatgttactgcactggaaggcctcttataatggcgggaagtcctccgccgatctggatctgaagaccatcggtatgcccgcaactgaagaagtggattgtattagactgaagtag

SEQ ID NO: 237611 - DNA, 1182 bp, Artificial Sequence
  derived and/or modified sequence
atggagaccaccatgggcttcatggatgacaatgccaccaacaccagcaccagcttcctgtctgtgctgaacccccacggggcccacgccaccagcttccccttcaacttctcctacagcgactatgacatgcccctggatgaagatgaagatgtgaccaacagcaggaccttctttgctgccaagatcgtgattggcatggccctggtgggcatcatgctggtgtgtggcatcggcaacttcatcttcatcgccgccctggtgcgctacaagaagctgaggaacctgaccaacctgctgattgccaacctggccatcagtgacttcctggtggccatcgtgtgctgcccctttgagatggactactacgtggtgcggcagctgtcctgggagcacggccacgtgctgtgcacctctgtgaactacctgaggacagtgtccctgtatgtgtccaccaatgccctgctggccatcgccatcgaccgctacctggccatcgtgcaccccctgcggcccaggatgaagtgccagacagccaccggcctgattgccctggtgtggacagtgtccatcctgattgccatccccagcgcctacttcaccacagagaccgtgctggtgattgtgaagagccaggagaagatcttctgtggccagatctggcctgtggaccagcagctgtactacaagagctacttcctgttcatctttggaattgaatttgtgggccctgtggtgaccatgaccctgtgctacgcccgcatcagccgggagctgtggttcaaggctgtgcccggcttccagacagagcagatcaggaagaggctgcgctgcaggaggaagacagtgctggtgctgatgtgcatcctgacagcctacgtgctgtgctgggcccccttctacggcttcaccatcgtgcgggacttcttccccaccgtgtttgtgaaggagaagcactacctgacagccttctacatcgtggagtgcatcgccatgagcaacagcatgatcaacaccctgtgctttgtgacagtgaagaatgacacagtgaagtacttcaagaagatcatgctgctgcactggaaggccagctacaacggcggcaagagcagcgctgacctggacctgaagaccatcggcatgcctgccacagaggaggtggactgcatccggctgaagtag

SEQ ID NO: 237612 - DNA, 1182 bp, Artificial Sequence
  derived and/or modified sequence
atggagaccaccatgggcttcatggacgacaacgccaccaacacctccacaagctttctctcagtgctcaatcctcatggagcccacgctacttctttcccctttaatttctcatattctgactatgatatgcctctcgacgaggatgaggatgtgacaaactccagaaccttcttcgcagctaaaattgtgatcggaatggccctggtggggatcatgcttgtgtgcggtattggcaattttatattcatcgcggccctggtgaggtataagaaactgcggaacctgaccaaccttcttattgcaaatctagccatatcggatttccttgtagctattgtgtgctgtccatttgagatggattactatgtggtccgccagctctcatgggaacatggacacgtgctgtgcacatcggtaaactatctgagaacagtatccctgtatgtttctacaaatgctttactggccatcgccattgaccgctacttagctattgtgcatcccctgagaccaaggatgaagtgccagactgctactggactcatagccttggtgtggacggtgtcaatcttaattgctattcctagcgcttattttaccacagagaccgtgctcgtgatcgtgaaatcccaggaaaagatattttgcggccaaatctggcctgtggatcagcaactttactacaaaagttacttcctgtttatctttggcatcgagtttgtaggacccgtagttaccatgacactgtgttacgcacggatctcccgagagttgtggtttaaggcagtccctgggtttcagactgaacagatccgcaaacggctgcggtgccgccgaaagacggtgcttgtgctcatgtgcattttgacagcatacgtgctctgttgggcacctttctacggctttaccatcgtgcgcgactttttccccacagttttcgttaaggagaaacattacctaacagccttttatattgtcgaatgtattgctatgtcaaacagcatgatcaacacactgtgcttcgtgactgtcaaaaatgataccgtgaaatactttaaaaaaattatgctgcttcattggaaagccagctataatggcggcaagagctccgctgacttagacctaaaaacaattgggatgcctgcaacagaagaagtcgattgtattcgcctaaaatag

SEQ ID NO: 237613 - DNA, 1182 bp, Artificial Sequence
  derived and/or modified sequence
atggagaccaccatgggcttcatggacgacaacgccaccaacacctctacaagcttcctaagtgtgctgaatccccacggggcacatgcaactagctttcctttcaatttttcttactccgactacgacatgccactggatgaggacgaggacgttacaaactctagaaccttctttgctgccaagattgtgatcggaatggcgctagttggcatcatgctggtgtgcggtataggcaacttcatctttatcgccgccttggtgcggtataagaagcttaggaacctgacgaatctgctgatcgctaatttggcgatttctgatttcttggtggccattgtttgctgccccttcgagatggactactatgtcgtgcgacagttatcttgggagcacggacatgtgctctgcacatcagtcaactatctcaggactgtctcactttacgtgagtaccaacgcactcctggcaatagccatcgaccgatatctggccatagtacatcctttacgaccgagaatgaaatgccaaacagcaaccggacttattgccctagtgtggactgtgtctattttaattgccatccctagcgcgtactttaccacggagaccgttctcgtcatcgtgaagtcccaggagaaaatcttctgcggtcaaatctggcctgttgaccagcagctgtattataaatcttacttcctgttcatttttggcatcgaattcgtggggccagtcgttacgatgacgctctgttatgctagaatatcccgggaactgtggttcaaagccgtgcccggtttccagaccgagcagattaggaagcgactgcgatgtcgacgtaagacagtactcgtcctgatgtgtatcctgacagcctatgtgctgtgctgggctcctttctatggatttaccattgtgcgggactttttccctaccgtgttcgtcaaggagaaacactatctgacagcattctatatcgtcgagtgcatcgccatgtcaaactccatgattaacactttatgcttcgtgaccgtgaagaacgacactgttaagtatttcaagaagatcatgcttctgcactggaaggcctcatataatggagggaagtccagcgccgatttggacctcaaaaccattggaatgccagctaccgaagaggtggactgtatccggctcaaatag

SEQ ID NO: 237614 - DNA, 1602 bp, Artificial Sequence
  derived and/or modified sequence
acgcctcgccaagagcccgcacctcggcgcctcacggccaccggaggcggggacagggagtccggcgcgggccgggtcgggggatctgcagcggcggcgcgaaggtaactcccccgccagagccgggaaagagccccgagcagaggaggaagggagcggggacctgcccttcgcctgccggcttctggaagaagcgtctcctgatccggccccggaataagaaacccggaccttgcctgccgggctccgcgatgccgcaggtttagaatggagctcagataccataccccaaagatgctggcagagacattctgactcattaagggagagctggctgatagcagagaggggtgacatcagccttgcagacattgccctggggaattctgagcagtgttgctcacagcaccacctggccagatggagaccaccatggggttcatggatgacaatgccaccaacacttccaccagcttcctttctgtgctcaaccctcatggagcccatgccacttccttcccattcaacttcagctacagcgactatgatatgcctttggatgaagatgaggatgtgaccaattccaggacgttctttgctgccaagattgtcattgggatggccctggtgggcatcatgctggtctgcggcattggaaacttcatctttatcgctgccctggtccgctacaagaaactgcgcaacctcaccaacctgctcatcgccaacctggccatctctgacttcctggtggccattgtctgctgcccctttgagatggactactatgtggtgcgccagctctcctgggagcacggccacgtcctgtgcacctctgtcaactacctgcgcactgtctctctctatgtctccaccaatgccctgctggccatcgccattgacaggtatctggctattgtccatccgctgagaccacggatgaagtgccaaacagccactggcctgattgccttggtgtggacggtgtccatcctgatcgccatcccttccgcctacttcaccaccgagacggtcctcgtcattgtcaagagccaggaaaagatcttctgcggccagatctggcctgtggaccagcagctctactacaagtcctacttcctctttatctttggcatagaattcgtgggccccgtggtcaccatgaccctgtgctatgccaggatctcccgggagctctggttcaaggcggtccctggattccagacagagcagatccgcaagaggctgcgctgccgcaggaagacggtcctggtgctcatgtgcatcctcaccgcctacgtgctatgctgggcgcccttctacggcttcaccatcgtgcgcgacttcttccccaccgtgtttgtgaaggagaagcactacctcactgccttctacatcgtcgagtgcatcgccatgagcaacagcatgatcaacactctgtgcttcgtgaccgtcaagaacgacaccgtcaagtacttcaaaaagatcatgttgctccactggaaggcttcttacaatggcggtaagtccagtgcagacctggacctcaagacaattgggatgcctgccaccgaagaggtggactgcatcagactaaaataa

SEQ ID NO: 237615 - DNA, 1182 bp, Artificial Sequence
  derived and/or modified sequence
atggagaccaccatggggttcatggatgacaatgccaccaacacttccaccagcttcctttctgtgctcaaccctcatggagcccatgccacttccttcccattcaacttcagctacagcgactatgatatgcctttggatgaagatgaggatgtgaccaattccaggacgttctttgctgccaagattgtcattgggatggccctggtgggcatcatgctggtctgcggcattggaaacttcatctttatcgctgccctggtccgctacaagaaactgcgcaacctcaccaacctgctcatcgccaacctggccatctctgacttcctggtggccattgtctgctgcccctttgagatggactactatgtggtgcgccagctctcctgggagcacggccacgtcctgtgcacctctgtcaactacctgcgcactgtctctctctatgtctccaccaatgccctgctggccatcgccattgacaggtatctggctattgtccatccgctgagaccacggatgaagtgccaaacagccactggcctgattgccttggtgtggacggtgtccatcctgatcgccatcccttccgcctacttcaccaccgagacggtcctcgtcattgtcaagagccaggaaaagatcttctgcggccagatctggcctgtggaccagcagctctactacaagtcctacttcctctttatctttggcatagaattcgtgggccccgtggtcaccatgaccctgtgctatgccaggatctcccgggagctctggttcaaggcggtccctggattccagacagagcagatccgcaagaggctgcgctgccgcaggaagacggtcctggtgctcatgtgcatcctcaccgcctacgtgctatgctgggcgcccttctacggcttcaccatcgtgcgcgacttcttccccaccgtgtttgtgaaggagaagcactacctcactgccttctacatcgtcgagtgcatcgccatgagcaacagcatgatcaacactctgtgcttcgtgaccgtcaagaacgacaccgtcaagtacttcaaaaagatcatgttgctccactggaaggcttcttacaatggcggtaagtccagtgcagacctggacctcaagacaattgggatgcctgccaccgaagaggtggactgcatcagactaaaataa

SEQ ID NO: 237616 - DNA, 1182 bp, Artificial Sequence
  derived and/or modified sequence
atggaaacaaccatggggtttatggacgataacgccactaacacaagtacttcttttctaagcgttttaaatcctcacggagcacatgcgacatcttttccgttcaacttctcttacagtgattacgatatgcccctggacgaagatgaagacgtgaccaacagccgcacgttctttgcagcaaaaatagttatcggcatggcgcttgtcggtataatgttagtgtgtggaatagggaacttcattttcattgccgcactggttcgctacaagaaactgcgaaacttgaccaatttgttgatcgccaatctggccatttccgatttccttgtggcaatagtgtgctgtccttttgagatggattactatgtggtcagacagttgtcatgggaacacggccacgtgctgtgtaccagcgtgaattaccttcgaaccgtaagcctgtatgtgagtaccaatgcactcctagctatcgccatagacaggtacctagcaattgtgcatcccctccgtcctagaatgaagtgtcaaactgctaccggcctaatcgccctggtttggaccgtttctattcttattgccattccctccgcgtacttcactactgagaccgtgctggtcatcgtaaaatcacaggaaaaaatattttgtggccaaatttggcccgtggatcaacagctgtattataagtcttactttctgtttatttttgggattgagtttgtaggccctgtcgttacaatgactctgtgctacgcaagaatttctagagaattgtggttcaaggcggtgccaggatttcagaccgagcaaatacggaagcgactgcgctgccgacgcaaaaccgtgcttgtcctgatgtgtatcctgacagcttacgtcttgtgctgggccccattctatggcttcaccattgtgagggacttctttcctacggtgttcgtgaaggaaaaacactacttgacagccttctacatcgtggagtgtattgcgatgagcaattctatgattaacaccctttgcttcgttacagtgaagaacgacactgtcaaatacttcaaaaagattatgttgttacattggaaggctagttacaatggaggcaaaagtagcgccgacctggatctgaagaccatcggcatgccagctaccgaggaagttgactgtatccgcttgaaatag

SEQ ID NO: 237617 - DNA, 1182 bp, Artificial Sequence
  derived and/or modified sequence
atggagacaaccatgggctttatggacgacaacgcaactaacacttctacctcatttctgtcagtgcttaacccacacggcgctcacgctacatccttcccgttcaatttttcatactcagactacgacatgcccctggacgaagacgaagatgtaacgaacagccgcacctttttcgccgctaaaatcgtaattgggatggccctagtgggtataatgctggtctgtgggatcggaaatttcatatttattgccgcattggttagatacaagaaactccgcaatcttactaatctgctcatcgctaatttggcgatatcagatttcctggtggctatagtatgttgtccgttcgaaatggactattacgtggtaaggcagcttagctgggaacatgggcatgtgctgtgcaccagcgttaactacttacgaacagtgagtctgtatgtgagcacgaacgccctattggcgatcgccatcgaccgctatctggccattgttcatccgctgcggccacgcatgaagtgccagacagcaacaggacttatagccctcgtgtggactgtcagtatcctcattgccatcccttccgcatactttacaacagaaacagtgcttgttatcgttaaaagccaggagaagatcttttgtggccagatatggccagtggaccagcagctgtactataagtcatacttcctgttcattttcggcattgagttcgtaggtcccgtagtgacaatgaccttatgttacgccagaatttctagggaactatggtttaaagccgtccccggtttccagacagagcagattcgtaaacggctgaggtgcaggaggaagacagtactcgttctgatgtgcatcctgacagcgtatgtcctgtgttgggctcctttttatgggttcaccattgtgcgggacttttttcccacggtgttcgttaaagagaaacattacttgaccgcattttatattgtggagtgcattgccatgtctaactctatgatcaatacactgtgttttgtgacagtgaagaacgataccgtgaagtattttaaaaagattatgctgttgcattggaaagcgtcctataacggagggaagagctccgcagatttagatctgaagaccattggcatgcccgctacagaggaggtcgactgtataaggctgaagtag

SEQ ID NO: 237618 - protein, 432 aa, Artificial Sequence
  derived and/or modified sequence
MHLRIHARRSPPRRPAWTLGIWFLFWGCIVSSVWSSSNVASSSSTSSSPGSHSQHEHHFHGSKHHSVPISIYRSPVSLRGGHAGATYIFGKSGGLILYTWPANDRPSTRSDRLAVGFSTTVKDGILVRIDSAPGLGDFLQLHIEQGKIGVVFNIGTVDISIKEERTPVNDGKYHVVRFTRNGGNATLQVDNWPVNEHYPTGRQLTIFNTQAQIAIGGKDKGRLFQGQLSGLYYDGLKVLNMAAENNPNIKINGSVRLVGEVPSILGTTQTTSMPPEMSTTVMETTTTMATTTTRKNRSTASIQPTSDDLVSSAECSSDDEDFVECEPSTGRSANPTEPGIRRVPGASEVIRESSSTTGMVVGIVAAAALCILILLYAMYKYRNRDEGSYQVDETRNYISNSAQSNGTLMKEKQQSSKSGHKKQKNKDREYYV

SEQ ID NO: 237619 - DNA, 1299 bp, Artificial Sequence
  derived and/or modified sequence
atgcacctgagaatacacgcccgtaggtctccccctcgaaggccggcgtggaccctcgggatctggtttttgttctgggggtgcatagtctccagtgtgtggagcagctcaaatgtcgcctcctcttcatctacttcttcgtcccctggatcccactcacagcacgaacaccacttccacggctctaagcaccactcagtgcctatctctatctacaggagtcctgtctcgcttaggggcggccatgctggagcaacgtatatcttcggtaagagtggcgggcttattttgtacacctggcctgcgaatgatcgaccgtcgacaaggtcggatagactcgcggtcgggttttccacgaccgttaaagatggcatccttgtccgaattgatagtgcacccggactcggcgacttccttcagctgcacatcgagcaaggaaagatcggagtcgtgttcaatataggtacagtggacatcagtatcaaggaagaaaggaccccagtcaacgacggaaagtaccatgtggttagattcacgagaaacggtggaaatgcgacactgcaggtggacaactggccagtcaacgagcactaccccacggggcgtcagctcacgatatttaacacccaggcacaaatcgccataggcggcaaagacaagggaagactcttccaagggcagctgtccggactgtattacgatggtcttaaagtcctgaacatggccgccgagaataaccctaatatcaagattaacggctcagtgcgtctcgtaggcgaagtcccttctatcctcggcacaacccagacgacatctatgcccccggagatgagcaccactgtcatggaaactaccaccacaatggccaccacaactacgaggaaaaataggagtacagcctctatccaacccacctccgatgatttagtgtcaagcgccgaatgcagctctgacgacgaggattttgtcgagtgtgagcctagcacagggcggtccgcaaatcccaccgaacctggcattagacgcgtccctggggctagcgaggtgatccgtgaaagctcttcaaccactggcatggttgtgggcattgtggcagctgctgctctttgtatcctcatcctcctgtacgccatgtacaagtacagaaatcgcgacgaggggagttaccaggtggacgaaactcgaaactacatatctaacagtgcacaaagcaacgggactctcatgaaagagaagcaacaatcctctaagagcggacacaaaaagcagaaaaacaaagatagagagtactatgtatag

SEQ ID NO: 237620 - DNA, 1299 bp, Artificial Sequence
  derived and/or modified sequence
atgcacctgcgcatccacgcccggcgcagccccccaagaagacctgcctggaccctgggcatctggttcctgttctggggctgcatcgtgtcctctgtgtggagcagcagcaatgtggccagcagcagcagcaccagcagcagccctggcagccacagccagcacgagcaccacttccacggcagcaagcaccacagcgtgcccatcagcatctaccgcagccctgtgtccctgcggggcggccatgctggggccacctacatctttgggaagagcggcggcctcatcctgtacacctggccagccaatgaccggcccagcaccaggagtgaccggctggccgtgggcttcagcaccaccgtgaaggatggcatcctggtgagaattgattctgcccctggcctgggggacttcctgcagctgcacatcgagcagggcaagattggagtggtgttcaacatcggcaccgtggacatcagcatcaaggaggagaggacccctgtgaatgatggcaagtaccacgtggtgcgcttcaccagaaatggaggaaatgccaccctgcaggtggacaactggcctgtgaatgagcactaccccaccggccggcagctgaccatcttcaacacccaggcccagatcgccatcggcggcaaggacaagggccgcctcttccagggccagctgagcggcctgtactatgatggcctgaaggtgctgaacatggctgctgagaacaaccccaacatcaagatcaatggatctgtgcggctggtgggggaggtgcccagcatcctgggcaccacccagaccacctccatgcctcctgagatgagcaccaccgtgatggagaccaccaccaccatggccaccaccaccaccaggaagaacagaagcacagccagcatccagcccaccagtgatgacctggtgagcagcgctgagtgcagcagtgatgatgaggactttgtggagtgtgagcccagcacaggccgcagcgccaaccccacagagcccggcatcagaagagtgcctggggccagcgaggtgatccgggagagcagcagcaccaccggcatggtggtgggcatcgtggccgctgctgccctgtgcatcctgatcctgctgtatgccatgtacaagtacagaaacagagatgagggcagctaccaggtggatgagaccaggaactacatcagcaacagcgcccagagcaatggcaccctgatgaaggagaagcagcagagcagcaagagcggccacaagaagcagaagaacaaggaccgggagtactacgtgtag

SEQ ID NO: 237621 - DNA, 1299 bp, Artificial Sequence
  derived and/or modified sequence
atgcacctgcggatccacgcccggcggagccccccccggcggcccgcctggacattggggatctggtttctgttttggggatgtatcgtgtccagcgtttggagttcatcaaacgtggccagctcaagcagcaccagtagttccccaggtagtcactctcagcacgaacaccacttccacgggtctaaacatcacagtgtgccaatctctatctacaggagccctgtctcgctgagaggcggtcatgccggcgccacgtatattttcggcaaatcaggaggattgatcctctacacatggccagcgaacgacagacccagtacacgaagcgatagactggctgtggggtttagcaccaccgttaaagatgggatcctcgtgcgcatagattcagcccctggactgggagacttcttgcagctgcatatcgagcaggggaagatcggagtggtcttcaacataggcaccgtggatatatcgattaaagaggaacgtacacctgtgaacgacggtaagtatcacgtggttaggtttacgaggaacggaggcaacgccaccttgcaggtagacaactggcctgtgaacgaacattatccaacgggtcggcaactgaccatcttcaatacacaggcccagatcgccattggcggcaaagacaaaggtcgcctatttcaaggacagctgtccggcttgtactacgatggtctgaaagtcctgaatatggcggcggaaaacaacccgaatataaaaataaatgggtcggtgcgtctggtcggtgaagtcccaagtatactgggcacaactcaaacaacgtccatgccccctgagatgagcactacggtaatggagaccactactacaatggctactacgacaacgagaaaaaaccgatctactgcatctatacagccaacctcagacgatctcgtgtcctccgccgaatgcagttcggacgacgaggattttgtagagtgtgagccttccactggacgcagtgccaaccccacggaaccagggatccggcgggtacccggcgcctcagaagtcatccgcgaaagtagcagtacaacgggcatggtggtggggattgttgccgccgccgctctgtgtattctgattctcttgtacgctatgtataagtacaggaatagggatgaaggctcataccaagttgacgaaacacgtaactacatttccaattccgcccagagcaacggtacgctgatgaaggagaagcagcagtccagcaagagtggccacaagaagcagaaaaataaggaccgcgaatattacgtgtag

SEQ ID NO: 237622 - DNA, 4633 bp, Artificial Sequence
  derived and/or modified sequence
acttcgcaggcgcccgcccgcctctcggccacctctgcagcctgccaggcacctcctcttgcgctctcgctgatttcgcccacccacctccctccaccccgtgccacgttggtttgggtggctgctccgcaccgggttcctcctcctctcctctttccctccagtccttcttattctcttcctctggctgcggtggctgctgctgctgctggttttcatccagttgggaaacccaggaagccggcggctgctccgtggcgctagtccagcacgcccagggttaaaagcctcgcgcccttccgcggagactcccaggaacacccgaagaactcttccacctgcagcccccttttgcctggcagttctgcattgcatctcatggaagtggaaacaggaaaataaaaatgttcaaactccttggatgttgggataaactcacctgaacccacttgggttcgggctgcctccttctcttccttcattgccacctttcctctgtgtggctcccgggagtgtgcggttaagtcatcagactcgaagtgcctagagatccggaggaagccgcgccggtcttcccctgacatgcgtggcatgccggggctccgtaggaggtttgctatacctgggaggaccctggcattctaaatttcagctccgggaaagagaaggggctttttgccttttatcttttttttttctttctttaagtagtaattttttaactgattcattgtttggaaagcgcatattgcttccctcttccccgaattctggcaactcttcctcctgctatgatgggcccttgggcatcatgaacttcattactcctcactggctggaattcaaactgcccatctgtagtggtcccgtgcgttgaccatgcacctgagaatccacgcgagacggagccctcctcgccggccggcctggacgcttgggatctggttcctgttctggggatgtatcgtcagctctgtatggagttcttctaatgtagcttcctcctcctccacctcttcctcgccggggtctcactctcagcacgagcaccatttccatggcagcaagcatcactcagtgcctatttctatctatcgttcccctgtttcccttcgaggaggacacgctggcgctacgtacatctttgggaaaagtggtgggcttatcctctacacctggccagccaatgacaggcccagcacgcggtctgaccgccttgccgtgggcttcagcaccactgtgaaggatggcatcttggtccgcatcgacagtgctccaggacttggtgacttcctccagcttcacatagaacaggggaaaattggagttgtcttcaacattggcacagttgacatctccatcaaagaggagagaacccctgtaaatgacggcaaataccatgtggtacgcttcaccaggaacggcggcaacgccaccctgcaggtggacaactggccagtgaatgaacattatcctacaggccggcagttaaccatcttcaacactcaggcgcaaatagccattggtggaaaggacaaaggacgcctcttccaaggccaactctctgggctctattatgatggtttgaaagtactgaacatggcggctgagaacaaccccaatattaaaatcaatggaagtgttcggctggttggagaagtcccatcaattttgggaacaacacagacgacctccatgccaccagaaatgtctactactgtcatggaaaccactactacaatggcgactaccacaacccgtaagaatcgctctacagccagcattcagccaacatcagatgatcttgtttcatctgctgaatgttcaagtgatgatgaagactttgttgaatgtgagccgagtacaggtaggtcagcaaaccccacggagccgggaatcagacgggttccgggggcctcagaggtgatccgggagtcgagcagcacaacagggatggtcgtcggcattgtggctgctgccgccctctgcatcttgatcctcctgtacgccatgtacaagtacaggaacagggacgaggggtcctatcaagtggacgagacgcggaactacatcagcaactccgcccagagcaacggcacgctcatgaaggagaagcagcagagctcgaagagcggccacaagaaacagaaaaacaaggacagggagtattacgtgtaaacatgcgaacactgctcacacgcgagttttcacagttatttctatccacgcctatgaatctttggacggtgagatctcacagatgtcagaactgctggaactatgaaatggggtatataaccacgactctggtggggaaaaccgttttttaaaggacacacacacacacagcgatgcatctctctctaaagctcagccacggctgcggcaaggtcccagcggtcgctgggagacagaaggttttgtgccctgctgtatcataaagcacacacttagcgctctggagccggacggtggctccaccacttccgcaggcctggaaacttccttctccggaggaccttttactaaaaggtagaagacttcatggcttacttgttccataactccaagtgagtctgtaatgtttgtgaagcttgactgtaaccatgttttttctgtttaattatgtaaaaaacaaaactacaacaacaaaaaaagaaaaaagttaaaaaagaaaaaaacaccaaaaaacaaaaacaaacaaaaaaaaaaacccacaacccttatctggttctgaccagtgtgcgtgtaactttatgatctgaggggaaaaatggcttttgggtttttgtttatttttttgataatgactggacatcagaagaggaaaaaaactcaaaacaaaagcgagagagactattgccatatgaactcaaaagctatcatggtgttcactctacatatcaggttatggtgtctctagaatctgttgtttgtttcctataagatgctttgctgaacacatagcaaaattcatgtgacggatgataaattgattcgaaaagctggtcccccaggatctaatttcagaatttaccacccaaacccggaacagatgggtttagggctggtgttatcagagctattggctttacgtaacaatattgttcctgtccattcacccagccaaattgtgttaaagaggaaagccccacaaactaaaacagcctttcctagggaagaggaaggggaggtgggctggatctgtgactgattgaaatgcatgcaaataaaaaagacaatattaaagtctgttatcaaaccagacagtaggggagttcaactcgtgatggaaccacaaaaggtcacacaagccaaccatgtcatgccagagtacaaaacacatagttctttccccgccccgaatgtgacaatggttttcatagtggtttaattttgtagcctgacatttatggataactctgtccttccatttgctcacttctctcttcacccatcttttttaaaaacaaataaatgaataaagctgctgtgacacacacacaaaaggaatttaatagtataatatatatataaataaatatatatacagatatatttatcatggtatgtttgatgggatgactgacacaggaaatctgttaaagtcttaaaatggaatgagaatgttgttttaaaagaaaatagcaaaacaacaaaaaagcaaaccttaaaatgtgaagaaagtgtgaattttagttttgtcacagttaactgtgtcaaagagaattaaaaaaaaaaacttcagattttgtttacatattttactacatttttgctggtataattccttagccacctatgtacatactgctttaagaaatgtttttttcctgtttatttctgtttggtttatattctggttgtctttttctttttgtaaagaggaaacaatgtacagaaaaacaataaactggttgtatggccatagctatccgaaaagcaagagacaaagcaagacaaatattcacacaaaaatgaagtgtgtcctctggagggtcagatatacaatttcttttgtacagatgaaaatcaatcagctgcttagatttagaaatctactcttgctggtctttgtaagttgcatgaatatttgactttgaaaaaatatcttaacgacatggggcaaaaagtgcaatctaaatggtagcctttactaatgtgtgtggaaagaggtgttcctcattatctaatatttcaatgtgttaagagtttaatttttttgttatcattaaaaaagacaggattataaagagatatcaaagcacgattttagataacctaaacggcccagcctatacgaagttgattatatctcgatgtctgtaaaagattgctgttcttggagtcttgaggtcttgtgaattgatttcctgctttctttcatttttttcaatttaagtaataatacatttgttatattcctttcagtgtaagtttctatttggacaattttatgggaacatgtgcattctctatgtgagcttctatcatattcctgttttattagcagaacctaaaggaatttatttaatgatgttgtgacattactgctttttcttttttcttttcttagttcatatttgcattttcgttcaaggatatgcttagcaataaaatgttcttcccaaaa

SEQ ID NO: 237623 - DNA, 1299 bp, Artificial Sequence
  derived and/or modified sequence
atgcacctgcgcatacatgcccgacgatccccgccacggcgtccagcctggacgctgggcatttggtttctgttctggggctgcatcgtgtcgagtgtctggtcttctagtaatgtggcatcaagctcatccacttcctcaagcccgggatcccacagccagcacgagcatcactttcatggttccaagcatcacagcgtccccattagtatttacagatctcctgtttctctgagggggggtcacgctggggcaacctacattttcggaaagtcgggcggtctgatcctgtatacctggcccgcaaacgaccgcccaagcacgagatcagacaggttagccgtggggttcagtaccaccgttaaagacggaatccttgtaagaatagattcagcaccaggccttggggattttctccagctgcacatcgaacaaggaaagataggggtggtgttcaatattggcaccgtggatatctccattaaagaggagaggacacccgtcaacgacggtaagtatcatgtggttaggtttacccgaaatgggggtaatgcaactttacaagttgacaattggcctgtaaatgaacactacccaactggacgtcaacttaccatcttcaacacccaggcgcaaatcgcaataggcggaaaggataaaggcaggctgttccagggtcagctgagcggactatactacgatggcctcaaggtgctgaacatggcagcggagaacaacccaaacatcaagatcaacggcagcgtccgcctcgttggggaagtgccaagtatcttgggcaccactcagacgacatctatgccacccgaaatgtcaactacagtgatggagactacaacgactatggccacgacaacaacgcgtaagaataggagcaccgctagcatccagcccacatctgacgatttggtgtctagcgctgaatgctccagcgatgatgaggattttgtggagtgcgagccctccactggtagaagtgctaatcctacagaacccggtataagacgcgtgcccggagcctccgaggtgattcgtgaaagcagcagtacaaccggaatggtggtggggatagttgctgctgccgctctgtgtattttgatcctcctttatgctatgtataagtatcgcaatagagacgaagggtcttaccaagtcgatgagactcgcaactacatctcgaattccgctcaatccaatggcaccctaatgaaggagaagcagcagtcaagcaaatctggtcataaaaagcaaaagaataaggatcgagagtactacgtgtag

SEQ ID NO: 237624 - DNA, 1299 bp, Artificial Sequence
  derived and/or modified sequence
atgcacctgagaatccacgccagaagaagcccccccagaagacccgcctggaccctgggcatctggttcctgttctggggctgcatcgtgagcagcgtgtggagcagcagcaacgtggccagcagcagcagcaccagcagcagccccggcagccacagccagcacgagcaccacttccacggcagcaagcaccacagcgtgcccatcagcatctacagaagccccgtgagcctgagaggcggccacgccggcgccacctacatcttcggcaagagcggcggcctgatcctgtacacctggcccgccaacgacagacccagcaccagaagcgacagactggccgtgggcttcagcaccaccgtgaaggacggcatcctggtgagaatcgacagcgcccccggcctgggcgacttcctgcagctgcacatcgagcagggcaagatcggcgtggtgttcaacatcggcaccgtggacatcagcatcaaggaggagagaacccccgtgaacgacggcaagtaccacgtggtgagattcaccagaaacggcggcaacgccaccctgcaggtggacaactggcccgtgaacgagcactaccccaccggcagacagctgaccatcttcaacacccaggcccagatcgccatcggcggcaaggacaagggcagactgttccagggccagctgagcggcctgtactacgacggcctgaaggtgctgaacatggccgccgagaacaaccccaacatcaagatcaacggcagcgtgagactggtgggcgaggtgcccagcatcctgggcaccacccagaccaccagcatgccccccgagatgagcaccaccgtgatggagaccaccaccaccatggccaccaccaccaccagaaagaacagaagcaccgccagcatccagcccaccagcgacgacctggtgagcagcgccgagtgcagcagcgacgacgaggacttcgtggagtgcgagcccagcaccggcagaagcgccaaccccaccgagcccggcatcagaagagtgcccggcgccagcgaggtgatcagagagagcagcagcaccaccggcatggtggtgggcatcgtggccgccgccgccctgtgcatcctgatcctgctgtacgccatgtacaagtacagaaacagagacgagggcagctaccaggtggacgagaccagaaactacatcagcaacagcgcccagagcaacggcaccctgatgaaggagaagcagcagagcagcaagagcggccacaagaagcagaagaacaaggacagagagtactacgtgtag

SEQ ID NO: 237625 - protein, 457 aa, Artificial Sequence
  derived and/or modified sequence
MAQALPWLLLWMGAGVLPAHGTQHGIRLPLRSGLGGAPLGLRLPRETDEEPEEPGRRGSFVEMVDNLRGKSGQGYYVEMTVGSPPQTLNILVDTGSSNFAVGAAPHPFLHRYYQRQLSSTYRDLRKGVYVPYTQGKWEGELGTDLPDDSLEPFFDSLVKQTHVPNLFSLQLCGAGFPLNQSEVLASVGGSMIIGGIDHSLYTGSLWYTPIRREWYYEVIIVRVEINGQDLKMDCKEYNYDKSIVDSGTTNLRLPKKVFEAAVKSIKAASSTEKFPDGFWLGEQLVCWQAGTTPWNIFPVISLYLMGEVTNQSFRITILPQQYLRPVEDVATSQDDCYKFAISQSSTGTVMGAVIMEGFYVVFDRARKRIGFAVSACHVHDEFRTAAVEGPFVTLDMEDCGYNIPQTDESTLMTIAYVMAAICALFMLPLCLMVCQWCCLRCLRQQHDDFADDISLLK

SEQ ID NO: 237626 - DNA, 1374 bp, Artificial Sequence
  derived and/or modified sequence
atggcccaggccctgccctggttgctgctctggatgggcgctggggttttgccagcccatggtacacagcatgggataaggctccctcttaggagcggattgggcggcgcgccactggggcttaggctgccacgcgaaactgacgaagagccggaggagccaggcagacgcggctcctttgtcgaaatggtggataacctcaggggtaaatcaggacaaggttactacgtggaaatgaccgtcggatctcccccccagacacttaatatcctcgtggatacagggagctctaactttgccgttggggcagctccccaccctttcctgcaccggtattatcaacgccagctgtcaagcacttatagggacctgaggaaaggcgtgtacgtgccatacacccaggggaaatgggagggggaactcggtaccgacctcccagatgacagcctagagccctttttcgacagcctcgtgaaacagacacatgtgcccaatctgttctcgctgcagttgtgcggcgctggcttccccctcaaccaatccgaggtgcttgcttccgtcggggggtcaatgattatcggcggcatagatcacagcctgtatactggatccctgtggtacaccccaattagaagagagtggtactacgaggtgatcatcgtaagggtggaaatcaatggacaggaccttaagatggactgtaaggagtacaactatgataagagtattgtggactcgggcacaactaacctgaggctccctaagaaagtgttcgaagccgctgtcaagtcaatcaaagctgcgtcttcaacagagaagtttcccgacggcttttggttaggggagcaactcgtttgctggcaggccggtacgaccccgtggaatatctttccggttatctcgctctacttaatgggggaggtcaccaatcagagcttcaggatcaccatcctcccacagcagtacctgagaccagtggaggacgtggctactagccaagatgattgctataagttcgcaatttctcagtcctccacgggcactgtaatgggtgcggtgatcatggaaggtttctatgttgtctttgatcgtgccagaaagcgaatcggctttgccgtgtctgcctgtcacgtccacgacgagttccggactgccgctgtggaggggcccttcgttacattagacatggaggattgcggctataacatcccgcagactgatgagtctaccctgatgacaatagcctatgtgatggcagcaatctgcgctctgtttatgcttcctctctgcctgatggtctgccagtggtgctgcctgaggtgcctaaggcagcaacatgacgactttgctgacgatatcagcctattgaaatag

SEQ ID NO: 237627 - DNA, 1374 bp, Artificial Sequence
  derived and/or modified sequence
atggcccaggccctgccctggctgctgctgtggatgggcgctggggtgctgcctgcccacggcacccagcacggcatccggctgcccctgcggagcggcctgggcggggcccccctgggcctgcggctgccccgggagacagatgaggagcctgaggagcccggccggcggggcagctttgtggagatggtggacaacctgcggggcaagagcggccagggctactacgtggagatgacagtgggcagccccccccagaccctgaacatcctggtggacaccggcagcagcaactttgctgtgggcgccgccccccaccccttcctgcaccgctactaccagaggcagctgagcagcacctacagagacctgaggaagggcgtgtatgtgccctacacccagggcaagtgggagggggagctgggcacagacctgcctgatgacagcctggagcccttctttgacagcctggtgaagcagacccacgtgcccaacctcttcagcctgcagctgtgtggggccggcttccccctgaaccagagcgaggtgctggcctctgtgggcggctccatgatcattggaggcatcgaccacagcctgtacacaggcagcctgtggtacacccccatcagaagagagtggtactatgaggtgatcatcgtgcgggtggagatcaatggccaggacctgaagatggactgcaaggagtacaactatgacaagagcatcgtggacagcggcaccaccaacctgcggctgcccaagaaggtgtttgaggccgctgtgaagagcatcaaggccgccagcagcacagagaagttcccagatggcttctggctgggggagcagctggtgtgctggcaggccggcaccaccccctggaacatcttccctgtgatcagcctgtacctgatgggagaggtgaccaaccagagcttccgcatcaccatcctgccccagcagtacctgcggcctgtggaggatgtggccaccagccaggatgactgctacaagtttgccatcagccagagcagcacaggcaccgtgatgggcgccgtcatcatggagggcttctacgtggtgtttgaccgggccaggaagagaattggatttgctgtgtctgcctgccacgtgcatgatgagttcagaacagctgctgtggagggcccctttgtgaccctggacatggaggactgtggctacaacatcccccagacagatgagagcaccctgatgaccatcgcctacgtgatggccgccatctgtgccctcttcatgctgcccctgtgcctgatggtgtgccagtggtgctgcctgcgctgcctgcggcagcagcatgatgactttgctgatgacatcagcctgctgaagtag

SEQ ID NO: 237628 - DNA, 1374 bp, Artificial Sequence
  derived and/or modified sequence
atggcccaggccctgccctggctgctgctgtggatgggcgccggcgtgctgcccgcccatggcacacagcacggtattagactgcctctcagaagtgggttaggcggagccccactcgggctgcgcctgcctagagaaactgatgaagagccggaagaaccaggccgccggggttcctttgtggagatggtcgacaatctgcgcggaaaaagcggtcagggctattatgtcgagatgaccgtgggatctcccccacagacacttaatattctggtcgacacgggatcctccaactttgcagtgggtgcagccccgcaccccttcctgcaccgatactaccagaggcagctctccagtacctatagggacctgcggaagggcgtctacgtgccctatacccagggaaagtgggagggggaactcgggacagacctgccagacgattcattggagcctttcttcgattccctggttaaacaaacccacgtgccgaacctcttctccctccagctctgcggagccggctttcctctgaatcagagtgaagtgttagcctcagtgggaggttccatgatcatcgggggaattgaccactcactgtacactgggagcctgtggtatactccaatccgacgtgagtggtactatgaggtcatcatcgtgagagtagagataaacgggcaagatctgaagatggactgcaaggagtataattacgataagtctattgtcgatagcggtactacaaacctcaggctgcccaaaaaggtgttcgaggctgcagtgaagtccataaaggccgcaagcagtaccgagaagttccccgatgggttctggctcggagagcagttggtgtgctggcaagccgggaccacaccatggaacatcttcccagtgatcagtctctatttgatgggcgaggtgactaatcagtcgtttcgaatcactattctgcctcagcagtacttacgtcccgtcgaggacgtagccacttcccaggacgattgttataagttcgctatctcccagtcgtctacagggaccgtcatgggagcggtcataatggagggattttacgttgtattcgacagggccaggaagcggatcggcttcgcagtgtccgcttgccacgtccacgatgaattcaggaccgcagcggttgaggggccgtttgtcacactggatatggaggactgtgggtacaatatacctcagacagatgagtcaaccctcatgactatagcttatgtgatggccgctatctgcgctctgttcatgctgcctctgtgtcttatggtctgtcagtggtgctgcttaaggtgtttacgacagcagcacgacgacttcgctgatgacatcagcctgctgaagtag

SEQ ID NO: 237629 - DNA, 1374 bp, Artificial Sequence
  derived and/or modified sequence
atggcccaggcattgccatggttgctcctgtggatgggagccggtgtcctgccagcacatgggacgcaacacggtatcagactgcccctgcggtcaggcttgggtggcgcacccctggggctgcgcctccctcgcgagacagacgaggaacctgaggaaccaggccgaagagggagttttgtggaaatggtggacaatctgcgagggaaaagcgggcaaggatattatgtcgaaatgactgtcggatcgcccccacagactttgaacattctggtcgataccggttcatcaaactttgctgtgggagctgcccctcatcctttcctgcatcgctactaccagaggcaactcagcagcacttatagggatctgagaaagggcgtgtacgtgccctacacccagggaaaatgggagggcgagctgggcacagacctacccgacgattctctggaaccattctttgattccctcgtgaaacaaacacacgtcccaaatttgttctccctgcagctctgcggagccggatttccacttaatcagtccgaggtcctggcaagtgtcgggggtagcatgatcataggcggaatcgaccactcactgtacacaggctctctctggtatacacccatccgcagggaatggtattacgaagttatcatcgttcgcgtggagataaatggacaagacttaaaaatggattgtaaggagtataattacgacaaatccatcgtcgatagtggaacaaccaatctgaggctgccaaagaaggtctttgaagcggctgtgaagtctattaaagcagcatcttctaccgaaaaattccccgatggcttttggctaggggagcaactagtctgctggcaagctggcactacaccgtggaacatctttccggttatatcactttatttgatgggcgaagtgacaaatcagagctttcggatcaccatcctcccccagcagtacctgaggcccgtggaggacgttgccaccagtcaggacgattgttataaatttgctattagtcagtctagtaccggtaccgtaatgggggctgtgatcatggagggcttctatgtggtgtttgatcgagcgagaaaaaggatcggcttcgccgtttccgcctgtcatgtacacgacgagtttcgcacagccgctgtcgagggtccttttgtgaccctcgatatggaagactgcggatataacatcccccagacggacgaatctacacttatgactatcgcatacgtgatggctgccatctgcgcgctgttcatgttaccattatgcctcatggtgtgccaatggtgctgtctccgttgcttacggcagcagcacgatgactttgccgatgacatctcattgctgaaatag

SEQ ID NO: 237630 - DNA, 1408 bp, Artificial Sequence
  derived and/or modified sequence
accatggcccaagccctgccctggctcctgctgtggatgggcgcgggagtgctgcctgcccacggcacccagcacggcatccggctgcccctgcgcagcggcctggggggcgcccccctggggctgcggctgccccgggagaccgacgaagagcccgaggagcccggccggaggggcagctttgtggagatggtggacaacctgaggggcaagtcggggcagggctactacgtggagatgaccgtgggcagccccccgcagacgctcaacatcctggtggatacaggcagcagtaactttgcagtgggtgctgccccccaccccttcctgcatcgctactaccagaggcagctgtccagcacataccgggacctccggaagggtgtgtatgtgccctacacccagggcaagtgggaaggggagctgggcaccgacctgcctgacgactccctggagcctttctttgactctctggtaaagcagacccacgttcccaacctcttctccctgcagctttgtggtgctggcttccccctcaaccagtctgaagtgctggcctctgtcggagggagcatgatcattggaggtatcgaccactcgctgtacacaggcagtctctggtatacacccatccggcgggagtggtattatgaggtgatcattgtgcgggtggagatcaatggacaggatctgaaaatggactgcaaggagtacaactatgacaagagcattgtggacagtggcaccaccaaccttcgtttgcccaagaaagtgtttgaagctgcagtcaaatccatcaaggcagcctcctccacggagaagttccctgatggtttctggctaggagagcagctggtgtgctggcaagcaggcaccaccccttggaacattttcccagtcatctcactctacctaatgggtgaggttaccaaccagtccttccgcatcaccatccttccgcagcaatacctgcggccagtggaagatgtggccacgtcccaagacgactgttacaagtttgccatctcacagtcatccacgggcactgttatgggagctgttatcatggagggcttctacgttgtctttgatcgggcccgaaaacgaattggctttgctgtcagcgcttgccatgtgcacgatgagttcaggacggcagcggtggaaggcccttttgtcaccttggacatggaagactgtggctacaacattccacagacagatgagtcaaccctcatgaccatagcctatgtcatggctgccatctgcgccctcttcatgctgccactctgcctcatggtgtgtcagtggtgctgcctccgctgcctgcgccagcagcatgatgactttgctgatgacatctccctgctgaagtgaggaggcccatgggcagaagatagagattccc

SEQ ID NO: 237631 - DNA, 1374 bp, Artificial Sequence
  derived and/or modified sequence
atggcccaggccctgccctggctgctgctgtggatgggcgccggcgtgctgcccgcccacggcacccagcacggcatcagactgcccctgagaagcggcctgggcggcgcccccctgggcctgagactgcccagagagaccgacgaggagcccgaggagcccggcagaagaggcagcttcgtggagatggtggacaacctgagaggcaagagcggccagggctactacgtggagatgaccgtgggcagccccccccagaccctgaacatcctggtggacaccggcagcagcaacttcgccgtgggcgccgccccccaccccttcctgcacagatactaccagagacagctgagcagcacctacagagacctgagaaagggcgtgtacgtgccctacacccagggcaagtgggagggcgagctgggcaccgacctgcccgacgacagcctggagcccttcttcgacagcctggtgaagcagacccacgtgcccaacctgttcagcctgcagctgtgcggcgccggcttccccctgaaccagagcgaggtgctggccagcgtgggcggcagcatgatcatcggcggcatcgaccacagcctgtacaccggcagcctgtggtacacccccatcagaagagagtggtactacgaggtgatcatcgtgagagtggagatcaacggccaggacctgaagatggactgcaaggagtacaactacgacaagagcatcgtggacagcggcaccaccaacctgagactgcccaagaaggtgttcgaggccgccgtgaagagcatcaaggccgccagcagcaccgagaagttccccgacggcttctggctgggcgagcagctggtgtgctggcaggccggcaccaccccctggaacatcttccccgtgatcagcctgtacctgatgggcgaggtgaccaaccagagcttcagaatcaccatcctgccccagcagtacctgagacccgtggaggacgtggccaccagccaggacgactgctacaagttcgccatcagccagagcagcaccggcaccgtgatgggcgccgtgatcatggagggcttctacgtggtgttcgacagagccagaaagagaatcggcttcgccgtgagcgcctgccacgtgcacgacgagttcagaaccgccgccgtggagggccccttcgtgaccctggacatggaggactgcggctacaacatcccccagaccgacgagagcaccctgatgaccatcgcctacgtgatggccgccatctgcgccctgttcatgctgcccctgtgcctgatggtgtgccagtggtgctgcctgagatgcctgagacagcagcacgacgacttcgccgacgacatcagcctgctgaagtag

SEQ ID NO: 237632 - protein, 476 aa, Artificial Sequence
  derived and/or modified sequence
MAQALPWLLLWMGAGVLPAHGTQHGIRLPLRSGLGGAPLGLRLPRETDEEPEEPGRRGSFVEMVDNLRGKSGQGYYVEMTVGSPPQTLNILVDTGSSNFAVGAAPHPFLHRYYQRQLSSTYRDLRKGVYVPYTQGKWEGELGTDLVSIPHGPNVTVRANIAAITESDKFFINGSNWEGILGLAYAEIARLCGAGFPLNQSEVLASVGGSMIIGGIDHSLYTGSLWYTPIRREWYYEVIIVRVEINGQDLKMDCKEYNYDKSIVDSGTTNLRLPKKVFEAAVKSIKAASSTEKFPDGFWLGEQLVCWQAGTTPWNIFPVISLYLMGEVTNQSFRITILPQQYLRPVEDVATSQDDCYKFAISQSSTGTVMGAVIMEGFYVVFDRARKRIGFAVSACHVHDEFRTAAVEGPFVTLDMEDCGYNIPQTDESTLMTIAYVMAAICALFMLPLCLMVCQWCCLRCLRQQHDDFADDISLLK

SEQ ID NO: 237633 - DNA, 1431 bp, Artificial Sequence
  derived and/or modified sequence
atggcccaagccttgccttggctcttgctttggatgggggcaggcgtgcttccagcccacgggactcaacacggaatcaggctaccattacggtcaggtctgggcggggccccactggggttgcgccttccgcgtgaaaccgatgaagagcctgaagagcccggcagacgaggatcttttgtggaaatggtcgataatctgagaggaaaaagcggccagggctactacgtggagatgaccgtaggttccccaccccaaaccctgaacattctcgtcgatactgggtcctccaattttgccgtgggagctgccccgcatccctttcttcacaggtactaccagaggcagctctctagtacgtaccgagatctgcgcaagggcgtctacgtgccgtatacacagggaaagtgggagggggaactgggaacagatctcgtgtctatacctcacggtcctaacgttactgtcagagcaaacattgcagctattacggaaagtgataagtttttcatcaacggatccaactgggaagggattttgggcctcgcttacgccgagattgcccgcttatgcggggccgggtttccactcaaccagagcgaggtactggcttccgtaggtggatcgatgatcatcggagggatcgatcatagtctatacactgggagtctctggtacacccctatccggagggagtggtactacgaagtgattattgttcgggtggagattaacggtcaggacctgaagatggattgcaaagaatacaactacgacaaatccattgttgatagcggaacgaccaacttgcgcctgcctaagaaagtcttcgaggctgcggtgaaatctatcaaggcagcctcctctaccgaaaaatttcccgatggattttggctgggcgaacaactggtttgctggcaggccggtaccaccccttggaacattttccccgtgatctccctgtatttgatgggcgaagtgaccaaccagtcattcaggattaccatcttacctcagcaatacttgcggccagtggaagatgtggccacatctcaggacgattgctataagttcgccatatcgcagagcagtaccgggactgtcatgggggcagtaatcatggagggtttctatgttgtgtttgacagagcccggaagcggatcgggttcgcggtgtctgcatgccatgtacatgatgagttcagaacagctgctgttgaaggtccatttgtgacactggatatggaggattgtggatacaatatcccgcagaccgatgaaagcaccctgatgaccattgcttacgttatggctgccatatgcgctcttttcatgttgccattgtgtctcatggtgtgccagtggtgttgcttaaggtgcctgagacagcagcacgacgactttgcggatgacatctctctcctgaagtag

SEQ ID NO: 237634 - DNA, 1431 bp, Artificial Sequence
  derived and/or modified sequence
atggcccaggccctgccctggctgctgctgtggatgggcgctggggtgctgcctgcccacggcacccagcacggcatccggctgcccctgcggagcggcctgggcggggcccccctgggcctgcggctgccccgggagacagatgaggagcctgaggagcccggccggcggggcagctttgtggagatggtggacaacctgcggggcaagagcggccagggctactacgtggagatgacagtgggcagccccccccagaccctgaacatcctggtggacaccggcagcagcaactttgctgtgggcgccgccccccaccccttcctgcaccgctactaccagaggcagctgagcagcacctacagagacctgaggaagggcgtgtatgtgccctacacccagggcaagtgggagggggagctgggcacagacctggtgtccatcccccacggccccaacgtgacagtgcgggccaacattgctgccatcacagaaagtgacaagttcttcatcaatggcagcaactgggagggcatcctgggcctggcctatgcagaaattgcccggctgtgtggggccggcttccccctgaaccagagcgaggtgctggcctctgtgggcggctccatgatcatcggcggcatcgaccacagcctgtacacaggcagcctgtggtacacccccatccggcgggagtggtactatgaagtcatcatcgtgcgggtggagatcaatggccaggacctgaagatggactgcaaggagtacaactatgacaagagcatcgtggacagcggcaccaccaacctgcggctgcccaagaaggtgtttgaagctgctgtgaagagcatcaaggccgccagcagcacagagaagttcccagatggcttctggctgggggagcagctggtgtgctggcaggccggcaccaccccctggaacatcttccctgtgatcagcctgtacctgatgggagaggtgaccaaccagagcttccgcatcaccatcctgccccagcagtacctgcggcctgtggaggatgtggccaccagccaggatgactgctacaagtttgccatcagccagagcagcactggaacagtgatgggcgctgtgatcatggagggcttctacgtggtgtttgaccgggccaggaagagaattggatttgctgtgtctgcctgccacgtgcatgatgagttcagaacagctgctgtggagggcccctttgtgaccctggacatggaggactgtggctacaacatcccccagacagatgagagcaccctgatgaccatcgcctacgtgatggccgccatctgtgccctcttcatgctgcccctgtgcctgatggtgtgccagtggtgctgcctgcgctgcctgcggcagcagcatgatgactttgctgatgacatcagcctgctgaagtag

SEQ ID NO: 237635 - DNA, 1431 bp, Artificial Sequence
  derived and/or modified sequence
atggcccaggccctgccctggctgctgctgtggatgggcgccggcgtactgccagcccacgggacgcagcatggaatcagactgccgctccggtccggtcttggtggagcccctttaggcctgagactgccacgcgagacagatgaagagcccgaggaaccaggcaggcggggaagctttgttgagatggtagacaatctcagagggaaaagcggtcaaggatactacgtcgagatgactgtcggttccccccctcaaacgttgaatatcctggtcgacactgggagcagcaacttcgctgtgggtgccgcaccacaccccttcctgcacagatactatcagagacagctgtcctcgacctaccgggaccttagaaaaggcgtgtacgtcccatacacccagggcaaatgggaaggagagctgggtaccgacctggtgtccatcccgcacggcccaaatgtgacagtccgtgcaaatatcgcagcgattacagagtctgacaagttctttattaacggttcgaactgggaaggcattctcggactggcctatgctgaaatcgcaaggttgtgtggggctggcttccccttgaatcagtcagaagtcctggcgtccgtgggcggtagtatgattatcggcggcattgaccactctctgtacacggggtccctgtggtacacacccatacgcagagaatggtactacgaagtcatcatcgtgagggtcgaaataaatggccaagaccttaagatggattgcaaggaatacaattacgacaaatcaatcgtggattcgggaacaacaaatcttcgactgcccaaaaaagtgtttgaggccgctgtcaagtccattaaagcggcctcctccacagaaaagtttcccgatggcttctggttaggggagcaactggtgtgttggcaggctggcacaacaccctggaacatatttcctgtgattagtctgtatcttatgggggaggtgacaaatcagtcctttagaattacaatcctgccacagcagtatctccgtcccgtcgaggatgtagctaccagccaagacgactgctacaagttcgccatctcacaatcgagcactgggaccgtgatgggcgctgtgataatggaaggattctacgtggtattcgaccgggcacggaagcgcatcggatttgctgtgtctgcatgtcatgtgcacgacgagtttcgcactgccgctgtcgaggggccatttgtgactctggacatggaagattgcggttataacattccccaaacagatgaaagtaccctgatgacgatagcctacgtgatggccgctatctgcgccctgttcatgctgccgctgtgcttaatggtctgccagtggtgttgtctcagatgtctacgtcaacaacatgatgacttcgctgatgatattagtttgctcaaatag

SEQ ID NO: 237636 - DNA, 1431 bp, Artificial Sequence
  derived and/or modified sequence
atggctcaggctcttccttggctgctgctgtggatgggtgcaggagttctgcccgcacacggcacacagcacggaatccggctaccactccggagtggcttgggtggagcacccctgggcctccgactgcccagagagacggacgaggagcctgaggagcctggacgtcggggtagcttcgttgagatggttgataatttgagaggcaagagtgggcagggttactatgttgagatgaccgtcggttcacccccacagacgctgaatattttggttgacaccggctcatccaatttcgccgtcggtgccgcaccgcacccatttctccacaggtactatcaaaggcagctctctagcacctatagagacctgcgaaagggcgtctatgtaccatatacacagggaaagtgggagggggagcttggaacagatttggtctcaatcccccacggacccaatgttacggtccgggctaatatagccgcaattacggagagcgataaattctttatcaacggatctaactgggagggcatactggggctggcctacgccgaaattgctagactgtgtggtgccggatttcctctcaatcagtcggaagtgctcgcaagcgtggggggaagtatgattataggagggattgaccatagcctctatacgggatctctatggtatacccccatccggagggaatggtactacgaagtgattatcgtgcgggtcgagatcaatggccaggatctcaaaatggactgcaaggaatacaattacgacaaatcgatcgtggactcaggcaccactaatttgcgactccctaaaaaagtgtttgaggctgctgtcaagtcaataaaagccgcttccagcaccgaaaagtttcccgacggcttctggttgggtgagcagctcgtgtgctggcaggccggaactactccctggaatatttttcccgtgatcagcctctacctcatgggggaagtaacaaatcagtctttccggattaccattctcccccagcaatatcttcgaccagtggaagacgtagctacttcacaggatgattgctataagttcgctattagtcagtcctccacaggaacagtgatgggagccgtaataatggagggcttttatgtggtcttcgatagggcaaggaagcgaatcggattcgcagtgtccgcctgccatgtacatgatgagtttcggacggccgcagtggaggggccatttgttactctcgacatggaggattgcgggtataacatcccacagacagacgagagcacattgatgactatcgcctacgtgatggctgctatttgcgccctcttcatgcttcccctatgccttatggtctgtcagtggtgctgtctgcggtgtctgagacagcagcacgacgatttcgccgatgacatctccctgctaaaatag

SEQ ID NO: 237637 - DNA, 1465 bp, Artificial Sequence
  derived and/or modified sequence
accatggcccaagccctgccctggctcctgctgtggatgggcgcgggagtgctgcctgcccacggcacccagcacggcatccggctgcccctgcgcagcggcctggggggcgcccccctggggctgcggctgccccgggagaccgacgaagagcccgaggagcccggccggaggggcagctttgtggagatggtggacaacctgaggggcaagtcggggcagggctactacgtggagatgaccgtgggcagccccccgcagacgctcaacatcctggtggatacaggcagcagtaactttgcagtgggtgctgccccccaccccttcctgcatcgctactaccagaggcagctgtccagcacataccgggacctccggaagggtgtgtatgtgccctacacccagggcaagtgggaaggggagctgggcaccgacctggtaagcatcccccatggccccaacgtcactgtgcgtgccaacattgctgccatcactgaatcagacaagttcttcatcaacggctccaactgggaaggcatcctggggctggcctatgctgagattgccaggctttgtggtgctggcttccccctcaaccagtctgaagtgctggcctctgtcggagggagcatgatcattggaggtatcgaccactcgctgtacacaggcagtctctggtatacacccatccggcgggagtggtattatgaggtgatcattgtgcgggtggagatcaatggacaggatctgaaaatggactgcaaggagtacaactatgacaagagcattgtggacagtggcaccaccaaccttcgtttgcccaagaaagtgtttgaagctgcagtcaaatccatcaaggcagcctcctccacggagaagttccctgatggtttctggctaggagagcagctggtgtgctggcaagcaggcaccaccccttggaacattttcccagtcatctcactctacctaatgggtgaggttaccaaccagtccttccgcatcaccatccttccgcagcaatacctgcggccagtggaagatgtggccacgtcccaagacgactgttacaagtttgccatctcacagtcatccacgggcactgttatgggagctgttatcatggagggcttctacgttgtctttgatcgggcccgaaaacgaattggctttgctgtcagcgcttgccatgtgcacgatgagttcaggacggcagcggtggaaggcccttttgtcaccttggacatggaagactgtggctacaacattccacagacagatgagtcaaccctcatgaccatagcctatgtcatggctgccatctgcgccctcttcatgctgccactctgcctcatggtgtgtcagtggtgctgcctccgctgcctgcgccagcagcatgatgactttgctgatgacatctccctgctgaagtgaggaggcccatgggcagaagatagagattccc

SEQ ID NO: 237638 - DNA, 1431 bp, Artificial Sequence
  derived and/or modified sequence
atggcccaggccctgccctggctgctgctgtggatgggcgccggcgtgctgcccgcccacggcacccagcacggcatcagactgcccctgagaagcggcctgggcggcgcccccctgggcctgagactgcccagagagaccgacgaggagcccgaggagcccggcagaagaggcagcttcgtggagatggtggacaacctgagaggcaagagcggccagggctactacgtggagatgaccgtgggcagccccccccagaccctgaacatcctggtggacaccggcagcagcaacttcgccgtgggcgccgccccccaccccttcctgcacagatactaccagagacagctgagcagcacctacagagacctgagaaagggcgtgtacgtgccctacacccagggcaagtgggagggcgagctgggcaccgacctggtgagcatcccccacggccccaacgtgaccgtgagagccaacatcgccgccatcaccgagagcgacaagttcttcatcaacggcagcaactgggagggcatcctgggcctggcctacgccgagatcgccagactgtgcggcgccggcttccccctgaaccagagcgaggtgctggccagcgtgggcggcagcatgatcatcggcggcatcgaccacagcctgtacaccggcagcctgtggtacacccccatcagaagagagtggtactacgaggtgatcatcgtgagagtggagatcaacggccaggacctgaagatggactgcaaggagtacaactacgacaagagcatcgtggacagcggcaccaccaacctgagactgcccaagaaggtgttcgaggccgccgtgaagagcatcaaggccgccagcagcaccgagaagttccccgacggcttctggctgggcgagcagctggtgtgctggcaggccggcaccaccccctggaacatcttccccgtgatcagcctgtacctgatgggcgaggtgaccaaccagagcttcagaatcaccatcctgccccagcagtacctgagacccgtggaggacgtggccaccagccaggacgactgctacaagttcgccatcagccagagcagcaccggcaccgtgatgggcgccgtgatcatggagggcttctacgtggtgttcgacagagccagaaagagaatcggcttcgccgtgagcgcctgccacgtgcacgacgagttcagaaccgccgccgtggagggccccttcgtgaccctggacatggaggactgcggctacaacatcccccagaccgacgagagcaccctgatgaccatcgcctacgtgatggccgccatctgcgccctgttcatgctgcccctgtgcctgatggtgtgccagtggtgctgcctgagatgcctgagacagcagcacgacgacttcgccgacgacatcagcctgctgaagtag

SEQ ID NO: 237639 - protein, 432 aa, Artificial Sequence
  derived and/or modified sequence
MAQALPWLLLWMGAGVLPAHGTQHGIRLPLRSGLGGAPLGLRLPRETDEEPEEPGRRGSFVEMVDNLRGKSGQGYYVEMTVGSPPQTLNILVDTGSSNFAVGAAPHPFLHRYYQRQLSSTYRDLRKGVYVPYTQGKWEGELGTDLLCGAGFPLNQSEVLASVGGSMIIGGIDHSLYTGSLWYTPIRREWYYEVIIVRVEINGQDLKMDCKEYNYDKSIVDSGTTNLRLPKKVFEAAVKSIKAASSTEKFPDGFWLGEQLVCWQAGTTPWNIFPVISLYLMGEVTNQSFRITILPQQYLRPVEDVATSQDDCYKFAISQSSTGTVMGAVIMEGFYVVFDRARKRIGFAVSACHVHDEFRTAAVEGPFVTLDMEDCGYNIPQTDESTLMTIAYVMAAICALFMLPLCLMVCQWCCLRCLRQQHDDFADDISLLK

SEQ ID NO: 237640 - DNA, 1299 bp, Artificial Sequence
  derived and/or modified sequence
atggctcaagcattgccttggctgctgctttggatgggagcgggcgtgctacctgctcacggtacccagcatggcattcggttgccactacgctccggactcggcggtgcccctctgggactcaggttgcccagagagactgatgaggagccagaggagccagggcgtcgcggctccttcgttgaaatggttgataatctaaggggcaaaagcggtcagggctattatgtggagatgacggtgggctcccccccacagacacttaatattctggtcgataccggttcttcaaatttcgcagtgggggctgccccacatcctttcctgcatcggtattaccaaagacagcttagcagtacatatcgcgatctgcggaagggcgtgtacgttccttatactcaggggaagtgggagggagaattgggcactgatttgctctgcggagcaggatttcccctgaatcaatctgaggtgctggccagcgtcggtggttcgatgatcattggcggcatcgatcattctctttatacagggtcactgtggtacacacctatccgcagggagtggtactatgaggtcattattgtgcgcgtggaaatcaatggacaggatctgaagatggactgtaaggagtacaactatgataaatccattgtagactctggcacgacaaatctcagactccctaagaaggtgtttgaggcagcggttaaatcgatcaaggctgctagttcaaccgaaaaatttcctgatgggttctggctgggtgagcagttggtgtgctggcaggcaggcactaccccttggaacatcttcccagtgatatctctatacctgatgggagaagtgacaaaccaatctttccggattaccattcttcctcaacagtatttgcgcccagtggaagatgtggccacttcccaggacgattgctataagttcgctatcagccagagctctacaggcaccgtgatgggcgccgttataatggaggggttttacgtggtgttcgatcgagctcgaaaaagaatcgggtttgccgtgtctgcttgtcacgtccacgacgagttcagaactgccgctgtggagggccccttcgtaacgctggacatggaagattgcggctataacatcccgcagacagacgagtctacactgatgactatcgcttatgtgatggcagccatctgcgcactcttcatgcttccactctgtttaatggtttgtcagtggtgctgtctgaggtgcttaaggcagcaacacgacgattttgccgatgatatctccttgctcaaatag

SEQ ID NO: 237641 - DNA, 1299 bp, Artificial Sequence
  derived and/or modified sequence
atggcccaggccctgccctggctgctgctgtggatgggcgctggggtgctgcctgcccacggcacccagcacggcatccggctgcccctgcggagcggcctgggcggggcccccctgggcctgcggctgccccgggagacagatgaggagcctgaggagcccggccggcggggcagctttgtggagatggtggacaacctgcggggcaagagcggccagggctactacgtggagatgacagtgggcagccccccccagaccctgaacatcctggtggacaccggcagcagcaactttgctgtgggcgccgccccccaccccttcctgcaccgctactaccagaggcagctgagcagcacctacagagacctgaggaagggcgtgtatgtgccctacacccagggcaagtgggagggggagctgggcacagacctgctgtgtggggccggcttccccctgaaccagagcgaggtgctggcctctgtgggcggctccatgatcatcggcggcatcgaccacagcctgtacacaggcagcctgtggtacacccccatccggcgggagtggtactatgaagtcatcatcgtgcgggtggagatcaatggccaggacctgaagatggactgcaaggagtacaactatgacaagagcatcgtggacagcggcaccaccaacctgcggctgcccaagaaggtgtttgaagctgctgtgaagagcatcaaggccgccagcagcacagagaagttcccagatggcttctggctgggggagcagctggtgtgctggcaggccggcaccaccccctggaacatcttccctgtgatcagcctgtacctgatgggagaggtgaccaaccagagcttccgcatcaccatcctgccccagcagtacctgcggcctgtggaggatgtggccaccagccaggatgactgctacaagtttgccatcagccagagcagcactggaacagtgatgggcgctgtgatcatggagggcttctacgtggtgtttgaccgggccaggaagagaattggatttgctgtgtctgcctgccacgtgcatgatgagttcagaacagctgctgtggagggcccctttgtgaccctggacatggaggactgtggctacaacatcccccagacagatgagagcaccctgatgaccatcgcctacgtgatggccgccatctgtgccctcttcatgctgcccctgtgcctgatggtgtgccagtggtgctgcctgcgctgcctgcggcagcagcatgatgactttgctgatgacatcagcctgctgaagtag

SEQ ID NO: 237642 - DNA, 1299 bp, Artificial Sequence
  derived and/or modified sequence
atggcccaggccctgccctggctgctgctgtggatgggcgccggcgtactccctgcgcacgggacgcagcatgggattcgacttccgctccggtctggcctgggcggcgcacctctgggactgcggctacccagagagactgacgaggagccagaggagcccggacggaggggctcctttgtggaaatggttgacaatctcagagggaagtcaggacaggggtactacgtggagatgactgtgggatctccaccgcagacccttaatatcctagtcgatacaggctcttccaattttgcagtcggggctgcaccacacccgtttttacacagatactatcaaagacaactgtcctcgacctacagagaccttagaaagggggtttatgtgccttacacacaaggaaagtgggagggggagcttgggactgatctactgtgcggagccgggtttccgcttaaccagtccgaagtactggcatccgtcggcggcagcatgattatcggcggtatcgaccattcactctacactgggagcctatggtacacacctatacggagagaatggtactacgaggtaatcatcgtgcgggtagaaattaatggccaggacctcaaaatggattgtaaagagtataattatgacaaaagtatcgtagactctggaactactaatttacgtctgcccaagaaggtgtttgaagccgctgtgaaatctatcaaagcagcgtcctctaccgaaaaatttcctgacgggttttggctgggcgaacagcttgtgtgctggcaggctggcaccactccttggaatatctttcccgttatttccttgtacctcatgggcgaggtgacaaatcagtctttcaggatcaccattctaccacagcagtaccttcggcccgtggaggacgtggccacaagtcaggacgattgttacaagttcgccattagccagtccagtaccgggacggtaatgggggccgtgattatggaagggttctacgtcgtgtttgacagagctcgaaaacgaatcggcttcgcggtctcagcttgccatgtgcacgatgagtttcggaccgctgctgtcgagggccctttcgtcacattagacatggaagattgtggatacaacataccacagaccgacgagtctaccctgatgacgatcgcctacgtcatggccgctatttgcgcactgtttatgttacctttatgtctcatggtgtgccaatggtgctgtctgcggtgtctgaggcagcaacacgacgacttcgctgatgacatcagcctgttgaaatag

SEQ ID NO: 237643 - DNA, 1299 bp, Artificial Sequence
  derived and/or modified sequence
atggcccaagcactgccgtggctgcttctgtggatgggcgctggagttctgcccgctcacggtacacagcacggcataagactacccctgagaagcgggctcgggggtgcacctctcgggttgcgcctgcccagagaaacggacgaagaacccgaagagcccggacggaggggctcgtttgtggagatggtcgataacctccgcggtaagtcaggacaggggtactatgtggagatgaccgtgggtagcccacctcaaacacttaatatccttgtggacactggctcaagtaattttgctgtgggcgctgcccctcatccattcctgcacaggtactaccagcgacaactctccagcacatatcgcgaccttcggaaaggggtatatgtgccctacactcagggaaaatgggagggtgagctcggaacagatctgctgtgcggggcagggttccccttaaaccagtccgaggttttagccagcgtgggcggtagtatgattataggcggaatcgaccactccctgtacactgggtcactttggtatactcctattcgcagggaatggtactacgaggtcatcatagtaagagtagagataaacggacaggacctgaaaatggattgtaaagaatacaactacgataagtcgattgttgattctggaactactaacctgagactccctaaaaaggtcttcgaggctgccgtcaagtctatcaaggctgctagttccacagagaaattccctgacggcttctggcttggggagcagctggtctgctggcaggctggcacaacgccttggaatatctttcctgttatctcactgtatctgatgggcgaggttacgaatcagagcttccgcattaccatccttcctcagcagtatttacgtcccgtggaagatgtcgccacctctcaggatgactgctataaattcgcaatatcccagtcctccacagggactgtgatgggggctgttataatggaaggcttctatgtggtttttgaccgcgctaggaaaagaatcggcttcgctgtgagcgcatgtcatgtgcacgacgagtttcgcacagccgcagtggaagggccattcgttaccttggatatggaggattgcgggtacaatatcccccaaaccgacgaaagcacactgatgactatcgcatatgttatggccgcaatttgcgctctctttatgcttcccctgtgtctgatggtctgtcagtggtgttgcctgcgatgccttaggcagcaacacgatgattttgcagatgatatctcacttctgaaatag

SEQ ID NO: 237644 - DNA, 1333 bp, Artificial Sequence
  derived and/or modified sequence
accatggcccaagccctgccctggctcctgctgtggatgggcgcgggagtgctgcctgcccacggcacccagcacggcatccggctgcccctgcgcagcggcctggggggcgcccccctggggctgcggctgccccgggagaccgacgaagagcccgaggagcccggccggaggggcagctttgtggagatggtggacaacctgaggggcaagtcggggcagggctactacgtggagatgaccgtgggcagccccccgcagacgctcaacatcctggtggatacaggcagcagtaactttgcagtgggtgctgccccccaccccttcctgcatcgctactaccagaggcagctgtccagcacataccgggacctccggaagggtgtgtatgtgccctacacccagggcaagtgggaaggggagctgggcaccgacctgctttgtggtgctggcttccccctcaaccagtctgaagtgctggcctctgtcggagggagcatgatcattggaggtatcgaccactcgctgtacacaggcagtctctggtatacacccatccggcgggagtggtattatgaggtgatcattgtgcgggtggagatcaatggacaggatctgaaaatggactgcaaggagtacaactatgacaagagcattgtggacagtggcaccaccaaccttcgtttgcccaagaaagtgtttgaagctgcagtcaaatccatcaaggcagcctcctccacggagaagttccctgatggtttctggctaggagagcagctggtgtgctggcaagcaggcaccaccccttggaacattttcccagtcatctcactctacctaatgggtgaggttaccaaccagtccttccgcatcaccatccttccgcagcaatacctgcggccagtggaagatgtggccacgtcccaagacgactgttacaagtttgccatctcacagtcatccacgggcactgttatgggagctgttatcatggagggcttctacgttgtctttgatcgggcccgaaaacgaattggctttgctgtcagcgcttgccatgtgcacgatgagttcaggacggcagcggtggaaggcccttttgtcaccttggacatggaagactgtggctacaacattccacagacagatgagtcaaccctcatgaccatagcctatgtcatggctgccatctgcgccctcttcatgctgccactctgcctcatggtgtgtcagtggtgctgcctccgctgcctgcgccagcagcatgatgactttgctgatgacatctccctgctgaagtgaggaggcccatgggcagaagatagagattccc

SEQ ID NO: 237645 - DNA, 1299 bp, Artificial Sequence
  derived and/or modified sequence
atggcccaggccctgccctggctgctgctgtggatgggcgccggcgtgctgcccgcccacggcacccagcacggcatcagactgcccctgagaagcggcctgggcggcgcccccctgggcctgagactgcccagagagaccgacgaggagcccgaggagcccggcagaagaggcagcttcgtggagatggtggacaacctgagaggcaagagcggccagggctactacgtggagatgaccgtgggcagccccccccagaccctgaacatcctggtggacaccggcagcagcaacttcgccgtgggcgccgccccccaccccttcctgcacagatactaccagagacagctgagcagcacctacagagacctgagaaagggcgtgtacgtgccctacacccagggcaagtgggagggcgagctgggcaccgacctgctgtgcggcgccggcttccccctgaaccagagcgaggtgctggccagcgtgggcggcagcatgatcatcggcggcatcgaccacagcctgtacaccggcagcctgtggtacacccccatcagaagagagtggtactacgaggtgatcatcgtgagagtggagatcaacggccaggacctgaagatggactgcaaggagtacaactacgacaagagcatcgtggacagcggcaccaccaacctgagactgcccaagaaggtgttcgaggccgccgtgaagagcatcaaggccgccagcagcaccgagaagttccccgacggcttctggctgggcgagcagctggtgtgctggcaggccggcaccaccccctggaacatcttccccgtgatcagcctgtacctgatgggcgaggtgaccaaccagagcttcagaatcaccatcctgccccagcagtacctgagacccgtggaggacgtggccaccagccaggacgactgctacaagttcgccatcagccagagcagcaccggcaccgtgatgggcgccgtgatcatggagggcttctacgtggtgttcgacagagccagaaagagaatcggcttcgccgtgagcgcctgccacgtgcacgacgagttcagaaccgccgccgtggagggccccttcgtgaccctggacatggaggactgcggctacaacatcccccagaccgacgagagcaccctgatgaccatcgcctacgtgatggccgccatctgcgccctgttcatgctgcccctgtgcctgatggtgtgccagtggtgctgcctgagatgcctgagacagcagcacgacgacttcgccgacgacatcagcctgctgaagtag

SEQ ID NO: 237646 - protein, 319 aa, Artificial Sequence
  derived and/or modified sequence
MELMDANLCQVIQMELDHERMSYLLYQMLCGIKHLHSAGIIHRDLKPSNIVVKSDCTLKILDFGLARTAGTSFMMTPYVVTRYYRAPEVILGMGYKENVDIWSVGCIMGEMVRHKILFPGRDYIDQWNKVIEQLGTPCPEFMKKLQPTVRNYVENRPKYAGLTFPKLFPDSLFPADSEHNKLKASQARDLLSKMLVIDPAKRISVDDALQHPYINVWYDPAEVEAPPPQIYDKQLDEREHTIEEWKELIYKEVMNSEEKTKNGVVKGQPSPSGAAVNSSESLPPSSSVNDISSMSTDQTLASDTDSSLEASAGPLGCCR

SEQ ID NO: 237647 - protein, 426 aa, Artificial Sequence
  derived and/or modified sequence
MSKSKVDNQFYSVEVGDSTFTVLKRYQNLKPIGSGAQGIVCAAYDAVLDRNVAIKKLSRPFQNQTHAKRAYRELVLMKCVNHKNIISLLNVFTPQKTLEEFQDVYLVMELMDANLCQVIQMELDHERMSYLLYQMLCGIKHLHSAGIIHRDLKPSNIVVKSDCTLKILDFGLARTAGTSFMMTPYVVTRYYRAPEVILGMGYKENVDIWSVGCIMGEMVRHKILFPGRDYIDQWNKVIEQLGTPCPEFMKKLQPTVRNYVENRPKYAGLTFPKLFPDSLFPADSEHNKLKASQARDLLSKMLVIDPAKRISVDDALQHPYINVWYDPAEVEAPPPQIYDKQLDEREHTIEEWKELIYKEVMNSEEKTKNGVVKGQPSPSGAAVNSSESLPPSSSVNDISSMSTDQTLASDTDSSLEASAGPLGCCR

SEQ ID NO: 237648 - protein, 74 aa, Artificial Sequence
  derived and/or modified sequence
MSKSKVDNQFYSVEVGDSTFTVLKRYQNLKPIGSGAQGIVCAAYDAVLDRNVAIKKLSRPFQNQTHAKRAYREL

SEQ ID NO: 237649 - protein, 84 aa, Artificial Sequence
  derived and/or modified sequence
MSKSKVDNQFYSVEVGDSTFTVLKRYQNLKPIGSGAQGIVCAAYDAVLDRNVAIKKLSRPFQNQTHAKRAYRELVLMKCVNHKN

SEQ ID NO: 237650 - DNA, 1281 bp, Artificial Sequence
  derived and/or modified sequence
atgtccaagtctaaggtggataatcagttttacagtgtcgaagtgggggattctacgtttacagttttgaaaagataccagaatctaaagccaatcggatcaggagcacaggggattgtgtgcgccgcctacgacgccgtgctagaccgtaacgtcgctattaagaagctttccagaccatttcagaaccagacccatgccaagagggcgtaccgggagctcgtcctgatgaaatgcgtaaaccataaaaacattattagcctgctgaacgtctttaccccgcagaagacattggaagaatttcaggacgtctatctcgtcatggaactgatggatgcaaacctgtgtcaggtaatccagatggaattagaccatgagcggatgtcctacctcctgtaccagatgctgtgtgggattaaacaccttcattctgcaggtattattcacagggaccttaaaccctcaaacattgtggtcaaatcggattgcacactgaagatccttgattttggattagcaaggacagccggtacaagtttcatgatgacgccatacgtagtgacgaggtactacagagctcccgaagtgattttggggatgggatataaagagaacgtggatatatggtccgtgggctgcatcatgggagaaatggttcgccacaagattctcttccctgggcgggactatatcgatcagtggaataaggttatcgagcagctaggtaccccctgtccggaattcatgaaaaagctgcagcccaccgttcggaattacgtcgagaaccgaccaaagtacgctggtctgactttccccaaactgttccccgactctctgtttcctgccgattctgaacataataagctgaaggcttcacaggcccgcgatctgcttagcaaaatgctggtgatcgacccagccaaaagaatctcagtcgatgacgctttgcagcatccatacattaatgtctggtatgaccctgccgaagtcgaggcccctcccccgcagatctacgataagcagcttgacgagagagagcatacgattgaggagtggaaagagcttatctataaagaggtcatgaatagcgaagagaagaccaagaatggtgttgtgaaaggacagccatcaccttcgggtgctgccgtgaattcatctgaatcattaccgccctcctcatcagttaacgatatctcgtctatgagcactgatcaaactttagcgtccgataccgacagctctctggaggcctccgccggccccctgggttgttgtcgatag

SEQ ID NO: 237651 - DNA, 1281 bp, Artificial Sequence
  derived and/or modified sequence
atgtctaagtcaaaggtcgataaccagttttactccgtagaggtaggagattctacttttaccgtgctgaagcgttatcagaatctgaaacctatcggatcgggggctcaggggatcgtgtgtgcggcctacgacgcagttctggaccgcaacgttgcgattaaaaaattgtctcgccctttccaaaatcagacacacgccaaaagagcttaccgagagctcgttcttatgaaatgcgtgaaccataagaacataatctccttactgaacgtgttcaccccacagaaaacgctcgaggagtttcaggatgtttacttggtgatggaattaatggacgcaaacctgtgtcaggtgatccagatggagcttgaccacgagcgaatgtcttatttgctgtatcagatgctttgcggcatcaaacatctgcatagcgccggcatcatccatagggatctgaagcccagcaatatcgtggtcaaatccgattgcaccttaaagattctggacttcggactggccagaaccgcaggtaccagcttcatgatgacaccttacgtggttacccgatattacagagctcctgaggtgatcctgggaatgggctataaggagaatgtagacatttggtcagtcggttgcattatgggcgaaatggtgcggcacaagatcttgttcccaggccgtgattacatagaccagtggaacaaagtgatagaacagcttggcacgccgtgccctgagttcatgaagaaacttcaacctaccgtgcgaaactatgtggaaaataggccgaagtacgcgggcctcaccttccctaagctgttcccggacagcctctttccagccgatagcgaacacaacaagctcaaagcgtcccaggctcgggacttgctttccaaaatgctcgtgattgatcccgctaaaagaattagcgtcgatgatgctttgcagcatccatacataaacgtgtggtacgaccccgcagaggttgaggctccacctccgcagatctacgacaagcagctggacgagcgtgaacatacgattgaagaatggaaagagctcatttacaaagaggtgatgaactccgaagaaaaaacgaagaatggtgtggtgaagggtcagccgtcgccttctggcgccgctgtgaactcgtccgagagtttacctccctctagcagcgttaacgacatatccagcatgtccaccgatcagacactagccagcgacaccgacagtagcctggaagcctccgccggacccctgggctgctgtagatag

SEQ ID NO: 237652 - DNA, 1281 bp, Artificial Sequence
  derived and/or modified sequence
atgagcaagagcaaggtggacaaccagttctacagcgtggaggtgggggacagcaccttcaccgtgctgaagcgctaccagaacctgaagcccatcggcagcggggcccagggcatcgtgtgtgccgcctatgatgctgtgctggacagaaatgtggccatcaagaagctgagccggcccttccagaaccagacccacgccaagagggcctaccgggagctggtgctgatgaagtgtgtgaaccacaagaacatcatcagcctgctgaatgtgttcaccccccagaagaccctggaggagttccaggatgtgtacctggtgatggagctgatggatgccaacctgtgccaggtgatccagatggagctggaccacgagaggatgagctacctgctgtaccagatgctgtgtggcatcaagcacctgcacagcgctggcatcatccaccgggacctgaagcccagcaacatcgtggtgaagagtgactgcaccctgaagatcctggactttggcctggccaggacagctggcaccagcttcatgatgaccccctacgtggtgacccgctactaccgggcccctgaggtgatcctgggcatgggctacaaggaaaatgtggacatctggagcgtgggctgcatcatgggagagatggtgcgccacaagatcctcttccctggccgggactacatcgaccagtggaacaaggtgattgagcagctgggcaccccctgcccagagttcatgaagaagctgcagcccaccgtgagaaattatgtggagaaccggcccaagtatgccggcctgaccttccccaagctgttcccagacagcctcttccctgctgacagcgagcacaacaagctgaaggccagccaggcccgggacctgctgagcaagatgctggtgattgatcctgccaagaggatctctgtggatgatgccctgcagcacccctacatcaacgtgtggtatgaccctgctgaggtggaggcccccccaccccagatctatgacaagcagctggatgagcgggagcacaccatcgaggagtggaaggagctgatctacaaggaggtgatgaacagcgaggagaagaccaagaatggagtggtgaagggccagcccagccccagcggggctgctgtgaacagcagcgagagcctgccccccagcagctctgtgaatgacatcagctccatgagcacagaccagaccctggccagtgacacagacagcagcctggaggccagcgctggccccctgggctgctgcaggtag

SEQ ID NO: 237653 - DNA, 1281 bp, Artificial Sequence
  derived and/or modified sequence
atgagcaagagcaaggtggacaaccagttctacagcgtggaggtgggagattctacgtttaccgtcctgaagcggtatcaaaacctgaaacctatcggttcaggagcacaggggattgtgtgcgcagcatatgatgccgtgttagaccgaaatgtcgccattaaaaaattaagtaggccattccaaaaccaaactcacgcaaagcgggcataccgtgagttggtcctcatgaagtgtgtgaatcacaagaatataataagcctcctgaacgtgtttactccccaaaaaaccttggaagaattccaagatgtctatctggtgatggagctcatggacgccaacctctgtcaggtaatccagatggagttggatcacgagcgcatgagctatctcctgtatcaaatgctgtgcggcattaagcatctgcactctgcggggatcatccatagggacctgaaaccatccaatattgtagtgaagtccgattgcaccctgaaaatactcgattttggcttagcacgaacagccggcacctcctttatgatgaccccatacgtggtaaccaggtactacagagcccccgaagtgatcttaggtatgggctataaggagaatgtagatatctggtccgtgggctgtattatgggggaaatggtgcggcacaagatcctttttccgggccgcgactatatcgaccaatggaacaaagtgattgagcaacttggtaccccatgtcccgagtttatgaagaagcttcaaccaacggtgcggaactacgtggaaaacaggcctaagtacgccgggttaacttttcccaaattgtttcccgactctttatttccggctgattctgagcacaataaactgaaggcgtcacaggcgcgcgacctgctgagcaagatgttggtgattgaccctgctaagagaatatcagtggacgacgccctgcaacacccttacattaacgtgtggtatgatccggcagaagtggaagccccccccccccagatatatgataaacagctagacgagagagagcacaccatcgaagaatggaaagaacttatctataaggaggtgatgaattcagaggagaagacaaagaacggggtcgtaaaaggccagccctctccaagtggagcggccgtgaactcatccgaatccttgccgccaagctcaagtgtcaatgatattagtagcatgtcaaccgaccagaccctggcgtctgacactgattcctcacttgaggcatctgcgggacctctgggatgttgtaggtag

SEQ ID NO: 237654 - DNA, 1281 bp, Artificial Sequence
  derived and/or modified sequence
atgagcaagagcaaggtggacaaccagttctacagcgtggaggtgggggattccaccttcaccgtgctgaaaagataccaaaatctgaaacccatcggatctggcgctcaaggaatagtgtgcgcagcttacgatgccgttctggataggaacgtggctattaagaaattgagccgtccatttcagaaccaaacacacgcgaagagggcttacagagaacttgtgctgatgaagtgtgtaaaccacaagaatattatctctttgcttaatgtgtttacaccacaaaagaccctggaggaattccaagatgtgtatttagtgatggagctgatggatgctaacttatgtcaggtcatccagatggagctggatcatgagcgcatgtcctatctactgtaccagatgctttgcgggataaagcacctgcattctgctgggatcatccatcgagacttgaaaccttctaatattgtcgtcaaatcagactgtactctgaagatcttagattttggcctggctagaacagctgggacctctttcatgatgaccccttacgttgttacccggtattaccgagccccagaagtgatcctaggcatgggctataaggaaaatgtcgatatttggtcagtcggttgcattatgggagaaatggtgcggcacaagattctcttccccggacgggattacatcgatcagtggaataaagttatcgagcagctaggtaccccctgcccagaattcatgaaaaaattacagcctacagtgcggaactacgtcgagaacagacctaaatacgcaggattgactttccccaagctgttcccagattcactgtttccagctgacagtgagcacaacaagctgaaggcctcccaagctagggatcttctgagtaagatgcttgtcatagatccggcgaagcggatttcagtggacgatgcacttcaacacccctatataaacgtgtggtatgaccctgccgaagttgaggccccccctccccagatctatgacaaacaactggatgaacgagagcacacaatcgaggagtggaaggagttgatttataaggaagtcatgaactctgaggagaaaaccaaaaatggagtggttaaaggtcagccctcccctagcggcgcagcagtaaatagctcggagagcctgccaccaagttcctcagtgaacgatatttcatccatgtccactgaccagaccctcgccagtgacaccgactcatcccttgaggcatccgcaggccctctgggatgttgcagatag

SEQ ID NO: 237655 - DNA, 1281 bp, Artificial Sequence
  derived and/or modified sequence
atgagcaaatcaaaagtcgataatcagttttacagtgttgaagtgggagactccacgtttactgtactcaagagataccagaaccttaaacctattggaagtggggctcagggtatcgtgtgcgctgcctatgacgccgttctcgataggaatgtggctatcaaaaagctctccaggccctttcagaatcagactcatgctaagagagcctacagagaactggtcctgatgaagtgcgttaaccataagaacattatctccctacttaatgtctttacgccccagaagaccttagaagaattccaagacgtgtatctggttatggagctgatggacgccaatctatgccaagtgattcagatggagctggatcatgagcgtatgtcgtatctgctgtaccagatgctttgcggcattaagcacctgcatagtgccggaatcattcatagagacctaaaacccagtaatattgttgtaaagagcgattgtacactgaaaatccttgactttggcctggccagaacagccggaaccagcttcatgatgaccccctacgtggtgactaggtactaccgggcacctgaagtcattctgggcatgggatacaaggagaacgttgatatctggagcgttgggtgtataatgggcgaaatggtcaggcacaagattctgtttcccggacgtgactatatcgaccagtggaacaaagtcattgagcaactgggtaccccatgcccagagttcatgaagaagctccagcccactgtgcgaaactacgtggaaaatcgcccaaagtacgcgggtctgacttttccaaagctgtttccagactccttgttcccggctgactctgagcataataaactgaaagctagtcaagcgagggatctgttgagcaagatgctggtgatcgatccggctaagcgaatctcagtagatgacgccctccaacacccctatatcaatgtgtggtacgatcccgcagaggttgaggctcctcctccccaaatttatgacaagcaactggatgagcgtgaacacacgattgaagagtggaaagagctgatttataaggaagtcatgaacagcgaagaaaagactaaaaacggtgtggtgaaagggcagccatctcccagtggcgctgctgtgaacagctccgaaagcctgcccccatcatcatctgtcaacgacatctcttccatgtcaaccgaccagacacttgcctcagacacagattcctcactcgaagccagtgccggtcccttgggctgttgccggtag

SEQ ID NO: 237656 - DNA, 1281 bp, Artificial Sequence
  derived and/or modified sequence
atgagcaagtccaaggttgacaaccagttctactctgtggaagttggcgattcaacctttacggtactgaaaaggtaccaaaaccttaagcctattggtagtggcgctcaagggatagtctgcgccgcatatgatgctgtgttggacaggaatgttgccatcaagaagctgagtcgacccttccagaaccaaacacacgcaaagcgggcttaccgcgagctggtcctcatgaagtgcgtgaatcacaagaacattataagccttcttaacgtcttcacaccccagaaaacattggaggaatttcaagacgtgtacttggtcatggaactcatggacgcaaacttgtgtcaagtaattcagatggagcttgatcacgagcggatgtcgtacctgctatatcagatgctgtgtgggatcaagcacctgcatagtgccggtattattcaccgtgacctgaagcccagcaatattgtggtaaagagcgattgcacactaaagatcctggatttcggcctggctagaacagctgggacctccttcatgatgactccctacgttgtcacccggtactatagagctcccgaggttatcttaggtatgggctataaagaaaacgtggatatctggtccgtgggatgtattatgggagagatggttcggcacaagatcctgtttccaggtcgcgactacatcgatcaatggaacaaggtgatagagcagctaggtacgccatgtccagagtttatgaagaagttgcaaccaactgttcggaactatgtggagaaccgacctaaatacgccggtttaactttccccaaactcttcccggattcactgtttcccgctgacagcgagcacaataagctgaaggcgtcacaagctcgcgatctgctgagcaagatgctcgtgatcgacccggcaaagcgaataagcgttgatgatgctctccaacacccctacattaatgtttggtatgaccctgctgaagtcgaggcgcctccccctcagatctatgacaaacagcttgacgaaagagaacacactatcgaggagtggaaagagctgatctacaaagaagtcatgaactctgaggagaagactaagaacggcgtggtgaaaggccagccgtcacccagtggcgctgcagtgaacagttctgaatcattacccccatcgtccagcgtcaacgatatctcttcaatgtcaacagaccagacgcttgcttcagacaccgactcatctctggaggctagcgctgggcctctgggatgttgccgttag

SEQ ID NO: 237657 - DNA, 1281 bp, Artificial Sequence
  derived and/or modified sequence
atgagcaagagcaaggtggacaaccagttctacagcgtggaggtgggcgacagcaccttcaccgtgctgaagagataccagaacctgaagcccatcggcagcggcgcccagggcatcgtgtgcgccgcctacgacgccgtgctggacagaaacgtggccatcaagaagctgagcagacccttccagaaccagacccacgccaagagagcctacagagagctggtgctgatgaagtgcgtgaaccacaagaacatcatcagcctgctgaacgtgttcaccccccagaagaccctggaggagttccaggacgtgtacctggtgatggagctgatggacgccaacctgtgccaggtgatccagatggagctggaccacgagagaatgagctacctgctgtaccagatgctgtgcggcatcaagcacctgcacagcgccggcatcatccacagagacctgaagcccagcaacatcgtggtgaagagcgactgcaccctgaagatcctggacttcggcctggccagaaccgccggcaccagcttcatgatgaccccctacgtggtgaccagatactacagagcccccgaggtgatcctgggcatgggctacaaggagaacgtggacatctggagcgtgggctgcatcatgggcgagatggtgagacacaagatcctgttccccggcagagactacatcgaccagtggaacaaggtgatcgagcagctgggcaccccctgccccgagttcatgaagaagctgcagcccaccgtgagaaactacgtggagaacagacccaagtacgccggcctgaccttccccaagctgttccccgacagcctgttccccgccgacagcgagcacaacaagctgaaggccagccaggccagagacctgctgagcaagatgctggtgatcgaccccgccaagagaatcagcgtggacgacgccctgcagcacccctacatcaacgtgtggtacgaccccgccgaggtggaggccccccccccccagatctacgacaagcagctggacgagagagagcacaccatcgaggagtggaaggagctgatctacaaggaggtgatgaacagcgaggagaagaccaagaacggcgtggtgaagggccagcccagccccagcggcgccgccgtgaacagcagcgagagcctgccccccagcagcagcgtgaacgacatcagcagcatgagcaccgaccagaccctggccagcgacaccgacagcagcctggaggccagcgccggccccctgggctgctgcagatag

SEQ ID NO: 237658 - protein, 255 aa, Artificial Sequence
  derived and/or modified sequence
MLRPQRPGDLQLGASLYELVGYRQPPSSSSSSTSSTSSTSSSSTTAPLLPKAAREKPEAPAEPPGPGPGSGAHPGGSARPDAKEEQQQQLRRKINSRERKRMQDLNLAMDALREVILPYSAAHCQGAPGRKLSKIATLLLARNYILLLGSSLQELRRALGEGAGPAAPRLLLAGLPLLAAAPGSVLLAPGAVGPPDALRPAKYLSLALDEPPCGQFALPGGGAGGPGLCTCAVCKFPHLVPASLGLAAVQAQFSK

SEQ ID NO: 237659 - protein, 271 aa, Artificial Sequence
  derived and/or modified sequence
MYYAVSQARVNAVPGTMLRPQRPGDLQLGASLYELVGYRQPPSSSSSSTSSTSSTSSSSTTAPLLPKAAREKPEAPAEPPGPGPGSGAHPGGSARPDAKEEQQQQLRRKINSRERKRMQDLNLAMDALREVILPYSAAHCQGAPGRKLSKIATLLLARNYILLLGSSLQELRRALGEGAGPAAPRLLLAGLPLLAAAPGSVLLAPGAVGPPDALRPAKYLSLALDEPPCGQFALPGGGAGGPGLCTCAVCKFPHLVPASLGLAAVQAQFSK

SEQ ID NO: 237660 - protein, 32 aa, Artificial Sequence
  derived and/or modified sequence
  misc_feature (1)..(1): Xaa can be any naturally occurring amino acid
XGPGLCTCAVCKFPHLVPASLGLAAVQAQFSK

SEQ ID NO: 237661 - DNA, 2168 bp, Artificial Sequence
  derived and/or modified sequence
ggcgcgcgtgaacgcggtccccgggaccatgctgcggccacagcggcccggagacttgcagctcggggcctccctctacgagctggtgggctacaggcagccgccctcctcctcctcctcctccacctcctccacctcctccacttcctcctcctccacgacggcccccctcctccccaaggctgcgcgcgagaagccggaggcgccggccgagcctccaggccccgggcccgggtcaggcgcgcacccgggcggcagcgcccggccggacgccaaggaggagcagcagcagcagctgcggcgcaagatcaacagccgcgagcggaagcgcatgcaggacctgaacctggccatggacgccctgcgcgaggtcatcctgccctactcagcggcgcactgccagggcgcgcccggccgcaagctctccaagatagccacgctgctgctcgcccgcaactacatcctactgctgggcagctcgctgcaggagctgcgccgcgcgctgggcgagggcgccgggcccgccgcgccgcgcctgctgctggccgggctgcccctgctcgccgccgcgcccggctccgtgttgctggcgcccggcgccgtaggaccccccgacgcgctgcgccccgccaagtacctgtcgctggcgctggacgagccgccgtgcggccagttcgctctccccggcggcggcgcaggcggccccggcctctgcacctgcgccgtgtgcaagttcccgcacctggtcccggccagcctgggcctggccgccgtgcaggcgcaattctccaagtgagggcgggcctgggcctggggcgcgacctcggcccggcctcccttcgctcagcttctccgcgcccctgctccctgcgtctgggagagcgaggccgagcaaggaaagcatttcgaaccttccagtccagaggaagggactgtcgggcacccccttccccgcccccacccctgggacgttaaagtgaccagagcggatgttcgatggcgcctcggggcagtttggggttctgggtcggttccagcggctttaggcagaaagtgctcgctctcacccagcacatctctctccttgtccctggagttgcgcgcttcgcggggccgatgtagaacttagggcgccttgccgtggttggcgcgccccgggtgcagcgagaggccatccccgagcgctatctccccggagcggagcacgccggctcccagtactaggggctgcgctcgagcagtggcgggggcggaggggtggttcttttccttctcctccgccagaggccacgggcgcccttgttcccgccggccaggtcctatcaaaggaggctgccggaactcaagaggcagaaaaagaccagttaggcggtgcagacggtctgggacgtggcagacggacggaccctcggcggacaggtggtcggcgtcggggtgcggtgggtaggggcgaggacaacgcagggtgcgctgggttgggacgtgggtccacttttgtagaccagctgtttggagagctgtatttaagactcgcgtatccagtgttttgtcgcagagagttttcgctcttaaatcctgggggtttcttagaaagcaacttagaactcgagattcacctttcgtttccctttccccaaaagtagcgtaaccaacatttaagcttgcttaaaaacgaaaaccaaccgccttgcatccagtgttcccgatttactaaaataggtaaccaggcgtctcacagtcgccgtcctgtcaagagcgctaatgaacgttctcattaacacgcaggagtaccgggagccctgaaccgcccgctgctcggcggatcccagctgcggtggcgacggcgggaaggcgctttccgctgttcctcagcgggccgggcccttgaccagcgcggcccgcaggtcttccttctcgccgtcttgcagttgaagagctacatacgtagtcagtttcgatttgttacagacgttaacaaattcctttacccaaggttatgctatgacctttccgcagtttactttgattttctatgtttaaggttttggttgttggtagtagccgaatttaactggcactttattttacttctaaccttgtttcctgacggtgtacagaatcaacaaaataaaacatttaaagtctgattttttaaaaaaaaaaaaaaa

SEQ ID NO: 237662 - DNA, 768 bp, Artificial Sequence
  derived and/or modified sequence
atgcttcgcccgcagagaccaggggatctccagttgggtgccagcctgtacgagctggtggggtaccgacaaccaccttccagcagttcctctagcacctcatcaacgtcttctacgtcgagtagtagcacaactgcaccactgttaccaaaagcagctcgcgaaaagccagaggctccagccgagccccctgggcccgggcccggatccggggcgcaccccggcggtagtgcccgtccggatgcaaaggaggagcagcagcaacagttgcggcgaaaaattaattcccgcgaacgcaaaaggatgcaggacctaaacctggccatggatgcgttacgcgaggtgatattgccctacagcgccgcccattgtcagggtgccccagggcgaaagctatccaaaattgcgacactgttgcttgccaggaactatatcctgttgctcggcagctccctacaagagctgagacgggctttgggggagggtgcagggccagctgctcctaggctcctgctagctggcctgcccctgctcgccgcggctccgggctccgtccttctggctcctggagcggtgggcccaccggacgcattaaggcccgcgaaatacctttcacttgcactggacgagccgccctgtggacaatttgccctgcccggcggtggtgcaggaggcccaggcctctgtacctgcgccgtgtgtaagttcccccacctggtgccagccagccttgggctcgctgccgttcaagctcaattctcaaaatag

SEQ ID NO: 237663 - DNA, 816 bp, Artificial Sequence
  derived and/or modified sequence
atgtattacgcagtcagtcaggcccgcgttaacgcagtgccggggaccatgctgcgcccacagaggcccggggatctgcagctgggggcaagcttatacgaactggtgggatacagacagcctcccagcagcagctcaagttccactagctctacctcatcgaccagcagctccagcacaacagccccactgctgccgaaagcggctagggagaagcccgaagcccccgccgagccaccaggccctggcccaggaagtggtgctcaccctggcggatccgctagacctgatgctaaggaagaacagcagcagcaactgagaagaaagataaattctagagagagaaagaggatgcaggatctgaacctggctatggatgcattaagagaggtgatcttgccttatagtgccgctcactgccagggagcaccaggaagaaaactgtcgaagatcgctactctgctcttggcacggaactatattctgctcttaggatcttctctgcaggaactgcgcagggcattgggggagggggccggtccagcagccccaagactcctgcttgccggcctgcctctcctggccgctgcacccggtagtgttcttctcgcccctggcgccgtcggaccccccgacgccctgagacccgcaaagtatctctccctcgcactggacgaaccaccttgcggtcaatttgctctgccaggcggcggtgcaggcgggcctggactgtgcacctgtgctgtgtgcaaatttccccatttggttccagcctcgctggggctcgcagcagtacaggcccaattttccaagtag

SEQ ID NO: 237664 - DNA, 99 bp, Artificial Sequence
  derived and/or modified sequence
taaggtcctggactgtgcacttgtgctgtgtgcaagtttcctcacctcgtacccgcatctcttggcctcgcagcagtacaagcacagttctccaaatag

SEQ ID NO: 237665 - DNA, 2276 bp, Artificial Sequence
  derived and/or modified sequence
atcgtttccccgcgcgcaggtccgcggggaggggcggcctgccgaccggcccaccccagggcgttcctgaagggcgtcctcggccgcccccaccgcctcccagatgtactatgcggtttcccaggcgcgcgtgaacgcggtccccgggaccatgctgcggccacagcggcccggagacttgcagctcggggcctccctctacgagctggtgggctacaggcagccgccctcctcctcctcctcctccacctcctccacctcctccacttcctcctcctccacgacggcccccctcctccccaaggctgcgcgcgagaagccggaggcgccggccgagcctccaggccccgggcccgggtcaggcgcgcacccgggcggcagcgcccggccggacgccaaggaggagcagcagcagcagctgcggcgcaagatcaacagccgcgagcggaagcgcatgcaggacctgaacctggccatggacgccctgcgcgaggtcatcctgccctactcagcggcgcactgccagggcgcgcccggccgcaagctctccaagatagccacgctgctgctcgcccgcaactacatcctactgctgggcagctcgctgcaggagctgcgccgcgcgctgggcgagggcgccgggcccgccgcgccgcgcctgctgctggccgggctgcccctgctcgccgccgcgcccggctccgtgctgctggcgcccggcgccgtaggaccccccgacgcgctgcgccccgccaagtacctgtcgctggcgctggacgagccgccgtgcggccagttcgctctccccggcggcggcgcaggcggccccggcctctgcacctgcgccgtgtgcaagttcccgcacctggtcccggccagcctgggcctggccgccgtgcaggcgcaattctccaagtgagggcgggcctgggcctggggcgcgacctcggcccggcctcccttcgctcagcttctccgcgcccctgctccctgcgtctgggagagcgaggccgagcaaggaaagcatttcgaaccttccagtccagaggaagggactgtcgggcacccccttccccgcccccacccctgggacgttaaagtgaccagagcggatgttcgatggcgcctcggggcagtttggggttctgggtcggttccagcggctttaggcagaaagtgctcgctctcacccagcacatctctctccttgtccctggagttgcgcgcttcgcggggccgatgtagaacttagggcgccttgccgtggttggcgcgccccgggtgcagcgagaggccatccccgagcgctacctccccggagcggagcacgccggctcccagtactaggggctgcgctcgagcagtggcgggggcggaggggtggttcttttccttctcctccgccagaggccacgggcgcccttgttcccgccggccaggtcctatcaaaggaggctgccggaactcaagaggcagaaaaagaccagttaggcggtgcagacggtctgggacgtggcagacggacggaccctcggcggacaggtggtcggcgtcggggtgcggtgggtaggggcgaggacaacgcagggtgcgctgggttgggacgtgggtccacttttgtagaccagctgtttggagagctgtatttaagactcgcgtatccagtgttttgtcgcagagagttttcgctcttaaatcctgggggtttcttagaaagcaacttagaactcgagattcacctttcgtttccctttccccaaaagtagcgtaaccaacatttaagcttgcttaaaaacgaaaaccaaccgccttgcatccagtgttcccgatttactaaaataggtaaccaggcgtctcacagtcgccgtcctgtcaagagcgctaatgaacgttctcattaacacgcaggagtaccgggagccctgaaccgcccgctgctcggcggatcccagctgcggtggcgacggcgggaaggcgctttccgctgttcctcagcgggccgggcccttgaccagcgcggcccgcaggtcttccttctcgccgtcttgcagttgaagagctacatacgtagtcagtttcgatttgttacagacgttaacaaattcctttacccaaggttatgctatgacctttccgcagtttactttgattttctatgtttaaggttttggttgttggtagtagccgaatttaactggcactttattttacttctaaccttgtttcctgacggtgtacagaatcaacaaaataaaacatttaaagtctgatttttt

SEQ ID NO: 237666 - DNA, 2277 bp, Artificial Sequence
  derived and/or modified sequence
atcgtttccccgcgcgcaggtccgcggggaggggcggcctgccgaccggcccaccccagggcgttcctgaagggcgtcctcggccgcccccaccgcctcccagatgtactatgcggtttcccaggcgcgcgtgaacgcggtccccgggaccatgctgcggccacagcggcccggagacttgcagctcggggcctccctctacgagctggtgggctacaggcagccgccctcctcctcctcctcctccacctcctccacctcctccacttcctcctcctccacgacggcccccctcctccccaaggctgcgcgcgagaagccggaggcgccggccgagcctccaggccccgggcccgggtcaggcgcgcacccgggcggcagcgcccggccggacgccaaggaggagcagcagcagcagctgcggcgcaagatcaacagccgcgagcggaagcgcatgcaggacctgaacctggccatggacgccctgcgcgaggtcatcctgccctactcagcggcgcactgccagggcgcgcccggccgcaagctctccaagatagccacgctgctgctcgcccgcaactacatcctactgctgggcagctcgctgcaggagctgcgccgcgcgctgggcgagggcgccgggcccgccgcgccgcgcctgctgctggccgggctgcccctgctcgccgccgcgcccggctccgtgctgctggcgcccggcgccgtaggaccccccgacgcgctgcgccccgccaagtacctgtcgctggcgctggacgagccgccgtgcggccagttcgctctccccggcggcggcgcaggcggccccggcctctgcacctgcgccgtgtgcaagttcccgcacctggtcccggccagcctgggcctggccgccgtgcaggcgcaattctccaagtgagggcgggcctgggcctggggcgcgacctcggcccggcctcccttcgctcagcttctccgcgcccctgctccctgcgtctgggagagcgaggccgagcaaggaaagcatttcgaaccttccagtccagaggaagggactgtcgggcacccccttccccgcccccacccctgggacgttaaagtgaccagagcggatgttcgatggcgcctcggggcagtttggggttctgggtcggttccagcggctttaggcagaaagtgctcgctctcacccagcacatctctctccttgtccctggagttgcgcgcttcgcggggccgatgtagaacttagggcgccttgccgtggttggcgcgccccgggtgcagcgagaggccatccccgagcgctacctccccggagcggagcacgccggctcccagtactaggggctgcgctcgagcagtggcgggggcggaggggtggttcttttccttctcctccgccagaggccacgggcgcccttgttcccgccggccaggtcctatcaaaggaggctgccggaactcaagaggcagaaaaagaccagttaggcggtgcagacggtctgggacgtggcagacggacggaccctcggcggacaggtggtcggcgtcggggtgcggtgggtaggggcgaggacaacgcagggtgcgctgggttgggacgtgggtccacttttgtagaccagctgtttggagagctgtatttaagactcgcgtatccagtgttttgtcgcagagagttttcgctcttaaatcctgggggtttcttagaaagcaacttagaactcgagattcacctttcgtttccctttccccaaaagtagcgtaaccaacatttaagcttgcttaaaaacgaaaaccaaccgccttgcatccagtgttcccgatttactaaaataggtaaccaggcgtctcacagtcgccgtcctgtcaagagcgctaatgaacgttctcattaacacgcaggagtaccgggagccctgaaccgcccgctgctcggcggatcccagctgcggtggcgacggcgggaaggcgctttccgctgttcctcagcgggccgggcccttgaccagcgcggcccgcaggtcttccttctcgccgtcttgcagttgaagagctacatacgtagtcagtttcgatttgttacagacgttaacaaattcctttacccaaggttatgctatgacctttccgcagtttactttgattttctatgtttaaggttttggttgttggtagtagccgaatttaactggcactttattttacttctaaccttgtttcctgacggtgtacagaatcaacaaaataaaacatttaaagtctgatttttta

SEQ ID NO: 237667 - DNA, 1083 bp, Artificial Sequence
  derived and/or modified sequence
gcggccccggcctctgcacctgcgccgtgtgcaagttcccgcacctggtcccggccagcctgggcctggccgccgtgcaggcgcaattctccaagtgagggcgggcctgggcctggggcgcgacctcggcccggcctcccttcgctcagcttctccgcgcccctgctccctgcgtctgggagagcgaggccgagcaaggaaagcatttcgaaccttccagtccagaggaagggactgtcgggcacccccttccccgcccccacccctgggacgttaaagtgaccagagcggatgttcgatggcgcctcggggcagtttggggttctgggtcggttccagcggctttaggcagaaagtgctcgctctcacccagcacatctctctccttgtccctggagttgcgcgcttcgcggggccgatgtagaacttagggcgccttgccgtggttggcgcgccccgggtgcagcgagaggccatccccgagcgctacctccccggagcggagcacgccggctcccagtactaggggctgcgctcgagcagtggcgggggcggaggggtggttcttttccttctcctccgccagaggccacgggcgcccttgttcccgccggccaggtcctatcaaaggaggctgccggaactcaagaggcagaaaaagaccagttaggcggtgcagacggtctgggacgtggcagacggacggaccctcggcggacaggagtaccgggagccctgaaccgcccgctgctcggcggatcccagctgcggtggcgacggcgggaaggcgctttccgctgttcctcagcgggccgggcccttgaccagcgcggcccgcaggtcttccttctcgccgtcttgcagttgaagagctacatacgtagtcagtttcgatttgttacagacgttaacaaattcctttacccaaggttatgctatgacctttccgcagtttactttgattttctatgtttaaggttttggttgttggtagtagccgaatttaactggcactttattttacttctaaccttgtttcctgacggtgtacagaatcaacaaaataaaacatttaaagtctga

SEQ ID NO: 237668 - DNA, 768 bp, Artificial Sequence
  derived and/or modified sequence
atgctgcggccccagaggcctggggacctgcagctgggcgccagcctgtatgagctggtgggctaccggcagccccccagcagcagcagcagcagcaccagcagcaccagcagcaccagcagcagcagcaccacagcccccctgctgcccaaggccgcccgggagaagccagaggccccagctgagcccccaggccctggccctggcagcggggcccaccctgggggcagcgcccggccagatgccaaggaggagcagcagcagcagctgcggaggaagatcaacagccgggagaggaagaggatgcaggacctgaacctggccatggatgccctgcgggaggtgatcctgccctacagcgctgcccactgccagggcgcccctggcaggaagctgagcaagatcgccaccctgctgctggccaggaactacatcctgctgctgggcagcagcctgcaggagctgcggcgggccctgggggagggcgccggccctgctgccccccggctgctgctggccggcctgcccctgctggccgccgcccctggctctgtgctgctggcccctggagctgtgggccccccagatgccctgcggcctgccaagtacctgagcctggccctggatgagcccccctgtggccagtttgccctgcccggcggcggggccggcggccctggcctgtgcacctgtgctgtgtgcaagttcccccacctggtgcctgccagcctgggcctggccgctgtgcaggcccagttcagcaagtag

SEQ ID NO: 237669 - DNA, 816 bp, Artificial Sequence
  derived and/or modified sequence
atgtactatgctgtgtcccaggcccgggtgaatgctgtgcccggcaccatgctgcggccccagaggcctggggacctgcagctgggcgccagcctgtatgagctggtgggctaccggcagccccccagcagcagcagcagcagcaccagcagcaccagcagcaccagcagcagcagcaccacagcccccctgctgcccaaggccgcccgggagaagccagaggccccagctgagcccccaggccctggccctggcagcggggcccaccctgggggcagcgcccggccagatgccaaggaggagcagcagcagcagctgcggaggaagatcaacagccgggagaggaagaggatgcaggacctgaacctggccatggatgccctgcgggaggtgatcctgccctacagcgctgcccactgccagggcgcccctggcaggaagctgagcaagatcgccaccctgctgctggccaggaactacatcctgctgctgggcagcagcctgcaggagctgcggcgggccctgggggagggcgccggccctgctgccccccggctgctgctggccggcctgcccctgctggccgccgcccctggctctgtgctgctggcccctggagctgtgggccccccagatgccctgcggcctgccaagtacctgagcctggccctggatgagcccccctgtggccagtttgccctgcccggcggcggggccggcggccctggcctgtgcacctgtgctgtgtgcaagttcccccacctggtgcctgccagcctgggcctggccgctgtgcaggcccagttcagcaagtag

SEQ ID NO: 237670 - DNA, 99 bp, Artificial Sequence
  derived and/or modified sequence
tgaggacctggcctgtgcacctgtgctgtgtgcaagttcccccacctggtgcctgccagcctgggcctggccgctgtgcaggcccagttcagcaagtag

SEQ ID NO: 237671 - DNA, 768 bp, Artificial Sequence
  derived and/or modified sequence
atgctgcggccccagcggcccggcgacctgcagctgggcgccagcttgtacgagcttgtggggtatcggcagcctcccagcagcagctcttcctctacgtcctcgacctcgagcacttctagcagcagtactaccgccccgctcttgcctaaggctgcccgtgagaagcctgaggcaccggcggagcctcctggtccaggaccggggtccggcgcacatccgggtggttctgcacgacctgacgccaaagaggagcagcagcaacagttgcggagaaaaataaatagccgggagcggaagaggatgcaggacctgaaccttgccatggacgccctgcgggaagtgattttaccatattcagcagcccactgccagggtgctcctggccgtaagcttagtaagatcgctacactgctgctggcccgtaactacatactgcttctgggttcctcactccaggagctccgacgcgccctgggcgagggagctggacctgccgctcctcgcctcctgctggcaggcctgcctctactcgccgccgcgccaggcagtgttctcctggcaccaggagctgtgggcccccctgacgctttgcgacccgcaaaatacttatcattagcactggacgaacccccttgtgggcagttcgccctcccagggggaggagctggaggccccggcctttgtacttgtgcggtatgtaagttcccgcacctggtgccggcttccctggggctggcggcagtgcaagctcagttttccaagtag

SEQ ID NO: 237672 - DNA, 816 bp, Artificial Sequence
  derived and/or modified sequence
atgtactacgccgtgagccaggcccgggtgaacgccgtgcccggcacaatgttgcggccccagagacccggtgatctgcaacttggagcaagcctgtacgaactcgtgggctataggcaaccgccttcttcttcctcatcttcaactagtagcactagtagtacatcctcatcctcgaccacagcacctcttttacccaaggctgctcgagagaaaccagaagccccggcggaaccccctggtccgggaccaggatccggcgcacacccaggtggctccgcgcggcctgatgctaaggaggagcaacagcaacagctgcggaggaagatcaactccagggagagaaaacgtatgcaggaccttaatctggcaatggacgccctgcgggaggtaatacttccatactcggcagcccattgtcagggcgcccccggcaggaaattgtcgaagatcgccactctacttttggcaagaaactacatactgctgttgggtagctctctgcaggaattaagacgcgctctcggggagggcgctggcccagccgccccgcggctattgctcgcgggcttgccgctgttggctgcagcccctggatctgtgctgttggcccccggcgccgtggggcccccagacgcactgagacctgcaaaatacctatcactagctctagatgaacccccctgtggacagtttgctctccctggaggaggcgcaggaggccccgggctttgtacctgcgcggtatgcaagtttccacacctggtcccagcatctcttgggctggctgcggtgcaggcccagtttagcaaatag

SEQ ID NO: 237673 - DNA, 99 bp, Artificial Sequence
  derived and/or modified sequence
tgaggccccggcctgtgcacctgcgccgtgtgcaagttcccccacttggtgcctgcttctcttggattagcagccgttcaagcccagttttctaaatag

SEQ ID NO: 237674 - DNA, 768 bp, Artificial Sequence
  derived and/or modified sequence
atgctgagaccccagagaccaggcgacctgcagttaggggcatcgctgtatgagttagtaggctaccggcagccaccttctagttcttcttcctcaacctcctccacctcaagcacgtcatcatcatccaccaccgcgccattgttgccaaaagctgcccgagagaagcccgaggccccagctgagcccccaggtcccggtcccggttctggcgctcatcctggcggatcagcacggcctgacgcaaaagaggaacaacagcagcagctgcgaaggaagatcaacagccgtgagaggaagagaatgcaggatctgaatctagcgatggacgcattgagagaggtgatcctgccatattccgcagcccactgtcagggcgcaccgggacgcaagctgagtaagattgccacccttttactggcgcgaaactatatattactactggggtcttctcttcaggaactcaggcgagccctgggcgagggcgcaggcccagctgccccaaggctcctcctagctggcttgcccctgcttgctgctgcaccgggatctgtgttattggctcccggagccgtgggaccacccgatgctcttcggcctgctaagtatctatccctggccctcgacgaacccccatgcggacagttcgcactgccgggaggcggtgccggtggcccaggtctctgtacatgtgcagtgtgcaagttcccacacttagtgccagctagcctgggactggccgctgtgcaggcacagttctcgaagtag

SEQ ID NO: 237675 - DNA, 816 bp, Artificial Sequence
  derived and/or modified sequence
atgtactacgcagtgagtcaggctcgggttaatgcagtgcccggtactatgctccggcctcagcggccaggcgacctacagctgggtgcctctctgtacgaactggtcggttatagacagccaccatcaagctcctcctctagcacctcctcaaccagctctacgtcatcttcctctacaactgcgccactgttaccaaaggccgctcgggagaagcccgaggccccagcggaacccccaggcccaggacccggtagcggagcccatcccggaggatccgcccgtcctgacgctaaggaggaacaacagcaacagcttaggcgcaaaatcaactccagagaacgaaaaaggatgcaggacctcaatctcgcgatggacgctctgagagaagtgatcctgccctattcagcggctcattgtcagggcgcacctgggagaaaactgtcaaagatcgctaccctcctgcttgcgagaaactacatcctcctgctgggctcaagcctgcaagagttaaggagagctctgggggaaggagctggcccagccgcaccacgtctgctgctggccggtttacctctcctcgcagcagcacccggatctgttctgctggcgcctggggcagtgggacctcccgatgccctgaggcctgctaagtacctctcactcgctctcgacgagccaccatgtggccagttcgctcttcccggtggcggagccggtggcccaggactgtgtacctgcgcagtctgtaaattcccgcacctggtgccggcaagcctcggattggcagccgtgcaggcgcagttctcgaagtag

SEQ ID NO: 237676 - DNA, 99 bp, Artificial Sequence
  derived and/or modified sequence
tgagggcctgggctgtgcacatgcgccgtgtgtaagtttccccatctagtgccagcttcgctgggtcttgccgcagtccaggcccagttctcgaaatag

SEQ ID NO: 237677 - DNA, 768 bp, Artificial Sequence
  derived and/or modified sequence
atgctgagaccccagagacccggcgacctgcagctgggcgccagcctgtacgagctggtgggctacagacagccccccagcagcagcagcagcagcaccagcagcaccagcagcaccagcagcagcagcaccaccgcccccctgctgcccaaggccgccagagagaagcccgaggcccccgccgagccccccggccccggccccggcagcggcgcccaccccggcggcagcgccagacccgacgccaaggaggagcagcagcagcagctgagaagaaagatcaacagcagagagagaaagagaatgcaggacctgaacctggccatggacgccctgagagaggtgatcctgccctacagcgccgcccactgccagggcgcccccggcagaaagctgagcaagatcgccaccctgctgctggccagaaactacatcctgctgctgggcagcagcctgcaggagctgagaagagccctgggcgagggcgccggccccgccgcccccagactgctgctggccggcctgcccctgctggccgccgcccccggcagcgtgctgctggcccccggcgccgtgggcccccccgacgccctgagacccgccaagtacctgagcctggccctggacgagcccccctgcggccagttcgccctgcccggcggcggcgccggcggccccggcctgtgcacctgcgccgtgtgcaagttcccccacctggtgcccgccagcctgggcctggccgccgtgcaggcccagttcagcaagtag

SEQ ID NO: 237678 - DNA, 816 bp, Artificial Sequence
  derived and/or modified sequence
atgtactacgccgtgagccaggccagagtgaacgccgtgcccggcaccatgctgagaccccagagacccggcgacctgcagctgggcgccagcctgtacgagctggtgggctacagacagccccccagcagcagcagcagcagcaccagcagcaccagcagcaccagcagcagcagcaccaccgcccccctgctgcccaaggccgccagagagaagcccgaggcccccgccgagccccccggccccggccccggcagcggcgcccaccccggcggcagcgccagacccgacgccaaggaggagcagcagcagcagctgagaagaaagatcaacagcagagagagaaagagaatgcaggacctgaacctggccatggacgccctgagagaggtgatcctgccctacagcgccgcccactgccagggcgcccccggcagaaagctgagcaagatcgccaccctgctgctggccagaaactacatcctgctgctgggcagcagcctgcaggagctgagaagagccctgggcgagggcgccggccccgccgcccccagactgctgctggccggcctgcccctgctggccgccgcccccggcagcgtgctgctggcccccggcgccgtgggcccccccgacgccctgagacccgccaagtacctgagcctggccctggacgagcccccctgcggccagttcgccctgcccggcggcggcgccggcggccccggcctgtgcacctgcgccgtgtgcaagttcccccacctggtgcccgccagcctgggcctggccgccgtgcaggcccagttcagcaagtag

SEQ ID NO: 237679 - DNA, 99 bp, Artificial Sequence
  derived and/or modified sequence
tgaggccccggcctgtgcacctgcgccgtgtgcaagttcccccacctggtgcccgccagcctgggcctggccgccgtgcaggcccagttcagcaagtag

SEQ ID NO: 237680 - protein, 468 aa, Artificial Sequence
  derived and/or modified sequence
MGALARALLLPLLAQWLLRAAPELAPAPFTLPLRVAAATNRVVAPTPGPGTPAERHADGLALALEPALASPAGAANFLAMVDNLQGDSGRGYYLEMLIGTPPQKLQILVDTGSSNFAVAGTPHSYIDTYFDTERSSTYRSKGFDVTVKYTQGSWTGFVGEDLVTIPKGFNTSFLVNIATIFESENFFLPGIKWNGILGLAYATLAKPSSSLETFFDSLVTQANIPNVFSMQMCGAGLPVAGSGTNGGSLVLGGIEPSLYKGDIWYTPIKEEWYYQIEILKLEIGGQSLNLDCREYNADKAIVDSGTTLLRLPQKVFDAVVEAVARASLLYIQPMMGAGLNYECYRFGISPSTNALVIGATVMEGFYVIFDRAQKRVGFAASPCAEIAGAAVSEISGPFSTEDVASNCVPAQSLSEPILWIVSYALMSVCGAILLVLIVLLLLPFRCQRRPRDPEVVNDESSLVRHRWK

SEQ ID NO: 237681 - DNA, 1407 bp, Artificial Sequence
  derived and/or modified sequence
atgggcgcacttgctagagctctgctgttacctctcctggctcagtggttgcttcgagccgcccctgagctcgcaccagctccgtttacccttcccctaagggtggctgcggcgaccaatcgggtagtcgcacctacgccaggacctggtacgcccgctgaaaggcacgcagatggtctcgccctcgccttagaaccagctctggcttcccccgcgggagccgccaatttcctggcaatggtggacaatcttcagggggattcggggagaggatattatttggaaatgctgatcggaacccctccccagaagttgcaaattcttgtcgatacaggatcaagcaacttcgcagtggctggaacaccccattcctatatagatacgtactttgacactgagcggtcctctacctaccggagtaagggctttgatgttactgtcaagtacacccaggggtcctggaccggcttcgttggggaagacttggtgaccatacctaaggggttcaatacgtctttcctggtaaatatcgcaaccatttttgagtctgaaaacttttttctccccgggataaagtggaacggtattctaggtctagcatacgctacgttagccaaaccttcctcttctctagagaccttcttcgacagcttggtgacacaggctaatatccccaatgtcttttccatgcagatgtgcggagcgggtctgcctgttgcaggcagcgggacaaacgggggctccctagtcttaggaggtatagagcccagtctgtacaaaggcgacatctggtacaccccgatcaaggaagagtggtattaccagatcgaaattctgaaactcgaaattgggggacagtctttgaacctggattgcagggagtataatgcggacaaagctattgtcgattccggtactactttgcttcgattgccacagaaagttttcgatgccgtggtagaggctgtggctagagccagcctcctatatatccagccaatgatgggagcagggctcaattacgaatgttaccgctttgggatctctccctcaacaaatgccctggtcatcggcgcaacagtgatggagggattttacgtcatctttgatagagcccagaaaagagtgggtttcgctgcaagcccatgcgctgaaatcgccggagccgctgtgtcagaaatcagcggcccattttctacagaagacgtggcttctaactgcgtacctgcccagagcctcagcgaacccattctgtggatcgtgagctatgccttgatgtccgtctgtggggctatcctcctggtcttgatcgttctgttgcttctcccattccgctgtcagcgacgccctcgagatcccgaagtagtcaacgatgagtcatcactggttagacaccgctggaagtag

SEQ ID NO: 237682 - DNA, 1407 bp, Artificial Sequence
  derived and/or modified sequence
atgggcgccctggcccgggccctgctgctgcccctgctggcccagtggctgctgcgggccgcccctgagctggccccagcccccttcaccctgcccctgcgggtggccgccgccaccaacagagtggtggcccccaccccaggccctggcaccccagctgagagacatgctgatggcctggccctggccctggagcccgccctggccagccctgctggggccgccaacttcctggccatggtggacaacctgcagggcgacagcggccggggctactacctggagatgctgattggcaccccaccccagaagctgcagatcctggtggacaccggcagcagcaactttgctgtggccggcaccccccacagctacatcgacacctactttgacacagagaggagcagcacctaccgcagcaaaggatttgatgtgacagtgaagtacacccagggctcctggacaggctttgtgggggaggacctggtgaccatccccaagggcttcaacaccagcttcctggtgaacatcgccaccatctttgaaagtgagaacttcttcctgcccggcatcaagtggaatggcatcctgggcctggcctatgccaccctggccaagcccagcagcagcctggagaccttctttgacagcctggtgacccaggccaacatccccaacgtgttctccatgcagatgtgtggggccggcctgcctgtggccggcagcggcaccaatggaggcagcctggtgctgggcggcatcgagcccagcctgtacaagggggacatctggtacacccccatcaaggaggagtggtactaccagatcgagatcctgaagctggagattggaggccagagcctgaacctggactgccgggagtacaatgctgacaaggccatcgtggacagcggcaccaccctgctgcggctgccccagaaggtgtttgatgctgtggtggaggccgtggcccgggccagcctgctgtacatccagcccatgatgggcgccggcctgaactatgagtgctaccgcttcggcatcagccccagcaccaatgccctggtgattggagccaccgtgatggagggcttctacgtgatctttgaccgggcccagaagagggtgggctttgctgccagcccctgtgccgagattgctggagctgctgtgtctgagatcagcggccccttcagcacagaagatgtggccagcaactgtgtgcctgcccagagcctgtctgagcccatcctgtggatcgtgtcctatgccctgatgtctgtgtgtggggccatcctgctggtgctgattgtgctgctgctgctgcccttccgctgccagaggcggccccgggaccctgaggtggtgaatgatgagagcagcctggtgcgccaccgctggaagtag

SEQ ID NO: 237683 - DNA, 1407 bp, Artificial Sequence
  derived and/or modified sequence
atgggcgccctggcccgggccctgctgctgcccctgctggcccagtggctgcttagggccgccccggaactggcacccgcccccttcaccctccctctgcgcgtagccgctgccacaaatagagtggtggctcccacccccgggcccggtactccagcagagcggcacgcagatggcctcgccctcgctctggagccagcactcgctagtcccgcaggcgcagccaactttctggcaatggtggataatttacagggggactccggtcgaggctactatttggaaatgctcataggcacaccaccgcagaagctgcagatcctggtggacacaggcagcagcaattttgccgtcgccggcacccctcactcctatatcgacacgtactttgatactgagagatcctctacttacagaagcaaaggctttgatgttacagtcaagtatacccaaggctcctggactggctttgtgggagaagacctagttactatccctaaggggttcaatacctccttcctcgtgaatatcgccacaatttttgagtctgagaacttctttttaccaggcatcaaatggaatggaatcctgggtctcgcgtacgcgactctggctaaaccctccagcagcctggaaaccttcttcgatagtctggtgacccaggcgaacatacccaacgtgttttctatgcagatgtgcggagccggactacccgtggctggaagcggcacaaatggagggtcgcttgtattgggagggatcgaaccctctctttataagggcgatatctggtacacccctatcaaagaagaatggtattaccagatcgaaattctcaagttagagatcggtggtcagtcacttaatttggattgcagagaatataatgcggataaagccatcgtcgattctgggacaacactcctgaggctaccccagaaagtgttcgatgcagtcgtcgaagcggtcgccagggcttcactgctgtacatacaaccaatgatgggagctgggctgaactatgagtgctacagattcggaatctctccttctactaatgctctcgttatcggtgcgaccgtcatggaaggcttctatgtgatattcgaccgggctcaaaaaagggtcgggttcgcagctagcccttgtgccgagatcgctggggcagctgtgtcagagatttccgggcctttttccactgaagacgtggcgagtaactgcgtgcctgctcagtcactttccgagcccatattgtggatcgtgagctacgccctcatgagcgtgtgcggggcaatcctgctcgtcctgatcgtcctgttacttttacctttcaggtgccagcggcggccgagggacccagaggtcgtgaacgatgagtcctcgctggttcgacacaggtggaagtag

SEQ ID NO: 237684 - DNA, 1407 bp, Artificial Sequence
  derived and/or modified sequence
atgggcgctctggccagagccctgctgctccctctccttgctcagtggttgctcagagccgctccggagctggcacctgctccgtttacattgccactccgggttgccgcagctacaaaccgagtcgtagctccaactccagggcctggaactccagcagagcggcatgctgatggcctggcactggcgcttgaaccggcactggcctccccggctggcgctgccaacttcctcgccatggtcgacaatctgcagggggatagtgggcgtggatactacctggaaatgctaatcggcacacccccacagaaactacagattctcgtagataccggatcctctaatttcgccgtagcaggaacaccacattcctacattgacacctatttcgatacagagaggtcctcaacgtaccggtccaagggatttgatgtgaccgttaaatacacacagggaagctggactggcttcgtgggtgaggacttggtgacaatcccaaaagggttcaatacctcatttttggtcaatatcgctacaattttcgagagcgaaaacttcttcttacccggaatcaaatggaacggcattctgggcctggcctacgcaacacttgccaaaccctctagcagcctcgaaaccttctttgatagcctcgtcacccaagctaacatccccaacgttttttccatgcaaatgtgcggagctggattaccagttgctggcagcggcactaatggcggttctttggtgctcggaggcattgagccttccctatataagggagacatttggtatacgcctatcaaggaagagtggtactaccagatcgaaatattgaaactggaaatcgggggacaatctctcaatctcgattgcagggagtacaatgccgataaggcaattgtggactctggaacaacccttctgagattaccgcagaaagtgttcgatgccgtggtggaggccgtggcaagggcttccctgctgtatatacagcctatgatgggcgctggcctgaattacgaatgctacagattcgggatctctccctcgactaacgctctcgttattggagctactgtgatggaggggttctatgtgatctttgaccgcgctcagaaacgagtggggttcgcagccagcccgtgtgccgagatcgctggtgccgctgtttccgagattagtgggcctttctcgacagaagacgtcgctagcaactgcgtgccagcccaaagtctgagtgagcctattctttggattgtgtcttatgctctcatgtccgtgtgtggagccatcctcctggtgctgatcgtgcttttactccttccgtttcggtgccagcgcagaccccgagatccagaggtcgtgaacgatgaaagttccctcgtgcgccacagatggaagtag

SEQ ID NO: 237685 - DNA, 2843 bp, Artificial Sequence
  derived and/or modified sequence
cgctggggcgctttccgaggaaattcgggactcgagtttcccggggaagaggcgcggcctgagcccggcgagggtggggagggcaggcgcaggtggaccccggcgccccccgagccccgctgtgaccttggccgcgggggaggggctgggccgctgcggggcagtcgcggccgccagagggggcagcggagaagaacttgcccaacttggcggcgcgggctggggcggctctgcgcctccgcgcccgcctccccggcctccgccttctcccctcccgcgagcctcctcccctcccgcgagcctcctcccctgggccctcctcccgtcctccccgccgccgccggtcccggtgcgcgcccatccctgcccgcagccccgcgcgccggccgagtcgctgagccgcggctgccggacgggacgggaccggctaggctgggcgcgccccccgggccccgccgtgggcatgggcgcactggcccgggcgctgctgctgcctctgctggcccagtggctcctgcgcgccgccccggagctggcccccgcgcccttcacgctgcccctccgggtggccgcggccacgaaccgcgtagttgcgcccaccccgggacccgggacccctgccgagcgccacgccgacggcttggcgctcgccctggagcctgccctggcgtcccccgcgggcgccgccaacttcttggccatggtagacaacctgcagggggactctggccgcggctactacctggagatgctgatcgggacccccccgcagaagctacagattctcgttgacactggaagcagtaactttgccgtggcaggaaccccgcactcctacatagacacgtactttgacacagagaggtctagcacataccgctccaagggctttgacgtcacagtgaagtacacacaaggaagctggacgggcttcgttggggaagacctcgtcaccatccccaaaggcttcaatacttcttttcttgtcaacattgccactatttttgaatcagagaatttctttttgcctgggattaaatggaatggaatacttggcctagcttatgccacacttgccaagccatcaagttctctggagaccttcttcgactccctggtgacacaagcaaacatccccaacgttttctccatgcagatgtgtggagccggcttgcccgttgctggatctgggaccaacggaggtagtcttgtcttgggtggaattgaaccaagtttgtataaaggagacatctggtatacccctattaaggaagagtggtactaccagatagaaattctgaaattggaaattggaggccaaagccttaatctggactgcagagagtataacgcagacaaggccatcgtggacagtggcaccacgctgctgcgcctgccccagaaggtgtttgatgcggtggtggaagctgtggcccgcgcatctctgctttacattcagcccatgatgggggccggcctgaattatgaatgttaccgattcggcatttccccatccacaaatgcgctggtgatcggtgccacggtgatggagggcttctacgtcatcttcgacagagcccagaagagggtgggcttcgcagcgagcccctgtgcagaaattgcaggtgctgcagtgtctgaaatttccgggcctttctcaacagaggatgtagccagcaactgtgtccccgctcagtctttgagcgagcccattttgtggattgtgtcctatgcgctcatgagcgtctgtggagccatcctccttgtcttaatcgtcctgctgctgctgccgttccggtgtcagcgtcgcccccgtgaccctgaggtcgtcaatgatgagtcctctctggtcagacatcgctggaaatgaatagccaggcctgacctcaagcaaccatgaactcagctattaagaaaatcacatttccagggcagcagccgggatcgatggtggcgctttctcctgtgcccacccgtcttcaatctctgttctgctcccagatgccttctagattcactgtcttttgattcttgattttcaagctttcaaatcctccctacttccaagaaaaataattaaaaaaaaaacttcattctaaaccaaaacagagtggattgggctgcaggctctatggggttcgttatgccaaagtgtctacatgtgccaccaacataaaacaaaaccaagccttggctcgttctcttctctcttcaatctctggaaaaataagtacatatagttgataacccctcttagcttacaggaagctttttgtattaattgcctttgaggttattttccgccagacctcaacctgggtcaaagtggtacaggaaggcttgcagtatgatggcaggagaatcagcctggggcctggggatgtaaccaagctgtacccttgagacctggaaccagagccacaggccccttttgtgggtttctctgtgctctgaatgggagccagaattcactaggaggtcatcaaccgatggtcctcacaagcctcttctgaagatggaaggccttttgcccgttgaggtagaggggaaggaaatctcctcttttgtacccaatacttatgttgtattgttggtgcgaaagtaaaaacactacctcttttgagactttgcccagggtcctgtgcctggatgggggtgcaggcagccttgaccacggctgttcccctcacccaaaagaattatcatcccaacagccaagacccaacaggtgctgaactgtgcatcaaccaggaagagttctatccccaagctggccactatcacatatgcttactcttgcttaaaattaataaatcatgttttgatgagaaaaaactattcta

SEQ ID NO: 237686 - DNA, 1407 bp, Artificial Sequence
  derived and/or modified sequence
atgggcgccctggccagagccctgctgctgcccctgctggcccagtggctgctgagagccgcccccgagctggcccccgcccccttcaccctgcccctgagagtggccgccgccaccaacagagtggtggcccccacccccggccccggcacccccgccgagagacacgccgacggcctggccctggccctggagcccgccctggccagccccgccggcgccgccaacttcctggccatggtggacaacctgcagggcgacagcggcagaggctactacctggagatgctgatcggcacccccccccagaagctgcagatcctggtggacaccggcagcagcaacttcgccgtggccggcaccccccacagctacatcgacacctacttcgacaccgagagaagcagcacctacagaagcaagggcttcgacgtgaccgtgaagtacacccagggcagctggaccggcttcgtgggcgaggacctggtgaccatccccaagggcttcaacaccagcttcctggtgaacatcgccaccatcttcgagagcgagaacttcttcctgcccggcatcaagtggaacggcatcctgggcctggcctacgccaccctggccaagcccagcagcagcctggagaccttcttcgacagcctggtgacccaggccaacatccccaacgtgttcagcatgcagatgtgcggcgccggcctgcccgtggccggcagcggcaccaacggcggcagcctggtgctgggcggcatcgagcccagcctgtacaagggcgacatctggtacacccccatcaaggaggagtggtactaccagatcgagatcctgaagctggagatcggcggccagagcctgaacctggactgcagagagtacaacgccgacaaggccatcgtggacagcggcaccaccctgctgagactgccccagaaggtgttcgacgccgtggtggaggccgtggccagagccagcctgctgtacatccagcccatgatgggcgccggcctgaactacgagtgctacagattcggcatcagccccagcaccaacgccctggtgatcggcgccaccgtgatggagggcttctacgtgatcttcgacagagcccagaagagagtgggcttcgccgccagcccctgcgccgagatcgccggcgccgccgtgagcgagatcagcggccccttcagcaccgaggacgtggccagcaactgcgtgcccgcccagagcctgagcgagcccatcctgtggatcgtgagctacgccctgatgagcgtgtgcggcgccatcctgctggtgctgatcgtgctgctgctgctgcccttcagatgccagagaagacccagagaccccgaggtggtgaacgacgagagcagcctggtgagacacagatggaagtag

SEQ ID NO: 237687 - protein, 396 aa, Artificial Sequence
  derived and/or modified sequence
MGALARALLLPLLAQWLLRAAPELAPAPFTLPLRVAAATNRVVAPTPGPGTPAERHADGLALALEPALASPAGAANFLAMVDNLQGDSGRGYYLEMLIGTPPQKLQILVDTGSSNFAVAGTPHSYIDTYFDTERSSTYRSKGFDVTVKYTQGSWTGFVGEDLVTIPKGFNTSFLVNIATIFESENFFLPGIKWNGILGLAYATLAKPSSSLETFFDSLVTQANIPNVFSMQMCGAGLPVAGSGTNGGSLVLGGIEPSLYKGDIWYTPIKEEWYYQIEILKLEIGGQSLNLDCREYNADKAIVDSGTTLLRLPQKVFDAVVEAVARASLIPEFSDGFWTGSQLACWTNSETPWSYFPKISIYLRDENSSRSFRITILPQKLQVLQCLKFPGLSQQRM

SEQ ID NO: 237688 - DNA, 1191 bp, Artificial Sequence
  derived and/or modified sequence
atgggcgcattggcacgcgctttgctgctgcctctcttggcccagtggttgctaagagctgcgccagaacttgcacccgctccatttaccctgcctcttcgggtcgcagcagctactaacagggtggtggccccaactcccggtcccggcacccccgccgagcggcacgctgatggcctggcgctagcccttgagccggcactcgctagccccgctggggccgccaacttcctggctatggtagataacctacaaggcgatagtggacggggttattatctggagatgcttatcggcacacccccccagaaattgcaaattttggtggatacagggagctccaatttcgccgttgccggcacaccacattcatacatagacacttacttcgataccgagcgcagcagtacttacagaagcaaaggctttgacgtgaccgtaaagtacacacagggaagttggaccggattcgtcggagaggatttggtgactatacctaaagggttcaacacaagcttcctggtgaacattgctactatttttgagtccgaaaacttttttctcccagggattaagtggaacggtatcttaggtctagcctacgcaacacttgctaaaccatccagctctttagaaacgttctttgattcacttgtcacgcaagccaatattcccaatgttttctcgatgcagatgtgcggcgccggactccccgtggcgggtagcggaacaaatggcggctcactggtgctgggagggattgaaccaagtctctataaaggcgatatatggtatacaccgatcaaggaagagtggtactaccagatcgaaattttaaaattggaaattggggggcagagtcttaatctggactgtagagagtataacgccgacaaggcaatagtggactccgggacgaccttgctccggttgccccaaaaggtgtttgatgctgtcgtggaagccgtggcccgagcttccctcattcccgaattttcagacggtttctggaccggcagtcagcttgcctgctggacaaatagtgaaacaccctggtcttacttccccaagatctcaatttacctcagggacgaaaattctagtaggtctttcaggatcactatcctccctcagaaactccaggtgctgcagtgcttgaagttcccgggtctctcccagcagcgtatgtag

SEQ ID NO: 237689 - DNA, 1191 bp, Artificial Sequence
  derived and/or modified sequence
atgggcgccctggcccgggccctgctgctgcccctgctggcccagtggctgctgcgggccgcccctgagctggccccagcccccttcaccctgcccctgcgggtggccgccgccaccaacagagtggtggcccccaccccaggccctggcaccccagctgagagacatgctgatggcctggccctggccctggagcccgccctggccagccctgctggggccgccaacttcctggccatggtggacaacctgcagggcgacagcggccggggctactacctggagatgctgattggcaccccaccccagaagctgcagatcctggtggacaccggcagcagcaactttgctgtggccggcaccccccacagctacatcgacacctactttgacacagagaggagcagcacctaccgcagcaaaggatttgatgtgacagtgaagtacacccagggctcctggacaggctttgtgggggaggacctggtgaccatccccaagggcttcaacaccagcttcctggtgaacatcgccaccatctttgaaagtgagaacttcttcctgcccggcatcaagtggaatggcatcctgggcctggcctatgccaccctggccaagcccagcagcagcctggagaccttctttgacagcctggtgacccaggccaacatccccaacgtgttctccatgcagatgtgtggggccggcctgcctgtggccggcagcggcaccaatggaggcagcctggtgctgggcggcatcgagcccagcctgtacaagggggacatctggtacacccccatcaaggaggagtggtactaccagatcgagatcctgaagctggagattggaggccagagcctgaacctggactgccgggagtacaatgctgacaaggccatcgtggacagcggcaccaccctgctgcggctgccccagaaggtgtttgatgctgtggtggaggccgtggcccgggccagcctcatccctgagttcagtgatggcttctggacaggcagccagctggcctgctggaccaacagcgagaccccctggagctacttccccaagatcagcatctacctgagagatgagaacagcagccgctccttccgcatcaccatcctgccccagaagctgcaggtgctgcagtgcctgaagtttcctggcctgagccagcagaggatgtag

SEQ ID NO: 237690 - DNA, 1191 bp, Artificial Sequence
  derived and/or modified sequence
atgggcgccctggcccgggccctgctgctgcccctgctggcccagtggctcctccgggcagccccagagttggcccccgcacctttcacactccccctgcgagtggccgccgccacaaatcgcgtagtcgctcccacccccggcccaggaaccccagctgaacggcacgcagatggcctggcactggccctcgagccagcactggcctcccccgccggagcggccaactttctagccatggtcgataatctccagggggattccggacgtggttattatttagagatgctcatcggaacccccccacagaagctccaaatcttagttgatactggcagttctaattttgccgttgcgggcacccctcactcttatatcgacacgtattttgatacagagaggtccagcacataccgctccaaaggtttcgacgttactgtcaaatatacccagggaagctggactggctttgtcggagaggacctcgtaactatccccaagggattcaacacatcattcttggtcaatatcgccacaattttcgagtctgagaacttctttctgcctggaatcaaatggaatgggattctcggcctggcatacgcaaccctcgcaaaacctagcagtagcttggagacgttcttcgacagtttagtcacccaggccaatattcctaatgtgttctctatgcagatgtgtggggctggccttcctgtagccggcagtggaacaaatggtggttctcttgtgctgggtgggattgaaccttcgctctataagggggacatttggtatacccctattaaagaggaatggtattaccaaattgagattctgaagctggagatcggagggcagagcctcaacctcgactgccgggaatacaacgctgataaagcgatagtggacagtggcacaactttgcttagacttcctcaaaaagtcttcgatgctgtagtggaagctgtggcacgcgcctccctcatacccgagttctccgatggtttttggactggtagccagctggcgtgctggacaaatagtgagacgccctggtcctacttccctaagatatccatttatctcagggacgaaaatagtagcagaagctttcgtattactatccttccccagaaactgcaggttctccagtgcttgaagtttcctggtctgagtcagcagcggatgtag

SEQ ID NO: 237691 - DNA, 1191 bp, Artificial Sequence
  derived and/or modified sequence
atgggggcattagccagggccctcctcctacctctgctcgctcagtggttgctgagggcagcccctgagctggccccagcaccgttcacacttcccttgagagttgctgcagccaccaatcgggtggtggcaccaacacctgggcctggaactccagctgaacgccatgctgacggactcgcacttgccctggagccagcgctggcttccccagctggtgcagcaaatttcctagctatggtagataatttgcagggagactctggaaggggatactacttggaaatgcttatcggtacaccgcctcagaagcttcagatcctagttgatacagggtcttcgaactttgcagtggccggaaccccacattcgtatatcgacacttacttcgacaccgagagatcgagcacttacagatcaaaaggttttgacgtgacagtcaagtacactcaggggtcctggaccggctttgtgggcgaggatctcgtaacgatccccaagggatttaacacaagtttcttggtgaacattgccaccattttcgagtccgaaaacttctttctccctgggataaaatggaacgggatattgggacttgcgtatgctactctggcaaaaccatcctcctcgctggaaacgttcttcgactcgttggtcacccaggccaatatccccaacgtctttagtatgcagatgtgcggcgcaggtttgcccgtcgccggaagcggaacaaacggcggttctctcgtgctgggaggtatcgagccgagcctctataaaggggacatctggtacacaccgatcaaagaggagtggtactatcaaatagagatactgaagctggagataggtggacagagccttaacctcgactgtcgggagtacaacgccgacaaggctattgtagatagtgggactacacttcttcgcctgcctcagaaagtgttcgatgcagttgttgaggctgtggcgagggcttccctaatccccgagttcagcgacggcttttggaccggatcccagctcgcatgttggactaactcagagaccccatggtcatattttcctaagatttctatctacctgcgagacgagaatagcagccgaagttttagaatcactatcctgccccagaagcttcaggtgctgcaatgtttaaaattccctggactaagccagcagcggatgtag

SEQ ID NO: 237692 - DNA, 2824 bp, Artificial Sequence
  derived and/or modified sequence
cgctggggcgctttccgaggaaattcgggactcgagtttcccggggaagaggcgcggcctgagcccggcgagggtggggagggcaggcgcaggtggaccccggcgccccccgagccccgctgtgaccttggccgcgggggaggggctgggccgctgcggggcagtcgcggccgccagagggggcagcggagaagaacttgcccaacttggcggcgcgggctggggcggctctgcgcctccgcgcccgcctccccggcctccgccttctcccctcccgcgagcctcctcccctcccgcgagcctcctcccctgggccctcctcccgtcctccccgccgccgccggtcccggtgcgcgcccatccctgcccgcagccccgcgcgccggccgagtcgctgagccgcggctgccggacgggacgggaccggctaggctgggcgcgccccccgggccccgccgtgggcatgggcgcactggcccgggcgctgctgctgcctctgctggcccagtggctcctgcgcgccgccccggagctggcccccgcgcccttcacgctgcccctccgggtggccgcggccacgaaccgcgtagttgcgcccaccccgggacccgggacccctgccgagcgccacgccgacggcttggcgctcgccctggagcctgccctggcgtcccccgcgggcgccgccaacttcttggccatggtagacaacctgcagggggactctggccgcggctactacctggagatgctgatcgggacccccccgcagaagctacagattctcgttgacactggaagcagtaactttgccgtggcaggaaccccgcactcctacatagacacgtactttgacacagagaggtctagcacataccgctccaagggctttgacgtcacagtgaagtacacacaaggaagctggacgggcttcgttggggaagacctcgtcaccatccccaaaggcttcaatacttcttttcttgtcaacattgccactatttttgaatcagagaatttctttttgcctgggattaaatggaatggaatacttggcctagcttatgccacacttgccaagccatcaagttctctggagaccttcttcgactccctggtgacacaagcaaacatccccaacgttttctccatgcagatgtgtggagccggcttgcccgttgctggatctgggaccaacggaggtagtcttgtcttgggtggaattgaaccaagtttgtataaaggagacatctggtatacccctattaaggaagagtggtactaccagatagaaattctgaaattggaaattggaggccaaagccttaatctggactgcagagagtataacgcagacaaggccatcgtggacagtggcaccacgctgctgcgcctgccccagaaggtgtttgatgcggtggtggaagctgtggcccgcgcatctctgattccagaattctctgatggtttctggactgggtcccagctggcgtgctggacgaattcggaaacaccttggtcttacttccctaaaatctccatctacctgagagacgagaactccagcaggtcattccgtatcacaatcctgcctcagaaattgcaggtgctgcagtgtctgaaatttccgggcctttctcaacagaggatgtagccagcaactgtgtccccgctcagtctttgagcgagcccattttgtggattgtgtcctatgcgctcatgagcgtctgtggagccatcctccttgtcttaatcgtcctgctgctgctgccgttccggtgtcagcgtcgcccccgtgaccctgaggtcgtcaatgatgagtcctctctggtcagacatcgctggaaatgaatagccaggcctgacctcaagcaaccatgaactcagctattaagaaaatcacatttccagggcagcagccgggatcgatggtggcgctttctcctgtgcccacccgtcttcaatctctgttctgctcccagatgccttctagattcactgtcttttgattcttgattttcaagctttcaaatcctccctacttccaagaaaaataattaaaaaaaaaacttcattctaaaccaaaacagagtggattgggctgcaggctctatggggttcgttatgccaaagtgtctacatgtgccaccaacataaaacaaaaccaagccttggctcgttctcttctctcttcaatctctggaaaaataagtacatatagttgataacccctcttagcttacaggaagctttttgtattaattgcctttgaggttattttccgccagacctcaacctgggtcaaagtggtacaggaaggcttgcagtatgatggcaggagaatcagcctggggcctggggatgtaaccaagctgtacccttgagacctggaaccagagccacaggccccttttgtgggtttctctgtgctctgaatgggagccagaattcactaggaggtcatcaaccgatggtcctcacaagcctcttctgaagatggaaggccttttgcccgttgaggtagaggggaaggaaatctcctcttttgtacccaatacttatgttgtattgttggtgcgaaagtaaaaacactacctcttttgagactttgcccagggtcctgtgcctggatgggggtgcaggcagccttgaccacggctgttcccctcacccaaaagaattatcatcccaacagccaagacccaacaggtgctgaactgtgcatcaaccaggaagagttctatccccaagctggccactatcacatatgcttactcttgcttaaaattaataaatcatgttttgatgagaaaaaactattcta

SEQ ID NO: 237693 - DNA, 1191 bp, Artificial Sequence
  derived and/or modified sequence
atgggcgccctggccagagccctgctgctgcccctgctggcccagtggctgctgagagccgcccccgagctggcccccgcccccttcaccctgcccctgagagtggccgccgccaccaacagagtggtggcccccacccccggccccggcacccccgccgagagacacgccgacggcctggccctggccctggagcccgccctggccagccccgccggcgccgccaacttcctggccatggtggacaacctgcagggcgacagcggcagaggctactacctggagatgctgatcggcacccccccccagaagctgcagatcctggtggacaccggcagcagcaacttcgccgtggccggcaccccccacagctacatcgacacctacttcgacaccgagagaagcagcacctacagaagcaagggcttcgacgtgaccgtgaagtacacccagggcagctggaccggcttcgtgggcgaggacctggtgaccatccccaagggcttcaacaccagcttcctggtgaacatcgccaccatcttcgagagcgagaacttcttcctgcccggcatcaagtggaacggcatcctgggcctggcctacgccaccctggccaagcccagcagcagcctggagaccttcttcgacagcctggtgacccaggccaacatccccaacgtgttcagcatgcagatgtgcggcgccggcctgcccgtggccggcagcggcaccaacggcggcagcctggtgctgggcggcatcgagcccagcctgtacaagggcgacatctggtacacccccatcaaggaggagtggtactaccagatcgagatcctgaagctggagatcggcggccagagcctgaacctggactgcagagagtacaacgccgacaaggccatcgtggacagcggcaccaccctgctgagactgccccagaaggtgttcgacgccgtggtggaggccgtggccagagccagcctgatccccgagttcagcgacggcttctggaccggcagccagctggcctgctggaccaacagcgagaccccctggagctacttccccaagatcagcatctacctgagagacgagaacagcagcagaagcttcagaatcaccatcctgccccagaagctgcaggtgctgcagtgcctgaagttccccggcctgagccagcagagaatgtag

SEQ ID NO: 237694 - protein, 1235 aa, Artificial Sequence
  derived and/or modified sequence
MWNYDCDDPLVSALPQASFSSSSELSSSHGPGFARLNRRDGAGGWSPLVSNKYQWLQIDLGERMEVTAVATQGGYGSSNWVTSYLLMFSDSGWNWKQYRQEDSIWGFSGNANADSVVYYRLQPSIKARFLRFIPLEWNPKGRIGMRIEVFGCAYRSEVVDLDGKSSLLYRFDQKSLSPIKDIISLKFKTMQSDGILLHREGPNGDHITLQLRRARLFLLINSGEAKLPSTSTLVNLTLGSLLDDQHWHSVLIQRLGKQVNFTVDEHRHHFHARGEFNLMNLDYEGNVSFSCSQPQSMPVTFLSSRSYLALPDFSGEEEVSATFQFRTWNKAGLLLFSELQLISGGILLFLSDGKLKSNLYQPGKLPSDITAGVELNDGQWHSVSLSAKKNHLSVAVDGQMASAAPLLGPEQIYSGGTYYFGGCPDKSFGSKCKSPLGGFQGCMRLISISGKVVDLISVQQGSLGNFSDLQIDSCGISDRCLPNYCEHGGECSQSWSTFHCNCTNTGYRGATCHNSIYEQSCEAYKHRGNTSGFYYIDSDGSGPLEPFLLYCNMTETAWTIIQHNGSDLTRVRNTNPENPYAGFFEYVASMEQLQATINRAEHCEQEFTYYCKKSRLVNKQDGTPLSWWVGRTNETQTYWGGSSPDLQKCTCGLEGNCIDSQYYCNCDADRNEWTNDTGLLAYKEHLPVTKIVITDTGRLHSEAAYKLGPLLCQGDRSFWNSASFDTEASYLHFPTFHGELSADVSFFFKTTASSGVFLENLGIADFIRIELRSPTVVTFSFDVGNGPFEISVQSPTHFNDNQWHHVRVERNMKEASLQVDQLTPKTQPAPADGHVLLQLNSQLFVGGTATRQRGFLGCIRSLQLNGMTLDLEERAQVTPEVQPGCRGHCSSYGKLCRNGGKCRERPIGFFCDCTFSAYTGPFCSNEISAYFGSGSSVIYNFQENYLLSKNSSSHAASFHGDMKLSREMIKFSFRTTRTPSLLLFVSSFYKEYLSVIIAKNGSLQIRYKLNKYQEPDVVNFDFKNMADGQLHHIMINREEGVVFIEIDDNRRRQVHLSSGTEFSAVKSLVLGRILEHSDVDQDTALAGAQGFTGCLSAVQLSHVAPLKAALHPSHPDPVTVTGHVTESSCMAQPGTDATSRERTHSFADHSGTIDDREPLANAIKSDSAVIGGLIAVVIFILLCITAIAVRIYQQKRLYKRSEAKRSENVDSAEAVLKSELNIQNAVNENQKEYFF

SEQ ID NO: 237695 - DNA, 3708 bp, Artificial Sequence
  derived and/or modified sequence
atgtggaactacgactgcgacgaccccctggtgagcgccctgccccaggccagcttcagcagcagcagcgagctgagcagcagccacggccccggcttcgccagactgaacagaagagacggcgccggcggctggagccccctggtgagcaacaagtaccagtggctgcagatcgacctgggcgagagaatggaggtgaccgccgtggccacccagggcggctacggcagcagcaactgggtgaccagctacctgctgatgttcagcgacagcggctggaactggaagcagtacagacaggaggacagcatctggggcttcagcggcaacgccaacgccgacagcgtggtgtactacagactgcagcccagcatcaaggccagattcctgagattcatccccctggagtggaaccccaagggcagaatcggcatgagaatcgaggtgttcggctgcgcctacagaagcgaggtggtggacctggacggcaagagcagcctgctgtacagattcgaccagaagagcctgagccccatcaaggacatcatcagcctgaagttcaagaccatgcagagcgacggcatcctgctgcacagagagggccccaacggcgaccacatcaccctgcagctgagaagagccagactgttcctgctgatcaacagcggcgaggccaagctgcccagcaccagcaccctggtgaacctgaccctgggcagcctgctggacgaccagcactggcacagcgtgctgatccagagactgggcaagcaggtgaacttcaccgtggacgagcacagacaccacttccacgccagaggcgagttcaacctgatgaacctggactacgagggcaacgtgagcttcagctgcagccagccccagagcatgcccgtgaccttcctgagcagcagaagctacctggccctgcccgacttcagcggcgaggaggaggtgagcgccaccttccagttcagaacctggaacaaggccggcctgctgctgttcagcgagctgcagctgatcagcggcggcatcctgctgttcctgagcgacggcaagctgaagagcaacctgtaccagcccggcaagctgcccagcgacatcaccgccggcgtggagctgaacgacggccagtggcacagcgtgagcctgagcgccaagaagaaccacctgagcgtggccgtggacggccagatggccagcgccgcccccctgctgggccccgagcagatctacagcggcggcacctactacttcggcggctgccccgacaagagcttcggcagcaagtgcaagagccccctgggcggcttccagggctgcatgagactgatcagcatcagcggcaaggtggtggacctgatcagcgtgcagcagggcagcctgggcaacttcagcgacctgcagatcgacagctgcggcatcagcgacagatgcctgcccaactactgcgagcacggcggcgagtgcagccagagctggagcaccttccactgcaactgcaccaacaccggctacagaggcgccacctgccacaacagcatctacgagcagagctgcgaggcctacaagcacagaggcaacaccagcggcttctactacatcgacagcgacggcagcggccccctggagcccttcctgctgtactgcaacatgaccgagaccgcctggaccatcatccagcacaacggcagcgacctgaccagagtgagaaacaccaaccccgagaacccctacgccggcttcttcgagtacgtggccagcatggagcagctgcaggccaccatcaacagagccgagcactgcgagcaggagttcacctactactgcaagaagagcagactggtgaacaagcaggacggcacccccctgagctggtgggtgggcagaaccaacgagacccagacctactggggcggcagcagccccgacctgcagaagtgcacctgcggcctggagggcaactgcatcgacagccagtactactgcaactgcgacgccgacagaaacgagtggaccaacgacaccggcctgctggcctacaaggagcacctgcccgtgaccaagatcgtgatcaccgacaccggcagactgcacagcgaggccgcctacaagctgggccccctgctgtgccagggcgacagaagcttctggaacagcgccagcttcgacaccgaggccagctacctgcacttccccaccttccacggcgagctgagcgccgacgtgagcttcttcttcaagaccaccgccagcagcggcgtgttcctggagaacctgggcatcgccgacttcatcagaatcgagctgagaagccccaccgtggtgaccttcagcttcgacgtgggcaacggccccttcgagatcagcgtgcagagccccacccacttcaacgacaaccagtggcaccacgtgagagtggagagaaacatgaaggaggccagcctgcaggtggaccagctgacccccaagacccagcccgcccccgccgacggccacgtgctgctgcagctgaacagccagctgttcgtgggcggcaccgccaccagacagagaggcttcctgggctgcatcagaagcctgcagctgaacggcatgaccctggacctggaggagagagcccaggtgacccccgaggtgcagcccggctgcagaggccactgcagcagctacggcaagctgtgcagaaacggcggcaagtgcagagagagacccatcggcttcttctgcgactgcaccttcagcgcctacaccggccccttctgcagcaacgagatcagcgcctacttcggcagcggcagcagcgtgatctacaacttccaggagaactacctgctgagcaagaacagcagcagccacgccgccagcttccacggcgacatgaagctgagcagagagatgatcaagttcagcttcagaaccaccagaacccccagcctgctgctgttcgtgagcagcttctacaaggagtacctgagcgtgatcatcgccaagaacggcagcctgcagatcagatacaagctgaacaagtaccaggagcccgacgtggtgaacttcgacttcaagaacatggccgacggccagctgcaccacatcatgatcaacagagaggagggcgtggtgttcatcgagatcgacgacaacagaagaagacaggtgcacctgagcagcggcaccgagttcagcgccgtgaagagcctggtgctgggcagaatcctggagcacagcgacgtggaccaggacaccgccctggccggcgcccagggcttcaccggctgcctgagcgccgtgcagctgagccacgtggcccccctgaaggccgccctgcaccccagccaccccgaccccgtgaccgtgaccggccacgtgaccgagagcagctgcatggcccagcccggcaccgacgccaccagcagagagagaacccacagcttcgccgaccacagcggcaccatcgacgacagagagcccctggccaacgccatcaagagcgacagcgccgtgatcggcggcctgatcgccgtggtgatcttcatcctgctgtgcatcaccgccatcgccgtgagaatctaccagcagaagagactgtacaagagaagcgaggccaagagaagcgagaacgtggacagcgccgaggccgtgctgaagagcgagctgaacatccagaacgccgtgaacgagaaccagaaggagtacttcttctag

SEQ ID NO: 237696 - DNA, 3708 bp, Artificial Sequence
  derived and/or modified sequence
atgtggaactatgactgtgatgatcctcttgtgtctgccttgcctcaggcatccttcagcagttcttccgagctctccagcagtcatggtcctggatttgcaaggctgaatagaagagatggagctggtggctggtctccacttgtgtctaacaaataccagtggttgcagattgaccttggagagagaatggaggtcaccgctgtggccactcaagggggatatggtagctccaactgggtgaccagctacctcctgatgttcagtgatagtggctggaactggaaacaatatcgccaagaggacagcatctggggtttttcaggaaatgcaaatgcagacagtgttgtgtactatagactccagccttctatcaaagccagatttctgcgcttcatccctttggaatggaaccccaagggcagaattggaatgcgaatcgaagtgttcggatgtgcatacagatcagaagtggttgatcttgatggaaaaagttcccttctctacagatttgatcaaaaatccctgagcccaataaaagacattatttctttgaaattcaaaaccatgcagagtgatgggattctactccacagggaagggccaaatggagatcacatcacactgcaattaagaagagcaagactctttttacttattaattcaggtgaagctaaactgccttccacttccaccctggtcaatctcaccctgggcagcctgctagatgatcagcattggcattcagtgctcatccagcgtttgggcaaacaagtcaacttcacagtggacgaacacaggcatcatttccatgcacggggagaattcaatctcatgaatcttgattatgagggaaatgtgtcattttcttgttcacaaccacaatctatgcccgtgacttttctgagctccaggagttatttagcactgccagacttctctggagaggaggaggtttctgccacttttcaatttcgaacttggaataaggcagggcttctgctgttcagtgaacttcagctgatttcagggggtatcctcctctttctgagtgatggaaaacttaagtcgaatctctaccagccaggaaaattacccagtgacatcacagcaggtgtcgaattaaatgatgggcagtggcattctgtctctttatctgctaaaaagaatcacttgagtgtggcggtggacggccagatggcttctgctgctcctctgctggggcctgagcagatttattcgggtggcacctattattttggaggttgtcctgacaaaagctttggatccaaatgtaaaagtccacttggtggatttcagggatgtatgaggctcatttctatcagcggcaaagtggtagatctgatttcagttcagcaggggtcccttgggaacttcagtgaccttcagatagactcatgtggcatctcagacaggtgtttgcccaactattgtgaacacggtggggagtgttcccagtcctggagcacctttcattgtaactgtaccaacactggttacagaggagctacttgccataactctatctatgagcagtcatgtgaagcctataagcacagaggaaatacttcagggttttactatatagattcagatggaagtggtcccctggaaccatttcttctatattgcaatatgaccgaaactgcatggaccatcatacagcacaacggctctgacttaacaagagtcagaaatactaatccagagaacccatatgctgggtttttcgagtatgtggccagcatggagcaacttcaggccactattaaccgtgcagagcactgtgaacaggagtttacttattactgcaagaagtcacggctggtcaataagcaagatggaacccctctgagttggtgggtaggaagaaccaatgaaacgcaaacctactggggaggttcttcgcctgatcttcaaaaatgtacttgtggattagagggaaactgcattgattctcagtattactgcaattgtgatgctgaccggaatgaatggaccaatgacactggattgcttgcttataaagaacatcttccagtaactaagatcgtgattacagacacaggccgactgcattcagaagcagcttataaactggggcctctgctctgccagggagacagatcattttggaattcagcttcctttgataccgaggcttcatatcttcattttcctaccttccacggagaacttagcgcggatgtatctttcttttttaagacaacagcttcatctggggtatttttagagaacttggggattgctgattttatacggatagagcttcgctctccgacagtagtgactttttcatttgatgtggggaatgggccttttgaaatctcagtgcagtcacccacccacttcaacgacaaccagtggcaccatgtgagggttgaaaggaacatgaaggaggcctcccttcaagtggatcagctgacaccaaagacacagcccgcccccgctgatgggcatgtcctgttacagctcaacagtcagctcttcgtgggtggaacggccaccagacagagaggctttctgggctgcattcggtctctgcagttgaatgggatgaccctggatttggaagaaagagcccaggtgactccagaagtgcagccaggttgtaggggacattgcagcagctatgggaagttatgccgcaatggagggaaatgcagagaaagacccattgggttcttttgtgactgcactttctctgcatacacagggccattctgctcaaatgagatttctgcatattttggatctggctcatccgtgatatacaattttcaagaaaattatcttttaagtaaaaactccagctcccacgctgcttcatttcatggtgatatgaagctgagcagagaaatgatcaaatttagtttccgaacaacacgaacaccaagcttgctgctttttgtgagctccttttacaaagaatacctttctgtgatcattgccaaaaatggaagtttgcagatcaggtacaagttaaataaatatcaagagcctgatgttgttaactttgattttaaaaacatggctgatggacaacttcaccacataatgattaacagagaagaaggagtggtctttatagagattgacgataatagaaggagacaagttcacctgtcatcaggcacagaattcagtgcagtcaaatctctggtattgggcaggattttagaacacagtgatgtggaccaggatactgcactggcaggtgcgcagggcttcacaggctgcctctctgcagtgcagctcagccacgtggcccctctgaaggcagctctgcaccccagccacccagaccctgtcactgttacaggacacgtgactgagtccagctgtatggcccagcctggcactgatgccacatcaagggaaaggacacactcgtttgcagatcattctggaacaatagatgacagagagccccttgctaatgcaatcaaaagtgactctgcagtaattggaggtctgatagctgttgtgatttttatcttgctttgcatcactgccatagctgttcgcatttatcagcagaaaaggttatataaaagaagtgaggcaaaaaggtcagagaatgtagacagtgctgaggctgttctgaaaagtgagcttaatatacaaaatgcagtcaatgaaaatcagaaagagtacttcttctga

SEQ ID NO: 237697 - DNA, 3708 bp, Artificial Sequence
  derived and/or modified sequence
atgtggaattatgactgtgatgatcctttggtctctgctctgccacaagccagcttctctagcagcagcgagctgtcttcttctcacgggccgggcttcgcacgcctaaataggcgggatggtgctggcggctggtcccctctggtgagcaacaagtatcagtggctgcagatcgatttgggcgagagaatggaggtcacagccgtcgctacacagggggggtatggttcgtcaaactgggtcacctcctatctactgatgttctcagactctggatggaattggaaacagtaccgccaagaagactccatttggggttttagtggaaatgccaatgccgacagtgtagtgtactacaggctccagcccagcattaaagccaggtttctcaggttcatcccattagagtggaatccaaaaggtaggattggcatgcgcattgaggtcttcggatgcgcataccggtccgaagtggtagatctggacggcaaaagctctctgttgtaccgcttcgatcagaaatctctgagccccataaaagatattatcagcctcaaattcaagacaatgcagtctgatgggatcttgctgcaccgcgagggccccaacggggatcacataacactccaactgcgcagggcacgcctatttctgctcatcaacagcggcgaagcgaagttaccttcgacctctacactggttaacctcactctgggatccctcctcgacgaccagcactggcactctgtcctgatccagcggctaggcaaacaggtcaacttcacagtcgacgaacataggcaccatttccatgcacggggcgagttcaatcttatgaacttggattatgagggaaatgtttctttttcttgttctcaaccacaatcaatgccggtgacttttttgtcgagccgatcatacctggctctgcccgatttctctggcgaagaggaagtgtccgccacttttcaattcagaacatggaataaggctggactgctgctcttttcagagctacaactcattagtggcggtatcttactgttcttatcagacgggaaactcaagtctaacctttatcaacctggtaagctgccctctgatataaccgccggtgtggagttgaatgatgggcagtggcacagcgtgagcctgagtgccaagaagaatcaccttagtgtagccgtcgatgggcagatggcgagcgccgctccccttctcggtcctgagcagatatacagcggaggcacgtattatttcggtgggtgtcccgacaaatcttttggtagcaagtgtaagagcccgttgggcggcttccaaggctgcatgagactgatcagcatctcaggcaaggtcgttgacctcattagtgtgcagcagggcagtctgggcaatttttcagatcttcaaatcgacagctgtggcatctccgacaggtgcctccccaattactgcgagcacggcggagagtgttctcagtcctggtcaacatttcattgcaattgcaccaacaccggctacagaggggccacatgccacaatagcatatacgagcagagttgtgaggcctacaagcataggggcaatacctccggcttttactacatcgactcagacggttctggaccactagagcctttcctgctgtactgtaacatgaccgaaactgcgtggacgataatccagcacaatggctcagacctcaccagagtccgcaacactaaccctgaaaatccttatgccggctttttcgaatacgtggcatccatggagcagttacaggccaccataaatcgggccgaacattgtgagcaagagttcacgtactactgcaagaaatcccgccttgtcaacaagcaagacggcactcccctgagctggtgggtgggccggacgaacgagactcagacatattggggagggagttccccagaccttcaaaaatgtacttgtggcctcgaaggcaactgcatcgatagccagtactattgcaactgcgacgcagataggaatgaatggacaaatgatacaggcctgctagcttacaaggaacaccttcctgtgacaaaaatcgtgatcactgacacagggcgtctccattcagaagctgcatataagctcggccccttactctgtcagggtgatcggtcattctggaactccgcttcattcgacacagaagcttcatacctgcactttccgacgttccacggggagctctcggctgacgtgagctttttttttaagactacagcctcctccggggtgttcctggagaacctcgggattgccgattttatccgaatcgaactgagatcccctactgttgtgacgttctctttcgatgtaggcaatggcccatttgagatctcagtgcaatctcctacacacttcaatgataatcagtggcaccacgtccgggtggagcgtaatatgaaagaagcctcccttcaggtggatcagcttaccccaaagacccaaccagcccccgccgacggccacgtcctgctccagctgaattcacagctgtttgtgggcggaacagcaacccgccagcggggctttctcggctgtatacgcagcctccagctgaatggtatgactctggatttggaggagagagctcaggtgactcctgaggtccagcccggctgcaggggacattgttcctcttatggtaagttgtgccgcaatggaggtaaatgcagagaaaggcccattggctttttttgcgactgcactttttccgcttacaccgggcccttttgctctaacgagatctctgcttactttggatctgggtcctctgtgatctacaattttcaggagaattacctgctttccaagaacagtagctcgcacgcggcaagttttcatggcgatatgaaactgagccgagagatgattaaattctctttccgtacaacccgaacgccttccctgctgctctttgtctcgtctttttacaaggaatacttatcggttattattgcgaaaaatgggagtctgcaaatcagatataaacttaacaagtaccaggagccagacgtggtcaactttgacttcaagaacatggccgacggtcagctccatcacattatgatcaaccgggaagagggtgtcgtcttcatcgagattgatgacaacagacgcagacaggtccacctgtcgagtggtactgagttttccgccgtgaagtccctggtgctgggtaggatcctggaacattccgatgtggaccaagacaccgccttagccggggcacaggggtttacaggatgtctgtcggccgtgcagctgagccacgtggcccccctgaaggcagctctccacccctctcatcctgaccctgtcacagtgaccggacacgtcacagaaagctcctgtatggcccagccgggaacagatgctacgagcagagaacggacacactcctttgccgaccatagtggaacaatcgatgacagagaacctctggcaaacgcaatcaaaagtgattctgctgttatcggtggactgatcgcagttgtgatatttattttactatgcattaccgccattgccgtgcggatctatcagcaaaaaaggctgtacaaacggtccgaagctaagcgcagcgagaatgtggatagtgctgaagctgttctgaaatctgaattgaacattcagaacgcagtcaacgaaaatcagaaagaatacttcttttag

SEQ ID NO: 237698 - DNA, 3708 bp, Artificial Sequence
  derived and/or modified sequence
atgtggaactatgactgtgatgaccccctggtgtctgccctgccccaggccagcttcagcagcagcagcgagctgagcagcagccacggccctggctttgcccggctgaacagaagagatggagctgggggctggagccccctggtgagcaacaagtaccagtggctgcagattgacctgggggagaggatggaggtgacagctgtggccacccagggcggctacggcagcagcaactgggtgaccagctacctgctgatgttcagtgacagcggctggaactggaagcagtaccggcaggaggacagcatctggggcttctctggaaatgccaatgctgacagcgtggtgtactaccgcctgcagcccagcatcaaggcccgcttcctgcgcttcatccccctggagtggaaccccaagggcagaattggcatgagaattgaggtgtttggctgtgcctacagaagtgaggtggtggacctggatggcaagagcagcctgctgtacagatttgaccagaagagcctgagccccatcaaggacatcatcagcctgaagttcaagaccatgcagagtgatggcatcctgctgcaccgggagggccccaatggagaccacatcaccctgcagctgcggcgggcccggctcttcctgctgatcaacagcggggaggccaagctgcccagcaccagcaccctggtgaacctgaccctgggcagcctgctggatgaccagcactggcacagcgtgctgatccagaggctgggcaagcaggtgaacttcaccgtggatgagcaccgccaccacttccacgcccggggggagttcaacctgatgaacctggactatgagggcaatgtgtccttcagctgcagccagccccagagcatgcctgtgaccttcctgagcagccgcagctacctggccctgcctgacttcagcggggaggaggaggtgtctgccaccttccagttccgcacctggaacaaggccggcctgctgctcttcagcgagctgcagctgatcagcggcggcatcctgctcttcctgagtgatggcaagctgaagagcaacctgtaccagcccgggaagctgcccagcgacatcacagctggggtggagctgaatgatggccagtggcacagcgtgtccctgagcgccaagaagaaccacctgtctgtggccgtggatggccagatggccagcgctgcccccctgctgggccctgagcagatctacagcggcggcacctactactttggaggctgcccagacaagagctttggcagcaagtgcaagagccccctgggcggcttccagggctgcatgaggctcatcagcatcagcggcaaggtggtggacctgatctctgtgcagcagggcagcctgggcaacttcagtgacctgcagattgacagctgtggcatcagtgaccgctgcctgcccaactactgtgaacatggaggagagtgcagccagagctggagcaccttccactgcaactgcaccaacacaggctacagaggagccacctgccacaacagcatctatgagcagagctgtgaggcctacaagcaccggggcaacaccagcggcttctactacatcgacagtgatggcagcggccccctggagcccttcctgctgtactgcaacatgacagaaacagcctggaccatcatccagcacaacggcagtgacctgaccagggtgaggaacaccaaccctgagaacccctatgccggcttctttgaatatgtggcctccatggagcagctgcaggccaccatcaacagagctgagcactgtgagcaggagttcacctactactgcaagaagagccggctggtgaacaagcaggacggcacccccctgtcctggtgggtgggccgcaccaatgagacccagacctactggggcggcagcagcccagacctgcagaagtgcacctgtggcctggagggcaactgcatcgacagccagtactactgcaactgtgatgctgacagaaatgagtggaccaatgacaccggcctgctggcctacaaggagcacctgcctgtgaccaagatcgtcatcacagacaccggccgcctgcacagcgaggccgcctacaagctgggccccctgctgtgccagggcgaccgctccttctggaacagcgccagctttgacacagaggccagctacctgcacttccccaccttccatggagagctgtctgcagatgtgtccttcttcttcaagaccacagccagcagcggggtcttcctggagaacctgggcattgctgacttcatcagaattgagctgcggagccccaccgtggtgaccttctcctttgatgtgggcaatggcccctttgagatctctgtgcagagccccacccacttcaatgacaaccagtggcaccacgtgcgggtggagaggaacatgaaggaggccagcctgcaggtggaccagctgacccccaagacccagcctgccccagcagatggccacgtgctgctgcagctgaacagccagctgtttgtgggcggcacagccacccggcagaggggcttcctgggctgcatccgcagcctgcagctgaatggcatgaccctggacctggaggagcgggcccaggtgaccccagaggtgcagcccggctgccggggccactgcagcagctatggcaagctgtgcagaaatggaggaaaatgtcgggagcggcccatcggcttcttctgtgactgcaccttcagcgcctacacaggccccttctgcagcaatgagatcagcgcctactttggaagtggcagcagcgtcatctacaacttccaggagaactacctgctgagcaagaacagcagcagccatgctgccagcttccatggagacatgaagctgagccgggagatgatcaagttctccttccgcaccaccaggacccccagcctgctgctgtttgtgtcctccttctacaaggagtacctgagcgtcatcatcgccaagaatggcagcctgcagatccgctacaagctgaacaagtaccaggagccagatgtggtgaactttgacttcaagaacatggctgatggccagctgcaccacatcatgatcaaccgggaggagggcgtggtgttcatcgagattgatgacaacagaagacggcaggtgcacctgagcagcggcacagagttctctgctgtgaagagcctggtgctgggccgcatcctggagcacagtgatgtggaccaggacacagccctggccggggcccagggcttcaccggctgcctgtctgctgtgcagctgagccacgtggcccccctgaaggccgccctgcaccccagccacccagaccctgtgacagtgactggacatgtgacagagagcagctgcatggcccagcctggaacagatgccaccagccgggagaggacccacagctttgctgaccacagcggcaccattgatgaccgggagcccctggccaatgccatcaagagtgacagcgctgtgattggaggcctgattgctgtggtgatcttcatcctgctgtgcatcacagccatcgctgtgcgcatctaccagcagaagaggctgtacaagaggtctgaggccaagagaagtgaaaatgtggacagcgctgaggccgtgctgaagtctgagctgaacatccagaatgctgtgaatgaaaaccagaaggagtacttcttctag

SEQ ID NO: 237699 - DNA, 3708 bp, Artificial Sequence
  derived and/or modified sequence
atgtggaactacgactgcgacgaccccctggtgagcgccctgccccaggcctccttctcttctagtagcgagcttagtagctcccatggtcctggcttcgcgcgcctgaataggcgcgatggagcgggtgggtggagtcctctggtgagcaacaagtatcagtggctgcagatcgatttgggcgagcgcatggaggttacagccgtggccactcagggtggttatggcagcagtaactgggtgacatcgtatttgctgatgttctctgatagtggctggaactggaaacagtacagacaagaggactccatctggggatttagcggtaacgccaatgcagatagtgtagtgtattacaggctgcagcccagcatcaaagctagatttctgcgctttattcccctggagtggaacccaaaagggcggatcggaatgaggatagaggtgttcggttgtgcgtaccgatccgaagtcgttgaccttgatggaaaaagctcactactgtacagatttgatcagaaatctctcagccccatcaaggatattatttccttgaagtttaagaccatgcaatctgacgggatcctccttcaccgagagggtccaaacggtgatcatattacgcttcaactgcgaagagcccgactcttcctgctcattaattctggggaggcaaagttgccctccactagcacattggtgaatttgacgctgggttcattattggacgatcagcattggcacagtgttttgattcagaggctaggaaagcaagtaaatttcacagtagatgagcatcgtcaccacttccacgctaggggcgagttcaacctgatgaaccttgattacgaaggcaacgtttcctttagttgctctcagccccaatccatgcccgtgacttttctgtcgtctcgatcataccttgcgctgcctgactttagtggcgaagaagaagtgtctgctacattccagttcagaacctggaacaaggctggccttctgctcttctcggagctgcagctgatctctggcggcatacttttgttcctgtcggacggtaaattaaagagcaacctataccagcccggaaagctcccatcagacatcacagctggcgtggagttgaatgacgggcagtggcactcagtgagtctgtctgctaagaagaaccatctgagtgtcgctgtcgacggccagatggcgagtgcagcaccccttctggggcccgagcagatctacagtggtggcacctactatttcggcgggtgtccagataagtcttttggcagtaagtgtaagtctcctctggggggcttccaggggtgcatgcgtctgattagcatcagtggtaaagtggttgacttaatatccgttcagcagggttctctaggtaatttctccgacctgcaaatcgattcgtgtggaattagcgaccgttgtctacccaactactgtgagcatggcggcgaatgcagccagagttggagtacattccactgtaactgcaccaatactggataccggggggcaacatgccacaattccatttatgagcaatcctgcgaagcctacaagcacagaggaaacaccagcgggttttattatatcgattcagacggcagcgggccgctggaaccgtttctgctctactgcaacatgactgagaccgcttggactatcatccaacataacggttcggacctgacgcgagtccgcaacaccaaccccgagaacccatacgcaggattttttgagtacgtcgcatccatggaacagctgcaggcaacaattaatagggccgagcactgtgagcaggagttcacatattactgcaagaagtcccgactcgttaataaacaggatggaacccctctgagctggtgggtggggcgcacgaatgaaacccaaacttattgggggggtagtagccctgatctgcaaaaatgcacttgtggtctcgagggcaactgcatcgattcccagtactactgcaactgcgatgccgacaggaacgaatggaccaacgacactggactgttggcctataaggagcacttgccagttactaagattgtgatcaccgataccgggcgccttcattctgaggccgcctacaaactcggacccctactgtgccagggagacagaagcttctggaactcagcttctttcgataccgaggcatcctatctgcactttcctacatttcacggcgagttgtctgccgatgtgtccttttttttcaaaactaccgcaagttcaggtgtttttctggagaacctcggtatagcagacttcatcaggattgagcttcgatcacccaccgtcgttacatttagcttcgacgttggcaatggcccatttgaaattagcgtgcagagccccactcacttcaacgataatcagtggcatcacgtgagggtcgagagaaacatgaaagaagcctctttacaggtcgaccagctgacccccaagactcaacctgctccggcagacggtcatgtgctgctacagttgaatagtcagctgttcgtcgggggtactgcgacccgccagcggggatttctgggttgcatccgcagcctgcaattgaacgggatgactctggatctcgaggagcgggctcaagtgacccctgaagtgcagccaggctgcagaggccactgttcgagctatgggaaactgtgtcggaacggtggaaagtgtcgtgaacggcctatcggatttttttgcgattgtacctttagcgcgtacacgggaccattttgctctaacgaaattagcgcatactttggcagcggctcctcagtgatatacaactttcaagaaaattacttgctgagtaagaactcgtcaagccatgctgcctcattccacggagacatgaagctttcaagagaaatgataaagttttcattccggacgacaagaaccccctcattgcttctatttgttagcagtttttacaaggaatatctaagtgtaataatcgccaaaaacggctctctgcaaatccgatacaaattgaacaaatatcaagaacccgacgtggtgaactttgatttcaagaatatggccgatggtcaattgcaccatatcatgatcaaccgggaggagggcgtagtgtttattgagatcgatgataataggcggaggcaggtccacttaagtagtggaacagaattttcagccgtcaagtcgctggtgcttggacgcatcctggaacacagtgacgtagaccaagataccgccttggcgggcgctcaaggctttaccggttgcttgtctgctgtccagctgtctcacgttgctcctctgaaggccgctcttcacccatctcaccccgatccagtcacagtcacaggacatgtcacagagagcagctgtatggcacagcctgggacagatgccaccagccgagaaagaacccactcgtttgccgaccatagcggcaccatagatgaccgggagcccctagctaacgctattaaaagtgattcggcagtgataggggggttaatagcagtcgtcatcttcatcctgctgtgcattacagcgatcgccgtgaggatttaccaacagaagcgcctgtacaagcgatccgaagccaaacgctctgagaacgtggactccgctgaagctgtgctcaaatccgagctgaacatccagaatgccgtcaatgaaaatcaaaaggaatattttttttag

SEQ ID NO: 237700 - DNA, 3708 bp, Artificial Sequence
  derived and/or modified sequence
atgtggaactacgactgtgacgatcccttagtctcggcgctgccacaggcctcctttagttcatcctcagagctgtcctcaagccatgggcctggcttcgccagactgaaccggagggatggcgctggtggctggtccccattagtgagcaacaaatatcagtggctgcaaatcgatctgggggaacggatggaggttactgctgtggccacacagggtggctacggatcttccaattgggtcacttcgtatttactcatgttcagcgatagcggctggaactggaaacagtacagacaggaagattcaatttggggattttcagggaacgcgaatgctgacagcgtagtctattaccgacttcagccttctatcaaagctaggttcctcaggttcattcccttggaatggaatccaaaaggcaggatcggaatgaggatcgaggtcttcgggtgtgcgtacagaagcgaggtcgttgatcttgatggcaaaagttccctgctctatcgattcgatcagaagtccctgagccccatcaaagacataataagtctaaaattcaagacaatgcaaagtgatggcatcctactacaccgggaaggccctaatggcgatcatatcactcttcagctcagacgtgctcgtttgttcctgctgataaactcaggagaagccaagctgccaagcacctccaccctggtgaacttgaccctcggatctctgctcgacgatcagcattggcactcggtgttaattcagcgtctcgggaagcaagtcaacttcaccgtcgacgaacaccggcatcattttcatgccaggggggaattcaacttgatgaacctagattatgagggcaatgtctccttttcttgcagccagccacaaagcatgccagtaactttcctctcctccaggtcctacctagccttgccggactttagcggggaggaagaggtgtccgccacattccagttccgaacatggaataaagccggattgctcctcttcagtgagctgcagctaatcagcgggggtatcttgcttttcctctccgacggtaagctgaaaagtaatctttatcagccaggcaagctgccctctgacatcaccgccggagtggagctgaacgacggccagtggcattctgtgagtctgagtgccaaaaagaatcacctgagcgtggccgtcgacggccagatggcaagcgccgctcctttgctgggccctgagcagatctatagtggcggaacctactattttggaggctgtcccgataagtcgtttggctcgaaatgtaagagccccctggggggattccaagggtgcatgaggctgatctccatatccgggaaggtggtggacctcatcagtgttcagcagggcagtttgggaaatttcagtgacttgcagatcgattcctgtggcatctcagacagatgtctccccaattactgcgaacatgggggtgaatgttcgcagtcttggtccacatttcactgtaattgtaccaacaccggttataggggggcaacatgccataactccatttatgagcagagctgcgaagcgtataagcaccgagggaacaccagcgggttttattacattgatagtgatggaagcgggccactggagccctttctcctttattgtaacatgactgagaccgcgtggaccatcatacagcataacggctctgacctgacccgcgttcggaatacgaatccagaaaatccatatgcaggattcttcgagtacgtggcatcgatggaacagctccaggccactataaaccgagctgagcactgtgagcaggaatttacatactattgcaagaaaagtaggctagtgaataaacaagacggtacccctctgtcatggtgggtaggccgtacaaatgaaacacagacttactgggggggtagcagtccagatctgcaaaagtgtacatgcggactcgagggtaattgtatagattcccagtattactgcaattgtgacgccgaccggaacgagtggaccaacgatactggtctgctggcctacaaggagcacctgccagtgaccaagattgtaatcaccgataccggacgactccactcagaggccgcttataagctgggccctctgttatgccaaggagatcgcagtttctggaacagtgcttcttttgatacagaagctagctatttacacttccccacctttcatggcgaactttcagcagacgtttcctttttctttaagacaaccgcctcttctggagtcttcctggagaacctgggcattgccgattttatcagaattgaactgcggagccccacggtcgtcactttctcttttgacgtgggtaacggtcccttcgaaatctctgtgcagtctcctacccactttaacgataatcagtggcatcacgtacgggtggagcggaacatgaaagaagccagccttcaggtcgaccaactaacaccaaagacacagccagctcctgcagacggccatgtactcttgcagctgaacagtcagctcttcgtaggcggtacagccacaaggcaaagaggctttctaggctgcattcggagcctgcagctgaatggaatgaccctggacttggaagagagagctcaggttactccagaggtgcaacccggatgtcgtggacactgtagttcatacggcaaattgtgtagaaacggtgggaagtgtagggagcgccctatcggattcttttgcgactgcacattttcagcctatacaggacccttttgtagtaacgaaatatctgcctatttcgggagcggatcatccgtgatttataattttcaggagaactatctcctgagcaagaactcctcatcccatgcagcgagcttccatggggacatgaagctgagtagagagatgataaaattttcttttagaacgaccaggactccctctctccttctcttcgtcagcagcttctacaaggagtaccttagcgtgataatagcaaagaatggatcccttcagattaggtataagctgaataagtaccaggaacctgatgtagtgaattttgactttaaaaacatggccgacggtcaattacaccacatcatgattaatcgggaagagggtgttgtgtttatcgaaattgatgacaaccggcgtcgccaggtgcatcttagctctggtactgagtttagcgccgtcaaatccctcgttctggggaggatcctggaacactctgacgtggaccaggatacagctctggctggagctcaaggctttaccggatgtctgagcgctgtgcagctcagtcatgtggccccactgaaggccgctctgcatcctagtcatcctgatcccgtcaccgtgactggacacgtcacagaatcctcttgtatggcacagcccggtactgacgccacttccagggagagaacccattcatttgctgaccacagtgggactattgatgaccgcgaacccttagctaacgcaatcaaatctgactcagccgtaatagggggtctcatcgccgttgtaatttttattctcctgtgtataaccgccatcgctgtgagaatctatcagcagaagcgactctacaagcggagtgaagccaaaaggtcagagaacgtcgatagtgccgaagccgtattaaagagcgaactgaacattcaaaacgccgtcaacgaaaatcagaaggaatattttttttag

SEQ ID NO: 237701 - protein, 1341 aa, Artificial Sequence
  derived and/or modified sequence
MKHLYGLFHYNPMMLGLESLPDPTDTWEIIETIGKGTYGKVYKVTNKRDGSLAAVKILDPVSDMDEEIEAEYNILQFLPNHPNVVKFYGMFYKADHCVGGQLWLVLELCNGGSVTELVKGLLRCGQRLDEAMISYILYGALLGLQHLHNNRIIHRDVKGNNILLTTEGGVKLVDFGVSAQLTSTRLRRNTSVGTPFWMAPEVIACEQQYDSSYDARCDVWSLGITAIELGDGDPPLFDMHPVKTLFKIPRNPPPTLLHPEKWCEEFNHFISQCLIKDFERRPSVTHLLDHPFIKGVHGKVLFLQKQLAKVLQDQKHQNPVAKTRHERMHTRRPYHVEDAEKYCLEDDLVNLEVLDEDTIIHQLQKRYADLLIYTYVGDILIALNPFQNLSIYSPQFSRLYHGVKRASNPPHIFASADAAYQCMVTLSKDQCIVISGESGSGKTESAHLIVQHLTFLGKANNQTLREKILQVNSLVEAFGNSCTAINDNSSRFGKYLEMMFTPTGVVMGARISEYLLEKSRVIKQAAREKNFHIFYYIYAGLHHQKKLSDFRLPEEKPPRYIADETGRVMHDITSKESYRRQFEAIQHCFRIIGFTDKEVHSVYRILAGILNIGNIEFAAISSQHQTDKSEVPNAEALQNAASVLCISPEELQEALTSHCVVTRGETIIRANTVDRAADVRDAMSKALYGRLFSWIVNRINTLLQPDENICSAGGGMNVGILDIFGFENFQRNSFEQLCINIANEQIQYYFNQHVFALEQMEYQNEGIDAVPVEYEDNRPLLDMFLQKPLGLLALLDEESRFPQATDQTLVDKFEDNLRCKYFWRPKGVELCFGIQHYAGKVLYDASGVLEKNRDTLPADVVVVLRTSENKLLQQLFSIPLTKTGNLAQTRARITVASSSLPPHFSAGKAKVDTLEVIRHPEETTNMKRQTVASYFRYSLMDLLSKMVVGQPHFVRCIKPNDDREALQFSRERVLAQLRSTGILETVSIRRQGYSHRILFEEFVKRYYYLAFTAHQTPLASKESCVAILEKSRLDHWVLGKTKVFLKYYHVEQLNLLLREVIGRVVVLQAYTKGWLGARRYKRVREKREKGAIAIQSAWRGYDARRKFKKISNRRNESAAHNQAGDTSNQSSGPHSPVAAGTRGSAEVQDCSEPGDHKVLRGSVHRRSHSQAESNNGRTQTSSNSPAVTEKNGHSQAQSSPKGCDIFAGHANKHSVSGTDLLSSRICHPAPDQQGLSLWGAPQKPGSENGLAQKHRTPRRRCQQPKMLSSPEDTMYYNQLNGTLEYQGSKRKPRKLGQIKVLDGEDEYYKSLSPVDCIPEENNSAHPSFFSSSSKGDSFAQH

SEQ ID NO: 237702 - DNA, 4026 bp, Artificial Sequence
  derived and/or modified sequence
atgaaacacctttacggcctattccattacaacccaatgatgttggggcttgaaagccttccagaccccactgatacctgggaaattattgagactattggtaaggggacatatgggaaggtgtacaaggtgaccaacaaaagagacgggagcctggccgctgtcaagatcctggatccagtgtcagacatggacgaagagatcgaggccgaatataacattcttcagttcctgccaaaccatccaaatgtcgtgaagttctatggcatgttttataaagccgaccactgtgtggggggtcagctatggttggtcctcgagctgtgcaatgggggtagtgtcacggaattagtgaaaggactcctgcggtgtgggcaacgcctggacgaagccatgatttcttacatactatatggagctctgctcggccttcagcatctccataataatcggatcatccatcgggatgtgaagggcaataacatcctcttgaccaccgaaggtggcgttaaactcgttgattttggagtgtcagcccagttaacttcaacccgactgagacggaacacaagcgtgggtacaccgttctggatggctccggaggttatcgcctgtgagcagcagtatgattcaagctacgacgcaaggtgtgatgtctggtctctgggtattactgcaatcgaactaggcgatggagatccccccttgttcgacatgcatccagtgaagacgttgttcaagatcccccggaatccacccccaacactgctgcatccggagaagtggtgcgaggaatttaatcactttatttcccagtgtttgatcaaagacttcgagaggaggccatcagtcacgcatctgctggaccacccctttattaagggagtgcacggaaaagtactgtttttgcaaaagcagttagccaaagtcctccaagaccagaaacatcagaacccggtggcgaaaacaagacatgaaagaatgcacactcggcggccttatcacgtcgaggatgcggagaagtactgtctcgaggacgatctggtgaacttggaagtgttagacgaggatacaattatccaccagctgcaaaaaaggtatgccgacttgcttatctacacctatgtcggtgatatcctgattgccttaaatccctttcagaatctgtctatttattcacctcagttctctcgcctgtatcatggcgtcaagcgggcttctaacccaccgcatatttttgcaagtgcagacgcagcctaccaatgcatggtgaccctgtcaaaagatcagtgcattgtcatatcaggtgaaagcggtagtggaaaaacagagagcgcccatttgatcgtgcagcatcttacatttttaggaaaggccaacaaccagactctcagggagaagatactgcaggtgaatagcctggtggaggccttcggtaactcttgtacggcgattaacgataattcctctaggtttgggaagtacctggagatgatgttcaccccaactggtgttgtgatgggcgctcgcatatcagaatacttactggagaaatccagggtgataaaacaggccgcaagggaaaaaaatttccatattttctactatatttatgctggactccatcatcagaagaaattgagcgacttcagactgccggaggaaaagccccccagatacatcgcagacgaaacaggccgcgtaatgcatgacataacaagcaaggagtcttatagacgtcagttcgaggccatacagcattgctttcggataataggattcacagataaggaggtccactctgtgtataggattctggcaggaattcttaatattgggaatatcgagtttgccgctatctcatctcagcatcaaactgataagtctgaagtgccaaatgctgaggccctccagaacgccgcatccgttctgtgcatttctcccgaagaactgcaggaggccctcaccagtcattgtgtagttactagaggagaaaccattattcgcgccaatactgtggatcgtgcagccgacgtgcgggatgccatgagtaaagctttgtacggccggcttttctcttggattgtgaaccggatcaacacgctcctgcagcctgatgagaacatttgttcagctggcggtggaatgaacgtggggatccttgatatttttggcttcgagaacttccagcgcaatagtttcgaacagctgtgcataaatatcgcgaatgagcagatccagtactactttaaccagcatgtctttgcactggaacagatggaatatcaaaacgagggtatcgacgcagtgcccgtcgaatacgaagacaacaggccactattggatatgttcttgcagaagcccctcggtctgctcgctttattagatgaggagagtaggtttccacaggctactgatcagacattagttgacaagttcgaggacaatctgcgatgcaagtatttctggcgccccaaaggggtcgagttgtgctttgggatccagcactatgctggcaaggtcttgtacgatgccagcggagttctggagaaaaaccgggacacgctccctgcggatgtagtggtggtacttcggacctccgagaacaagctcttacagcagttgttctcgattcctttgacgaagaccggaaacctggcgcagacccgggcgagaattaccgtggcgtcaagtagcttaccgcctcactttagcgctgggaaggcaaaggttgatactttggaagtgatacggcacccagaagaaacaactaacatgaagagacagacagtggcctcctatttcaggtattcgctcatggatctcctgagcaagatggtggtcggacagccgcatttcgtccgctgtataaaaccaaacgacgatcgcgaggccttacagttcagccgcgagagagtgctggcccagctcagatcaaccggcattttggagaccgtttccattagacggcaggggtattctcaccgaatcttgttcgaagaattcgtgaaacgctattactaccttgcttttacggcacatcagacaccgcttgcatccaaggagagctgtgtggcgattcttgagaaatcccggctagaccactgggtactgggaaaaaccaaagtctttcttaagtactatcacgttgaacagcttaatctgctcttgagggaggttatcggtcgagtggtggtactgcaagcttacaccaagggctggctgggtgcaagacgttataaacgggtgagagagaagcgggaaaaaggggcgatcgccatccagagcgcatggcggggttacgatgcacgaaggaaattcaagaaaatcagcaacaggaggaacgagagtgctgcccataaccaggccggtgatacctccaatcagtcttccggcccccacagcccagtggccgccggcaccagaggttcagctgaggttcaggattgcagtgaacccggagatcataaagtgctgcgcggctctgtccatcgccgatcccactcacaggccgagtcgaacaacggtaggacacagacctcatctaatagccccgctgtgacagaaaaaaatggtcatagtcaggctcaaagtagccccaaaggttgcgatatttttgcgggccacgctaataagcattccgtttccggaacggacttgttatcctctaggatttgccacccggcccccgatcaacaggggctgagtctttggggggcaccacagaaacctggctcggagaatgggttagcgcaaaagcaccgtaccccacggcggcggtgccagcaaccaaagatgctctcctcccctgaagatactatgtactacaatcaattaaatggaaccctggaataccaggggagcaaacggaagccccggaagctggggcagattaaggtgctcgatggagaggacgaatactataaatcactttcccctgtcgattgcattccggaagagaacaattctgcccatcctagcttctttagttcttcatcaaagggagatagcttcgcccagcactag

SEQ ID NO: 237703 - DNA, 4026 bp, Artificial Sequence
  derived and/or modified sequence
atgaagcacctgtatggcctcttccactacaaccccatgatgctgggcctggagagcctgcctgaccccacagacacctgggagatcatcgagaccatcggcaagggcacctacggcaaggtgtacaaggtgaccaacaagagagatggcagcctggccgctgtgaagatcctggaccctgtgtctgacatggatgaggagattgaggccgagtacaacatcctgcagttcctgcccaaccaccccaacgtggtgaagttctacggcatgttctacaaggctgaccactgtgtgggcggccagctgtggctggtgctggagctgtgcaatggaggctctgtgacagagctggtgaagggcctgctgcgctgtggccagaggctggatgaggccatgatctcctacatcctgtatggagccctgctgggcctgcagcacctgcacaacaaccgcatcatccacagagatgtgaagggcaacaacatcctgctgaccacagagggcggcgtgaagctggtggactttggagtgtctgcccagctgaccagcacccggctgcggaggaacacctctgtgggcacccccttctggatggcccctgaggtgattgcctgtgagcagcagtatgacagcagctatgatgcccgctgtgatgtgtggagcctgggcatcacagccatcgagctgggagatggagacccccccctgtttgacatgcaccctgtgaagaccctcttcaagatccccaggaaccccccacccaccctgctgcaccctgagaagtggtgtgaggagttcaaccacttcatcagccagtgcctgatcaaggactttgagcggcggcccagcgtgacccacctgctggaccaccccttcatcaagggcgtgcacggcaaggtgctcttcctgcagaagcagctggccaaggtgctgcaggaccagaagcaccagaaccctgtggccaagaccaggcatgagaggatgcacacccggcggccctaccacgtggaggatgctgagaagtactgcctggaggatgacctggtgaacctggaggtgctggatgaggacaccatcatccaccagctgcagaagagatatgctgacctgctgatctacacctacgtgggggacatcctgattgccctgaaccccttccagaacctgagcatctacagcccccagttcagccggctgtaccatggagtgaagagggccagcaaccccccccacatctttgccagcgcagatgctgcctaccagtgcatggtgaccctgagcaaggaccagtgcatcgtcatctctggagagagcggcagcggcaagacagaaagtgcccacctgattgtgcagcacctgaccttcctgggcaaggccaacaaccagaccctgcgggagaagatcctgcaggtgaacagcctggtggaggccttcggcaacagctgcacagccatcaatgacaacagcagcagatttgggaagtacctggagatgatgttcacccccactggagtggtgatgggcgcccgcatcagcgagtacctgctggagaagagcagggtcatcaagcaggccgcccgggagaagaacttccacatcttctactacatctatgccggcctgcaccaccagaagaagctgagtgacttccggctgcctgaggagaagcccccacgctacatcgcagatgaaacaggccgggtgatgcatgacatcaccagcaaggagagctaccgccggcagtttgaggccatccagcactgcttccgcatcatcggcttcacagacaaggaggtgcacagcgtgtaccgcatcctggccggcatcctgaacatcggcaacattgaatttgctgccatcagcagccagcaccagacagacaagtctgaggtgcccaatgctgaggccctgcagaatgctgcctctgtgctgtgcatcagccctgaggagctgcaggaggccctgaccagccactgtgtggtgaccagaggagagaccatcatccgggccaacacagtggacagagctgctgatgtgagagatgccatgagcaaggccctgtatggccgcctcttctcctggatcgtgaaccgcatcaacaccctgctgcagccagatgagaacatctgcagcgctgggggcggcatgaatgtgggcatcctggacatcttcggctttgagaacttccagagaaattcctttgagcagctgtgcatcaacatcgccaatgagcagatccagtactacttcaaccagcacgtgtttgccctggagcagatggagtaccagaatgaaggaattgatgctgtgcctgtggagtatgaggacaaccggcccctgctggacatgttcctgcagaagcccctgggcctgctggccctgctggatgaggagagccgcttcccccaggccacagaccagaccctggtggacaagtttgaggacaacctgcgctgcaagtacttctggaggcccaagggcgtggagctgtgcttcggcatccagcactacgccggcaaggtgctgtatgatgccagcggcgtgctggagaagaacagagacaccctgcctgcagatgtggtggtggtgctgcggaccagcgagaacaagctgctgcagcagctgttcagcatccccctgaccaagacaggcaacctggcccagacccgggcccgcatcaccgtggccagcagcagcctgcccccccacttctctgctgggaaggccaaggtggacaccctggaggtgatccgccaccctgaggagaccaccaacatgaagaggcagacagtggccagctacttccgctacagcctgatggacctgctgagcaagatggtggtgggccagccccactttgtgcgctgcatcaagcccaatgatgaccgggaggccctgcagttcagccgggagcgggtgctggcccagctgcggagcacaggcatcctggagaccgtgtccatccggcggcagggctacagccaccgcatcctgtttgaggagtttgtgaagcgctactactacctggccttcaccgcccaccagacccccctggccagcaaggagagctgtgtggccatcctggagaagagccggctggaccactgggtgctgggcaagaccaaggtgttcctgaagtactaccacgtggagcagctgaacctgctgctgcgggaggtgattggccgggtggtggtgctgcaggcctacaccaagggctggctgggcgcccggcgctacaagagggtgcgggagaagcgggagaagggggccatcgccatccagagcgcctggaggggctatgatgcccggaggaagttcaagaagatcagcaacagaagaaatgaatctgctgcccacaaccaggccggggacaccagcaaccagagcagcggcccccacagccctgtggccgccggcacccggggcagcgctgaggtgcaggactgcagcgagcccggggaccacaaggtgctgcggggctctgtgcacagaagaagccacagccaggccgagagcaacaatggaagaacccagaccagcagcaacagccctgctgtgacagagaagaatggccacagccaggcccagagcagccccaagggctgtgacatctttgctggccacgccaacaagcacagcgtgtctggaacagacctgctgagcagccgcatctgccacccagccccagaccagcagggcctgagcctgtggggcgccccccagaagccaggctctgaaaatggcctggcccagaagcacaggaccccccggcggcgctgccagcagcccaagatgctgagcagccctgaggacaccatgtactacaaccagctgaatggcaccctggagtaccagggcagcaagaggaagcccaggaagctgggccagatcaaggtgctggatggagaagatgagtactacaagagcctgagccctgtggactgcatccctgaggagaacaacagcgcccaccccagcttcttcagcagcagcagcaagggggacagctttgcccagcactag

SEQ ID NO: 237704 - DNA, 6231 bp, Artificial Sequence
  derived and/or modified sequence
ctagatcgaaagtcctttggtaatgatgtgtcatacattctagtcatcaaagacaccattttctgggcctgaagtgttctgctggtttttggaggaatgagaatccaatctctcataagccggattcagaaaataggtcatcgatgaaacatctgtatggattatttcactataatcctatgatgcttggacttgaatcacttccagatcccacagacacctgggaaattatagagaccattggtaaaggcacctatggcaaagtctacaaggtaactaacaagagagatgggagcctggctgcagtgaaaattctggatccagtcagtgatatggatgaagaaattgaggcagaatacaacattttgcagttccttcctaatcatcccaatgttgtaaagttttatgggatgttttacaaagcggatcactgtgtagggggacagctgtggctggtcctggagctgtgtaatgggggctcagtcactgagcttgtcaaaggtctactcagatgtggccagcggttggatgaagcaatgatctcatacatcttgtacggggccctcttgggccttcagcatttgcacaacaaccgaatcatccaccgtgatgtgaaggggaataacattcttctgacaacagaaggaggagttaagctcgttgactttggtgtttcagctcaactcaccagtacacgtctgcggagaaacacatctgttggcaccccgttctggatggcccctgaggtcattgcctgtgagcagcagtatgactcttcctatgacgctcgctgtgacgtctggtccttggggatcacagctattgaactgggggatggagaccctcccctctttgacatgcatcctgtgaaaacactctttaagattccaagaaatcctccacctactttacttcatccagaaaaatggtgtgaagaattcaaccactttatttcacagtgtcttattaaggattttgaaaggcgaccttccgtcacacatctccttgaccacccatttattaaaggagtacatggaaaagttctgtttctgcaaaaacagctggccaaggttctccaagaccagaagcatcaaaatcctgttgctaaaaccaggcatgagaggatgcataccagaagaccttatcatgtggaagatgctgaaaaatactgccttgaggatgatttggtcaacctagaggttctggatgaggatacaattatccatcagttgcagaaacgttatgcagacttgctaatttacacatatgttggagacatcttaattgccttaaaccccttccagaatctaagcatatactctccacagttttccagactttatcatggggtgaaacgcgcctccaatcccccccacatatttgcatcagcagatgctgcttaccagtgcatggttactctcagcaaagaccagtgcattgtcatcagcggagagagtggctctgggaagacagaaagcgcccacctgattgttcagcatttgactttcttgggaaaggccaataatcagaccttgagagagaaaattctacaagtcaactccctggtggaagcctttgggaactcatgcactgccatcaatgacaactcgagccgttttggaaaatatctggaaatgatgtttacaccaactggagttgtgatgggggcaagaatctctgaatatctcctggaaaaatccagagttataaaacaggcagcgagagagaaaaattttcatatattttactatatttatgctggtcttcatcaccaaaagaagctttctgatttcagacttcctgaggaaaaacctcctaggtacatagctgatgaaactggaagggtgatgcacgacataacttccaaggagtcttacagaagacaattcgaagcaattcagcattgcttcaggattatagggttcacggacaaagaggtgcactcagtgtacagaattttggctgggattttgaatattgggaacattgagttcgcagctatttcctctcaacatcagactgataaaagtgaggtgcccaatgctgaagctttgcaaaatgctgcctctgttctgtgcattagccctgaagagctccaggaggccctcacctcccactgtgtggtcacccggggcgagaccatcatccgtgccaacactgtagacagggctgcggacgttcgagacgccatgtccaaagccctgtatgggaggctcttcagctggattgtgaatcgcattaatacactcctgcagccagacgaaaacatatgtagtgcaggaggtggaatgaatgtggggatcttggatatctttggattcgagaattttcagagaaattcatttgagcagctctgcataaacatcgccaatgagcaaatccagtactatttcaatcagcatgtttttgctcttgagcagatggaatatcagaatgaaggcattgatgctgtacccgtggaatatgaggacaaccgcccgctcttggacatgttcctccagaaacccctgggactgcttgcacttttggatgaggaaagtcggtttccccaagcaactgaccagaccctggttgataaatttgaagataatctacgatgcaaatacttctggaggcccaaaggagtggaactgtgctttggcattcagcattatgctggaaaggtattatatgatgcttctggggttcttgagaaaaatagagacactctccctgccgatgtggttgtggtcctgagaacgtcagaaaacaagcttcttcagcagctcttctcaatccctctgaccaaaacaggtaatttggcccagacaagagctaggataacagtggcctcaagttctttgcctccacatttcagtgctgggaaagccaaggtggacactctggaggtgatacggcatccggaagaaaccaccaacatgaagaggcaaactgtggcttcttacttccggtattctctgatggacctgctctccaaaatggtggttggacagccccactttgtgcgctgcattaaacccaatgatgaccgagaggccctgcagttctctcgagagagggtgctggcccagctccgctccacagggattctggagacagtcagcatccgccgccagggctattcccaccgcatcctttttgaagaatttgtgaaaaggtattattacttggcattcacagcacatcaaacacctcttgctagcaaagagagctgtgtggctatcttggaaaagtccagattagatcactgggtactgggaaaaacaaaggtttttctcaaatattaccatgttgagcaattaaatttgctgcttcgagaagtcataggcagagtggttgtgctgcaggcatataccaaggggtggcttggagccaggagatacaaaagggtcagagagaagagagagaagggagccattgccatccagtcagcctggagaggatatgatgctcggaggaaatttaagaaaataagcaacagaaggaatgagtctgctgctcataatcaagcaggggacacttcaaaccaaagcagtgggccacattcccccgtcgcagcaggtacgaggggaagtgccgaggttcaagactgcagcgagcctggtgaccataaagttctcaggggctctgtacatcgtaggagccattcacaagcagaatccaacaatggccgtacacagacttcaagcaactctcctgctgtcacagagaaaaatgggcattcacaagcccagagttctccaaaagggtgcgatatcttcgcaggacatgcaaacaagcactcggtttctgggactgatttgctgtcttctcggatatgccatcctgctccagatcagcaaggattgagtctctggggagcccctcaaaagcctgcctttccacattacggatgtaacttttatgggttcagaaaatggtcttgcacagaagcatcgaacacctcgccgacgatgtcagcagcccaaaatgctgagtagccctgaggacaccatgtactataaccagttaaatggaactctagaatatcaagggagcaagaggaagccaagaaaacttggccaaatcaaagtacttgatggggaagatgaatattacaaatctctgtcaccagtggactgtatccctgaggagaacaactcagcccacccttcctttttttcttcatcctcaaaaggagactcttttgctcaacattaaattgtgcttcctaaccctaaatctgtccagagtaggaacattcatggtaatcgactgtctgtcattgcgtaagaaagcactgatatggggtcagcttctttggacatatggtccatgcctgaaccttactgaaccacttgcagattccaaaacatcttatcctatcctctaccactctcccacatgtgttgtgcagcctgagctgggcgctgccttcctttctcatcccatggggccctgtgggacactgagaacacctttacaatagtttaaacagtcattcatgcccccagtgtctaggaagataacagccagtctcaccccagtctaatcatggaccctgataatattgcttgatttttcctatcaagttacttttcaatccattcagaatctgccccagtggagacccaggagttcctttcctgcactcttctccatcctcccacctttgctgggcttttctatcactcccacctcccccagagtcagggctccattgctgagtgccccatcctggaggattggccccaagatctcctagaacaggataattgcctgtgtttaggcagataggcctaaatctttcagattctttctacaaggcaaataacccctctcttgttaattatgatgctgagaaagcctctgtctctttatttcaccttgccaagacacccacactactttggtgatgaaaagaaaggaatgagagggaaagtttggacctgtcactttggtgacagggaaagtccaggtcactttattctgtaactctccattcactggtcaaataactccatgaggctatcagtggctacagtggaaggacctgatcttgtccatctttgtgtgcacagagcctagcacagggcttggtagagggtatatctagtgaatggagaatacatggagaaacttaactaagttacacaagcatatctgacaggaatgttaccttcaattgtatgttacatatgattagtcacttttcatacactataacctctgatttttcactcaagtttgggctgattatattgtaatgatgttagataatactcaacatgattcagtatgacaaacttttttgagcacctactttatataaaacatgacaaattgcagtgtgatgtaatcaaaaacaaagaagccctataagaccatttctctagaacagatgttcttaatatttttcttactctaaaatatgtggtagatagtatgcaagaaaagccgggtgcggtggctcaggcctgtaatcccagcactttgggaggccaagatgggcggatcatgaagtcaggagttcgagaccagcctgaccaacatggtgaaaccccgtctctactaaaaaaaataatgataatacaaaaattagcccagcatggtggtgcatacctgtaatcccagctactcaggaggctgacgcaggagaatcacttgaacccgggaagcaaaggttgcagtcagctgagagcgcaccactgcactccagcctgggcgacagggcaagactctgtctcaaaaaaaaaaaaaaaaaaaaaaaaaagagatagtatgcaagaagacacctaaattttgagagaaataaccttgaagaaaatcttgttatcagagttttgaaagggagcacattaataggccttttatgaagataaataatgaaatgaggtatttaaagatctcagaaattgtaattttacaagtaaaataaatatagccaatttttcaatagctgaacttcacccaaaaggtaatgtttataagtagagcagaaaaaatgcagataaattttattttattgtttaaaaaataatgtgtagaatatataaattttttatgttactgttaatatacgagtgcttttggaagtttcacttttgtcactgattgtctacttttggtttgataatatgagctgcttttcaaattgttgaatggaaatgttcataactccctgcttgtccgtgcacaatgtaattctaaacctggcttgtttctcatttaaatatatctataaataaactt

SEQ ID NO: 237705 - DNA, 5529 bp, Artificial Sequence
  derived and/or modified sequence
ctagatcgaaagtcctttggtaatgatgtgtcatacattctagtcatcaaagacaccattttctgggcctgaagtgttctgctggtttttggaggaatgagaatccaatctctcataagccggattcagaaaataggtcatcgatgaaacatctgtatggattatttcactataatcctatgatgcttggacttgaatcacttccagatcccacagacacctgggaaattatagagaccattggtaaaggcacctatggcaaagtctacaaggtaactaacaagagagatgggagcctggctgcagtgaaaattctggatccagtcagtgatatggatgaagaaattgaggcagaatacaacattttgcagttccttcctaatcatcccaatgttgtaaagttttatgggatgttttacaaagcggatcactgtgtagggggacagctgtggctggtcctggagctgtgtaatgggggctcagtcactgagcttgtcaaaggtctactcagatgtggccagcggttggatgaagcaatgatctcatacatcttgtacggggccctcttgggccttcagcatttgcacaacaaccgaatcatccaccgtgatgtgaaggggaataacattcttctgacaacagaaggaggagttaagctcgttgactttggtgtttcagctcaactcaccagtacacgtctgcggagaaacacatctgttggcaccccgttctggatggcccctgaggtcattgcctgtgagcagcagtatgactcttcctatgacgctcgctgtgacgtctggtccttggggatcacagctattgaactgggggatggagaccctcccctctttgacatgcatcctgtgaaaacactctttaagattccaagaaatcctccacctactttacttcatccagaaaaatggtgtgaagaattcaaccactttatttcacagtgtcttattaaggattttgaaaggcgaccttccgtcacacatctccttgaccacccatttattaaaggagtacatggaaaagttctgtttctgcaaaaacagctggccaaggttctccaagaccagaagcatcaaaatcctgttgctaaaaccaggcatgagaggatgcataccagaagaccttatcatgtggaagatgctgaaaaatactgccttgaggatgatttggtcaacctagaggttctggatgaggatacaattatccatcagttgcagaaacgttatgcagacttgctaatttacacatatgttggagacatcttaattgccttaaaccccttccagaatctaagcatatactctccacagttttccagactttatcatggggtgaaacgcgcctccaatcccccccacatatttgcatcagcagatgctgcttaccagtgcatggttactctcagcaaagaccagtgcattgtcatcagcggagagagtggctctgggaagacagaaagcgcccacctgattgttcagcatttgactttcttgggaaaggccaataatcagaccttgagagagaaaattctacaagtcaactccctggtggaagcctttgggaactcatgcactgccatcaatgacaactcgagccgttttggaaaatatctggaaatgatgtttacaccaactggagttgtgatgggggcaagaatctctgaatatctcctggaaaaatccagagttataaaacaggcagcgagagagaaaaattttcatatattttactatatttatgctggtcttcatcaccaaaagaagctttctgatttcagacttcctgaggaaaaacctcctaggtacatagctgatgaaactggaagggtgatgcacgacataacttccaaggagtcttacagaagacaattcgaagcaattcagcattgcttcaggattatagggttcacggacaaagaggtgcactcagtgtacagaattttggctgggattttgaatattgggaacattgagttcgcagctatttcctctcaacatcagactgataaaagtgaggtgcccaatgctgaagctttgcaaaatgctgcctctgttctgtgcattagccctgaagagctccaggaggccctcacctcccactgtgtggtcacccggggcgagaccatcatccgtgccaacactgtagacagggctgcggacgttcgagacgccatgtccaaagccctgtatgggaggctcttcagctggattgtgaatcgcattaatacactcctgcagccagacgaaaacatatgtagtgcaggaggtggaatgaatgtggggatcttggatatctttggattcgagaattttcagagaaattcatttgagcagctctgcataaacatcgccaatgagcaaatccagtactatttcaatcagcatgtttttgctcttgagcagatggaatatcagaatgaaggcattgatgctgtacccgtggaatatgaggacaaccgcccgctcttggacatgttcctccagaaacccctgggactgcttgcacttttggatgaggaaagtcggtttccccaagcaactgaccagaccctggttgataaatttgaagataatctacgatgcaaatacttctggaggcccaaaggagtggaactgtgctttggcattcagcattatgctggaaaggtattatatgatgcttctggggttcttgagaaaaatagagacactctccctgccgatgtggttgtggtcctgagaacgtcagaaaacaagcttcttcagcagctcttctcaatccctctgaccaaaacaggtaatttggcccagacaagagctaggataacagtggcctcaagttctttgcctccacatttcagtgctgggaaagccaaggtggacactctggaggtgatacggcatccggaagaaaccaccaacatgaagaggcaaactgtggcttcttacttccggtattctctgatggacctgctctccaaaatggtggttggacagccccactttgtgcgctgcattaaacccaatgatgaccgagaggccctgcagttctctcgagagagggtgctggcccagctccgctccacagggattctggagacagtcagcatccgccgccagggctattcccaccgcatcctttttgaagaatttgtgaaaaggtattattacttggcattcacagcacatcaaacacctcttgctagcaaagagagctgtgtggctatcttggaaaagtccagattagatcactgggtactgggaaaaacaaaggtttttctcaaatattaccatgttgagcaattaaatttgctgcttcgagaagtcataggcagagtggttgtgctgcaggcatataccaaggggtggcttggagccaggagatacaaaagggtcagagagaagagagagaagggagccattgccatccagtcagcctggagaggatatgatgctcggaggaaatttaagaaaataagcaacagaaggaatgagtctgctgctcataatcaagcaggggacacttcaaaccaaagcagtgggccacattcccccgtcgcagcaggtacgaggggaagtgccgaggttcaagactgcagcgagcctggtgaccataaagttctcaggggctctgtacatcgtaggagccattcacaagcagaatccaacaatggccgtacacagacttcaagcaactctcctgctgtcacagagaaaaatgggcattcacaagcccagagttctccaaaagggtgcgatatcttcgcaggacatgcaaacaagcactcggtttctgggactgatttgctgtcttctcggatatgccatcctgctccagatcagcaaggattgagtctctggggagcccctcaaaagcctggttcagaaaatggtcttgcacagaagcatcgaacacctcgccgacgatgtcagcagcccaaaatgctgagtagccctgaggacaccatgtactataaccagttaaatggaactctagaatatcaagggagcaagaggaagccaagaaaacttggccaaatcaaagtacttgatggggaagatgaatattacaaatctctgtcaccagtggactgtatccctgaggagaacaactcagcccacccttcctttttttcttcatcctcaaaaggagactcttttgctcaacattaaattgtgcttcctaaccctaaatctgtccagagtaggaacattcatggtaatcgactgtctgtcattgcgtaagaaagcactgatatggggtcagcttctttggacatatggtccatgcctgaaccttactgaaccacttgcagattccaaaacatcttatcctatcctctaccactctcccacatgtgttgtgcagcctgagctgggcgctgccttcctttctcatcccatggggccctgtgggacactgagaacacctttacaatagtttaaacagtcattcatgcccccagtgtctaggaagataacagccagtctcaccccagtctaatcatggaccctgataatattgcttgatttttcctatcaagttacttttcaatccattcagaatctgccccagtggagacccaggagttcctttcctgcactcttctccatcctcccacctttgctgggcttttctatcactcccacctcccccagagtcagggctccattgctgagtgccccatcctggaggattggccccaagatctcctagaacaggataattgcctgtgtttaggcagataggcctaaatctttcagattctttctacaaggcaaataacccctctcttgttaattatgatgctgagaaagcctctgtctctttatttcaccttgccaagacacccacactactttggtgatgaaaagaaaggaatgagagggaaagtttggacctgtcactttggtgacagggaaagtccaggtcactttattctgtaactctccattcactggtcaaataactccatgaggctatcagtggctacagtggaaggacctgatcttgtccatctttgtgtgcacagagcctagcacagggcttggtagagggtatatctagtgaatggagaatacatggagaaacttaactaagttacacaagcatatctgacaggaatgttaccttcaattgtatgttacatatgattagtcacttttcatacactataacctctgatttttcactcaagtttgggctgattatattgtaatgatgttagataatactcaacatgattcagtatgacaaacttttttgagcacctactttatataaaacatgacaaattgcagtgtgatgtaatcaaaaacaaagaagccctataagaccatttctctagaacagatgttcttaatatttttcttactctaaaatatgtggtagatagtatgcaagaaaagccgggtgcggtggctcaggcctgtaatcccagcactttgggaggccaagatgggcggatcatgaagtcaggagttcgagaccagcctgaccaacatggtgaaaccccgtctctactaaaaaaaa

SEQ ID NO: 237706 - DNA, 4026 bp, Artificial Sequence
  derived and/or modified sequence
atgaagcacctgtacggcctgttccactacaaccccatgatgctggggttggagagtctgccggaccctactgatacatgggagataattgagacaattggcaaggggacctacggaaaagtctataaggtaacaaacaaacgtgatggctcactggctgcagtcaagatcttggatcctgtgtctgatatggatgaagaaatcgaggcggagtataacattcttcaattcctgccaaaccacccgaatgtcgtgaagttctacggtatgttctacaaagccgaccactgtgtcggggggcagttgtggcttgttctggagttatgcaatggtggaagcgttaccgaactggtgaaagggctcctgagatgtgggcagagacttgacgaggccatgatttcatacatactgtacggagccctgctcggattgcagcatctgcacaataacagaataattcaccgcgacgtgaaggggaataacattctactcacaaccgagggtggagtcaagctggtggattttggtgttagtgcccagctaacaagtacacgattgcggcggaacacaagtgttgggacccctttttggatggcccctgaggttattgcatgcgagcagcagtatgatagctcttacgacgcaagatgtgatgtgtggtctctggggatcactgcgattgaactgggggatggtgatcccccgttatttgacatgcaccccgtcaaaactctgttcaaaattccgcggaacccaccacccaccctgctgcaccctgagaagtggtgcgaggagtttaaccatttcattagtcagtgtctgatcaaagactttgagaggcgcccttccgtaacacacctattagaccatcctttcattaaaggagttcatggaaaggtcctgttcctccagaaacaactcgccaaggtcttgcaggaccagaaacaccagaacccagtcgccaaaaccaggcacgagcggatgcacactagaagaccgtatcacgtagaggatgctgagaagtattgtcttgaggacgacttggtgaacctcgaggttttggacgaggataccataatccatcagctccaaaaacggtacgccgacctccttatctatacgtatgtgggcgacatccttatagccctgaacccctttcaaaatctgtctatctactcaccccaattctcccgactgtaccacggggtcaagcgcgcctcaaacccgccacacattttcgccagtgctgacgctgcctatcagtgcatggtgacgctgtccaaggatcaatgcattgtgatttccggagaatccgggtcgggcaagactgagtccgcccacttaatcgtgcagcacctgacttttctgggaaaagctaacaatcaaaccctcagagaaaagattctgcaagttaactctctggtggaagcattcggtaacagttgtactgccataaacgacaacagttctaggttcggtaagtacttggaaatgatgttcactcccaccggggttgtcatgggggccaggatcagtgaatatctgttggagaaatcgagggtgattaaacaagccgcccgagaaaagaacttccacatcttttactatatctacgccggattgcaccatcagaagaaattgtcggatttcagactgcctgaagagaagcccccgagatacatcgccgacgagacaggccgcgtcatgcacgacatcacatctaaggaaagctaccggcgacagttcgaagcaatccagcattgtttccgaattatcggattcaccgacaaagaggtgcattctgtctatagaatcctggcagggatcctgaatatcggaaacattgaatttgcggccattagtagtcagcaccagacagacaaatcggaggtacccaatgctgaagccctgcagaatgcagcgagtgtcctgtgtattagtcccgaagaactgcaagaagccctcacttcccattgcgtggttactcggggtgagaccattatcagagcaaacaccgtagatagagcagcagatgtgagggacgcgatgagcaaagctctatacggcagacttttctcatggatagtgaataggatcaacactctgctccaaccagacgagaacatttgtagcgcggggggcgggatgaatgtggggatcttagacatattcgggtttgagaattttcagcggaactccttcgaacaactctgcatcaatattgccaacgagcagatccagtactactttaaccagcatgtcttcgctctggaacagatggaataccaaaacgaagggattgatgcagtgcccgtcgaatatgaagacaaccgccctctgctagacatgttcctgcagaagccacttgggctgctggccctacttgacgaagagtcacgtttcccccaggcaaccgaccaaacattggtggacaaatttgaggacaacctgcgctgcaaatatttttggagacccaaaggcgtggagctgtgtttcggtatccagcattatgcaggaaaagtgctgtatgacgcaagcggagtcctggaaaagaatagggatacactgccagccgatgtggtggtggtgttgcggacctccgaaaacaaactgctgcaacaattgtttagcatccccctgaccaagacaggcaatctggcccaaacccgcgccaggatcaccgtggcttccagctcgttgccaccacatttcagtgctgggaaagcgaaagtggacactttggaagtgatacggcacccagaggagacaactaatatgaagagacagacagtggcatcgtactttcggtacagcctgatggacttgctgtccaagatggtagtgggacagcctcatttcgtgcgctgcattaagccgaatgacgatcgggaagcattacagttctcccgagagagagtgttggcccagctaagatccactggtatcttagaaacagtcagcatccgccgacagggatactcccatagaatcctgttcgaggagtttgtgaagcgttattactacctggcctttactgcacaccagacacctctcgcatctaaggaatcgtgtgttgctatcctcgaaaagtctcggttggaccattgggtgctgggaaaaactaaggtttttctcaaatactaccatgtcgaacagttaaatctgctgctgagggaggtaataggcagggtggtcgtgctccaagcgtatacaaagggatggctcggagctaggcgttacaagcgcgtgcgggaaaagcgtgagaaaggggctatcgccattcaatcagcgtggaggggatacgacgctcggcggaaatttaagaagatctccaatcggcggaacgagtcagctgctcataatcaagccggggatacttctaaccagtcttccggacctcactcacccgtcgccgccgggacccggggcagcgccgaagtgcaggattgtagcgagccaggtgaccacaaggtgcttcgaggatcggtccatcgccgctcacacagtcaagctgaatcgaacaatggcagaacgcagaccagttctaattcacccgcagtgaccgaaaagaacggccactctcaagcacaatcctccccaaaaggttgtgatattttcgccggccatgctaacaaacacagtgtgagcggtacagacttactaagcagccgtatctgtcaccctgcccccgaccagcaggggttgtctctttggggggcgcctcaaaagccagggtccgaaaatgggctcgcccaaaaacacagaaccccaagacgacggtgccaacagcccaaaatgctatcttctcccgaggacactatgtactataaccagctaaacggcactctcgagtatcagggcagtaagcggaagccgcgaaagctggggcagattaaggtgcttgacggcgaagatgagtattacaaatccctgtctcccgtagactgtattccagaagagaacaattccgcccaccctagttttttctcctccagctcaaaaggcgattctttcgctcagcactag

SEQ ID NO: 237707 - DNA, 4026 bp, Artificial Sequence
  derived and/or modified sequence
atgaaacatctctatggtttgtttcattacaacccaatgatgctcggcttggagtcgctacccgatccaacagacacgtgggagataatcgaaactataggaaaggggacatatggaaaggtctacaaggtgaccaataagcgggacggcagccttgctgcagtcaagattctggatccggtctccgatatggacgaggaaattgaggctgagtacaacattcttcagtttctgcctaaccatcccaatgtggtgaagttctacgggatgttctacaaggccgatcactgcgtggggggacaactgtggctggtcttggaactttgtaatggcggatccgttaccgagctggttaagggtctgctccgttgcggacagagactggatgaagctatgatctcatatattctgtacggcgcattgctaggcctacaacatctgcataacaacaggatcatccaccgcgacgtcaaggggaataacatcttgctgaccacagaaggtggagtaaaacttgtcgatttcggcgtgtccgctcagctgacctcaacgcggttacgcagaaatacttctgtaggaacgccattctggatggcacctgaggtgatcgcatgtgaacagcagtacgattcttcctacgatgcgaggtgtgacgtctggagcttaggcattacagctatcgaactgggtgacggcgatcccccattgttcgacatgcatcccgtgaaaaccttatttaaaatccctcgcaacccacctcccaccctgctgcatccggaaaaatggtgtgaggaattcaaccattttatctcacagtgtttgattaaggatttcgagcgccgtccgagtgtgacccacctgcttgatcatcccttcatcaagggagtgcatggtaaggtcctcttcttgcagaagcagctggctaaagttctgcaggaccagaagcaccagaatccagtggcgaagacaagacacgaacggatgcatacaagacggccttaccacgtggaagatgctgagaagtactgcctggaagacgatcttgttaacctggaggttctggacgaggataccatcatccaccaactccagaagcgctatgccgacctgttgatctatacttacgtgggggacatcctcatagcactgaaccctttccagaacctttctatatactccccccaattttccagactctaccatggcgtaaagagggcctccaatccccctcacatatttgcgagtgccgacgccgcataccaatgtatggtgaccttatctaaagaccagtgcatcgtgatatctggcgagtcagggtctggcaagaccgaaagcgcacacctgatcgtgcagcatttgacattcctgggcaaggcaaacaatcagacattacgcgagaagattctgcaggtgaactcactcgtggaggccttcgggaacagttgcacagctatcaatgataactcatcccgatttggtaagtatttagagatgatgtttaccccgactggagtggtcatgggcgctcggataagcgagtatctcctcgagaaatcccgagttatcaagcaggctgcacgggagaaaaattttcacatcttctattatatttacgcgggacttcaccaccaaaagaaactctcagacttccggctgccagaggaaaaaccacccaggtatattgctgacgagactgggagagtgatgcacgatattacatctaaagaaagttatcgacggcagttcgaggccattcagcactgcttcagaatcataggcttcactgacaaggaagtgcattcagtctacaggatcctagccggaattcttaacatcggcaatatcgagttcgccgctatcagttctcaacaccagacagataaatccgaggtgccaaatgctgaggcactacagaacgctgcttctgtcctttgcatttcccctgaagaactccaggaggcgttgacttctcactgtgtggttacaagaggagagaccatcatccgtgcgaatactgtcgaccgtgctgccgatgtacgcgacgcaatgagcaaagcactatacgggagactcttttcctggatcgtgaacaggatcaatacgctcctgcaaccggacgagaacatctgttctgctggcggaggcatgaacgtcggcatcctggacatattcgggtttgaaaattttcagcgaaatagcttcgagcagctatgcatcaacattgctaacgaacagatacagtattatttcaatcagcatgtgttcgcactagaacagatggagtatcagaacgaaggcatcgacgccgtgccagtcgagtacgaagacaatcgcccactcctcgacatgttcctgcagaagcctctgggcctgctggctctgcttgatgaagagtcccgcttcccacaggcaactgatcagaccctggtggacaaatttgaagataacctgaggtgcaagtatttctggcgccctaagggagttgagttgtgcttcggcattcagcattacgccggtaaggtgctgtatgacgcatccggggtgttagaaaaaaatcgggatactctcccagccgacgtggttgtggttctccggacctcagagaataagctgcttcagcagctattctcgattcctttgaccaagacggggaaccttgcccaaaccagagcacgcattaccgttgcttccagttcccttccgccacactttagtgcgggaaaggcaaaggtggatacgctagaggttataaggcacccagaagagaccacaaacatgaagcgccagaccgtcgcctcatacttccgctattctctcatggacctgctgagtaagatggtcgtggggcaaccccactttgtgaggtgtattaagccgaatgacgatagagaagcattgcagttttcacgagagcgcgtcctcgcccagctgaggagtaccggcatcttggaaactgttagcatccgaaggcagggctacagtcacagaatcctatttgaagaattcgttaaaaggtattattacctcgctttcactgctcatcaaactccccttgccagcaaagagtcgtgtgtggcaatccttgagaagagtcgtctggaccactgggtgttagggaaaactaaagttttccttaagtactaccatgtagagcaactcaatctgctactgcgggaagtcattgggagggtcgtcgtgcttcaggcctacacaaagggatggctcggggctcgcagatacaaaagggtgagagagaaaagggagaaaggagcaatcgcaatccagtccgcatggaggggttatgacgctcggagaaagttcaagaaaatcagtaacaggcgaaacgagtctgcggcacacaatcaggctggggataccagtaatcagtcgtcaggccctcactcaccagtggcagccggtactagaggaagcgccgaggttcaggattgctctgagcccggtgaccataaagtgctccgtggttcagtgcaccgcaggtcacacagccaagctgagtccaataacggaagaacgcagacatcttccaattctccggcagttacagaaaagaacggacactcacaggcccaatcatcccccaagggctgcgacattttcgccggacacgcaaataaacactccgtgagcggcaccgacctcctctccagtcgcatttgccatcctgcaccagatcagcagggactctcactgtggggggctccacagaaacctggctccgagaatgggttggctcaaaaacaccgaacccctcgcagaaggtgccagcagcccaagatgctgagtagccccgaagacactatgtactataatcagctgaatggcacactcgaataccagggatcgaagagaaagccccgaaaattaggccagattaaagttctggacggggaggacgagtactataagtcactgagtcccgtcgactgcattccagaagagaataactccgctcatccatcctttttttcctcttcctctaagggggactccttcgcgcaacactag

SEQ ID NO: 237708 - DNA, 4026 bp, Artificial Sequence
  derived and/or modified sequence
atgaagcacctgtacggcctgttccactacaaccccatgatgctgggcctggagagcctgcccgaccccaccgacacctgggagatcatcgagaccatcggcaagggcacctacggcaaggtgtacaaggtgaccaacaagagagacggcagcctggccgccgtgaagatcctggaccccgtgagcgacatggacgaggagatcgaggccgagtacaacatcctgcagttcctgcccaaccaccccaacgtggtgaagttctacggcatgttctacaaggccgaccactgcgtgggcggccagctgtggctggtgctggagctgtgcaacggcggcagcgtgaccgagctggtgaagggcctgctgagatgcggccagagactggacgaggccatgatcagctacatcctgtacggcgccctgctgggcctgcagcacctgcacaacaacagaatcatccacagagacgtgaagggcaacaacatcctgctgaccaccgagggcggcgtgaagctggtggacttcggcgtgagcgcccagctgaccagcaccagactgagaagaaacaccagcgtgggcacccccttctggatggcccccgaggtgatcgcctgcgagcagcagtacgacagcagctacgacgccagatgcgacgtgtggagcctgggcatcaccgccatcgagctgggcgacggcgacccccccctgttcgacatgcaccccgtgaagaccctgttcaagatccccagaaaccccccccccaccctgctgcaccccgagaagtggtgcgaggagttcaaccacttcatcagccagtgcctgatcaaggacttcgagagaagacccagcgtgacccacctgctggaccaccccttcatcaagggcgtgcacggcaaggtgctgttcctgcagaagcagctggccaaggtgctgcaggaccagaagcaccagaaccccgtggccaagaccagacacgagagaatgcacaccagaagaccctaccacgtggaggacgccgagaagtactgcctggaggacgacctggtgaacctggaggtgctggacgaggacaccatcatccaccagctgcagaagagatacgccgacctgctgatctacacctacgtgggcgacatcctgatcgccctgaaccccttccagaacctgagcatctacagcccccagttcagcagactgtaccacggcgtgaagagagccagcaaccccccccacatcttcgccagcgccgacgccgcctaccagtgcatggtgaccctgagcaaggaccagtgcatcgtgatcagcggcgagagcggcagcggcaagaccgagagcgcccacctgatcgtgcagcacctgaccttcctgggcaaggccaacaaccagaccctgagagagaagatcctgcaggtgaacagcctggtggaggccttcggcaacagctgcaccgccatcaacgacaacagcagcagattcggcaagtacctggagatgatgttcacccccaccggcgtggtgatgggcgccagaatcagcgagtacctgctggagaagagcagagtgatcaagcaggccgccagagagaagaacttccacatcttctactacatctacgccggcctgcaccaccagaagaagctgagcgacttcagactgcccgaggagaagccccccagatacatcgccgacgagaccggcagagtgatgcacgacatcaccagcaaggagagctacagaagacagttcgaggccatccagcactgcttcagaatcatcggcttcaccgacaaggaggtgcacagcgtgtacagaatcctggccggcatcctgaacatcggcaacatcgagttcgccgccatcagcagccagcaccagaccgacaagagcgaggtgcccaacgccgaggccctgcagaacgccgccagcgtgctgtgcatcagccccgaggagctgcaggaggccctgaccagccactgcgtggtgaccagaggcgagaccatcatcagagccaacaccgtggacagagccgccgacgtgagagacgccatgagcaaggccctgtacggcagactgttcagctggatcgtgaacagaatcaacaccctgctgcagcccgacgagaacatctgcagcgccggcggcggcatgaacgtgggcatcctggacatcttcggcttcgagaacttccagagaaacagcttcgagcagctgtgcatcaacatcgccaacgagcagatccagtactacttcaaccagcacgtgttcgccctggagcagatggagtaccagaacgagggcatcgacgccgtgcccgtggagtacgaggacaacagacccctgctggacatgttcctgcagaagcccctgggcctgctggccctgctggacgaggagagcagattcccccaggccaccgaccagaccctggtggacaagttcgaggacaacctgagatgcaagtacttctggagacccaagggcgtggagctgtgcttcggcatccagcactacgccggcaaggtgctgtacgacgccagcggcgtgctggagaagaacagagacaccctgcccgccgacgtggtggtggtgctgagaaccagcgagaacaagctgctgcagcagctgttcagcatccccctgaccaagaccggcaacctggcccagaccagagccagaatcaccgtggccagcagcagcctgcccccccacttcagcgccggcaaggccaaggtggacaccctggaggtgatcagacaccccgaggagaccaccaacatgaagagacagaccgtggccagctacttcagatacagcctgatggacctgctgagcaagatggtggtgggccagccccacttcgtgagatgcatcaagcccaacgacgacagagaggccctgcagttcagcagagagagagtgctggcccagctgagaagcaccggcatcctggagaccgtgagcatcagaagacagggctacagccacagaatcctgttcgaggagttcgtgaagagatactactacctggccttcaccgcccaccagacccccctggccagcaaggagagctgcgtggccatcctggagaagagcagactggaccactgggtgctgggcaagaccaaggtgttcctgaagtactaccacgtggagcagctgaacctgctgctgagagaggtgatcggcagagtggtggtgctgcaggcctacaccaagggctggctgggcgccagaagatacaagagagtgagagagaagagagagaagggcgccatcgccatccagagcgcctggagaggctacgacgccagaagaaagttcaagaagatcagcaacagaagaaacgagagcgccgcccacaaccaggccggcgacaccagcaaccagagcagcggcccccacagccccgtggccgccggcaccagaggcagcgccgaggtgcaggactgcagcgagcccggcgaccacaaggtgctgagaggcagcgtgcacagaagaagccacagccaggccgagagcaacaacggcagaacccagaccagcagcaacagccccgccgtgaccgagaagaacggccacagccaggcccagagcagccccaagggctgcgacatcttcgccggccacgccaacaagcacagcgtgagcggcaccgacctgctgagcagcagaatctgccaccccgcccccgaccagcagggcctgagcctgtggggcgccccccagaagcccggcagcgagaacggcctggcccagaagcacagaacccccagaagaagatgccagcagcccaagatgctgagcagccccgaggacaccatgtactacaaccagctgaacggcaccctggagtaccagggcagcaagagaaagcccagaaagctgggccagatcaaggtgctggacggcgaggacgagtactacaagagcctgagccccgtggactgcatccccgaggagaacaacagcgcccaccccagcttcttcagcagcagcagcaagggcgacagcttcgcccagcactag

SEQ ID NO: 237709 - protein, 156 aa, Artificial Sequence
  derived and/or modified sequence
MLAEPFPKVVASLIILHLSGATKKGTEKQTTSETQKSVQCGTWTKHAEGGIFTSPNYPSKYPPDRECIYIIEAAPRQCIELYFDEKYSIEPSWECKFDHIEVRDGPFGFSPIIGRFCGQQNPPVIKSSGRFLWIKFFADGELESMGFSARYNFTPE

SEQ ID NO: 237710 - DNA, 471 bp, Artificial Sequence
  derived and/or modified sequence
atgctggccgaaccattccccaaggtcgtagctagtctcatcatcttgcacctgtcaggtgccactaagaagggaacggagaaacagactacctccgagactcaaaaatccgtgcagtgcgggacttggaccaagcacgcggaaggggggatttttacttcacccaactatccatctaaataccctccagacagggaatgcatttatatcatcgaggcagcaccccgacagtgcattgagctgtattttgatgaaaagtacagcattgagccgagctgggagtgcaagttcgaccacatcgaggttcgcgacggtcccttcggatttagccccataatcggaaggttttgcggccaacaaaacccacccgtcataaagtctagtggaagatttctttggattaagttcttcgccgacggggagttagagtctatgggtttctcagcacgttataacttcaccccagaatag

SEQ ID NO: 237711 - DNA, 471 bp, Artificial Sequence
  derived and/or modified sequence
atgctggccgagcccttccccaaggtggtggccagcctcatcatcctgcacctgagcggggccaccaagaagggcacagagaagcagaccaccagcgagacccagaagtctgtgcagtgtggcacctggaccaagcatgctgagggcggcatcttcaccagccccaactaccccagcaagtaccccccagaccgggagtgcatctacatcattgaagctgccccccggcagtgcatcgagctgtactttgatgagaagtacagcattgagcccagctgggagtgcaagtttgaccacatcgaggtgagagatggccccttcggcttcagccccatcatcggccgcttctgtggccagcagaacccccctgtgatcaagagcagcggccgcttcctgtggatcaagttctttgctgatggagagctggagagcatgggcttcagcgcccgctacaacttcaccccagagtag

SEQ ID NO: 237712 - DNA, 471 bp, Artificial Sequence
  derived and/or modified sequence
atgctggccgagcccttccccaaggtggtggccagcctgatcatcctgcacctgagtggagctaccaagaagggcaccgaaaaacagacaaccagcgaaacccagaaaagcgtgcagtgcggcacctggaccaagcatgctgagggtggtatctttacgtcccctaattatccttcaaagtaccctccggatagagagtgtatctacattatcgaggccgctccaagacaatgcattgagctttatttcgacgaaaagtactctatcgagccctcttgggaatgcaagtttgatcatatcgaagtgagagacggtccctttgggttctcacctatcattggccggttctgtggccagcaaaacccacctgtcattaagtccagtggcagatttctatggattaagttcttcgcagacggcgaacttgaaagcatgggcttcagtgcccggtacaactttaccccagaatag

SEQ ID NO: 237713 - DNA, 1849 bp, Artificial Sequence
  derived and/or modified sequence
acagccacactgcagtatgtcaggaacagtcatggagctgttctcattgtttgcctctccttttcctcctttttaccttctggcccctctcttcattcagagatgctggcagagccattccctaaggttgtagcaagtttaatcatcctccatttgtctggggcaaccaagaaaggaacagaaaagcaaaccacctcagaaacacagaagtcagtgcagtgtggaacttggacaaaacatgcagagggaggtatctttacctctcccaactatcccagcaagtatccccctgaccgggaatgcatctacatcatagaagccgctccaagacagtgcattgaactttactttgatgaaaagtactctattgaaccgtcttgggagtgcaaatttgatcatattgaagttcgagatggaccttttggcttttctccaataattggacgtttctgtggacaacaaaatccacctgtcataaaatccagtggaagatttctatggattaaattttttgctgatggagagctggaatctatgggattttcagctcgatacaatttcacacctgaataaaaggcaaactccttagcaggatctacagagtgtttcgtgatctctccttctccatcatctcatctctggatgctgtggtgcccagaacgttgatctaacaccatcttgaagcacacatgctgatctccaggtgcaccacgatttgtgcccttgaaaatgctgtttgctcaatctttctggagaaagtttgccacatattcggacttagtaaattagaactcctaccttgaaacccagatgaaggttcaattttccccaggattcctttcctcaccattctcctatgtgagggacttcttgtattataatcttttaatataatattatattttatgtaatattgtgttaaattatattgttttatgtaatatattattttaaatgttattttatatatgatattaaaagattataattatataatctttttcgataatttattcttgtattacaatctttttattataatagtctccactctccccaaaatattgtgaattcttcagctgaggagttttgctttagtttcttatcgccatggactgggaattaacatgtatttaacacattttgctcaaacaatcaaacagtaaaagctgaagagagcgtattattattcgcccattccgagagaaagttgaagatgactgaagaactaaaaatacataaatgaattaagtaattataaacataaatttcctgtagctccaacatgactttgatctgagtaatagtgttgtgaaatagattactacatgattttcattgcttttatattatatatagtaattaatattcagaatagttgattaactttcttaagtgtcacataatttaaaaatgaaattgctgtttgccccagatatgtttttctgtgttctttttaaatttcagtgaaattttcttatactcccttcattaaatctattatctggtttctaaacctttacctatttaatgtctcttttcctttctttctaaaaagtaactggttaaactacagttttgtcatttatgaaattttttctgttattattgtagggatagtcaatattatcattttaaggatagttaaaacttattttgcaattaatacgtattttacagtacactaatatgcatatatgttgtattttattaaaatattaaaatgttttttaaacaaaaatattgtccgaagctctaaataccagagtattgattttaaagtctgccaagacaataatacaagtaacacaactaagcctttctttaaataataaaacgagtatctaaa

SEQ ID NO: 237714 - DNA, 471 bp, Artificial Sequence
  derived and/or modified sequence
atgctggccgagccctttcccaaggtggtggcttccctgatcatcttgcacctgagcggggcaacaaagaagggaactgaaaaacagaccacgagcgagacgcagaaatcagttcagtgtggtacctggaccaaacacgccgaaggaggcattttcaccagccccaactatccctcaaaatatcccccagatcgggagtgtatatacataatcgaagccgctccaagacagtgtattgaactatacttcgatgaaaagtattccatcgaaccgagctgggaatgtaaatttgaccacatagaggtgcgggacggccctttcgggtttagtcccatcatcggcaggttctgtggccaacaaaatccacccgtcatcaaaagctccggtagattcctgtggatcaaatttttcgcggacggggagctggagagtatgggcttcagtgcaagatataactttacacccgagtag

SEQ ID NO: 237715 - DNA, 471 bp, Artificial Sequence
  derived and/or modified sequence
atgctggccgagcccttccccaaggtggtggccagcctgatcatcctgcacctgagcggcgccaccaagaagggcaccgagaagcagaccaccagcgagacccagaagagcgtgcagtgcggcacctggaccaagcacgccgagggcggcatcttcaccagccccaactaccccagcaagtacccccccgacagagagtgcatctacatcatcgaggccgcccccagacagtgcatcgagctgtacttcgacgagaagtacagcatcgagcccagctgggagtgcaagttcgaccacatcgaggtgagagacggccccttcggcttcagccccatcatcggcagattctgcggccagcagaacccccccgtgatcaagagcagcggcagattcctgtggatcaagttcttcgccgacggcgagctggagagcatgggcttcagcgccagatacaacttcacccccgagtag

SEQ ID NO: 237716 - protein, 242 aa, Artificial Sequence
  derived and/or modified sequence
MGPRARPALLLLMLLQTAVLQGRLLRSHSLHYLFMGASEQDLGLSLFEALGYVDDQLFVFYDHESRRVEPRTPWVSSRISSQMWLQLSQSLKGWDHMFTVDFWTIMENHNHSKVTTLRCRALNYYPQNITMKWLKDKQPMDAKEFEPKDVLPNGDGTYQGWITLAVPPGEEQRYTCQVEHPGLDQPLIVIWEPSPSGTLVIGVISGIAVFVVILFIGILFIILRKRQGSRGAMGHYVLAERE

SEQ ID NO: 237717 - DNA, 729 bp, Artificial Sequence
  derived and/or modified sequence
atgggccccagagccagacccgccctgctgctgctgatgctgctgcagaccgccgtgctgcagggcagactgctgagaagccacagcctgcactacctgttcatgggcgccagcgagcaggacctgggcctgagcctgttcgaggccctgggctacgtggacgaccagctgttcgtgttctacgaccacgagagcagaagagtggagcccagaaccccctgggtgagcagcagaatcagcagccagatgtggctgcagctgagccagagcctgaagggctgggaccacatgttcaccgtggacttctggaccatcatggagaaccacaaccacagcaaggtgaccaccctgagatgcagagccctgaactactacccccagaacatcaccatgaagtggctgaaggacaagcagcccatggacgccaaggagttcgagcccaaggacgtgctgcccaacggcgacggcacctaccagggctggatcaccctggccgtgccccccggcgaggagcagagatacacctgccaggtggagcaccccggcctggaccagcccctgatcgtgatctgggagcccagccccagcggcaccctggtgatcggcgtgatcagcggcatcgccgtgttcgtggtgatcctgttcatcggcatcctgttcatcatcctgagaaagagacagggcagcagaggcgccatgggccactacgtgctggccgagagagagtag

SEQ ID NO: 237718 - DNA, 729 bp, Artificial Sequence
  derived and/or modified sequence
atgggcccccgggccaggcccgccctgctgctactaatgcttttgcaaacggcggtactgcagggaagactgctgcgctcgcactcactccactacttgttcatgggagcctccgaacaagacctcggcctttcgttatttgaggctctcggctacgttgacgatcaactgtttgtcttttacgatcacgagtcaagacgagtggagcctaggacaccttgggtgtcgtcccgtatctcctcccagatgtggttgcagctgtcacagtccttgaagggctgggatcatatgtttacagtcgatttctggactatcatggaaaaccacaaccacagtaaggtgactacattgcggtgcagggccctaaattactacccccagaacattaccatgaaatggctaaaggacaaacagcctatggatgctaaggagttcgagcctaaagatgttctgcccaacggcgatggtacatatcaaggttggataaccctggccgttccccccggcgaggagcaacggtatacttgccaagtggagcatccgggactggatcagcccttaattgtgatttgggagccttccccgtccgggacgctcgtgattggggtgatatctggtattgctgtatttgtcgtgatccttttcattgggatactttttatcattctgaggaaaaggcaggggtcccgtggtgctatgggccactatgtcctggcagagagagaatag

SEQ ID NO: 237719 - DNA, 729 bp, Artificial Sequence
  derived and/or modified sequence
atgggcccccgggcccggcctgccctgctgctgctgatgctgctgcagacagctgtgctgcagggccgcctgctgcggagccacagcctgcactacctgttcatgggcgccagcgagcaggacctgggcctgagcctgtttgaggccctgggctacgtggatgaccagctgtttgtgttctatgaccacgagagccggcgggtggagcccaggaccccctgggtgagcagccgcatcagcagccagatgtggctgcagctgagccagagcctgaagggctgggaccacatgttcaccgtggacttctggaccatcatggagaaccacaaccacagcaaggtgaccaccctgcgctgccgggccctgaactactacccccagaacatcaccatgaagtggctgaaggacaagcagcccatggatgccaaggagtttgagcccaaggatgtgctgcccaatggagatggcacctaccagggctggatcaccctggccgtgcccccaggagaggagcagcgctacacctgccaggtggagcaccctggcctggaccagcccctcatcgtcatctgggagcccagccccagcggcaccctggtgattggagtcatctctggaattgctgtgtttgtggtgatcctcttcatcggcatcctcttcatcatcctgaggaagaggcagggcagcagaggagccatgggccactacgtgctggccgagcgggagtag

SEQ ID NO: 237720 - DNA, 729 bp, Artificial Sequence
  derived and/or modified sequence
atgggcccccgggcccggcccgccctgctgctgctgatgctgctgcaaaccgcagttctacaggggaggcttctacgctcacacagcctccactatttatttatgggagctagcgagcaagacctgggactgtccttgttcgaagccttgggatatgtggacgaccaactgttcgtgttttatgatcacgaatcgcgtcgcgtcgaaccaagaaccccatgggtgagttctaggattagttcccaaatgtggctgcagttatcacagagcttgaagggttgggatcacatgttcacagtggatttctggacaattatggagaatcataatcacagtaaagtgaccaccttgcggtgcagggcactgaattactaccctcagaacattaccatgaaatggttaaaggacaagcagcctatggacgcaaaggagttcgaacccaaagacgtgttacctaatggcgatggcacttatcagggatggattaccctggccgtgccacctggagaggagcaacgctatacatgccaggtggaacatccagggctcgaccagcctcttattgtgatttgggagcccagccccagtgggaccttggttattggcgttatttcaggcattgccgtgtttgtcgtgattttgttcattgggattctgtttatcatacttcggaagcgacaaggaagccgaggagcaatgggccactacgtgctcgccgaaagagagtag

SEQ ID NO: 237721 - DNA, 804 bp, Artificial Sequence
  derived and/or modified sequence
aagaagcggagatttaacggggacgtgcggccagagctggggaaatgggcccgcgagccaggccggcgcttctcctcctgatgcttttgcagaccgcggtcctgcaggggcgcttgctgcgttcacactctctgcactacctcttcatgggtgcctcagagcaggaccttggtctttccttgtttgaagctttgggctacgtggatgaccagctgttcgtgttctatgatcatgagagtcgccgtgtggagccccgaactccatgggtttccagtagaatttcaagccagatgtggctgcagctgagtcagagtctgaaagggtgggatcacatgttcactgttgacttctggactattatggaaaatcacaaccacagcaaggtgaccactctacggtgtcgggccttgaactactacccccagaacatcaccatgaagtggctgaaggataagcagccaatggatgccaaggagttcgaacctaaagacgtattgcccaatggggatgggacctaccagggctggataaccttggctgtaccccctggggaagagcagagatatacgtgccaggtggagcacccaggcctggatcagcccctcattgtgatctgggagccctcaccgtctggcaccctagtcattggagtcatcagtggaattgctgtttttgtcgtcatcttgttcattggaattttgttcataatattaaggaagaggcagggttcaagaggagccatggggcactacgtcttagctgaacgtgagtgacacgcagcctgcagactcactgtgggaagga

SEQ ID NO: 237722 - DNA, 729 bp, Artificial Sequence
  derived and/or modified sequence
atgggaccccgtgcgaggccggctctgctcctgctaatgctgttacagacagcagttttgcagggtcgacttttgcgaagccactcattacattacctgtttatgggcgcttccgaacaggacctggggttgagtctgtttgaggccctggggtatgtggatgaccaactgttcgtcttctacgaccatgaaagtcggcgagtggagcccagaacgccatgggtgagttcaagaatcagctctcagatgtggttgcagctgagccagtcactgaagggctgggatcacatgtttacagtggacttttggaccatcatggagaaccacaatcatagcaaggttacgactctgaggtgccgcgcactcaactattatccccaaaatatcactatgaaatggctgaaagataagcagccaatggacgccaaagaattcgaacctaaggatgtactccccaacggggacggcacctaccagggttggataacactggctgtgcctccaggcgaggagcagcggtatacatgtcaggttgaacacccaggcctggatcaaccactgattgtgatctgggaaccctccccctcgggaactcttgtgatcggtgtgatctccgggattgctgtttttgtcgtgatcctttttatcggaatactctttattatcttgaggaaaaggcaggggtcacggggtgcgatggggcattatgtgctggccgaaagggagtag

SEQ ID NO: 237723 - protein, 256 aa, Artificial Sequence
  derived and/or modified sequence
MGPRARPALLLLMLLQTAVLQGRLLRSHSLHYLFMGASEQDLGLSLFEALGYVDDQLFVFYDHESRRVEPRTPWVSSRISSQMWLQLSQSLKGWDHMFTVDFWTIMENHNHSKVPPLVKVTHHVTSSVTTLRCRALNYYPQNITMKWLKDKQPMDAKEFEPKDVLPNGDGTYQGWITLAVPPGEEQRYTCQVEHPGLDQPLIVIWEPSPSGTLVIGVISGIAVFVVILFIGILFIILRKRQGSRGAMGHYVLAERE

SEQ ID NO: 237724 - DNA, 771 bp, Artificial Sequence
  derived and/or modified sequence
atgggccccagagccagacccgccctgctgctgctgatgctgctgcagaccgccgtgctgcagggcagactgctgagaagccacagcctgcactacctgttcatgggcgccagcgagcaggacctgggcctgagcctgttcgaggccctgggctacgtggacgaccagctgttcgtgttctacgaccacgagagcagaagagtggagcccagaaccccctgggtgagcagcagaatcagcagccagatgtggctgcagctgagccagagcctgaagggctgggaccacatgttcaccgtggacttctggaccatcatggagaaccacaaccacagcaaggtgccccccctggtgaaggtgacccaccacgtgaccagcagcgtgaccaccctgagatgcagagccctgaactactacccccagaacatcaccatgaagtggctgaaggacaagcagcccatggacgccaaggagttcgagcccaaggacgtgctgcccaacggcgacggcacctaccagggctggatcaccctggccgtgccccccggcgaggagcagagatacacctgccaggtggagcaccccggcctggaccagcccctgatcgtgatctgggagcccagccccagcggcaccctggtgatcggcgtgatcagcggcatcgccgtgttcgtggtgatcctgttcatcggcatcctgttcatcatcctgagaaagagacagggcagcagaggcgccatgggccactacgtgctggccgagagagagtag

SEQ ID NO: 237725 - DNA, 771 bp, Artificial Sequence
  derived and/or modified sequence
atgggcccacgggccaggcccgcacttctcctcctcatgctccttcagacagcagttttacagggtcgtcttctgcgctcccacagcctgcattacctattcatgggcgcaagtgagcaggacttgggactgagcttatttgaggctctcggatacgtggatgaccagctgttcgtgttttacgatcacgagtccagacgggttgagcctagaaccccgtgggtcagtagtcgcatttcctctcagatgtggcttcagctaagtcagagtcttaaaggctgggatcacatgttcaccgtcgacttctggactatcatggaaaaccacaatcacagcaaagtgccgcctttagtcaaggtgacccatcatgtcacctcgtctgtgaccactctccggtgccgcgcgctgaattattatccacagaacattactatgaagtggcttaaagataaacagccgatggacgctaaggaattcgaacctaaagatgttctgccaaatggcgacggaacgtaccaggggtggattactcttgcagtgccccccggtgaagaacaaagatacacatgtcaggtggagcacccaggactggaccagcccctcatcgtgatatgggagccatcaccttcaggcaccctcgttattggagtcatttctggaatagcggtattcgtcgtcattctattcatcggaatcctgtttatcattctgcgtaagcggcaagggtcgaggggcgccatgggccactacgtcctggctgagagggaatag

SEQ ID NO: 237726 - DNA, 771 bp, Artificial Sequence
  derived and/or modified sequence
atgggcccccgggcccggcctgccctgctgctgctgatgctgctgcagacagctgtgctgcagggccgcctgctgcggagccacagcctgcactacctgttcatgggcgccagcgagcaggacctgggcctgagcctgtttgaggccctgggctacgtggatgaccagctgtttgtgttctatgaccacgagagccggcgggtggagcccaggaccccctgggtgagcagccgcatcagcagccagatgtggctgcagctgagccagagcctgaagggctgggaccacatgttcaccgtggacttctggaccatcatggagaaccacaaccacagcaaggtgccccccctggtgaaggtgacccaccacgtgaccagctctgtgaccaccctgcgctgccgggccctgaactactacccccagaacatcaccatgaagtggctgaaggacaagcagcccatggatgccaaggagtttgagcccaaggatgtgctgcccaatggagatggcacctaccagggctggatcaccctggccgtgcccccaggagaggagcagcgctacacctgccaggtggagcaccctggcctggaccagcccctcatcgtcatctgggagcccagccccagcggcaccctggtgattggagtcatctctggaattgctgtgtttgtggtgatcctcttcatcggcatcctcttcatcatcctgaggaagaggcagggcagcagaggagccatgggccactacgtgctggccgagcgggagtag

SEQ ID NO: 237727 - DNA, 771 bp, Artificial Sequence
  derived and/or modified sequence
atgggcccccgggcccggcccgccctgctgctgctgatgctgctgcagactgccgtgctccagggcagattattacgcagccatagcctgcactatcttttcatgggcgctagcgagcaggatctcgggcttagtctctttgaagcattagggtacgtggacgaccagctcttcgtgttctatgaccacgaaagtaggagagtagagcctcgtactccatgggtcagctctaggatatcttcccagatgtggctacagctttcccaaagtctaaaaggttgggaccacatgttcacggtggacttctggaccattatggaaaaccacaaccactcgaaggtcccccccctggtgaaagttacccaccacgtcacctccagcgttaccaccctccgctgtcgggcactgaattattaccctcaaaatatcacgatgaaatggcttaaggataaacaacctatggacgcgaaggaatttgagcctaaggacgtcctgcccaatggggacggtacttatcaggggtggatcactctggccgtgccacccggagaagaacaaagatatacgtgccaagtggagcaccccggactggaccaaccgcttattgtaatctgggaaccctctcccagcggcactctcgttattggcgtgatttctgggatcgcagttttcgtggtaatcctgtttattgggattttatttattatactgaggaaacgacagggatcaagaggcgctatgggacactatgttttggccgaacgtgagtag

SEQ ID NO: 237728 - DNA, 1922 bp, Artificial Sequence
  derived and/or modified sequence
ctaaagttctgaaagacctgttgcttttcaccaggaagttttactgggcatctcctgagcctaggcaatagctgtagggtgacttctggagccatccccgtttccccgccccccaaaagaagcggagatttaacggggacgtgcggccagagctggggaaatgggcccgcgagccaggccggcgcttctcctcctgatgcttttgcagaccgcggtcctgcaggggcgcttgctgcgttcacactctctgcactacctcttcatgggtgcctcagagcaggaccttggtctttccttgtttgaagctttgggctacgtggatgaccagctgttcgtgttctatgatcatgagagtcgccgtgtggagccccgaactccatgggtttccagtagaatttcaagccagatgtggctgcagctgagtcagagtctgaaagggtgggatcacatgttcactgttgacttctggactattatggaaaatcacaaccacagcaaggtgcctcctttggtgaaggtgacacatcatgtgacctcttcagtgaccactctacggtgtcgggccttgaactactacccccagaacatcaccatgaagtggctgaaggataagcagccaatggatgccaaggagttcgaacctaaagacgtattgcccaatggggatgggacctaccagggctggataaccttggctgtaccccctggggaagagcagagatatacgtgccaggtggagcacccaggcctggatcagcccctcattgtgatctgggagccctcaccgtctggcaccctagtcattggagtcatcagtggaattgctgtttttgtcgtcatcttgttcattggaattttgttcataatattaaggaagaggcagggttcaagaggagccatggggcactacgtcttagctgaacgtgagtgacacgcagcctgcagactcactgtgggaaggagacaaaactagagactcaaagagggagtgcatttatgagctcttcatgtttcaggagagagttgaacctaaacatagaaattgcctgacgaactccttgattttagccttctctgttcatttcctcaaaaagatttccccatttaggtttctgagttcctgcatgccggtgatccctagctgtgacctctcccctggaactgtctctcatgaacctcaagctgcatctagaggcttccttcatttcctccgtcacctcagagacatacacctatgtcatttcatttcctatttttggaagaggactccttaaatttgggggacttacatgattcattttaacatctgagaaaagctttgaaccctgggacgtggctagtcataaccttaccagatttttacacatgtatctatgcattttctggacccgttcaacttttcctttgaatcctctctctgtgttacccagtaactcatctgtcaccaagccttggggattcttccatctgattgtgatgtgagttgcacagctatgaaggctgtacactgcacgaatggaagaggcacctgtcccagaaaaagcatcatggctatctgtgggtagtatgatgggtgtttttagcaggtaggaggcaaatatcttgaaaggggttgtgaagaggtgttttttctaattggcatgaaggtgtcatacagatttgcaaagtttaatggtgccttcatttgggatgctactctagtattccagacctgaagaatcacaataattttctacctggtctctccttgttctgataatgaaaattatgataaggatgataaaagcacttacttcgtgtccgactcttctgagcacctacttacatgcattactgcatgcacttcttacaataattctatgagataggtactattatccccatttcttttttaaatgaagaaagtgaagtaggccgggcac

SEQ ID NO: 237729 - DNA, 771 bp, Artificial Sequence
  derived and/or modified sequence
atgggccctcgtgcacgacccgcactgttgctcttgatgctgctccagacagctgttttgcagggcagactgcttcgctcacactccttgcattatttgtttatgggggcaagcgaacaggacctgggccttagtctgtttgaggcactgggttacgtggatgaccaattgtttgtgttttacgaccacgagagtagaagagttgagccgaggacaccctgggtgagttcccgcatctcctctcaaatgtggctgcagctgtcacagtccttgaagggatgggatcacatgttcactgtcgacttctggaccatcatggaaaaccacaaccactctaaggtccccccactagttaaggtcacccaccatgtgacatcgagtgttacgacactccgatgcagagcgctaaattactacccacagaacataaccatgaaatggctcaaggacaaacagcccatggacgccaaggaattcgagcccaaagacgtgctgcctaatggcgatgggacgtaccagggctggatcactctggccgtcccccctggcgaagagcagaggtatacttgtcaggtggagcatccaggtctcgatcagccacttatagtcatctgggagccctcacctagtggtaccctggtaattggagttatctctggtattgcagtcttcgtggtcattctgttcatcggaatccttttcattattctgaggaaacggcagggatctcgcggagcaatgggccactacgtcctggcagaacgcgagtag

SEQ ID NO: 237730 - protein, 334 aa, Artificial Sequence
  derived and/or modified sequence
MGPRARPALLLLMLLQTAVLQGRLLRSHSLHYLFMGASEQDLGLSLFEALGYVDDQLFVFYDHESRRVEPRTPWVSSRISSQMWLQLSQSLKGWDHMFTVDFWTIMENHNHSKESHTLQVILGCEMQEDNSTEGYWKYGYDGQDHLEFCPDTLDWRAAEPRAWPTKLEWERHKIRARQNRAYLERDCPAQLQQLLELGRGVLDQQVTTLRCRALNYYPQNITMKWLKDKQPMDAKEFEPKDVLPNGDGTYQGWITLAVPPGEEQRYTCQVEHPGLDQPLIVIWEPSPSGTLVIGVISGIAVFVVILFIGILFIILRKRQGSRGAMGHYVLAERE

SEQ ID NO: 237731 - DNA, 1005 bp, Artificial Sequence
  derived and/or modified sequence
atgggccccagagccagacccgccctgctgctgctgatgctgctgcagaccgccgtgctgcagggcagactgctgagaagccacagcctgcactacctgttcatgggcgccagcgagcaggacctgggcctgagcctgttcgaggccctgggctacgtggacgaccagctgttcgtgttctacgaccacgagagcagaagagtggagcccagaaccccctgggtgagcagcagaatcagcagccagatgtggctgcagctgagccagagcctgaagggctgggaccacatgttcaccgtggacttctggaccatcatggagaaccacaaccacagcaaggagagccacaccctgcaggtgatcctgggctgcgagatgcaggaggacaacagcaccgagggctactggaagtacggctacgacggccaggaccacctggagttctgccccgacaccctggactggagagccgccgagcccagagcctggcccaccaagctggagtgggagagacacaagatcagagccagacagaacagagcctacctggagagagactgccccgcccagctgcagcagctgctggagctgggcagaggcgtgctggaccagcaggtgaccaccctgagatgcagagccctgaactactacccccagaacatcaccatgaagtggctgaaggacaagcagcccatggacgccaaggagttcgagcccaaggacgtgctgcccaacggcgacggcacctaccagggctggatcaccctggccgtgccccccggcgaggagcagagatacacctgccaggtggagcaccccggcctggaccagcccctgatcgtgatctgggagcccagccccagcggcaccctggtgatcggcgtgatcagcggcatcgccgtgttcgtggtgatcctgttcatcggcatcctgttcatcatcctgagaaagagacagggcagcagaggcgccatgggccactacgtgctggccgagagagagtag

SEQ ID NO: 237732 - DNA, 486 bp, Artificial Sequence
  derived and/or modified sequence
atgggccccagagccagacccgccctgctgctgctgatgctgctgcagaccgccgtgctgcagggcagactgctgagaagccacagcctgcactacctgttcatgggcgccagcgagcaggacctgggcctgagcctgttcgaggccctgggctacgtggacgaccagctgttcgtgttctacgaccacgagagcagaagagtggagcccagaaccccctgggtgagcagcagaatcagcagccagatgtggctgcagctgagccagagcctgaagggctgggaccacatgttcaccgtggacttctggaccatcatggagaaccacaaccacagcaaggagagccacaccctgcaggtgatcctgggctgcgagatgcaggaggacaacagcaccgagggctactggaagtacggctacgacggccaggtgctgcaggacaccatctacagcagcgaggtgagcagcctgggcatcaagttctag

SEQ ID NO: 237733 - DNA, 1005 bp, Artificial Sequence
  derived and/or modified sequence
atgggacccagagctagacccgccctgttgctgcttatgctactgcagactgccgtgctgcaggggaggcttctaagaagccacagcctgcactacctcttcatgggggccagcgaacaagacttaggactatccttgttcgaggctctgggctacgtcgacgaccaattgttcgtattctacgaccacgaatccagaagggtggagccgaggaccccatgggttagctccaggatttccagccagatgtggttgcaactttcccagtcactcaaaggctgggaccacatgttcactgttgacttttggactattatggagaatcataatcactccaaagagagccatactctccaagtgatcttggggtgcgagatgcaggaggataacagcacagagggttactggaagtacgggtacgacggacaggatcacctcgaattctgcccagacactctagactggagggcagcagaacctcgggcttggccgaccaagctcgaatgggagaggcacaaaatccgggccaggcagaatcgcgcatatctggagcgtgattgccccgcacagctgcagcagttactggagctcggacgcggcgtgttagaccagcaggtcactacattacggtgccgggctctaaattattaccctcaaaacatcacaatgaagtggctgaaagataagcaacctatggacgctaaagaatttgaacctaaggatgtattgccaaacggggacggtacttaccaggggtggatcaccttggccgtcccccctggcgaggagcagagatatacctgtcaggttgagcaccccggtcttgaccagcctctgattgtcatatgggaaccctctccatcggggaccctagtgattggagtcatctccggcatcgccgtatttgttgtcattctgtttatcgggattttgtttatcatccttcgtaagcggcagggttctcggggcgccatgggccactacgtactggccgaacgtgaatag

SEQ ID NO: 237734 - DNA, 486 bp, Artificial Sequence
  derived and/or modified sequence
atggggccacgtgcccgaccggcccttctcctgttgatgttattacaaactgctgtgttacaggggagactgctgcgctcacactccctgcactacctcttcatgggtgcttcagaacaggatttggggctgtctctgttcgaggcactggggtacgttgatgaccagctgttcgttttttatgaccacgagtctcgacgggtcgaaccccgtaccccctgggtgagctcaaggatttcttcccagatgtggttgcagttgagtcaaagtctaaaaggctgggaccacatgtttactgttgacttctggacaattatggaaaatcataaccacagtaaggagtctcatactctccaggtgatattggggtgtgaaatgcaggaagacaacagcaccgagggttactggaagtatgggtacgatgggcaggtgctgcaggacaccatttacagttccgaggtgtcctcgctgggcattaaattctag

SEQ ID NO: 237735 - DNA, 1005 bp, Artificial Sequence
  derived and/or modified sequence
atgggcccccgggcccggcctgccctgctgctgctgatgctgctgcagacagctgtgctgcagggccgcctgctgcggagccacagcctgcactacctgttcatgggcgccagcgagcaggacctgggcctgagcctgtttgaggccctgggctacgtggatgaccagctgtttgtgttctatgaccacgagagccggcgggtggagcccaggaccccctgggtgagcagccgcatcagcagccagatgtggctgcagctgagccagagcctgaagggctgggaccacatgttcaccgtggacttctggaccatcatggagaaccacaaccacagcaaggagagccacaccctgcaggtgatcctgggctgtgagatgcaggaggacaacagcacagagggctactggaagtatggctatgatggccaggaccacctggagttctgcccagacaccctggactggagggctgctgagccccgggcctggcccaccaagctggagtgggagcggcacaagatccgggcccggcagaacagagcctacctggagcgggactgcccagcccagctgcagcagctgctggagctgggccggggcgtgctggaccagcaggtgaccaccctgcgctgccgggccctgaactactacccccagaacatcaccatgaagtggctgaaggacaagcagcccatggatgccaaggagtttgagcccaaggatgtgctgcccaatggagatggcacctaccagggctggatcaccctggccgtgcccccaggagaggagcagcgctacacctgccaggtggagcaccctggcctggaccagcccctcatcgtcatctgggagcccagccccagcggcaccctggtgattggagtcatctctggaattgctgtgtttgtggtgatcctcttcatcggcatcctcttcatcatcctgaggaagaggcagggcagcagaggagccatgggccactacgtgctggccgagcgggagtag

SEQ ID NO: 237736 - DNA, 486 bp, Artificial Sequence
  derived and/or modified sequence
atgggcccccgggcccggcctgccctgctgctgctgatgctgctgcagacagctgtgctgcagggccgcctgctgcggagccacagcctgcactacctgttcatgggcgccagcgagcaggacctgggcctgagcctgtttgaggccctgggctacgtggatgaccagctgtttgtgttctatgaccacgagagccggcgggtggagcccaggaccccctgggtgagcagccgcatcagcagccagatgtggctgcagctgagccagagcctgaagggctgggaccacatgttcaccgtggacttctggaccatcatggagaaccacaaccacagcaaggagagccacaccctgcaggtgatcctgggctgtgagatgcaggaggacaacagcacagagggctactggaagtatggctatgatggccaggtgctgcaggacaccatctacagcagcgaggtgagcagcctgggcatcaagttctag

SEQ ID NO: 237737 - DNA, 1005 bp, Artificial Sequence
  derived and/or modified sequence
atgggcccccgggcccggcccgccctgctgctgctgatgctgctgcagacagccgtcctgcaagggaggctgctgcgcagccacagcctgcactacctgttcatgggggctagcgaacaagatctgggtctaagtctcttcgaagcccttggttatgtagacgaccagctgttcgtcttttacgaccacgagagtaggcgcgttgagccacgcaccccgtgggtgtcgtcgcggatttcgagtcagatgtggctgcaactgtcccaatcactcaagggttgggatcatatgttcacggtcgacttctggaccattatggagaaccacaatcattctaaggaaagccatacacttcaggtgatcctggggtgtgaaatgcaggaggacaatagtacagagggctactggaaatacggatacgatggacaggatcatttagaattttgtcctgacactttggattggcgcgctgcggagccccgggcttggccaacaaagctggaatgggagagacataagattcgggctaggcagaatcgggcctatttagagcgggattgtcctgcccagctccagcagctcctcgagttgggccgaggcgtgctcgatcaacaggtaacaactcttcgttgtcgggctctgaactactatccccagaatattacaatgaagtggctgaaggacaagcagcctatggacgccaaggaatttgagccaaaggatgtcctccccaatggagatgggacctatcaaggctggatcactctagctgttccccccggcgaggagcagcggtatacctgtcaggtggaacatccagggttggaccagccacttattgttatctgggaacccagcccgtctgggaccctcgtgatcggcgtgataagtggcatcgcagtctttgttgtcattctgttcatagggatcttgttcatcattctgaggaagcgacaggggtcccgaggagctatggggcattacgtattggcggaacgcgaatag

SEQ ID NO: 237738 - DNA, 486 bp, Artificial Sequence
  derived and/or modified sequence
atgggcccccgggcccggcccgccctgctgctgctgatgctgctgcagaccgctgtgcttcaggggaggctgctccggtcccatagcttgcactatctttttatgggggcctccgaacaagacttgggtttgtccttgttcgaggctcttggctacgttgatgaccagttattcgtcttttacgaccatgaatccaggcgagtggaacccaggacaccctgggtaagcagccggatatcatcccagatgtggctccaactgtcccagtccttaaaggggtgggatcacatgttcaccgttgacttctggaccattatggagaatcacaaccacagcaaagaatcccacactcttcaagtcattctgggatgtgaaatgcaggaggataattcgacggaggggtattggaagtatggatacgacggccaagtgctgcaagacaccatctactcatccgaggtttcgagtctggggatcaagttctag

SEQ ID NO: 237739 - DNA, 1045 bp, Artificial Sequence
  derived and/or modified sequence
gagatttaacggggacgtgcggccagagctggggaaatgggcccgcgagccaggccggcgcttctcctcctgatgcttttgcagaccgcggtcctgcaggggcgcttgctgcgttcacactctctgcactacctcttcatgggtgcctcagagcaggaccttggtctttccttgtttgaagctttgggctacgtggatgaccagctgttcgtgttctatgatcatgagagtcgccgtgtggagccccgaactccatgggtttccagtagaatttcaagccagatgtggctgcagctgagtcagagtctgaaagggtgggatcacatgttcactgttgacttctggactattatggaaaatcacaaccacagcaaggagtcccacaccctgcaggtcatcctgggctgtgaaatgcaagaagacaacagtaccgagggctactggaagtacgggtatgatgggcaggaccaccttgaattctgccctgacacactggattggagagcagcagaacccagggcctggcccaccaagctggagtgggaaaggcacaagattcgggccaggcagaacagggcctacctggagagggactgccctgcacagctgcagcagttgctggagctggggagaggtgttttggaccaacaagtgaccactctacggtgtcgggccttgaactactacccccagaacatcaccatgaagtggctgaaggataagcagccaatggatgccaaggagttcgaacctaaagacgtattgcccaatggggatgggacctaccagggctggataaccttggctgtaccccctggggaagagcagagatatacgtgccaggtggagcacccaggcctggatcagcccctcattgtgatctgggagccctcaccgtctggcaccctagtcattggagtcatcagtggaattgctgtttttgtcgtcatcttgttcattggaattttgttcataatattaaggaagaggcagggttcaagaggagccatggggcactacgtcttagctgaacgtgagtgacacg

SEQ ID NO: 237740 - DNA, 646 bp, Artificial Sequence
  derived and/or modified sequence
ctaaagttctgaaagacctgttgcttttcaccaggaagttttactgggcatctcctgagcctaggcaatagctgtagggtgacttctggagccatccccgtttccccgccccccaaaagaagcggagatttaacggggacgtgcggccagagctggggaaatgggcccgcgagccaggccggcgcttctcctcctgatgcttttgcagaccgcggtcctgcaggggcgcttgctgcgttcacactctctgcactacctcttcatgggtgcctcagagcaggaccttggtctttccttgtttgaagctttgggctacgtggatgaccagctgttcgtgttctatgatcatgagagtcgccgtgtggagccccgaactccatgggtttccagtagaatttcaagccagatgtggctgcagctgagtcagagtctgaaagggtgggatcacatgttcactgttgacttctggactattatggaaaatcacaaccacagcaaggagtcccacaccctgcaggtcatcctgggctgtgaaatgcaagaagacaacagtaccgagggctactggaagtacgggtatgatgggcaggtgcttcaggataccatatacagctcagaagtttcttctttaggcattaaattttag

SEQ ID NO: 237741 - DNA, 1005 bp, Artificial Sequence
  derived and/or modified sequence
atggggccacgcgcacggccagctctcctgctgctgatgctgttacagactgctgtgttgcaggggcgactgctgaggtcccatagtttgcactacctgtttatgggggctagcgaacaggacctcggcctgagcctttttgaagcgcttggctacgtggacgaccaactcttcgtcttctacgaccacgaatcccgacgagtcgaaccccgtacgccgtgggtgtcatcccgcatcagcagccaaatgtggctgcagctgtcccagtcactcaagggatgggaccacatgtttaccgtcgacttctggacgatcatggagaatcataaccacagtaaggagagccataccctccaggtaattctggggtgtgaaatgcaggaggataactccacagagggttactggaagtacggctatgatgggcaggatcacctggaattttgtccggatactcttgattggagagctgcagaacctagagcatggccaaccaagttagagtgggagagacataagattagagccaggcagaatcgcgcatacctggagcgagactgtccggcacagctccaacagttgcttgaactgggcaggggggtgttagatcaacaggtaaccactctgcggtgtagagccctgaactactatccacagaacatcacaatgaagtggctgaaagacaaacaacctatggatgccaaagagttcgaaccaaaagacgtgctgcccaacggagatggcacgtatcaaggctggattacccttgctgtacccccaggagaggaacagcgctatacttgccaggtcgaacaccctgggctggaccaaccactgatcgttatctgggagccttccccttccgggaccctagtgatcggagtaattagcggtattgccgtcttcgtggtgatcctgtttattggtatcctgttcataatacttaggaagcgacagggttctcgcggagcaatgggacattatgtcctcgctgaacgagagtag

SEQ ID NO: 237742 - DNA, 486 bp, Artificial Sequence
  derived and/or modified sequence
atgggtccacgcgcaagaccagccctgctgctgctgatgttactccagaccgcggttttgcaaggacgcctcctgcgctcacacagtctgcattatcttttcatgggggcttccgaacaggacctcgggctatccctgtttgaagccctggggtatgtggacgaccagttgtttgtgttttatgaccacgaatctaggcgggtcgagcctagaacaccgtgggttagctcgagaataagtagccagatgtggcttcagctttctcaatcactgaagggctgggaccacatgttcacggtggatttctggacaatcatggagaaccataatcacagtaaggaaagtcacacactacaggtgatcctaggatgtgagatgcaggaggataactccacagagggatactggaagtacgggtacgacggccaggtgctgcaggacactatttatagctctgaagtcagctcattggggatcaaattctag

SEQ ID NO: 237743 - protein, 260 aa, Artificial Sequence
  derived and/or modified sequence
MGPRARPALLLLMLLQTAVLQGRLLQSHTLQVILGCEMQEDNSTEGYWKYGYDGQDHLEFCPDTLDWRAAEPRAWPTKLEWERHKIRARQNRAYLERDCPAQLQQLLELGRGVLDQQVPPLVKVTHHVTSSVTTLRCRALNYYPQNITMKWLKDKQPMDAKEFEPKDVLPNGDGTYQGWITLAVPPGEEQRYTCQVEHPGLDQPLIVIWEPSPSGTLVIGVISGIAVFVVILFIGILFIILRKRQGSRGAMGHYVLAERE

SEQ ID NO: 237744 - DNA, 783 bp, Artificial Sequence
  derived and/or modified sequence
atgggccccagagccagacccgccctgctgctgctgatgctgctgcagaccgccgtgctgcagggcagactgctgcagagccacaccctgcaggtgatcctgggctgcgagatgcaggaggacaacagcaccgagggctactggaagtacggctacgacggccaggaccacctggagttctgccccgacaccctggactggagagccgccgagcccagagcctggcccaccaagctggagtgggagagacacaagatcagagccagacagaacagagcctacctggagagagactgccccgcccagctgcagcagctgctggagctgggcagaggcgtgctggaccagcaggtgccccccctggtgaaggtgacccaccacgtgaccagcagcgtgaccaccctgagatgcagagccctgaactactacccccagaacatcaccatgaagtggctgaaggacaagcagcccatggacgccaaggagttcgagcccaaggacgtgctgcccaacggcgacggcacctaccagggctggatcaccctggccgtgccccccggcgaggagcagagatacacctgccaggtggagcaccccggcctggaccagcccctgatcgtgatctgggagcccagccccagcggcaccctggtgatcggcgtgatcagcggcatcgccgtgttcgtggtgatcctgttcatcggcatcctgttcatcatcctgagaaagagacagggcagcagaggcgccatgggccactacgtgctggccgagagagagtag

SEQ ID NO: 237745 - DNA, 783 bp, Artificial Sequence
  derived and/or modified sequence
atggggccccgcgctcgccctgctcttctgctcctcatgctgctgcagaccgcggtgctgcagggaagactcctgcagagccacaccttacaggtgatacttggctgtgagatgcaggaggataacagtacagaaggatattggaagtacggatatgacggtcaggaccacttggagttctgccccgacacactggactggcgggcggccgaaccccgagcttggccgaccaaactagaatgggagcgccataagatccgagccagacagaacagagcctatctggaacgagactgtccggcacaacttcagcagcttcttgagttgggcaggggcgtactggatcaacaagtgccacctctggtgaaggtgacccaccacgtcacatcaagtgtgacgaccttgcgatgcagagccttaaattactatccacagaatatcaccatgaagtggctcaaggataaacagcctatggatgccaaggagtttgagcctaaggatgtcttgccaaatggcgacggaacataccagggatggatcaccttggctgtgcccccaggcgaagagcaaagatacacctgccaggtggaacaccccgggctggaccaacctttaatcgtgatctgggaaccgtcaccctccggcacccttgtgattggtgtgatctccggaatcgctgtgtttgtcgtcatcctttttatcggaattctgtttatcatcctgcgaaagcgtcagggaagcagaggcgcaatgggccactacgttctcgctgaaagggaatag

SEQ ID NO: 237746 - DNA, 783 bp, Artificial Sequence
  derived and/or modified sequence
atgggcccccgggcccggcctgccctgctgctgctgatgctgctgcagacagctgtgctgcagggccgcctgctgcagagccacaccctgcaggtgatcctgggctgtgagatgcaggaggacaacagcacagagggctactggaagtatggctatgatggccaggaccacctggagttctgcccagacaccctggactggagggctgctgagccccgggcctggcccaccaagctggagtgggagcggcacaagatccgggcccggcagaacagagcctacctggagcgggactgcccagcccagctgcagcagctgctggagctgggccggggcgtgctggaccagcaggtgccccccctggtgaaggtgacccaccacgtgaccagctctgtgaccaccctgcgctgccgggccctgaactactacccccagaacatcaccatgaagtggctgaaggacaagcagcccatggatgccaaggagtttgagcccaaggatgtgctgcccaatggagatggcacctaccagggctggatcaccctggccgtgcccccaggagaggagcagcgctacacctgccaggtggagcaccctggcctggaccagcccctcatcgtcatctgggagcccagccccagcggcaccctggtgattggagtcatctctggaattgctgtgtttgtggtgatcctcttcatcggcatcctcttcatcatcctgaggaagaggcagggcagcagaggagccatgggccactacgtgctggccgagcgggagtag

SEQ ID NO: 237747 - DNA, 783 bp, Artificial Sequence
  derived and/or modified sequence
atgggcccccgggcccggcccgccctgctgctgctgatgctgctgcagactgccgttctccagggcagacttctccagtcacacactttacaggtaattctgggctgtgagatgcaagaggataactccaccgaagggtattggaaatacggctacgatggacaagaccacctcgagttctgccccgatacccttgattggcgtgcagctgagccccgagcctggcctacgaaattggagtgggaaagacacaagatccgtgcgcggcaaaacagagcatacctggaaagggactgccctgcgcagctgcagcagttactagagctaggacgaggagtgctggaccagcaagtgcctccattggtaaaggtgacacaccatgtaactagcagtgtgacaacgctgaggtgccgagccctgaactactatccacagaatattacaatgaaatggcttaaggacaaacagcctatggacgccaaagaatttgaacctaaggacgtgcttcccaatggagatggtacatatcaaggctggattaccctcgcggtgccacccggcgaggaacagcgatacacctgtcaggtagagcatcccgggctagaccagccgctaatcgtcatctgggagccgagcccctccggcactctggtaataggtgtgatctctggcatagctgtgtttgtcgtgattttatttataggaatcctattcatcatactccgtaagcggcaaggatctcggggcgctatgggccattatgttctcgctgagagggagtag

SEQ ID NO: 237748 - DNA, 1704 bp, Artificial Sequence
  derived and/or modified sequence
ctaaagttctgaaagacctgttgcttttcaccaggaagttttactgggcatctcctgagcctaggcaatagctgtagggtgacttctggagccatccccgtttccccgccccccaaaagaagcggagatttaacggggacgtgcggccagagctggggaaatgggcccgcgagccaggccggcgcttctcctcctgatgcttttgcagaccgcggtcctgcaggggcgcttgctgcagtcccacaccctgcaggtcatcctgggctgtgaaatgcaagaagacaacagtaccgagggctactggaagtacgggtatgatgggcaggaccaccttgaattctgccctgacacactggattggagagcagcagaacccagggcctggcccaccaagctggagtgggaaaggcacaagattcgggccaggcagaacagggcctacctggagagggactgccctgcacagctgcagcagttgctggagctggggagaggtgttttggaccaacaagtgcctcctttggtgaaggtgacacatcatgtgacctcttcagtgaccactctacggtgtcgggccttgaactactacccccagaacatcaccatgaagtggctgaaggataagcagccaatggatgccaaggagttcgaacctaaagacgtattgcccaatggggatgggacctaccagggctggataaccttggctgtaccccctggggaagagcagagatatacgtgccaggtggagcacccaggcctggatcagcccctcattgtgatctgggagccctcaccgtctggcaccctagtcattggagtcatcagtggaattgctgtttttgtcgtcatcttgttcattggaattttgttcataatattaaggaagaggcagggttcaagaggagccatggggcactacgtcttagctgaacgtgagtgacacgcagcctgcagactcactgtgggaaggagacaaaactagagactcaaagagggagtgcatttatgagctcttcatgtttcaggagagagttgaacctaaacatagaaattgcctgacgaactccttgattttagccttctctgttcatttcctcaaaaagatttccccatttaggtttctgagttcctgcatgccggtgatccctagctgtgacctctcccctggaactgtctctcatgaacctcaagctgcatctagaggcttccttcatttcctccgtcacctcagagacatacacctatgtcatttcatttcctatttttggaagaggactccttaaatttgggggacttacatgattcattttaacatctgagaaaagctttgaaccctgggacgtggctagtcataaccttaccagatttttacacatgtatctatgcattttctggacccgttcaacttttcctttgaatcctctctctgtgttacccagtaactcatctgtcaccaagccttggggattcttccatctgattgtgatgtgagttgcacagctatgaaggctgtacactgcacgaatggaagaggcacctgtcccagaaaaagcatcatggctatctgtgggtagtatgatgggtgtttttagcaggtaggaggcaaatatcttgaaaggggttgtgaagaggtgttttttctaattggcatgaaggtgtcatacagatttgcaaagtttaatggtgccttcatttgggatg

SEQ ID NO: 237749 - DNA, 783 bp, Artificial Sequence
  derived and/or modified sequence
atgggcccaagagcacgtccagccttgctcctccttatgctgctgcagaccgcagtgctgcagggtcgcctgctgcagtctcataccctgcaggttattctcgggtgtgagatgcaggaggacaatagcaccgagggatactggaagtatggatacgacgggcaggatcacctagagttctgcccagatacccttgactggcgtgccgctgagcctcgagcctggcctactaaattggagtgggagcgccataaaatcagagcccgacagaatagagcttatctagagcgcgattgtcccgcacagctgcagcagctgctcgagctgggcagaggcgtgttggaccagcaggtgcctcctcttgttaaggtcactcatcatgttacctccagcgtgacgaccctgcgttgcagagccctgaattattacccccagaacattactatgaagtggttaaaagataagcaacctatggatgctaaggaattcgagcccaaggatgtcctgccaaacggcgacggcacttaccagggttggataactttggctgtgcccccaggtgaagaacagcgctatacctgtcaggttgaacatccaggattagaccagcccctaattgtgatatgggagccatcaccgtcaggcactctggtgatcggtgtgatctccggcattgccgtttttgtcgtgatcctttttatcggcatcctgttcataatcctaagaaagcggcagggtagccgaggagcgatgggccactatgttctggcagaacgagaatag

SEQ ID NO: 237750 - protein, 246 aa, Artificial Sequence
  derived and/or modified sequence
MGPRARPALLLLMLLQTAVLQGRLLQSHTLQVILGCEMQEDNSTEGYWKYGYDGQDHLEFCPDTLDWRAAEPRAWPTKLEWERHKIRARQNRAYLERDCPAQLQQLLELGRGVLDQQVTTLRCRALNYYPQNITMKWLKDKQPMDAKEFEPKDVLPNGDGTYQGWITLAVPPGEEQRYTCQVEHPGLDQPLIVIWEPSPSGTLVIGVISGIAVFVVILFIGILFIILRKRQGSRGAMGHYVLAERE

SEQ ID NO: 237751 - DNA, 741 bp, Artificial Sequence
  derived and/or modified sequence
atgggccccagagccagacccgccctgctgctgctgatgctgctgcagaccgccgtgctgcagggcagactgctgcagagccacaccctgcaggtgatcctgggctgcgagatgcaggaggacaacagcaccgagggctactggaagtacggctacgacggccaggaccacctggagttctgccccgacaccctggactggagagccgccgagcccagagcctggcccaccaagctggagtgggagagacacaagatcagagccagacagaacagagcctacctggagagagactgccccgcccagctgcagcagctgctggagctgggcagaggcgtgctggaccagcaggtgaccaccctgagatgcagagccctgaactactacccccagaacatcaccatgaagtggctgaaggacaagcagcccatggacgccaaggagttcgagcccaaggacgtgctgcccaacggcgacggcacctaccagggctggatcaccctggccgtgccccccggcgaggagcagagatacacctgccaggtggagcaccccggcctggaccagcccctgatcgtgatctgggagcccagccccagcggcaccctggtgatcggcgtgatcagcggcatcgccgtgttcgtggtgatcctgttcatcggcatcctgttcatcatcctgagaaagagacagggcagcagaggcgccatgggccactacgtgctggccgagagagagtag

SEQ ID NO: 237752 - DNA, 741 bp, Artificial Sequence
  derived and/or modified sequence
atgggccctcgcgctcggccagccctgttgctgctgatgctcctccagacggctgtgctgcaggggcggctgctgcagagtcacacgttacaggtcatcctgggatgtgaaatgcaggaggataactctacagaaggctattggaaatacggttatgatgggcaggatcatctcgaattctgcccagatacccttgactggcgagcagccgaaccccgggcctggcccacgaagcttgaatgggaaaggcacaaaatccgggcaaggcagaatagggcttaccttgaaagggactgccctgcacaattacagcagttgctggagctggggaggggagtgctggatcagcaggtcacgacactgcgctgtcgggcgcttaattactatccacagaatatcactatgaaatggctgaaggacaagcaacctatggacgctaaggaatttgaacccaaagatgtgctacctaacggtgatggcacataccaagggtggattaccctcgctgtccccccgggcgaagaacagcgctatacttgtcaggtagaacatccaggcttggatcaacccctgatcgtgatctgggaacctagtccctcgggtacactcgttataggggtaatctctggaatcgccgtctttgtcgtgatccttttcatagggattctgttcattatcttacggaaaagacaagggtctcgcggcgcaatgggacattacgtgctggcggaacgagagtag

SEQ ID NO: 237753 - DNA, 741 bp, Artificial Sequence
  derived and/or modified sequence
atgggcccccgggcccggcctgccctgctgctgctgatgctgctgcagacagctgtgctgcagggccgcctgctgcagagccacaccctgcaggtgatcctgggctgtgagatgcaggaggacaacagcacagagggctactggaagtatggctatgatggccaggaccacctggagttctgcccagacaccctggactggagggctgctgagccccgggcctggcccaccaagctggagtgggagcggcacaagatccgggcccggcagaacagagcctacctggagcgggactgcccagcccagctgcagcagctgctggagctgggccggggcgtgctggaccagcaggtgaccaccctgcgctgccgggccctgaactactacccccagaacatcaccatgaagtggctgaaggacaagcagcccatggatgccaaggagtttgagcccaaggatgtgctgcccaatggagatggcacctaccagggctggatcaccctggccgtgcccccaggagaggagcagcgctacacctgccaggtggagcaccctggcctggaccagcccctcatcgtcatctgggagcccagccccagcggcaccctggtgattggagtcatctctggaattgctgtgtttgtggtgatcctcttcatcggcatcctcttcatcatcctgaggaagaggcagggcagcagaggagccatgggccactacgtgctggccgagcgggagtag

SEQ ID NO: 237754 - DNA, 741 bp, Artificial Sequence
  derived and/or modified sequence
atgggcccccgggcccggcccgccctgctgctgctgatgctgctgcagactgcagtacttcagggtaggcttctgcagtcgcacacactgcaggtgatcttgggctgcgagatgcaggaagacaactccacagaggggtactggaaatacgggtacgatggtcaggatcacctggaattctgccccgacaccctggattggcgcgcagccgaaccccgcgcttggcctacaaaactggaatgggagaggcacaagattcgggctcgccaaaacagggcttacctcgaacgggattgtcctgcacagttgcagcagctgctcgaactaggaagaggagtccttgaccagcaggttacaactcttcgctgtcgagcccttaattattacccacagaacatcactatgaagtggcttaaggacaagcagcccatggacgccaaagagtttgagccaaaagacgtgctgcccaacggagatggaacataccagggatggattactctggccgtgccccccggcgaggaacagcggtacacctgccaggtggaacaccccggcctggatcagcccctgatcgttatctgggagcccagtccctccggaacattggttataggtgtaatcagcggcattgccgtgttcgtcgttatccttttcattggcattctattcattattttaagaaagcggcagggatccagaggggctatgggacactacgttcttgctgagagggaatag

SEQ ID NO: 237755 - DNA, 781 bp, Artificial Sequence
  derived and/or modified sequence
gagatttaacggggacgtgcggccagagctggggaaatgggcccgcgagccaggccggcgcttctcctcctgatgcttttgcagaccgcggtcctgcaggggcgcttgctgcagtcccacaccctgcaggtcatcctgggctgtgaaatgcaagaagacaacagtaccgagggctactggaagtacgggtatgatgggcaggaccaccttgaattctgccctgacacactggattggagagcagcagaacccagggcctggcccaccaagctggagtgggaaaggcacaagattcgggccaggcagaacagggcctacctggagagggactgccctgcacagctgcagcagttgctggagctggggagaggtgttttggaccaacaagtgaccactctacggtgtcgggccttgaactactacccccagaacatcaccatgaagtggctgaaggataagcagccaatggatgccaaggagttcgaacctaaagacgtattgcccaatggggatgggacctaccagggctggataaccttggctgtaccccctggggaagagcagagatatacgtgccaggtggagcacccaggcctggatcagcccctcattgtgatctgggagccctcaccgtctggcaccctagtcattggagtcatcagtggaattgctgtttttgtcgtcatcttgttcattggaattttgttcataatattaaggaagaggcagggttcaagaggagccatggggcactacgtcttagctgaacgtgagtgacacg

SEQ ID NO: 237756 - DNA, 741 bp, Artificial Sequence
  derived and/or modified sequence
atgggtcccagggccaggccggctcttctgctgcttatgctgctccagacagcagtgttacagggtaggctgttacagtcccatactttgcaggtcatactgggctgcgaaatgcaagaggacaattctaccgagggctactggaagtacggttacgatggccaggaccatctcgaattttgccccgatactctcgactggcgtgctgccgagccgagggcatggcccacaaaactagaatgggagaggcacaagatccgagcgagacaaaacagggcctacctggaaagagattgtcctgctcagctccaacagttactggagctcggtagaggagtgttagatcagcaggtcacaacgctgagatgtagggccctgaattattacccccagaatattacaatgaagtggctgaaggacaaacagcctatggatgctaaggaattcgagccgaaggacgtgctgcctaatggggatgggacttaccagggatggatcaccctcgccgtccctcccggtgaggagcagcggtatacctgtcaggttgaacatccagggcttgaccagcctctgatcgtgatttgggagccttctcctagcggcacgttggtgattggagtaatctctggtatcgccgtcttcgtcgttattctttttatcggtattttgttcatcattctccgcaagagacagggtagtaggggagccatgggccactatgttttggcggagcgggaatag

SEQ ID NO: 237757 - protein, 325 aa, Artificial Sequence
  derived and/or modified sequence
MGPRARPALLLLMLLQTAVLQGRLLPLGYVDDQLFVFYDHESRRVEPRTPWVSSRISSQMWLQLSQSLKGWDHMFTVDFWTIMENHNHSKESHTLQVILGCEMQEDNSTEGYWKYGYDGQDHLEFCPDTLDWRAAEPRAWPTKLEWERHKIRARQNRAYLERDCPAQLQQLLELGRGVLDQQVPPLVKVTHHVTSSVTTLRCRALNYYPQNITMKWLKDKQPMDAKEFEPKDVLPNGDGTYQGWITLAVPPGEEQRYTCQVEHPGLDQPLIVIWEPSPSGTLVIGVISGIAVFVVILFIGILFIILRKRQGSRGAMGHYVLAERE

SEQ ID NO: 237758 - DNA, 978 bp, Artificial Sequence
  derived and/or modified sequence
atgggccccagagccagacccgccctgctgctgctgatgctgctgcagaccgccgtgctgcagggcagactgctgcccctgggctacgtggacgaccagctgttcgtgttctacgaccacgagagcagaagagtggagcccagaaccccctgggtgagcagcagaatcagcagccagatgtggctgcagctgagccagagcctgaagggctgggaccacatgttcaccgtggacttctggaccatcatggagaaccacaaccacagcaaggagagccacaccctgcaggtgatcctgggctgcgagatgcaggaggacaacagcaccgagggctactggaagtacggctacgacggccaggaccacctggagttctgccccgacaccctggactggagagccgccgagcccagagcctggcccaccaagctggagtgggagagacacaagatcagagccagacagaacagagcctacctggagagagactgccccgcccagctgcagcagctgctggagctgggcagaggcgtgctggaccagcaggtgccccccctggtgaaggtgacccaccacgtgaccagcagcgtgaccaccctgagatgcagagccctgaactactacccccagaacatcaccatgaagtggctgaaggacaagcagcccatggacgccaaggagttcgagcccaaggacgtgctgcccaacggcgacggcacctaccagggctggatcaccctggccgtgccccccggcgaggagcagagatacacctgccaggtggagcaccccggcctggaccagcccctgatcgtgatctgggagcccagccccagcggcaccctggtgatcggcgtgatcagcggcatcgccgtgttcgtggtgatcctgttcatcggcatcctgttcatcatcctgagaaagagacagggcagcagaggcgccatgggccactacgtgctggccgagagagagtag

SEQ ID NO: 237759 - DNA, 366 bp, Artificial Sequence
  derived and/or modified sequence
atggagaaccacaaccacagcaaggagagccacaccctgcaggtgatcctgggctgcgagatgcaggaggacaacagcaccgagggctactggaagtacggctacgacggccaggaccacctggagttctgccccgacaccctggactggagagccgccgagcccagagcctggcccaccaagctggagtgggagagacacaagatcagagccagacagaacagagcctacctggagagagactgccccgcccagctgcagcagctgctggagctgggcagaggcgtgctggaccagcaggtgccccccctggtgaaggtgacccaccacgtgagccaccccgcccagcccagcaaggagagctag

SEQ ID NO: 237760 - DNA, 978 bp, Artificial Sequence
  derived and/or modified sequence
atgggcccaagagctcgcccagccctcctgctgcttatgttactacagaccgcggtgctgcaaggtagactactgcctcttggctacgtagacgaccagctcttcgtgttttatgatcacgagagtcgaagggtagaacctcgtaccccatgggtttcgagccgaatcagctcccagatgtggttgcagctgagtcagagtttgaaaggctgggaccacatgtttaccgtcgatttctggactatcatggaaaatcataatcacagtaaggaaagccataccctgcaggtcattcttggttgcgagatgcaggaagataacagcactgagggatattggaaatacggctacgatgggcaggaccaccttgaattctgtcccgacactctagactggcgagcagccgagccacgggcctggcctaccaagttagaatgggagcggcataaaataagggctcgccagaatagagcatatttggaacgggattgcccggcacagttgcaacagctcttagaactgggtcggggagtgctggaccaacaggttccccccttagtcaaggttactcaccacgtgaccagcagtgtgactacgcttcgctgcagggcccttaactattacccgcagaacattactatgaaatggctgaaggataagcagccgatggatgccaaggagtttgaacccaaagatgtcctacctaatggagatggcacataccaggggtggattactttagcagtgcccccaggcgaggaacagaggtatacttgccaggtcgaacacccaggccttgaccagcccctgatagtgatttgggagccttcgcccagtggtactctggtcataggagtgattagtgggatcgctgtttttgttgtgattctgttcattggcatattgtttatcatcctcaggaagcgccagggcagtcgaggagctatgggccattatgttctggctgagagagagtag

SEQ ID NO: 237761 - DNA, 366 bp, Artificial Sequence
  derived and/or modified sequence
atggagaaccacaatcactcgaaggagtctcatactctgcaggtcatcttaggttgcgagatgcaagaggacaactccacagagggatactggaagtacggctacgatggccaggaccacctggagttctgtccagataccctggattggcgggctgccgagccaagagcttggcctaccaaattagaatgggagagacacaaaattagagccaggcagaacagggcatacctggaacgagactgtccagcccaacttcagcagttgttggagctcggccggggagtgctggaccagcaagtacctcccctcgtgaaagtcactcaccatgtgagtcatccagcacagcctagcaaggaatcttag

SEQ ID NO: 237762 - DNA, 978 bp, Artificial Sequence
  derived and/or modified sequence
atgggcccccgggcccggcctgccctgctgctgctgatgctgctgcagacagctgtgctgcagggccgcctgctgcccctgggctacgtggatgaccagctgtttgtgttctatgaccacgagagcagaagagtggagcccaggaccccctgggtgagcagccgcatcagcagccagatgtggctgcagctgagccagagcctgaagggctgggaccacatgttcaccgtggacttctggaccatcatggagaaccacaaccacagcaaggagagccacaccctgcaggtgatcctgggctgtgagatgcaggaggacaacagcacagagggctactggaagtatggctatgatggccaggaccacctggagttctgcccagacaccctggactggagggctgctgagccccgggcctggcccaccaagctggagtgggagcggcacaagatccgggcccggcagaacagagcctacctggagcgggactgcccagcccagctgcagcagctgctggagctgggccggggcgtgctggaccagcaggtgccccccctggtgaaggtgacccaccacgtgaccagctctgtgaccaccctgcgctgccgggccctgaactactacccccagaacatcaccatgaagtggctgaaggacaagcagcccatggatgccaaggagtttgagcccaaggatgtgctgcccaatggagatggcacctaccagggctggatcaccctggccgtgcccccaggagaggagcagcgctacacctgccaggtggagcaccctggcctggaccagcccctgattgtcatctgggagcccagccccagcggcaccctggtgattggagtcatcagcggcattgctgtgtttgtggtgatcctcttcatcggcatcctcttcatcatcctgaggaagaggcagggcagcagaggagccatgggccactacgtgctggccgagcgggagtag

SEQ ID NO: 237763 - DNA, 366 bp, Artificial Sequence
  derived and/or modified sequence
atggagaaccacaaccacagcaaggagagccacaccctgcaggtgatcctgggctgtgagatgcaggaggacaacagcacagagggctactggaagtatggctatgatggccaggaccacctggagttctgcccagacaccctggactggagggctgctgagccccgggcctggcccaccaagctggagtgggagcggcacaagatccgggcccggcagaacagagcctacctggagcgggactgcccagcccagctgcagcagctgctggagctgggccggggcgtgctggaccagcaggtgccccccctggtgaaggtgacccaccacgtgagccacccagcccagcccagcaaggagagctag

SEQ ID NO: 237764 - DNA, 978 bp, Artificial Sequence
  derived and/or modified sequence
atgggcccccgggcccggcccgccctgctgctgctgatgctgctgcagaccgctgtcctccagggtaggcttctgcccctcggatatgtggacgaccaactgttcgtgttctatgaccacgagtccagacgcgtagagccaaggacaccctgggtgagctctcgtattagcagtcagatgtggctgcaactgtcccaatccctgaagggatgggatcatatgtttacagtggatttttggactatcatggagaatcataaccacagtaaagagagccacaccttgcaggtcatattgggatgtgaaatgcaagaagacaattccacagaggggtactggaagtatggctatgatggccaggatcacctggagttctgtcccgacacactggattggcgggctgcagagcctagagcctggcctactaagctcgaatgggagcgtcataagatcagggcacgccagaaccgcgcctatctggaacgcgattgcccagcacaactccagcagctcctagaactgggacggggtgtcctggaccaacaagttcctccccttgtgaaagtgactcaccacgttacatcctccgtcaccacactccgttgcagggccttgaattactacccccagaacatcaccatgaagtggttgaaggacaagcagcccatggatgcaaaggaattcgagccaaaagatgtgctccctaacggggacggaacttaccaaggatggatcacactcgcagtgccccccggcgaagagcaacgctatacatgccaggttgaacatcccggattggaccagcccctcattgtgatttgggaaccttctccatcagggacactcgtcataggcgttattagtggaattgccgtgttcgtcgtgatcttgtttattgggattttgttcattattctgcggaagcgacaggggtctcggggcgccatggggcattacgtgctggccgaaagagaatag

SEQ ID NO: 237765 - DNA, 366 bp, Artificial Sequence
  derived and/or modified sequence
atggagaaccacaaccacagcaaggagagccacaccctgcaggtgatactgggttgcgagatgcaggaggacaacagtacagaggggtactggaagtacggatacgacgggcaagatcatttagaattctgccccgatactctggactggcgggccgcagaacctcgcgcttggccaaccaagctggagtgggagaggcacaaaatccgcgcccggcagaaccgtgcgtacctcgaacgagactgcccagctcagctgcagcagctcttggagctcggtaggggcgtgctcgaccagcaggtgcctcccttggttaaggttacgcatcacgtgagccatccagcccagccctcgaaggaaagctag

SEQ ID NO: 237766 - DNA, 1280 bp, Artificial Sequence
  derived and/or modified sequence
ctaaagttctgaaagacctgttgcttttcaccaggaagttttactgggcatctcctgagcctaggcaatagctgtagggtgacttctggagccatccccgtttccccgccccccaaaagaagcggagatttaacggggacgtgcggccagagctggggaaatgggcccgcgagccaggccggcgcttctcctcctgatgcttttgcagaccgcggtcctgcaggggcgcttgctgcctttgggctacgtggatgaccagctgttcgtgttctatgatcatgagagtcgccgtgtggagccccgaactccatgggtttccagtagaatttcaagccagatgtggctgcagctgagtcagagtctgaaagggtgggatcacatgttcactgttgacttctggactattatggaaaatcacaaccacagcaaggagtcccacaccctgcaggtcatcctgggctgtgaaatgcaagaagacaacagtaccgagggctactggaagtacgggtatgatgggcaggaccaccttgaattctgccctgacacactggattggagagcagcagaacccagggcctggcccaccaagctggagtgggaaaggcacaagattcgggccaggcagaacagggcctacctggagagggactgccctgcacagctgcagcagttgctggagctggggagaggtgttttggaccaacaagtgcctcctttggtgaaggtgacacatcatgtgacctcttcagtgaccactctacggtgtcgggccttgaactactacccccagaacatcaccatgaagtggctgaaggataagcagccaatggatgccaaggagttcgaacctaaagacgtattgcccaatggggatgggacctaccagggctggataaccttggctgtaccccctggggaagagcagagatatacgtgccaggtggagcacccaggcctggatcagcccctcattgtgatctgggagccctcaccgtctggcaccctagtcattggagtcatcagtggaattgctgtttttgtcgtcatcttgttcattggaattttgttcataatattaaggaagaggcagggttcaagaggagccatggggcactacgtcttagctgaacgtgagtgacacgcagcctgcagactcactgtgggaaggagacaaaactagagactcaaagagggagtgcatttatgagctcttcatgtttcaggagagagttgaacctaaacatagaaattgcctgacgaactccttgattttagccttc

SEQ ID NO: 237767 - DNA, 978 bp, Artificial Sequence
  derived and/or modified sequence
atgggcccacgggcacggcctgctctgctgctgctgatgctgctgcagaccgcggtgctccaaggcaggctgctgcctctcggttacgtggacgatcaactgtttgtgttctatgaccacgagtcgaggcgggtggagcccaggaccccatgggtttcaagcaggatcagcagccaaatgtggctccaattgagccagtcgctaaaaggatgggaccacatgtttacagtagatttttggacaataatggaaaaccacaaccattctaaggagagccataccttgcaggtgattctcggctgcgaaatgcaggaggacaactccacagaagggtactggaagtatggttatgacggccaagaccacttggagttctgcccagatacccttgattggagggctgcagagccaagagcctggccaaccaaactcgagtgggaaaggcacaaaatacgagccagacagaaccgagcgtacttagagcgggactgtcccgcacagctgcagcagctgttggagctgggcaggggtgtgctggaccagcaagttcctcccttagtgaaagttacccatcacgtgacaagttcggtgactactctacggtgtcgggctctgaattactatccccagaatatcaccatgaagtggttaaaagacaaacagccaatggacgctaaggaatttgaacccaaagatgtcctgccaaacggagacggaacttaccaaggatggattacgttggcagtgcccccaggggaggagcagcgttatacctgccaagttgaacaccctggccttgaccagcctttaattgtcatctgggagccaagcccatctggaaccttggtgatcggcgttatctccgggatcgccgtgtttgtggtaatcctgttcattggtatcttatttatcatcctgagaaagcgtcagggctctcgaggcgcaatgggacattacgttctggcagagcgcgagtag

SEQ ID NO: 237768 - DNA, 366 bp, Artificial Sequence
  derived and/or modified sequence
atggaaaatcacaaccacagcaaagaaagccataccctgcaggttattttgggatgtgaaatgcaagaggacaacagcacggaggggtactggaagtatggttacgacggccaggatcacctcgaattttgtcctgatacgctggactggcgagcagctgagccacgcgcatggcctaccaaactcgagtgggagcgtcataaaatcagagctagacaaaacagggcttatctcgaacgtgactgccccgcacagttgcaacagctgttagagctgggcagaggcgtactcgatcagcaggtaccaccactggtaaaggtgacccaccatgttagccatccggctcagccctccaaagagagctag

SEQ ID NO: 237769 - protein, 168 aa, Artificial Sequence
  derived and/or modified sequence
MGPRARPALLLLMLLQTAVLQGRLLLPPLVKVTHHVTSSVTTLRCRALNYYPQNITMKWLKDKQPMDAKEFEPKDVLPNGDGTYQGWITLAVPPGEEQRYTCQVEHPGLDQPLIVIWEPSPSGTLVIGVISGIAVFVVILFIGILFIILRKRQGSRGAMGHYVLAERE

SEQ ID NO: 237770 - DNA, 507 bp, Artificial Sequence
  derived and/or modified sequence
atgggccccagagccagacccgccctgctgctgctgatgctgctgcagaccgccgtgctgcagggcagactgctgctgccccccctggtgaaggtgacccaccacgtgaccagcagcgtgaccaccctgagatgcagagccctgaactactacccccagaacatcaccatgaagtggctgaaggacaagcagcccatggacgccaaggagttcgagcccaaggacgtgctgcccaacggcgacggcacctaccagggctggatcaccctggccgtgccccccggcgaggagcagagatacacctgccaggtggagcaccccggcctggaccagcccctgatcgtgatctgggagcccagccccagcggcaccctggtgatcggcgtgatcagcggcatcgccgtgttcgtggtgatcctgttcatcggcatcctgttcatcatcctgagaaagagacagggcagcagaggcgccatgggccactacgtgctggccgagagagagtag

SEQ ID NO: 237771 - DNA, 507 bp, Artificial Sequence
  derived and/or modified sequence
atgggtcctagggctagacctgccctcctgctgctaatgctgctccaaacggccgttctacaaggtcgactcctgctcccaccccttgtgaaggtgacccatcacgttaccagttccgttacaactctgagatgtcgcgccttgaattactacccacagaatattaccatgaagtggcttaaggacaagcaacctatggatgctaaggaatttgagccaaaagacgtcctgcccaacggagacggtacatatcagggctggattacacttgcagtgccccccggcgaagagcagcggtacacctgtcaggtggagcatcctgggctcgatcaaccactcatcgtgatctgggaacctagcccctcaggcactcttgtcattggagttataagcgggattgcagtgttcgttgtgatcctatttatcggaatactctttattatactacggaaaaggcaaggtagcagaggagccatgggacactacgtgctggcggagagagaatag

SEQ ID NO: 237772 - DNA, 507 bp, Artificial Sequence
  derived and/or modified sequence
atgggcccccgggcccggcctgccctgctgctgctgatgctgctgcagacagctgtgctgcagggccgcctgctgctgccccccctggtgaaggtgacccaccacgtgaccagctctgtgaccaccctgcgctgccgggccctgaactactacccccagaacatcaccatgaagtggctgaaggacaagcagcccatggatgccaaggagtttgagcccaaggatgtgctgcccaatggagatggcacctaccagggctggatcaccctggccgtgcccccaggagaggagcagcgctacacctgccaggtggagcaccctggcctggaccagcccctcatcgtcatctgggagcccagccccagcggcaccctggtgattggagtcatctctggaattgctgtgtttgtggtgatcctcttcatcggcatcctcttcatcatcctgaggaagaggcagggcagcagaggagccatgggccactacgtgctggccgagcgggagtag

SEQ ID NO: 237773 - DNA, 507 bp, Artificial Sequence
  derived and/or modified sequence
atgggcccccgggcccggcccgccctgctgctgctgatgctgctgcagacggctgtgctccagggccggctgcttctgccacctcttgtaaaagtgacccatcacgtcacctcctcggtcaccaccctccgctgccgagcattgaactattacccacagaacattaccatgaagtggctgaaggataagcagccaatggacgctaaagagttcgaacctaaagatgttctaccaaatggagacggcacctaccagggttggatcacattggccgtgccaccaggagaagaacaaaggtacacctgtcaggtagaacacccagggctggaccagcctctgattgtcatttgggaaccgtctcccagcggcacactcgtcatcggcgtgataagtggtatcgctgtgttcgtggtgattctgttcattggcatcttgtttattatcctgagaaaaaggcagggcagccgcggagccatgggacactacgtgctggctgagagggaatag

SEQ ID NO: 237774 - DNA, 809 bp, Artificial Sequence
  derived and/or modified sequence
ctaaagttctgaaagacctgttgcttttcaccaggaagttttactgggcatctcctgagcctaggcaatagctgtagggtgacttctggagccatccccgtttccccgccccccaaaagaagcggagatttaacggggacgtgcggccagagctggggaaatgggcccgcgagccaggccggcgcttctcctcctgatgcttttgcagaccgcggtcctgcaggggcgcttgctgctgcctcctttggtgaaggtgacacatcatgtgacctcttcagtgaccactctacggtgtcgggccttgaactactacccccagaacatcaccatgaagtggctgaaggataagcagccaatggatgccaaggagttcgaacctaaagacgtattgcccaatggggatgggacctaccagggctggataaccttggctgtaccccctggggaagagcagagatatacgtgccaggtggagcacccaggcctggatcagcccctcattgtgatctgggagccctcaccgtctggcaccctagtcattggagtcatcagtggaattgctgtttttgtcgtcatcttgttcattggaattttgttcataatattaaggaagaggcagggttcaagaggagccatggggcactacgtcttagctgaacgtgagtgacacgcagcctgcagactcactgtgggaaggagacaaaactagagactcaaagagggagtgcatttatgagctcttcatgtttcaggagagagttgaacctaaacatagaaattgcctgacgaactccttgattttagccttc

SEQ ID NO: 237775 - DNA, 507 bp, Artificial Sequence
  derived and/or modified sequence
atggggccacgagctaggcctgcgcttctgctgttaatgctgctgcaaaccgccgtgttacaaggcaggttgttgcttcctccactcgtaaaagtgacgcaccacgtgacctcaagtgtgacgacgttgcgctgccgggctctcaactattacccccaaaacatcaccatgaagtggcttaaggataagcagcctatggacgcgaaggagtttgagcctaaagacgtgctccctaacggggatggaacctaccaggggtggatcacgttggccgtgccgcctggtgaggaacagcgctacacttgtcaggtagagcatccaggactggaccagcccctcatcgttatttgggagccttcacccagcggcaccctcgtgatcggggtcatttctgggattgccgtgttcgtggtgatcctcttcatcggcattctattcattattctgaggaagagacagggaagtagaggggctatgggccattatgtgttggccgagcgcgaatag

SEQ ID NO: 237776 - protein, 76 aa, Artificial Sequence
  derived and/or modified sequence
MGPRARPALLLLMLLQTAVLQGRLLQPSPSGTLVIGVISGIAVFVVILFIGILFIILRKRQGSRGAMGHYVLAERE

SEQ ID NO: 237777 - DNA, 231 bp, Artificial Sequence
  derived and/or modified sequence
atgggccccagagccagacccgccctgctgctgctgatgctgctgcagaccgccgtgctgcagggcagactgctgcagcccagccccagcggcaccctggtgatcggcgtgatcagcggcatcgccgtgttcgtggtgatcctgttcatcggcatcctgttcatcatcctgagaaagagacagggcagcagaggcgccatgggccactacgtgctggccgagagagagtag

SEQ ID NO: 237778 - DNA, 231 bp, Artificial Sequence
  derived and/or modified sequence
atgggcccaagagcccggccagccctgctgcttcttatgttattgcaaaccgccgtgctccagggaaggctgctccagccctcaccttccggcactctggtgatcggggtgatttccggtattgccgtgttcgtggtaatactgttcataggtattctgttcattatactccgcaaacggcaagggtcgcggggagctatgggccattacgtgttagccgaacgagaatag

SEQ ID NO: 237779 - DNA, 231 bp, Artificial Sequence
  derived and/or modified sequence
atgggcccccgggcccggcctgccctgctgctgctgatgctgctgcagacagctgtgctgcagggccgcctgctgcagcccagccccagcggcaccctggtgattggagtcatctctggaattgctgtgtttgtggtgatcctcttcatcggcatcctcttcatcatcctgaggaagaggcagggcagcagaggagccatgggccactacgtgctggccgagcgggagtag

SEQ ID NO: 237780 - DNA, 231 bp, Artificial Sequence
  derived and/or modified sequence
atgggcccccgggcccggcccgccctgctgctgctgatgctgctgcagaccgcagttttgcagggtagactgttgcagccctccccttcgggcacattggtgatcggtgtcatcagtggcatcgccgtgttcgtagtgatattattcatcggaatcctgttcataatactgaggaagcgtcagggctcccgcggggcaatgggtcattacgtattagctgaacgcgaatag

SEQ ID NO: 237781 - DNA, 653 bp, Artificial Sequence
  derived and/or modified sequence
ctaaagttctgaaagacctgttgcttttcaccaggaagttttactgggcatctcctgagcctaggcaatagctgtagggtgacttctggagccatccccgtttccccgccccccaaaagaagcggagatttaacggggacgtgcggccagagctggggaaatgggcccgcgagccaggccggcgcttctcctcctgatgcttttgcagaccgcggtcctgcaggggcgcttgctgcagccctcaccgtctggcaccctagtcattggagtcatcagtggaattgctgtttttgtcgtcatcttgttcattggaattttgttcataatattaaggaagaggcagggttcaagaggagccatggggcactacgtcttagctgaacgtgagtgacacgcagcctgcagactcactgtgggaaggagacaaaactagagactcaaagagggagtgcatttatgagctcttcatgtttcaggagagagttgaacctaaacatagaaattgcctgacgaactccttgattttagccttctctgttcatttcctcaaaaagatttccccatttaggtttctgagttcctgcatgccggtgatccctagctgtgacctctcccctggaactgtctctcatgaacctcaagctgcatctaga

SEQ ID NO: 237782 - DNA, 231 bp, Artificial Sequence
  derived and/or modified sequence
atgggcccacgtgccaggcctgcattactcctgctaatgttgctccaaactgcagtgctgcaaggaaggcttcttcaaccatcaccaagcggaacactggtcattggagtaatctctggaattgcggtcttcgttgtgatcctcttcatcgggatcctgtttattatcttacgcaaacgtcagggaagtaggggggcaatgggtcactacgtcttggcggaacgggagtag

SEQ ID NO: 237783 - protein, 360 aa, Artificial Sequence
  derived and/or modified sequence
MSQERPTFYRQELNKTIWEVPERYQNLSPVGSGAYGSVCAAFDTKTGLRVAVKKLSRPFQSIIHAKRTYRELRLLKHMKHENVIGLLDVFTPARSLEEFNDVYLVTHLMGADLNNIVKCQKLTDDHVQFLIYQILRGLKYIHSADIIHRDLKPSNLAVNEDCELKILDFGLARHTDDEMTGYVATRWYRAPEIMLNWMHYNQTVDIWSVGCIMAELLTGRTLFPGTDHIDQLKLILRLVGTPGAELLKKISSESARNYIQSLTQMPKMNFANVFIGANPLAVDLLEKMLVLDSDKRITAAQALAHAYFAQYHDPDDEPVADPYDQSFESRDLLIDEWKSLTYDEVISFVPPPLDQEEMES

SEQ ID NO: 237784 - DNA, 1083 bp, Artificial Sequence
  derived and/or modified sequence
atgagccaggagagacccaccttctacagacaggagctgaacaagaccatctgggaggtgcccgagagataccagaacctgagccccgtgggcagcggcgcctacggcagcgtgtgcgccgccttcgacaccaagaccggcctgagagtggccgtgaagaagctgagcagacccttccagagcatcatccacgccaagagaacctacagagagctgagactgctgaagcacatgaagcacgagaacgtgatcggcctgctggacgtgttcacccccgccagaagcctggaggagttcaacgacgtgtacctggtgacccacctgatgggcgccgacctgaacaacatcgtgaagtgccagaagctgaccgacgaccacgtgcagttcctgatctaccagatcctgagaggcctgaagtacatccacagcgccgacatcatccacagagacctgaagcccagcaacctggccgtgaacgaggactgcgagctgaagatcctggacttcggcctggccagacacaccgacgacgagatgaccggctacgtggccaccagatggtacagagcccccgagatcatgctgaactggatgcactacaaccagaccgtggacatctggagcgtgggctgcatcatggccgagctgctgaccggcagaaccctgttccccggcaccgaccacatcgaccagctgaagctgatcctgagactggtgggcacccccggcgccgagctgctgaagaagatcagcagcgagagcgccagaaactacatccagagcctgacccagatgcccaagatgaacttcgccaacgtgttcatcggcgccaaccccctggccgtggacctgctggagaagatgctggtgctggacagcgacaagagaatcaccgccgcccaggccctggcccacgcctacttcgcccagtaccacgaccccgacgacgagcccgtggccgacccctacgaccagagcttcgagagcagagacctgctgatcgacgagtggaagagcctgacctacgacgaggtgatcagcttcgtgcccccccccctggaccaggaggagatggagagctag

SEQ ID NO: 237785 - DNA, 1083 bp, Artificial Sequence
  derived and/or modified sequence
atgtcacaggaacggccaactttttatcgccaggagctgaataagacaatctgggaagtaccggagagataccagaatttatcaccagttggctccggtgcttacgggtcagtgtgtgctgctttcgacactaagactggcttgcgtgttgccgtcaagaaactcagtaggccgttccagagcattatccacgctaagcggacataccgagagctgaggctgctgaaacacatgaagcatgaaaatgtgattggcctattagacgtgtttacgccggcccgcagcctggaggagttcaacgatgtttaccttgttacccacctgatgggagccgacttgaataacatcgtgaagtgccagaaactcacagacgaccatgtgcaattcctgatctaccagatactgaggggcttaaaatatattcattctgctgatatcatccaccgggatttaaagccatcaaacctggctgtcaacgaagactgcgaactcaagatcctcgatttcggactggcacgacatactgatgatgaaatgaccggctatgtggcgacgcgttggtaccgggctcctgagattatgctcaattggatgcattacaaccagactgtcgatatttggagcgtcggttgtatcatggccgaacttctgacaggaagaacactcttcccgggcaccgatcatattgaccagctgaaattgattcttcgcctggttggtaccccaggcgctgaactattgaagaaaatctcttctgagagcgcgagaaattatattcagtccctcacacagatgccgaagatgaacttcgctaacgtgttcatcggcgcgaaccccctagccgtggacttactggaaaaaatgctagtacttgactcagacaagagaatcacagccgctcaagctctggcacatgcctactttgcgcagtaccatgatcccgacgacgagcccgtggcagatccttatgatcagtcattcgaatctagggacttgcttattgatgaatggaagagcctcacttacgacgaagtcatttcttttgttcctcctccactggaccaggaggaaatggaaagctag

SEQ ID NO: 237786 - DNA, 1083 bp, Artificial Sequence
  derived and/or modified sequence
atgagccaggagcggcccaccttctaccggcaggagctgaacaagaccatctgggaggtgcctgagcgctaccagaacctgagccctgtgggcagcggggcctacggctctgtgtgtgccgcctttgacaccaagacaggcctgcgggtggccgtgaagaagctgagccggcccttccagagcatcatccacgccaagaggacctaccgggagctgcggctgctgaagcacatgaagcatgaaaatgtcatcggcctgctggatgtgttcaccccagcccggagcctggaggagttcaatgatgtgtacctggtgacccacctgatgggcgctgacctgaacaacatcgtgaagtgccagaagctgacagatgaccacgtgcagttcctgatctaccagatcctgcggggcctgaagtacatccacagcgctgacatcatccaccgggacctgaagcccagcaacctggccgtgaatgaagactgtgagctgaagatcctggactttggcctggcccggcacacagatgatgagatgacaggctacgtggccacccgctggtaccgggcccctgagatcatgctgaactggatgcactacaaccagacagtggacatctggagcgtgggctgcatcatggccgagctgctgaccggccgcaccctcttccctggaacagaccacatcgaccagctgaagctgatcctgcggctggtgggcaccccaggagctgagctgctgaagaagatcagcagcgagagcgccaggaactacatccagagcctgacccagatgcccaagatgaactttgccaacgtgttcatcggggccaaccccctggccgtggacctgctggagaagatgctggtgctggacagcgacaagaggatcacagctgcccaggccctggcccacgcctactttgcccagtaccatgaccctgatgatgagcctgtggccgacccctatgaccagagctttgagagccgggacctgctgattgatgagtggaagagcctgacctatgatgaagtcatcagctttgtgcccccacccctggaccaggaggagatggagagctag

SEQ ID NO: 237787 - DNA, 1083 bp, Artificial Sequence
  derived and/or modified sequence
atgagccaggagcggcccaccttctaccggcaggagctgaacaagaccatatgggaagttccagaacggtaccagaacctttcccctgtcggttctggcgcttacggcagcgtttgtgcagcgttcgacactaagacgggcctgagagttgcagtgaaaaagctgtcccgcccttttcagtccataatccacgccaagaggacttatagagaactgagactattgaaacacatgaagcacgaaaacgttatcgggctgctggacgtgtttaccccagccagatctctggaagagttcaatgatgtgtacctggtgacacacctgatgggcgcagatctcaacaatattgtgaagtgtcagaagctgaccgacgaccatgtacagtttctcatctaccagatcttacgagggttgaagtatatccactccgcagatatcattcacagagatctcaagccttcaaatctggccgtgaatgaagattgcgagctcaaaatcctggattttggcctcgccaggcatacggacgacgaaatgactgggtacgtagccaccaggtggtaccgcgcaccagagatcatgctgaattggatgcactataaccagaccgtggacatctggtctgtaggctgcattatggccgaattactgacggggagaactttattcccaggaaccgaccatattgaccagctcaaactgatcttgagactggtaggtacacccggcgcggaattactgaaaaaaatttcaagcgaaagtgcccggaattacatccagagcctcactcagatgcctaagatgaactttgcaaacgtcttcatcggtgctaatccactagctgtggacctgttggagaaaatgcttgttctagactccgataaacgcatcaccgccgcacaggccctcgcgcatgcttactttgctcaatatcacgacccagatgacgaaccagtggctgacccatatgatcagtccttcgagagccgagatctgctcattgatgagtggaagagcctcacttatgatgaagtcatctcattcgtccctcctccactggatcaggaggagatggagtcgtag

SEQ ID NO: 237788 - DNA, 3779 bp, Artificial Sequence
  derived and/or modified sequence
cgggaggctcccgtttgctggctcttggaaccgcgaccactggagccttagcgggcgcagcagctggaacgggagtactgcgacgcagcccggagtcggccttgtaggggcgaaggtgcagggagatcgcggcgggcgcagtcttgagcgccggagcgcgtccctgcccttagcggggcttgccccagtcgcaggggcacatccagccgctgcggctgacagcagccgcgcgcgcgggagtctgcggggtcgcggcagccgcacctgcgcgggcgaccagcgcaaggtccccgcccggctgggcgggcagcaagggccggggagagggtgcgggtgcaggcgggggccccacagggccaccttcttgcccggcggctgccgctggaaaatgtctcaggagaggcccacgttctaccggcaggagctgaacaagacaatctgggaggtgcccgagcgttaccagaacctgtctccagtgggctctggcgcctatggctctgtgtgtgctgcttttgacacaaaaacggggttacgtgtggcagtgaagaagctctccagaccatttcagtccatcattcatgcgaaaagaacctacagagaactgcggttacttaaacatatgaaacatgaaaatgtgattggtctgttggacgtttttacacctgcaaggtctctggaggaattcaatgatgtgtatctggtgacccatctcatgggggcagatctgaacaacattgtgaaatgtcagaagcttacagatgaccatgttcagttccttatctaccaaattctccgaggtctaaagtatatacattcagctgacataattcacagggacctaaaacctagtaatctagctgtgaatgaagactgtgagctgaagattctggattttggactggctcggcacacagatgatgaaatgacaggctacgtggccactaggtggtacagggctcctgagatcatgctgaactggatgcattacaaccagacagttgatatttggtcagtgggatgcataatggccgagctgttgactggaagaacattgtttcctggtacagaccatattgatcagttgaagctcattttaagactcgttggaaccccaggggctgagcttttgaagaaaatctcctcagagtctgcaagaaactatattcagtctttgactcagatgccgaagatgaactttgcgaatgtatttattggtgccaatcccctggctgtcgacttgctggagaagatgcttgtattggactcagataagagaattacagcggcccaagcccttgcacatgcctactttgctcagtaccacgatcctgatgatgaaccagtggccgatccttatgatcagtcctttgaaagcagggacctccttatagatgagtggaaaagcctgacctatgatgaagtcatcagctttgtgccaccaccccttgaccaagaagagatggagtcctgagcacctggtttctgttctgttgatcccacttcactgtgaggggaaggccttttcacgggaactctccaaatattattcaagtgcctcttgttgcagagatttcctccatggtggaagggggtgtgcgtgcgtgtgcgtgcgtgttagtgtgtgtgcatgtgtgtgtctgtctttgtgggagggtaagacaatatgaacaaactatgatcacagtgactttacaggaggttgtggatgctccagggcagcctccaccttgctcttctttctgagagttggctcaggcagacaagagctgctgtccttttaggaatatgttcaatgcaaagtaaaaaaatatgaattgtccccaatcccggtcatgcttttgccactttggcttctcctgtgaccccaccttgacggtggggcgtagacttgacaacatcccacagtggcacggagagaaggcccataccttctggttgcttcagacctgacaccgtccctcagtgatacgtacagccaaaaaggaccaactggcttctgtgcactagcctgtgattaacttgcttagtatggttctcagatcttgacagtatatttgaaactgtaaatatgtttgtgccttaaaaggagagaagaaagtgtagatagttaaaagactgcagctgctgaagttctgagccgggcaagtcgagagggctgttggacagctgcttgtgggcccggagtaatcaggcagccttcataggcggtcatgtgtgcatgtgagcacatgcgtatatgtgcgtctctctttctccctcacccccaggtgttgccatttctctgcttacccttcacctttggtgcagaggtttcttgaatatctgccccagtagtcagaagcaggttcttgatgtcatgtacttcctgtgtactctttatttctagcagagtgaggatgtgttttgcacgtcttgctatttgagcatgcacagctgcttgtcctgctctcttcaggaggccctggtgtcaggcaggtttgccagtgaagacttcttgggtagtttagatcccatgtcacctcagctgatattatggcaagtgatatcacctctcttcagcccctagtgctattctgtgttgaacacaattgatacttcaggtgcttttgatgtgaaaatcatgaaaagaggaacaggtggatgtatagcatttttattcatgccatctgttttcaaccaactatttttgaggaattatcatgggaaaagaccagggcttttcccaggaatatcccaaacttcggaaacaagttattctcttcactcccaataactaatgctaagaaatgctgaaaatcaaagtaaaaaattaaagcccataaggccagaaactccttttgctgtctttctctaaatatgattactttaaaataaaaaagtaacaaggtgtcttttccactcctatggaaaagggtcttcttggcagcttaacattgacttcttggtttggggagaaataaattttgtttcagaattttgtatattgtaggaatcctttgagaatgtgattccttttgatggggagaaagggcaaattattttaatattttgtattttcaactttataaagataaaatatcctcaggggtggagaagtgtcgttttcataacttgctgaatttcaggcattttgttctacatgaggactcatatatttaagccttttgtgtaataagaaagtataaagtcacttccagtgttggctgtgtgacagaatcttgtatttgggccaaggtgtttccatttctcaatcagtgcagtgatacatgtactccagagggacagggtggaccccctgagtcaactggagcaagaaggaaggaggcagactgatggcgattccctctcacccgggactctccccctttcaaggaaagtgaacctttaaagtaaaggcctcatctcctttattgcagttcaaatcctcaccatccacagcaagatgaattttatcagccatgtttggttgtaaatgctcgtgtgatttcctacagaaatactgctctgaatattttgtaataaaggtctttgcacatgtgaccacatacgtgttaggaggctgcatgctctggaagcctggactctaagctggagctcttggaagagctcttcggtttctgagcataatgctcccatctcctgatttctctgaacagaaaacaaaagagagaatgagggaaattgctattttatttgtattcatgaacttggctgtaatcagttatgccgtataggatgtcagacaataccactggttaaaataaagcctatttttcaaa

SEQ ID NO: 237789 - DNA, 1376 bp, Artificial Sequence
  derived and/or modified sequence
gtttgctggctcttggaaccgcgaccactggagccttagcgggcgcagcagctggaacgggagtactgcgacgcagcccggagtcggccttgtaggggcgaaggagctgaacaagacaatctgggaggtgcccgagcgttaccagaacctgtctccagtgggctctggcgcctatggctctgtgtgtgctgcttttgacacaaaaacggggttacgtgtggcagtgaagaagctctccagaccatttcagtccatcattcatgcgaaaagaacctacagagaactgcggttacttaaacatatgaaacatgaaaatgtgattggtctgttggacgtttttacacctgcaaggtctctggaggaattcaatgatgtgtatctggtgacccatctcatgggggcagatctgaacaacattgtgaaatgtcagaagcttacagatgaccatgttcagttccttatctaccaaattctccgaggtctaaagtatatacattcagctgacataattcacagggacctaaaacctagtaatctagctgtgaatgaagactgtgagctgaagattctggattttggactggctcggcacacagatgatgaaatgacaggctacgtggccactaggtggtacagggctcctgagatcatgctgaactggatgcattacaaccagacagttgatatttggtcagtgggatgcataatggccgagctgttgactggaagaacattgtttcctggtacagaccatattgatcagttgaagctcattttaagactcgttggaaccccaggggctgagcttttgaagaaaatctcctcagagtctgcaagaaactatattcagtctttgactcagatgccgaagatgaactttgcgaatgtatttattggtgccaatcccctggctgtcgacttgctggagaagatgcttgtattggactcagataagagaattacagcggcccaagcccttgcacatgcctactttgctcagtaccacgatcctgatgatgaaccagtggccgatccttatgatcagtcctttgaaagcagggacctccttatagatgagtggaaaagcctgacctatgatgaagtcatcagctttgtgccaccaccccttgaccaagaagagatggagtcctgagcacctggtttctgttctgttgatcccacttcactgtgaggggaaggccttttcacgggaactctccaaatattattcaagtgcctcttgttgcagagatttcctccatggtggaagggggtgtgcgtgcgtgtgcgtgcgtgttagtgtgtgtgcatgtgtgtgtctgtctttgtgggagggtaagacaatatgaacaaactatgatcacagtgactttaca

SEQ ID NO: 237790 - DNA, 1083 bp, Artificial Sequence
  derived and/or modified sequence
atgtctcaggagagaccaacattctacagacaggaactgaataagaccatctgggaagtccccgaacgttaccagaatttaagtcccgtgggctccggcgcatatgggagtgtgtgtgccgctttcgatactaagacaggccttcgcgttgccgtgaaaaagctttccagaccattccaatctatcatacacgctaaacgcacttacagggagctgcgcctcctgaaacatatgaaacacgagaacgttatcgggctgctggacgtcttcaccccggctagaagtctggaggagtttaacgacgtttatcttgttacccacttaatgggggctgatctgaataatattgttaagtgccaaaagcttactgacgaccacgtacaattccttatctatcagatcctgaggggtctgaaatatatacacagcgcagacatcattcaccgggacctgaagccctccaatctggctgtcaatgaagattgtgagctgaaaattcttgatttcggcctggctcggcataccgacgatgaaatgactggctacgtggccacacggtggtacagagctccggagattatgctgaactggatgcactacaaccagactgtcgacatctggtccgttgggtgcattatggctgaactgctgactggacgcactttatttcccggtaccgatcatattgatcagctgaaactgattctgaggctcgtgggtaccccgggtgccgaactgcttaaaaaaatcagttctgagtcagcacgaaactatatccagagcctcactcagatgccaaaaatgaattttgctaatgttttcattggagctaaccccctcgccgtggacttgttagaaaagatgctggttctcgatagtgacaagcgtattacagctgcccaggcattggctcacgcctatttcgcgcaatatcacgacccagacgatgagccagtggccgacccttatgaccaatcatttgaaagccgggaccttctgattgacgagtggaagtctttaacatatgatgaagtcatcagttttgtccctccacctctggatcaagaagagatggagtcgtag

SEQ ID NO: 237791 - protein, 307 aa, Artificial Sequence
  derived and/or modified sequence
MSQERPTFYRQELNKTIWEVPERYQNLSPVGSGAYGSVCAAFDTKTGLRVAVKKLSRPFQSIIHAKRTYRELRLLKHMKHENVIGLLDVFTPARSLEEFNDVYLVTHLMGADLNNIVKCQKLTDDHVQFLIYQILRGLKYIHSADIIHRDLKPSNLAVNEDCELKILDFGLARHTDDEMTGYVATRWYRAPEIMLNWMHYNQTVDIWSVGCIMAELLTGRTLFPGTDHIDQLKLILRLVGTPGAELLKKISSESLSTCWRRCLYWTQIRELQRPKPLHMPTLLSTTILMMNQWPILMISPLKAGTSL

SEQ ID NO: 237792 - DNA, 924 bp, Artificial Sequence
  derived and/or modified sequence
atgagccaggagagacccaccttctacagacaggagctgaacaagaccatctgggaggtgcccgagagataccagaacctgagccccgtgggcagcggcgcctacggcagcgtgtgcgccgccttcgacaccaagaccggcctgagagtggccgtgaagaagctgagcagacccttccagagcatcatccacgccaagagaacctacagagagctgagactgctgaagcacatgaagcacgagaacgtgatcggcctgctggacgtgttcacccccgccagaagcctggaggagttcaacgacgtgtacctggtgacccacctgatgggcgccgacctgaacaacatcgtgaagtgccagaagctgaccgacgaccacgtgcagttcctgatctaccagatcctgagaggcctgaagtacatccacagcgccgacatcatccacagagacctgaagcccagcaacctggccgtgaacgaggactgcgagctgaagatcctggacttcggcctggccagacacaccgacgacgagatgaccggctacgtggccaccagatggtacagagcccccgagatcatgctgaactggatgcactacaaccagaccgtggacatctggagcgtgggctgcatcatggccgagctgctgaccggcagaaccctgttccccggcaccgaccacatcgaccagctgaagctgatcctgagactggtgggcacccccggcgccgagctgctgaagaagatcagcagcgagagcctgagcacctgctggagaagatgcctgtactggacccagatcagagagctgcagagacccaagcccctgcacatgcccaccctgctgagcaccaccatcctgatgatgaaccagtggcccatcctgatgatcagccccctgaaggccggcaccagcctgtag

SEQ ID NO: 237793 - DNA, 924 bp, Artificial Sequence
  derived and/or modified sequence
atgtctcaggagaggcccaccttttaccggcaagaactgaacaagacgatctgggaagtcccagagcgttaccagaacttgagtcctgtgggatcgggcgcctatggcagcgtgtgcgctgcctttgacactaagacggggttaagggtagcagtcaagaaactgtcaagaccgttccagtccatcattcatgccaagagaacctacagagagctccgcctcctgaagcacatgaagcatgagaacgttatcggcctcctggatgtgttcacgccagcccgatccttagaggagtttaacgatgtgtacttggtaacacacctgatgggagccgatttgaacaatatcgtaaagtgccagaaactcactgacgatcatgtgcagtttttgatttatcaaatcttacgaggccttaagtatatccacagtgctgatatcatccatagagatctgaagcctagcaatctcgccgtaaatgaggactgtgaacttaaaattctggatttcggactggcacgtcatactgatgatgaaatgacggggtacgtggctacacgctggtaccgtgctcccgagatcatgcttaactggatgcactataaccaaacggtggacatctggtctgtggggtgtattatggctgagttactaacaggccggacccttttccccggcactgatcatatcgaccaacttaagctgatcctgaggctcgtgggaacccctggagcggaactgctcaagaaaataagttctgagtcacttagcacctgctggcggcggtgcctctattggacgcagatccgcgagctgcagcggccaaagcccctgcatatgccgacactgctgtcaacaaccatccttatgatgaaccagtggcctatcttaatgatcagccccctgaaggctgggacatccctctag

SEQ ID NO: 237794 - DNA, 924 bp, Artificial Sequence
  derived and/or modified sequence
atgagccaggagcggcccaccttctaccggcaggagctgaacaagaccatctgggaggtgcctgagcgctaccagaacctgagccctgtgggcagcggggcctacggctctgtgtgtgccgcctttgacaccaagacaggcctgcgggtggccgtgaagaagctgagccggcccttccagagcatcatccacgccaagaggacctaccgggagctgcggctgctgaagcacatgaagcatgaaaatgtcatcggcctgctggatgtgttcaccccagcccggagcctggaggagttcaatgatgtgtacctggtgacccacctgatgggcgctgacctgaacaacatcgtgaagtgccagaagctgacagatgaccacgtgcagttcctgatctaccagatcctgcggggcctgaagtacatccacagcgctgacatcatccaccgggacctgaagcccagcaacctggccgtgaatgaagactgtgagctgaagatcctggactttggcctggcccggcacacagatgatgagatgacaggctacgtggccacccgctggtaccgggcccctgagatcatgctgaactggatgcactacaaccagacagtggacatctggagcgtgggctgcatcatggccgagctgctgaccggccgcaccctcttccctggaacagaccacatcgaccagctgaagctgatcctgcggctggtgggcaccccaggagctgagctgctgaagaagatcagcagcgagagcctgagcacctgctggaggcgctgcctgtactggacccagatccgggagctgcagaggcccaagcccctgcacatgcccaccctgctgagcaccaccatcctgatgatgaaccagtggcccatcctgatgatcagccccctgaaggccggcaccagcctgtag

SEQ ID NO: 237795 - DNA, 924 bp, Artificial Sequence
  derived and/or modified sequence
atgagccaggagcggcccaccttctaccggcaggagctgaacaagacgatctgggaggtgcctgagagatatcagaacctttcgccagttggcagcggggcttacgggtcagtctgcgccgcttttgacacaaagaccggcctccgggtggctgtgaaaaagctgagtaggccatttcaatccatcatacacgcgaagcggacctaccgcgaactgcggctgttaaaacacatgaaacacgaaaacgtgattggtctgcttgatgtgtttactcctgcccgaagcctggaagaattcaacgatgtatatctagtcactcatttgatgggggcggacctcaacaatattgtaaaatgccagaagctgactgacgatcatgtacaatttttgatttaccaaatcctgcgggggctcaagtatattcattctgccgatataatccatcgcgatctgaagccctctaatttagccgtgaatgaggactgcgagctaaaaattctagattttggcctcgcccgccacaccgacgacgaaatgactggctacgttgctacacggtggtaccgggctcccgagattatgctgaattggatgcactacaatcagacggttgatatctggtcggttggctgcatcatggctgaattactgacagggagaactctgttccccggtactgatcatattgaccagcttaagctaattctgaggctggttggcaccccaggcgccgaactattgaagaaaatttcttccgagtcactgagtacttgctggcgcaggtgcctgtactggacccagatacgggagctgcagagaccgaagcctttgcacatgccaaccttactgagtacaacgatcctgatgatgaatcagtggcccattcttatgataagccctctgaaggcaggtacaagcctgtag

SEQ ID NO: 237796 - DNA, 1066 bp, Artificial Sequence
  derived and/or modified sequence
atgtctcaggagaggcccacgttctaccggcaggagctgaacaagacaatctgggaggtgcccgagcgttaccagaacctgtctccagtgggctctggcgcctatggctctgtgtgtgctgcttttgacacaaaaacggggttacgtgtggcagtgaagaagctctccagaccatttcagtccatcattcatgcgaaaagaacctacagagaactgcggttacttaaacatatgaaacatgaaaatgtgattggtctgttggacgtttttacacctgcaaggtctctggaggaattcaatgatgtgtatctggtgacccatctcatgggggcagatctgaacaacattgtgaaatgtcagaagcttacagatgaccatgttcagttccttatctaccaaattctccgaggtctaaagtatatacattcagctgacataattcacagggacctaaaacctagtaatctagctgtgaatgaagactgtgagctgaagattctggattttggactggctcggcacacagatgatgaaatgacaggctacgtggccactaggtggtacagggctcctgagatcatgctgaactggatgcattacaaccagacagttgatatttggtcagtgggatgcataatggccgagctgttgactggaagaacattgtttcctggtacagaccatattgatcagttgaagctcattttaagactcgttggaaccccaggggctgagcttttgaagaaaatctcctcagagtctctgtcgacttgctggagaagatgcttgtattggactcagataagagaattacagcggcccaagcccttgcacatgcctactttgctcagtaccacgatcctgatgatgaaccagtggccgatccttatgatcagtcctttgaaagcagggacctccttatagatgagtggaaaagcctgacctatgatgaagtcatcagctttgtgccaccaccccttgaccaagaagagatggagtcctgagcacctggtttctgttctgttgatcccacttcactgtgaggggaaggccttttcacgggaac

SEQ ID NO: 237797 - DNA, 924 bp, Artificial Sequence
  derived and/or modified sequence
atgagtcaggagcggcctacgttttatcggcaggaactcaacaagactatctgggaggttcctgagcggtatcagaatctctcacccgtcgggagtggggcatacggcagtgtctgtgcagcctttgacacaaaaaccggcttgagagttgcagttaaaaaactcagccggccttttcagagtattatccacgctaaacgcacctacagagagttaaggttgctgaagcacatgaaacacgagaatgtgatcgggcttctcgatgtttttactcctgcaaggtctctggaggagttcaacgatgtgtacctggtgacccacctcatgggggcagacctcaacaacattgttaagtgccaaaagctcacggatgaccatgtgcagttcttgatttatcaaatcttaaggggactgaagtacattcattccgccgatattattcaccgcgacctgaagccaagcaacttggccgttaatgaggattgtgagctcaagatcctggactttggcctcgcaagacataccgacgacgagatgactggctacgtggctactcgttggtacagggctcccgagattatgctgaactggatgcactataaccaaacagtcgacatatggagtgttggctgtatcatggcggaactgctcactggcaggactctctttcctggaacggaccatatcgaccagctgaaactgatacttcggttagtgggcaccccaggtgcagaactcctgaaaaagataagtagtgaatccctgtctacctgttggcggagatgcctgtattggactcagataagggaattacagagaccaaagcctctccatatgcctacccttcttagcactaccatcctcatgatgaatcaatggcccatcttaatgatttcccccttaaaagcgggaacgtcgttgtag

SEQ ID NO: 237798 - protein, 384 aa, Artificial Sequence
  derived and/or modified sequence
MAEQTYSWAYSLVDSSQVSTFLISILLIVYGSFRSLNMDFENQDKEKDSNSSSGSFNGNSTNNSIQTIDSTQALFLPIGASVSLLVMFFFFDSVQVVFTICTAVLATIAFAFLLLPMCQYLTRPCSPQNKISFGCCGRFTAAELLSFSLSVMLVLIWVLTGHWLLMDALAMGLCVAMIAFVRLPSLKVSCLLLSGLLIYDVFWVFFSAYIFNSNVMVKVATQPADNPLDVLSRKLHLGPNVGRDVPRLSLPGKLVFPSSTGSHFSMLGIGDIVMPGLLLCFVLRYDNYKKQASGDSCGAPGPANISGRMQKVSYFHCTLIGYFVGLLTATVASRIHRAAQPALLYLVPFTLLPLLTMAYLKGDLRRMWSEPFHSKSSSSRFLEV

SEQ ID NO: 237799 - DNA, 1155 bp, Artificial Sequence
  derived and/or modified sequence
atggccgagcagacctacagctgggcctacagcctggtggacagcagccaggtgagcaccttcctgatcagcatcctgctgatcgtgtacggcagcttcagaagcctgaacatggacttcgagaaccaggacaaggagaaggacagcaacagcagcagcggcagcttcaacggcaacagcaccaacaacagcatccagaccatcgacagcacccaggccctgttcctgcccatcggcgccagcgtgagcctgctggtgatgttcttcttcttcgacagcgtgcaggtggtgttcaccatctgcaccgccgtgctggccaccatcgccttcgccttcctgctgctgcccatgtgccagtacctgaccagaccctgcagcccccagaacaagatcagcttcggctgctgcggcagattcaccgccgccgagctgctgagcttcagcctgagcgtgatgctggtgctgatctgggtgctgaccggccactggctgctgatggacgccctggccatgggcctgtgcgtggccatgatcgccttcgtgagactgcccagcctgaaggtgagctgcctgctgctgagcggcctgctgatctacgacgtgttctgggtgttcttcagcgcctacatcttcaacagcaacgtgatggtgaaggtggccacccagcccgccgacaaccccctggacgtgctgagcagaaagctgcacctgggccccaacgtgggcagagacgtgcccagactgagcctgcccggcaagctggtgttccccagcagcaccggcagccacttcagcatgctgggcatcggcgacatcgtgatgcccggcctgctgctgtgcttcgtgctgagatacgacaactacaagaagcaggccagcggcgacagctgcggcgcccccggccccgccaacatcagcggcagaatgcagaaggtgagctacttccactgcaccctgatcggctacttcgtgggcctgctgaccgccaccgtggccagcagaatccacagagccgcccagcccgccctgctgtacctggtgcccttcaccctgctgcccctgctgaccatggcctacctgaagggcgacctgagaagaatgtggagcgagcccttccacagcaagagcagcagcagcagattcctggaggtgtag

SEQ ID NO: 237800 - DNA, 1152 bp, Artificial Sequence
  derived and/or modified sequence
agcatcagaacccactgcatggcctacagcctggtggacagcagccaggtgagcaccttcctgatcagcatcctgctgatcgtgtacggcagcttcagaagcctgaacatggacttcgagaaccaggacaaggagaaggacagcaacagcagcagcggcagcttcaacggcaacagccccatcatcggcatccagaccatcgacagcacccaggccctgttcctgcccatcggcgccagcgtgagcctgctggtgatgttcttcttcttcgacagcgtgcaggtggtgttcaccatctgcaccgccgtgctggccaccatcgccttcgccttcctgctgctgcccatgtgccagtacctgaccagaccctgcagcccccagaacaagatcagcttcggctgctgcggcagattcaccgccgccgagctgctgagcttcagcctgagcgtgatgctggtgctgatctgggtgctgaccggccactggctgctgatggacgccctggccatgggcctgtgcgtggccatgatcgccttcgtgagactgcccagcctgaaggtgagctgcctgctgctgagcggcctgctgatctacgacgtgttctgggtgttcttcagcgcctacatcttcaacagcaacgtgatggtgaaggtggccacccagcccgccgacaaccccctggacgtgctgagcagaaagctgcacctgggccccaacgtgggcagagacgtgcccagactgagcctgcccggcaagctggtgttccccagcagcaccggcagccacttcagcatgctgggcatcggcgacatcgtgatgcccggcctgctgctgtgcttcgtgctgagatacgacaactacaagaagcaggccagcggcgacagctgcggcgcccccggccccgccaacatcagcggcagaatgcagaaggtgagctacttccactgcaccctgatcggctacttcgtgggcctgctgaccgccaccgtggccagcagaatccacagagccgcccagcccgccctgctgtacctggtgcccttcaccctgctgcccctgctgaccatggcctacctgaagggcgacctgagaagaatgtggagcgagcccttccacagcaagagcagcagcagcagattcctggaggtgtag

SEQ ID NO: 237801 - DNA, 1155 bp, Artificial Sequence
  derived and/or modified sequence
atggccgaacagacttactcctgggcatactccttagtcgattcatcgcaggtgagtactttcctgatctccatcctgttgattgtgtacggtagtttccggagcctgaatatggactttgagaatcaagacaaggaaaaggacagcaactcgagtagtgggtccttcaacggtaattctaccaataactctattcagacgattgatagtactcaggccctatttctgcctatcggcgcttctgtgtctctgctcgtgatgtttttcttctttgactctgtccaggtcgtctttacaatctgtactgccgtcctcgccaccatagctttcgccttcctccttctcccaatgtgccagtatctgactcggccttgtagccctcagaataaaattagcttcggctgctgtggaaggttcacggctgctgaactgttgagcttctccttatcagtgatgctggtcttaatctgggtgctgactggccactggctactgatggatgctctcgcaatgggcctttgcgtagctatgatagctttcgtccgattgccaagtctgaaggtcagttgtctactgttgtcagggctcctgatatacgatgtgttctgggtgtttttctcagcttatatttttaatagcaatgttatggtgaaggtggccacccagccagccgacaatcccttggatgtactctcccgcaagctgcacttagggcccaatgttggtagggatgtgccccgcctgtccctccccgggaagcttgtattcccttcctctacagggtctcacttcagcatgctgggcatcggcgacatcgtcatgcccggattactgttatgttttgtgttaaggtatgacaactacaagaaacaggcgtctggggacagttgtggtgcccccgggcccgctaatattagcgggagaatgcagaaagtttcctactttcactgcactctgatcggttacttcgtaggacttcttacagccaccgtggcttcccggattcatagagcggctcagcccgccctgttgtatctggtcccatttacacttctgccgctgctgacaatggcctacctgaagggcgatctccgtagaatgtggtccgaaccttttcatagtaagtcatcgtcttcacggtttcttgaggtgtag

SEQ ID NO: 237802 - DNA, 1152 bp, Artificial Sequence
  derived and/or modified sequence
agtatacgaacgcactgtatggcctactctctggtagactcctcacaggtatcgacctttttgatctccattctactcatagtttacggttccttcaggtctctcaatatggattttgagaatcaggacaaggaaaaggactccaattctagctccggttcctttaatgggaacagccctatcatcggaatccaaaccattgactccacccaggccctgtttctgcctattggtgcctcggtgtccttgctcgtcatgttcttttttttcgacagcgtacaagtagtatttaccatttgcaccgcagtacttgccactatagcctttgcattcctactgttgccgatgtgccagtatttgacgaggccatgttctccacagaacaaaataagttttggttgttgcggtcggtttaccgcggcagagcttctgtccttcagcctttcggtgatgctcgtactgatttgggtattaactggtcactggctcctgatggatgccctggctatgggcctttgcgtggccatgatagcctttgtgcgattgcctagcctcaaagtgagctgtttgctcctgtccggtctgctgatttatgatgtgttttgggtgtttttctctgcgtatatcttcaacagcaatgtgatggtgaaagtggctacccagccggccgataaccccttggatgtgctgagcagaaagctgcacctaggaccgaatgtcggccgcgacgttcctcgattatcattgccagggaagctggtgttcccctcatccactggctcacatttttccatgctgggaatcggtgacattgtaatgccaggactgctgctgtgctttgtgctaaggtacgacaattataagaagcaggccagcggagactcatgcggcgcgcctggaccggcaaatatctccggaaggatgcagaaggtctcttactttcattgcactttaatcggatacttcgtaggactgcttaccgcaactgtcgcgtcaagaatccatagagcagctcagccggccctgctgtatctagtcccttttacgctgctccctctcctgaccatggcttacctaaagggagatctgcgccgtatgtggagtgagccttttcattccaagtcctcctctagccgcttcctggaagtatag

SEQ ID NO: 237803 - DNA, 1155 bp, Artificial Sequence
  derived and/or modified sequence
atggccgagcagacctacagctgggcctacagcctggtggacagcagccaggtgtccaccttcctgatcagcatcctgctgattgtgtatggcagcttccgcagcctgaacatggactttgagaaccaggacaaggagaaggacagcaacagcagcagcggcagcttcaatggaaacagcaccaacaacagcatccagaccatcgacagcacccaggccctcttcctgcccatcggggcctctgtgtccctgctggtgatgttcttcttctttgattctgtgcaggtggtgttcaccatctgcacagctgtgctggccaccatcgcctttgccttcctgctgctgcccatgtgccagtacctgacccggccctgcagcccccagaacaagatcagctttggctgctgcggccgcttcaccgctgctgagctgctgtccttcagcctgtctgtgatgctggtgctgatctgggtgctgaccggccactggctgctgatggatgccctggccatgggcctgtgtgtggccatgattgcctttgtgcggctgcccagcctgaaggtgtcctgcctgctgctgagcggcctgctgatctatgatgtgttctgggtgttcttcagcgcctacatcttcaacagcaatgtgatggtgaaggtggccacccagcctgctgacaaccccctggatgtgctgagcaggaagctgcacctgggccccaacgtgggcagagatgtgccccggctgagcctgcccgggaagctggtgttccccagcagcacaggcagccacttctccatgctgggcattggagacatcgtgatgcctggcctgctgctgtgctttgtgctgcgctatgacaactacaagaagcaggccagcggggacagctgtggggcccctggccctgccaacatcagcggccgcatgcagaaggtgtcctacttccactgcaccctcatcggctactttgtgggcctgctgacagccaccgtggccagccgcatccaccgggccgcccagcctgccctgctgtacctggtgcccttcaccctgctgcccctgctgaccatggcctacctgaagggggacctgcggaggatgtggagcgagcccttccacagcaagagcagcagcagccgcttcctggaggtgtag

SEQ ID NO: 237804 - DNA, 1152 bp, Artificial Sequence
  derived and/or modified sequence
tccatccgcacccactgcatggcctacagcctggtggacagcagccaggtgtccaccttcctgatcagcatcctgctgattgtgtatggcagcttccgcagcctgaacatggactttgagaaccaggacaaggagaaggacagcaacagcagcagcggcagcttcaacggcaacagccccatcatcggcatccagaccatcgacagcacccaggccctcttcctgcccatcggggcctctgtgtccctgctggtgatgttcttcttctttgacagcgtgcaggtggtgttcaccatctgcacagctgtgctggccaccatcgcctttgccttcctgctgctgcccatgtgccagtacctgacccggccctgcagcccccagaacaagatcagctttggctgctgcggccgcttcaccgctgctgagctgctgtccttcagcctgtctgtgatgctggtgctgatctgggtgctgaccggccactggctgctgatggatgccctggccatgggcctgtgtgtggccatgattgcctttgtgcggctgcccagcctgaaggtgtcctgcctgctgctgagcggcctgctgatctatgatgtgttctgggtgttcttcagcgcctacatcttcaacagcaatgtgatggtgaaggtggccacccagcctgctgacaaccccctggatgtgctgagcaggaagctgcacctgggccccaacgtgggcagagatgtgccccggctgagcctgcccgggaagctggtgttccccagcagcacaggcagccacttctccatgctgggcatcggggacatcgtgatgcctggcctgctgctgtgctttgtgctgcgctatgacaactacaagaagcaggccagcggggacagctgtggggcccctggccctgccaacatcagcggccgcatgcagaaggtgtcctacttccactgcaccctgattggctactttgtgggcctgctgacagccaccgtggccagccgcatccacagagctgcccagcctgccctgctgtacctggtgcccttcaccctgctgcccctgctgaccatggcctacctgaagggggacctgcggaggatgtggagcgagcccttccacagcaagagcagcagcagccgcttcctggaggtgtag

SEQ ID NO: 237805 - DNA, 1155 bp, Artificial Sequence
  derived and/or modified sequence
atggccgagcagacctacagctgggcctacagcctggtggacagcagccaagtgtccacttttctgatctctattttgctcattgtgtatggatccttcagatccctgaacatggactttgaaaaccaggataaggagaaagactctaattctagttctggcagtttcaacggcaattccacaaataattcaatacagaccatagattccacacaggcactgtttctgcctatcggggcgtccgtgtcgctcctggtgatgttcttttttttcgactcagtacaagtcgtgtttacaatttgcaccgccgtcctggcaaccattgccttcgccttcctgttgctccccatgtgtcagtacctgactaggccctgcagcccacagaataagatctcctttggctgctgcgggcgattcaccgccgccgagctcctgagtttttcgctttctgtgatgttggtgttgatatgggtgctcaccggccattggctcttgatggatgcactggctatgggcctgtgtgtcgctatgatcgcctttgtgcgactgccctctctgaaagtctcttgtctcctgctgtccggtcttctgatctatgatgttttctgggtgttcttctctgcttacatctttaactctaatgtcatggtcaaggtggccactcagccagcggataaccctctggatgtgctgagccggaagctccacctcggacccaacgtcggtcgggatgtgccccggttgagtctgccaggaaaactggtattcccgagttcaacaggctcccatttctccatgctgggcattggagatatcgtaatgccggggttactactctgcttcgtgctcaggtatgataactacaagaagcaggcttcgggggattcttgcggggcacctggtccagcaaacatcagcggccggatgcagaaagtctcgtatttccactgtacccttattggatactttgtgggtctactcacggcaaccgtggcatccagaatacatcgtgctgcccaaccggctctactgtacttggtgcctttcacccttttgcctctgctgactatggcttatctgaagggggatcttcgtcgaatgtggagtgaacctttccattccaaatcttctagctccaggttcctggaggtttag

SEQ ID NO: 237806 - DNA, 1152 bp, Artificial Sequence
  derived and/or modified sequence
agcatccggacccactgcatggcctacagcctggtggacagcagccaggtgagcacgtttttaatctccatcttgcttatcgtctatggctcgttccggtccctcaatatggactttgaaaaccaggacaaagagaaggactcaaattcaagcagcggttctttcaacgggaactccccaattatcggtatacaaaccatcgactctacccaagcactttttcttcccataggggcttctgtctccctgctggtgatgttctttttctttgattctgtacaggtcgtgttcacaatttgtacagccgtgcttgctacaatcgccttcgccttcctacttcttccgatgtgccagtatttaactaggccttgtagtcctcaaaataagatctccttcgggtgctgtgggagattcacagccgccgagctgctttcattctcgttatctgtgatgttagtcctcatctgggtcctgacaggtcactggctgctcatggatgccttagctatggggctttgcgtggctatgattgcattcgtgaggctgccttccctcaaggtttcatgcctgcttctctccgggctcctgatttacgacgtcttttgggtgttttttagtgcctacatcttcaattcaaatgtgatggtcaaagtggccacacaacccgccgataacccactagacgtgttgtcccgcaagttacacttgggccctaatgtgggtagagatgttccaagactgtctctcccgggcaaacttgttttcccttcgtcaactggatctcatttctcaatgttgggcatcggggatatcgtgatgcctggcctgctcctgtgttttgtgctgcgctatgacaattataaaaaacaagcaagtggcgattcttgtggagcccctggccccgccaacatctctggacggatgcagaaagtgtcatacttccactgcacactaatcggatatttcgtgggattgttgaccgctacagtggcctcgcgcatacatagggccgcacaaccagctctcttgtaccttgtacctttcaccctcctgcccttactgaccatggcctacttaaaaggggacctgcgacggatgtggtcagaacccttccactctaagtcctccagttcacggtttctggaagtatag

SEQ ID NO: 237807 - DNA, 1155 bp, Artificial Sequence
  derived and/or modified sequence
atggctgaacagacctactcttgggcctactcactggtggactcaagtcaagtgtcaacattccttatatcaatactattaatagtttatggctctttcaggagccttaacatggatttcgaaaaccaggacaaagagaaagacagcaactccagcagtggaagttttaatggaaattcaaccaataattctatccagaccatagatagcacgcaggctctgtttttgcccatcggagcaagcgtcagcctgttggtcatgtttttcttttttgacagcgttcaggtagttttcactatctgcacagcggtgcttgcaacaatcgcttttgcgttcctcctgttgccaatgtgccagtacctaacaagaccctgctcacctcagaacaaaatttccttcggctgctgtggccgtttcaccgccgcagagttgctgtccttctcattgtccgttatgctcgtactgatctgggtgctcacgggccattggctgctcatggatgccctcgccatgggactgtgtgtggcgatgattgcattcgtgaggctgccctcactgaaggtgtcgtgcctgctgttatccggcctccttatctacgacgtgttctgggtgttcttttccgcctatattttcaattcaaacgttatggtgaaagttgccacgcagcctgctgacaatcctctggatgtgctgagcaggaaattacacctaggaccaaacgtcggcagggacgtcccccgactgtctctgcccggtaagctcgttttcccttcctctactggctcccacttttcaatgctgggtatcggtgacattgtcatgcctggactgttgctctgcttcgtgctccgatacgacaactacaaaaaacaagcttctggggacagttgcggagccccaggacctgctaacatcagcggtcgtatgcagaaagtctcttacttccattgcactctcatcgggtatttcgtggggttgttaacagcaaccgttgcgtctaggatacaccgagccgcacagccggctttactgtatctggtgccctttacgctgttacctctgcttacgatggcatacctaaagggcgacctgagaagaatgtggtcggagccattccactcaaaatcttcaagctcaagattcttggaagtctag

SEQ ID NO: 237808 - DNA, 1152 bp, Artificial Sequence
  derived and/or modified sequence
tctatccggacgcactgcatggcatatagtctagtcgattcctcacaggtatcaacattcctgatctcaattctcttgattgtttacgggtcgtttcggagcctcaacatggacttcgagaatcaagacaaagagaaagacagtaattctagctccggaagctttaacggaaatagtccaattattggcattcagactatcgacagtacgcaggctttgttcctgcctataggtgcatcagtaagcctgctcgtgatgttcttcttcttcgacagcgtgcaggtggtgttcactatttgcactgctgtattggccacaattgcctttgcatttctgctactgccaatgtgtcagtaccttacgcggccatgctccccacaaaataaaatctcgttcggatgctgtgggaggttcaccgctgcagagctgttatctttcagcttgtcggttatgctcgtccttatctgggtgctcactggacactggctgctgatggatgctctcgccatggggctgtgcgtcgctatgatcgcatttgttagactcccaagcctcaaagtgtcttgcctgctactgagcggcctcctgatttatgatgttttttgggtcttcttttccgcttacatatttaatagtaatgtgatggtcaaggtcgccacccagcctgccgataaccctttggatgtgctgtcgcgaaagctccacctggggccaaatgttggacgtgatgtccctcgcctctccctgcccggaaagctggtgttcccgagttcaacaggatcccatttctcgatgcttggcatcggtgatatagttatgccaggcttgttactgtgttttgtgcttagatatgacaattataaaaaacaggcctctggcgattcttgcggagcaccaggccctgcaaatatctctggtcggatgcaaaaggtctcatattttcactgcacattaatcggttactttgttggattgctgaccgcaaccgtcgcctcgcgcattcacagagcagcacagcctgctcttttgtacctcgtcccattcactttgctgcccctcctcaccatggcttatctcaaaggcgatctcagacgaatgtggtcggagcccttccactccaaatcctcctcttcgaggttccttgaagtgtag

SEQ ID NO: 237809 - DNA, 4148 bp, Artificial Sequence
  derived and/or modified sequence
gcccccgcccctcctcccctcggcgggtgtgatcgagtggcctcgcctcatcgcctagcgcccccctcagtcgccgccgcctccgcccgccggccatgtcccccggccgccgccgccgccgcccgagcgcggcgctcccgcggccccgcgcgcagtgagcgcgggcccgtcttgccgttcgcccgccccagggcccccttgttctccgcgccgccgccgccgccatgttgggtttggagctgcagcggagccgccgccgccgccgcgggtgagggaggccgagagcggagcccgccccgccccggggcccagggagcggggccgcttcggagcccggcctctccccgccagccgccttcccggcccgccgtgcagccagcgagccagcgagcgagcaagcaagcaagcaccggaccccggccgcgccttcagctacggcccgagcgagcccgccgccgccgggcccggccacagcctgcagcggagcccacgagaggcagcgccatggcggagcagacctactcgtgggcctattccctggtggattccagtcaagtgtctacatttctgatttccattcttcttatagtctatggtagtttcaggtcccttaatatggactttgaaaatcaagataaggagaaagacagtaatagttcttctgggtctttcaatggcaacagcaccaataatagcatccaaacaattgactctacccaggctctgttccttccaattggagcatctgtctctcttttagtaatgttcttcttctttgactcagttcaagtagtttttacaatatgtacagcagttcttgcaacgatagcttttgcttttcttctcctcccgatgtgccagtatttaacaagaccctgctcacctcagaacaagatttcctttggttgctgtggacgtttcactgctgctgagttgctgtcattctctctgtctgtcatgctcgtcctcatctgggttctcactggccattggcttctcatggatgcactggccatgggcctctgtgtcgccatgatcgcctttgtccgcctgccgagcctcaaggtctcctgcctgcttctctcagggcttctcatctatgatgtcttttgggtatttttctcagcctacatcttcaatagcaacgtcatggtgaaggtggccactcagccggctgacaatccccttgacgttctatcccggaagctccacctggggcccaatgttgggcgtgatgttcctcgcctgtctctgcctggaaaactggtcttcccaagctccactggcagccacttctccatgttgggcatcggagacatcgttatgcctggtctcctactatgctttgtccttcgctatgacaactacaaaaagcaagccagtggggactcctgtggggcccctggacctgccaacatctccgggcgcatgcagaaggtctcctactttcactgcaccctcatcggatactttgtaggcctgctcactgctactgtggcgtctcgcattcaccgggccgcccagcccgcccttctctatttggtgccatttactttattgccactcctcacgatggcctatttaaagggcgacctccggcggatgtggtctgagcctttccactccaagtccagcagctcccgattcctggaagtatgatggatcacgtggaaagtgaccagatggccgtcatagtccttttctctcaactcatggtttgtttcctcttagagctggcctggtactcagaaatgtacctgtgtttaaggaactgccgtgtgactggatttggcatttaaagggagctcgtttgcaggagagaggtgctggagccctgtttggttccttctcttcctgcggatgtagaggtggggccccttccaagagggacaggcctctccccagcgcgccttcctcccacgtttttatggatctgcaccagactgttaccttctgggggagatggagatttgactgtttaaaaactgaaaacagcgaggagtctttctagaacttttgaacactaaaaggatgaaaaaaattagcaaaccgaagtttcttcaatgacccctcgagaactttgggaccagtttcctataggggactcagtttcagagaactgagacagaagctcttctgtcgttatattcttctttcctttttttggatttattaaatattttctgtggtgtgaagtgacttattaaatccacagacattgagtgacttcttacaacatccacataagaatttgttgtaatgagttcatgtccacccagatgttgtgttggcagtgaacaagggcacggtttttatacatacgtacatatatatatataaacacacacatagatatatatgaataaacaaaaatgaaatcctgctaagatcacgctgtgtagctgacaggggcttgctgtcgttttgagcatgtcgagcagtttactgtggcttccttgtatatggataagctgctgtccttccccttcacaactgaccccgcagttacaaactagtatagcatttgtgctgattgatgatagactcatggacttcaggagcccttacttggttttgatcagtgtagcaaattagggatgaagagttcaaaccttttggccctttctttcttttctaggcttctccctcgcagggtgttccgtagtttcttctcgagccaatgcatgtattatagcagcaggtgtctttgtgctttctcatcatagtaacgtactacttgtaaatacatttttctattttctatttttttgtatttttttttttgacattttgtttcattggtgtgctgtatattttccatgccctcactcctttaagaaaaaaaaaaaggaaaaaagcaacacaatcctgtccttgctgttgtgattatagtcttggtttacctgtggtgacaaccgggtgttggggacacatgtcaaatgcccctctgagatgggccctaaattccagtaactggggaaagaaccagctgctgtgtcctgagagcctggccctgtgctgtggtctctgctgcaagcccagatttctgggagtaactagtgttaggtctgctgacctttacctaagcagcccctgcctggtaagaaggtgcccattgttcagaggcaaagagaagcctgcggttggcatgaggatgcctgacaacaaaggctggagaagggccctgagttccagcctctccccaagggtccccgccccagtggctgcctctgtcttgacctgtgtaatgaattagtgtgctgtgtcactgtggcttgaagtcactgtggatcgagctcacagggggcacccatcctgttgtcaacagagtctgaagcagtcagggtgttggattcctctgttgttgtcatcaattcctgctgaggggtttctggggttttgtttttaataaatgactcctttgtagcctttgtcacataatcttcactttggttgttggtaccaaacagagctcccagccatctcctccctgttctggaagactgatgggaagactctgtctgtccccagacctggtcatctgcagctctggcccagtcatagatacatcaaagaactgaagcttctgctgtccacagaactcaaaactgcctctgcattgggtgaagactaaaaatccacttgcggactctcccttccttccttctcagccctcgaggatgcatatagctaattaagcaggcccagagacagagaggggggctccaaaatgactcggattaagggcaagtgccagtgatgggtagaaataacgttatccttcatgcctgtaatcccagcactttgggaggccgaggcaggtggatcacaaggttgggagctcgagaccagcctggccaacatggtgaaaccccgtctctactaaaaacacaaaaattagctgggcatggtggcaggcgcctgtaatcccagctatttgggaggctgaggcagaagaatcgcttgaacctggaaggcggaggttgcagtgagcagagattgcgccactgcactcaagtctgggcgacagggtgagactccatctcaaaaaaaaaaaaaaaaaggaaatgttatcctggcagtgggtcattttaatttttctgtctttgttttcataagaaaattaaattccagacagaaggaacgtc

SEQ ID NO: 237810 - DNA, 1878 bp, Artificial Sequence
  derived and/or modified sequence
tccattaggactcactgcatggcctattccctggtggattccagtcaagtgtctacatttctgatttccattcttcttatagtctatggtagtttcaggtcccttaatatggactttgaaaatcaagataaggagaaagacagtaatagttcttctgggtctttcaatggcaacagcccaataataggcatccaaacaattgactctacccaggctctgttccttccaattggagcatctgtctctcttttagtaatgttcttcttctttgactcagttcaagtagtttttacaatatgtacagcagttcttgcaacgatagcttttgcttttcttctcctcccgatgtgccagtatttaacaagaccctgctcacctcagaacaagatttcctttggttgctgtggacgtttcactgctgctgagttgctgtcattctctctgtctgtcatgctcgtcctcatctgggttctcactggccattggcttctcatggatgcactggccatgggcctctgtgtcgccatgatcgcctttgtccgcctgccgagcctcaaggtctcctgcctgcttctctcagggcttctcatctatgatgtcttttgggtatttttctcagcctacatcttcaatagcaacgtcatggtgaaggtggccactcagccggctgacaatccccttgacgttctatcccggaagctccacctggggcccaatgttgggcgtgatgttcctcgcctgtctctgcctggaaaactggtcttcccaagctccactggcagccacttctccatgttgggcatcggagacatcgttatgcctggtctcctactatgctttgtccttcgctatgacaactacaaaaagcaagccagtggggactcctgtggggcccctggacctgccaacatctccgggcgcatgcagaaggtctcctactttcactgcaccctcatcggatactttgtaggcctgctcactgctactgtggcgtctcgcattcaccgggccgcccagcccgcccttctctatttggtgccatttactttattgccactcctcacgatggcctatttaaagggcgacctccggcggatgtggtctgagcctttccactccaagtccagcagctcccgattcctggaagtatgatggatcacgtggaaagtgaccagatggccgtcatagtccttttctctcaactcatggtttgtttcctcttagagctggcctggtactcagaaatgtacctgtgtttaaggaactgccgtgtgactggatttggcatttaaagggagctcgtttgcaggagagaggtgctggagccctgtttggttccttctcttcctgcggatgtagaggtggggccccttccaagagggacaggcctctccccagcgcgccttcctcccacgtttttatggatctgcaccagactgttaccttctgggggagatggagatttgactgtttaaaaactgaaaacagcgaggagtctttctagaacttttgaacactaaaaggatgaaaaaaattagcaaaccgaagtttcttcaatgacccctcgagaactttgggaccagtttcctataggggactcagtttcagagaactgagacagaagctcttctgtcgttatattcttctttcctttttttggatttattaaatattttctgtggtgtgaagtgacttattaaatccacagacattgagtgacttcttacaacatccacataagaatttgttgtaatgagttcatgtccacccagatgttgtgttggcagtgaacaagggcacggtttttatacatacgtacatatatatatataaacacacacatagatatatatgaataaacaaaaatgaaatcctgct

SEQ ID NO: 237811 - protein, 764 aa, Artificial Sequence
  derived and/or modified sequence
MCIRQLKFFTTACVCECPQNILSPQPSCVNLGMMWTWALWMLPSLCKFSLAALPAKPENISCVYYYRKNLTCTWSPGKETSYTQYTVKRTYAFGEKHDNCTTNSSTSENRASCSFFLPRITIPDNYTIEVEAENGDGVIKSHMTYWRLENIAKTEPPKIFRVKPVLGIKRMIQIEWIKPELAPVSSDLKYTLRFRTVNSTSWMEVNFAKNRKDKNQTYNLTGLQPFTEYVIALRCAVKESKFWSDWSQEKMGMTEEEAPCGLELWRVLKPAEADGRRPVRLLWKKARGAPVLEKTLGYNIWYYPESNTNLTETMNTTNQQLELHLGGESFWVSMISYNSLGKSPVATLRIPAIQEKSFQCIEVMQACVAEDQLVVKWQSSALDVNTWMIEWFPDVDSEPTTLSWESVSQATNWTIQQDKLKPFWCYNISVYPMLHDKVGEPYSIQAYAKEGVPSEGPETKVENIGVKTVTITWKEIPKSERKGIICNYTIFYQAEGGKGFSKTVNSSILQYGLESLKRKTSYIVQVMASTSAGGTNGTSINFKTLSFSVFEIILITSLIGGGLLILIILTVAYGLKKPNKLTHLCWPTVPNPAESSIATWHGDDFKDKLNLKESDDSVNTEDRILKPCSTPSDKLVIDKLVVNFGNVLQEIFTDEARTGQENNLGGEKNGYVTCPFRPDCPLGKSFEELPVSPEIPPRKSQYLRSRMPEGTRPEAKEQLLFSGQSLVPDHLCEEGAPNPYLKNSVTAREFLVSEKLPEHTKGEV

SEQ ID NO: 237812 - DNA, 2295 bp, Artificial Sequence
  derived and/or modified sequence
atgtgcatccgccagttgaaattcttcaccacagcttgcgtctgtgagtgtccccagaacatattaagccctcagccttcgtgtgttaatctggggatgatgtggacctgggccctatggatgttgcctagcctttgtaagttcagtcttgccgcccttccagctaagcctgagaacatttcctgcgtgtactactaccggaaaaacttaacatgcacctggtccccaggtaaagaaacgtcctacacccagtacaccgttaagcggacctacgcctttggcgaaaaacatgacaactgcaccactaatagctccacttctgagaacagagcgtcctgcagcttctttttgccgaggataaccattcccgataattacaccattgaggttgaggcagaaaacggtgatggggtgattaagtctcacatgacttattggcgactcgaaaacatcgcaaagaccgaaccccccaagatcttccgggtaaagcccgtgctcggaataaaaaggatgatccaaatagagtggataaaacccgaactggcgcctgtgtctagtgatctgaaatacaccctccgctttaggaccgtgaattccacttcctggatggaagtgaatttcgctaagaaccggaaagacaaaaaccagacctacaatcttaccggactgcagcctttcacagaatacgtcatagcgctgcggtgtgctgtgaaagaatctaaattctggagcgactggtctcaggagaagatgggaatgaccgaggaggaagcaccatgtggcctggaattgtggagagttctgaaacccgccgaagcggatggtcggagaccggttcgattgttgtggaagaaagcacgcggggccccggtcctggagaagacacttggatacaacatctggtattacccagagagcaacactaatctcacagaaacaatgaacacaactaatcagcaacttgaactacacttgggaggcgaatctttttgggtctctatgattagctataatagcttgggcaagtcacctgtcgctaccctgcgcattccagccattcaagagaaatctttccagtgcattgaggtgatgcaggcatgcgtggccgaggaccagcttgtggtgaagtggcaatctagcgctcttgatgttaacacatggatgatcgagtggtttcccgacgtcgactctgaaccaacaactctctcatgggagtctgttagccaggccactaattggaccattcagcaggacaagctgaaacctttttggtgttacaacatctcagtgtatcccatgttacatgataaagtcggggagccttactcaatccaagcatacgcaaaggaaggcgtcccatctgaaggcccagagactaaagttgagaacatcggggtaaaaaccgtcacaatcacatggaaggagattcctaaatcagaacgtaaaggcattatctgtaattatacaatattttaccaggctgaaggcggaaaaggattttcaaagacggtgaattcaagcatccttcagtatggcttggaatcactcaaacgcaaaacttcgtacattgtacaggttatggcctctaccagtgctggtggaacgaacggaacgtccatcaattttaagactcttagcttcagtgtcttcgagataatcctgattaccagcctgattgggggcggactgcttatcctaataattctgaccgtggcctacgggcttaagaagcctaataaattaacccacctctgctggccgaccgtgccgaatcctgcagaatctagcattgctacatggcatggggacgattttaaagataagctgaatctgaaagagagcgatgatagtgttaatactgaagaccggatactgaagccgtgcagcactccctctgataagctcgtgatcgataagttggtcgtgaattttggaaatgtgctgcaagagatctttactgatgaagcacgcaccgggcaagagaataatctcggcggcgagaagaacggttatgtgacatgtccattcaggcctgattgtcctttggggaaatctttcgaagagttgccggtatctcccgagattcccccacgtaaatcccagtacctccgtagtcggatgccagaaggtacccgcccggaggctaaagaacaactcttgttttctggacaatcgctcgtaccagaccacttgtgcgaggaaggcgcgcccaatccatacctgaaaaactccgttactgcaagagaattcttggtgtctgagaaactgcctgagcacacgaagggtgaggtatag

SEQ ID NO: 237813 - DNA, 2577 bp, Artificial Sequence
  derived and/or modified sequence
tgtgtgtgcagtatgaaaattgagacaggaaggcagagtgtcagcttgttccacctcagctgggaatgtgcatcaggcaactcaagtttttcaccacggcatgtgtctgtgaatgtccgcaaaacattctctctccccagccttcatgtgttaacctggggatgatgtggacctgggcactgtggatgctcccctcactctgcaaattcagcctggcagctctgccagctaagcctgagaacatttcctgtgtctactactataggaaaaatttaacctgcacttggagtccaggaaaggaaaccagttatacccagtacacagttaagagaacttacgcttttggagaaaaacatgataattgtacaaccaatagttctacaagtgaaaatcgtgcttcgtgctcttttttccttccaagaataacgatcccagataattataccattgaggtggaagctgaaaatggagatggtgtaattaaatctcatatgacatactggagattagagaacatagcgaaaactgaaccacctaagattttccgtgtgaaaccagttttgggcatcaaacgaatgattcaaattgaatggataaagcctgagttggcgcctgtttcatctgatttaaaatacacacttcgattcaggacagtcaacagtaccagctggatggaagtcaacttcgctaagaaccgtaaggataaaaaccaaacgtacaacctcacggggctgcagccttttacagaatatgtcatagctctgcgatgtgcggtcaaggagtcaaagttctggagtgactggagccaagaaaaaatgggaatgactgaggaagaagctccatgtggcctggaactgtggagagtcctgaaaccagctgaggcggatggaagaaggccagtgcggttgttatggaagaaggcaagaggagccccagtcctagagaaaacacttggctacaacatatggtactatccagaaagcaacactaacctcacagaaacaatgaacactactaaccagcagcttgaactgcatctgggaggcgagagcttttgggtgtctatgatttcttataattctcttgggaagtctccagtggccaccctgaggattccagctattcaagaaaaatcatttcagtgcattgaggtcatgcaggcctgcgttgctgaggaccagctagtggtgaagtggcaaagctctgctctagacgtgaacacttggatgattgaatggtttccggatgtggactcagagcccaccaccctttcctgggaatctgtgtctcaggccacgaactggacgatccagcaagataaattaaaacctttctggtgctataacatctctgtgtatccaatgttgcatgacaaagttggcgagccatattccatccaggcttatgccaaagaaggcgttccatcagaaggtcctgagaccaaggtggagaacattggcgtgaagacggtcacgatcacatggaaagagattcccaagagtgagagaaagggtatcatctgcaactacaccatcttttaccaagctgaaggtggaaaaggattctccaagacagtcaattccagcatcttgcagtacggcctggagtccctgaaacgaaagacctcttacattgttcaggtcatggccagcaccagtgctgggggaaccaacgggaccagcataaatttcaagacattgtcattcagtgtctttgagattatcctcataacttctctgattggtggaggccttcttattctcattatcctgacagtggcatatggtctcaaaaaacccaacaaattgactcatctgtgttggcccaccgttcccaaccctgctgaaagtagtatagccacatggcatggagatgatttcaaggataagctaaacctgaaggagtctgatgactctgtgaacacagaagacaggatcttaaaaccatgttccacccccagtgacaagttggtgattgacaagttggtggtgaactttgggaatgttctgcaagaaattttcacagatgaagccagaacgggtcaggaaaacaatttaggaggggaaaagaatgggtatgtgacctgccccttcaggcctgattgtcccctggggaaaagttttgaggagctcccagtttcacctgagattccgcccagaaaatcccaatacctacgttcgaggatgccagaggggacccgcccagaagccaaagagcagcttctcttttctggtcaaagtttagtaccagatcatctgtgtgaggaaggagccccaaatccatatttgaaaaattcagtgacagccagggaatttcttgtgtctgaaaaacttccagagcacaccaagggagaagtctaaatgcgaccatagcatgagaccctcggggcctcagtgtggatggcccttgccagagaagatgtcaagactcggcacgcagcgcttgcttggccctgccacatcctgcctaggttaaagtttcccctgccccttgagctgccagttgaacttggtcggcaaagatgcgaccttgtactgggaagaagggatggtgataagcccgagttttgtaaaggaa

SEQ ID NO: 237814 - DNA, 2295 bp, Artificial Sequence
  derived and/or modified sequence
atgtgcatccggcagctgaagttcttcaccacagcctgtgtgtgtgagtgcccccagaacatcctgagcccccagcccagctgtgtgaacctgggcatgatgtggacctgggccctgtggatgctgcccagcctgtgcaagttcagcctggccgccctgcctgccaagccagagaacatcagctgtgtgtactactacaggaagaacctgacctgcacctggagccctgggaaggagaccagctacacccagtacacagtgaagaggacctacgcctttggagagaagcatgacaactgcaccaccaacagcagcaccagcgagaacagagccagctgcagcttcttcctgccccgcatcaccatcccagacaactacaccatcgaggtggaggctgaaaatggagatggagtcatcaagagccacatgacctactggaggctggagaacatcgccaagacagagccccccaagatcttccgggtgaagcctgtgctgggcatcaagaggatgatccagatcgagtggatcaagccagagctggcccctgtgtccagtgacctgaagtacaccctgcgcttcagaacagtgaacagcacctcctggatggaggtgaactttgccaagaacaggaaggacaagaaccagacctacaacctgaccggcctgcagcccttcacagaatatgtgattgccctgcgctgtgctgtgaaggagagcaagttctggagcgactggagccaggagaagatgggcatgacagaggaggaggccccctgtggcctggagctgtggagggtgctgaagccagctgaggctgatggccggcggcctgtgcggctgctgtggaagaaggcccggggggcccctgtgctggagaagaccctgggctacaacatctggtactacccagagagcaacaccaacctgacagagaccatgaacaccaccaaccagcagctggagctgcacctgggcggggagagcttctgggtgtccatgatctcctacaacagcctgggcaagagccctgtggccaccctgcgcatcccagccatccaggagaagagcttccagtgcatcgaggtgatgcaggcctgtgtggccgaggaccagctggtggtgaagtggcagagcagcgccctggatgtgaacacctggatgattgagtggttcccagatgtggacagcgagcccaccaccctgtcctgggagagcgtgtcccaggccaccaactggaccatccagcaggacaagctgaagcccttctggtgctacaacatctctgtgtaccccatgctgcatgacaaggtgggggagccctacagcatccaggcctatgccaaggagggcgtgcccagcgagggccctgagaccaaggtggagaacatcggcgtgaagacagtgaccatcacctggaaggagatccccaagtctgagaggaagggcatcatctgcaactacaccatcttctaccaggccgagggcggcaagggcttcagcaagacagtgaacagcagcatcctgcagtatggcctggagagcctgaagaggaagaccagctacatcgtgcaggtgatggccagcaccagcgctgggggcaccaacggcaccagcatcaacttcaagaccctgtccttctctgtgtttgagatcatcctgatcaccagcctgattggaggcggcctgctgatcctgatcatcctgactgtggcctacggcctgaagaagcccaacaagctgacccacctgtgctggcccaccgtgcccaacccagctgagagcagcatcgccacctggcatggagatgacttcaaggacaagctgaacctgaaggagagtgatgattctgtgaacacagaagatcgcatcctgaagccctgcagcacccccagcgacaagctggtgattgacaagctggtggtgaactttggaaatgtgctgcaggagatcttcacagatgaggccaggacaggccaggagaacaacctgggcggggagaagaatggctacgtgacctgccccttccggccagactgccccctgggcaagagctttgaggagctgcctgtgtccccagagatcccccccaggaagagccagtacctgcggagcaggatgcctgagggcaccaggcctgaggccaaggagcagctgctcttcagcggccagagcctggtgcctgaccacctgtgtgaggagggcgcccccaacccctacctgaagaacagcgtgacagcccgggagttcctggtgtctgagaagctgcctgagcacaccaagggggaggtgtag

SEQ ID NO: 237815 - DNA, 2295 bp, Artificial Sequence
  derived and/or modified sequence
atgtgcatccggcagctgaagttcttcaccaccgcctgcgtgtgcgaatgtccacagaacatattgtcccctcagccctcatgcgtcaacctggggatgatgtggacgtgggctttatggatgctaccatctctctgtaagttttctttagccgccctgccggctaaaccggagaacatctcttgcgtttattactatcggaagaatcttacgtgtacgtggtctcccggtaaagaaacgtcctatacgcaatatacggtcaagcggacatacgcgttcggtgagaagcatgacaattgtactactaatagcagtacatcagagaatagggcctcctgctctttcttccttcctcgcatcacgataccagataactatacaatcgaggtagaggccgagaatggagacggggtgataaagtctcacatgacctactggcgacttgagaacatcgccaagacagagcccccaaagatctttagggttaagcccgtattgggaataaaaagaatgatccaaatcgaatggattaagcctgagcttgcacctgtctcttctgatctgaaatatacgcttcgattccgcaccgtgaattccacttcatggatggaagtgaatttcgctaaaaacagaaaggacaaaaatcagacttacaatctgaccggacttcaacctttcaccgagtacgtgatcgcattgcgctgtgcagtgaaagagagcaaattttggagcgattggtctcaagaaaaaatgggtatgactgaagaagaggctccatgcggactagagttgtggagggttctcaagccagcggaagccgatggccggagacctgtgcggctgttatggaagaaggcaaggggcgcgcccgtgttggaaaagaccttgggctataacatctggtattaccccgaaagcaacaccaacctaaccgagacaatgaatactacaaatcagcagttggaacttcacctggggggtgagtctttttgggtgtccatgattagctataactcactcggcaaatctcccgtagccacattgcgcatcccagccatccaggagaaatcttttcagtgcattgaggtgatgcaagcctgcgtcgcggaggaccagcttgtggttaaatggcagagtagtgccttggatgttaacacctggatgatcgagtggttcccagacgtggacagcgaacccactactctgtcttgggaatcagtttctcaagctaccaactggactattcaacaggacaagctgaagccattctggtgttataacatttccgtgtaccctatgctccacgataaggtgggggagccatacagtatccaagcctacgcaaaagaaggagtccccagtgagggccctgaaacaaaggtagagaatatcggggtaaaaacggtcaccatcacctggaaggagataccgaaaagcgaaagaaagggcatcatatgtaattacactatattctaccaggccgagggtggaaaaggcttcagcaagactgttaattcctctatcctccagtatggactagaaagcctcaagcggaagacttcgtacatcgtgcaggtgatggcctctacctccgctgggggtactaacgggacgagcatcaatttcaagacactgtcatttagcgtgtttgaaattatcctcatcacctcactaatcgggggtgggctgctgatcctgattattctgacagtcgcttacggcctgaagaaaccaaacaaactcacccatctctgttggcctaccgtgcctaatccggcagagtctagcatcgctacttggcacggtgatgatttcaaggacaaactcaatctgaaggagagcgacgatagcgttaatacagaggaccgcattctgaagccgtgcagcaccccctcagacaaactggtcattgacaagctcgtggtcaatttcgggaacgtgctgcaggagatcttcaccgatgaagcgcggacaggacaagagaacaatttaggcggggaaaagaacggatatgttacttgcccattcaggcctgactgtccgctggggaagtcattcgaagagctgcccgtttcaccagaaattccccctaggaaatctcaatacttacggtcacgtatgcccgagggcaccagacctgaggccaaggagcagttgctcttctctgggcagtccttagtccctgaccacttatgtgaggagggggccccaaacccctatctcaagaactccgtaactgcgcgcgagtttcttgtgagtgaaaaactgcctgaacacacaaagggcgaagtctag

SEQ ID NO: 237816 - DNA, 2295 bp, Artificial Sequence
  derived and/or modified sequence
atgtgcattcgccagctaaaattctttaccacagcctgcgtgtgcgaatgtcctcagaatattctgtcgcctcagcctagttgtgtaaatcttggaatgatgtggacttgggctctttggatgttgccctcactttgcaaattctccctggccgctcttccagcaaaacctgagaacatatcttgtgtgtactactatcgcaagaaccttacctgcacttggtccccaggaaaagagacatcatacacccagtacaccgtgaagagaacctacgcctttggcgaaaaacatgataattgcaccaccaactcctccaccagcgagaacagggcatcctgttcattttttcttccaagaatcactattcctgacaactacacaattgaggtcgaggccgagaacggagacggcgtcattaaaagtcacatgacatattggagactcgaaaatatcgctaaaacggagcccccaaaaatcttccgtgtaaaacctgtcctgggaattaagaggatgatccagatcgaatggatcaagccagagctggcccctgtgagctcagatttgaaatataccctgaggttccgcacggtgaattcaactagctggatggaagtcaacttcgctaaaaaccggaaggacaaaaaccagacatacaacttgaccggcctgcaaccattcacggagtacgtgatcgccttgaggtgtgccgtaaaagaatccaaattctggagtgactggtctcaagaaaagatgggcatgaccgaggaagaagccccatgtggccttgaattgtggagggttctaaaacccgctgaggccgatggcagacgcccagtgcggttgctgtggaaaaaggccaggggtgcccctgttttggagaagactctcgggtacaacatctggtattatcctgagtccaacaccaatctgaccgaaactatgaataccactaaccaacagctggagctgcatttaggcggagagtccttttgggtgtccatgatctcttataatagccttggcaagagcccagtcgctacactcaggatccccgcaattcaggaaaaaagttttcagtgcattgaagtgatgcaggcctgcgtggccgaagaccagttagtggtgaaatggcagtcgtctgcgctcgatgtcaatacgtggatgatcgagtggtttcctgacgtggactccgagccaacgaccctctcgtgggagtctgtgtctcaggctactaattggacaatccagcaggataagctgaaacctttctggtgctataatatttctgtctaccccatgcttcacgataaggttggggaaccttactccatacaggcctacgccaaagagggcgtgcccagcgaaggacccgaaacaaaggtcgaaaatattggtgtaaagacggttaccatcacttggaaggaaatccctaagagcgaacgcaagggaatcatttgtaattataccatattttaccaggcggaaggcggaaagggattctctaagacagtgaactcctcaatcctgcagtacggactggaatctcttaaacgtaagacttcatacattgtccaggtgatggcttccactagcgcgggtggaacaaatggaactagtatcaatttcaagaccctgtctttttctgtcttcgagattattctgatcactagcctcatcgggggaggattactgatcctgatcatcttgaccgtggcatacggccttaaaaaacccaataaacttacccacctatgttggcccactgtgcctaatccagcagagagcagtatcgctacatggcacggcgatgacttcaaagacaagctaaacttgaaggaatccgacgacagtgtgaacacggaggatagaatcctgaaaccctgctctacccccagtgataagctcgtgatcgataaactcgtggtgaattttggcaatgtcttgcaagagatcttcactgacgaagccaggaccggccaggagaataatctaggtggagagaaaaacgggtacgtgacctgccctttccgacccgattgccccctgggaaagtcctttgaggaactgcccgtgtctcccgaaatcccccctagaaaatcacagtacctgcggagcaggatgcctgagggcacccgcccagaggcgaaagagcaactgctcttttctggacaatcgttagtgcccgaccatctgtgtgaggagggcgctcctaatccctatctgaagaactctgtgacagctcgagagtttctcgtgagcgaaaagctgcctgagcacactaaaggcgaggtgtag

SEQ ID NO: 237817 - DNA, 2295 bp, Artificial Sequence
  derived and/or modified sequence
atgtgcatcagacagctgaagttcttcaccaccgcctgcgtgtgcgagtgcccccagaacatcctgagcccccagcccagctgcgtgaacctgggcatgatgtggacctgggccctgtggatgctgcccagcctgtgcaagttcagcctggccgccctgcccgccaagcccgagaacatcagctgcgtgtactactacagaaagaacctgacctgcacctggagccccggcaaggagaccagctacacccagtacaccgtgaagagaacctacgccttcggcgagaagcacgacaactgcaccaccaacagcagcaccagcgagaacagagccagctgcagcttcttcctgcccagaatcaccatccccgacaactacaccatcgaggtggaggccgagaacggcgacggcgtgatcaagagccacatgacctactggagactggagaacatcgccaagaccgagccccccaagatcttcagagtgaagcccgtgctgggcatcaagagaatgatccagatcgagtggatcaagcccgagctggcccccgtgagcagcgacctgaagtacaccctgagattcagaaccgtgaacagcaccagctggatggaggtgaacttcgccaagaacagaaaggacaagaaccagacctacaacctgaccggcctgcagcccttcaccgagtacgtgatcgccctgagatgcgccgtgaaggagagcaagttctggagcgactggagccaggagaagatgggcatgaccgaggaggaggccccctgcggcctggagctgtggagagtgctgaagcccgccgaggccgacggcagaagacccgtgagactgctgtggaagaaggccagaggcgcccccgtgctggagaagaccctgggctacaacatctggtactaccccgagagcaacaccaacctgaccgagaccatgaacaccaccaaccagcagctggagctgcacctgggcggcgagagcttctgggtgagcatgatcagctacaacagcctgggcaagagccccgtggccaccctgagaatccccgccatccaggagaagagcttccagtgcatcgaggtgatgcaggcctgcgtggccgaggaccagctggtggtgaagtggcagagcagcgccctggacgtgaacacctggatgatcgagtggttccccgacgtggacagcgagcccaccaccctgagctgggagagcgtgagccaggccaccaactggaccatccagcaggacaagctgaagcccttctggtgctacaacatcagcgtgtaccccatgctgcacgacaaggtgggcgagccctacagcatccaggcctacgccaaggagggcgtgcccagcgagggccccgagaccaaggtggagaacatcggcgtgaagaccgtgaccatcacctggaaggagatccccaagagcgagagaaagggcatcatctgcaactacaccatcttctaccaggccgagggcggcaagggcttcagcaagaccgtgaacagcagcatcctgcagtacggcctggagagcctgaagagaaagaccagctacatcgtgcaggtgatggccagcaccagcgccggcggcaccaacggcaccagcatcaacttcaagaccctgagcttcagcgtgttcgagatcatcctgatcaccagcctgatcggcggcggcctgctgatcctgatcatcctgaccgtggcctacggcctgaagaagcccaacaagctgacccacctgtgctggcccaccgtgcccaaccccgccgagagcagcatcgccacctggcacggcgacgacttcaaggacaagctgaacctgaaggagagcgacgacagcgtgaacaccgaggacagaatcctgaagccctgcagcacccccagcgacaagctggtgatcgacaagctggtggtgaacttcggcaacgtgctgcaggagatcttcaccgacgaggccagaaccggccaggagaacaacctgggcggcgagaagaacggctacgtgacctgccccttcagacccgactgccccctgggcaagagcttcgaggagctgcccgtgagccccgagatcccccccagaaagagccagtacctgagaagcagaatgcccgagggcaccagacccgaggccaaggagcagctgctgttcagcggccagagcctggtgcccgaccacctgtgcgaggagggcgcccccaacccctacctgaagaacagcgtgaccgccagagagttcctggtgagcgagaagctgcccgagcacaccaagggcgaggtgtag

SEQ ID NO: 237818 - protein, 290 aa, Artificial Sequence
  derived and/or modified sequence
MPLLTLYLLLFWLSGYSIVTQITGPTTVNGLERGSLTVQCVYRSGWETYLKWWCRGAIWRDCKILVKTSGSEQEVKRDRVSIKDNQKNRTFTVTMEDLMKTDADTYWCGIEKTGNDLGVTVQVTIDPAPVTQEETSSSPTLTGHHLDNRHKLLKLSVLLPLIFTILLLLLVAASLLAWRMMKYQQKAAGMSPEQVLQPLEGDLCYADLTLQLAGTSPQKATTKLSSAQVDQVEVEYVTMASLPKEDISYASLTLGAEDQEPTYCNMGHLSSHLPGRGPEEPTEYSTISRP

SEQ ID NO: 237819 - DNA, 873 bp, Artificial Sequence
  derived and/or modified sequence
atgcctctgttaacgctctacctgctgctgttctggctcagtgggtactctatcgtgacccagatcaccgggcccaccacagtcaacggcctagaacggggcagtttgacagtccagtgtgtttataggtctggatgggagacttatctgaagtggtggtgtagaggcgcaatctggcgcgattgcaagattctggttaagacaagcggctctgagcaggaagtaaaaagagacagagttagtatcaaggataatcagaagaaccggaccttcaccgtgaccatggaggaccttatgaagactgacgctgatacctactggtgcggaatcgaaaagactgggaacgacctgggtgtgaccgttcaggttacaatcgaccctgcacccgtaacccaggaggagacgtcgtccagtccgactttgacaggccatcacctggataacagacacaagctcctaaagctttcagttctgctgccattaattttcacaattctcctgctgcttctggtggccgcatccctcctggcttggcgcatgatgaaatatcagcagaaagcagccggtatgagccccgagcaagtcctgcagccacttgagggcgacctgtgttacgcagacttgaccctacaactcgccggcacaagcccgcagaaagccacaacaaaactgtcttctgcccaagttgaccaggtggaggttgagtacgtgaccatggcaagtctgccgaaggaagacattagctatgcttcattgaccttgggggctgaagaccaagagcccacatactgcaacatgggccatttatcttcccatcttccaggaagaggaccagaggagcctacagagtactcaaccatctccagaccttag

SEQ ID NO: 237820 - DNA, 873 bp, Artificial Sequence
  derived and/or modified sequence
atgcccctgctgaccctgtacctgctgctcttctggctgagcggctacagcatcgtgacccagatcaccggccccaccaccgtgaatggcctggagcggggcagcctgactgtgcagtgtgtgtaccgcagcggctgggagacctacctgaagtggtggtgccgcggggccatctggagggactgcaagatcctggtgaagaccagcggcagcgagcaggaggtgaagagggacagagtgtccatcaaggacaaccagaagaacagaaccttcaccgtgaccatggaggacctgatgaagacagatgctgacacctactggtgtggcatcgagaagacaggaaatgacctgggcgtgacagtgcaggtgaccattgatcctgcccctgtgacccaggaggagaccagcagcagccccaccctgaccggccaccacctggacaacagacacaagctgctgaagctgtctgtgctgctgcccctcatcttcaccatcctgctgctgctgctggtggccgccagcctgctggcctggaggatgatgaagtaccagcagaaggccgccggcatgagccctgagcaggtgctgcagcccctggagggggacctgtgctacgccgacctgaccctgcagctggccggcaccagcccccagaaggccaccaccaagctgagcagcgcccaggtggaccaggtggaggtggagtatgtgaccatggccagcctgcccaaggaggacatctcctatgccagcctgaccctgggcgctgaggaccaggagcccacctactgcaacatgggccacctgagcagccacctgcccggccggggccctgaggagcccacagagtacagcaccatcagccggccctag

SEQ ID NO: 237821 - DNA, 873 bp, Artificial Sequence
  derived and/or modified sequence
atgcccctgctgaccctgtacctgctgctgttctggctgagcggctactcaattgttacccagatcactggaccaacaacggtcaacggactcgaacggggctccctgacggtccagtgcgtgtatcgatcgggctgggagacctacctgaaatggtggtgtcgtggagctatatggagggattgcaaaatcttggtcaagactagcggcagcgaacaggaggtgaaaagagaccgggtcagtattaaggacaatcagaagaaccggacctttaccgttactatggaagacttgatgaagaccgacgccgacacctattggtgtgggatcgaaaagaccggcaatgaccttggggtgactgtgcaagtgaccatagatcccgccccggttacgcaggaagaaacaagcagttcgcctacactaaccggacaccacctggataacagacacaaactgttgaagctgtctgtactgctcccccttattttcacgatcctgctgctgttgctggtcgccgcttctctgctagcctggcgcatgatgaaataccagcaaaaggctgccggcatgtcgcctgagcaggtgctccagccactggagggtgatctgtgttatgccgacttgaccctccagctggcaggcacaagtccccaaaaggcgactacaaaactgtcctctgcacaggtcgatcaggtggaagtagagtatgtcaccatggcctcattgcccaaagaagacatttcctacgcttctctgacgctcggcgctgaggaccaggaacctacatattgtaacatgggtcacctttcctcacacctcccgggccgagggccagaagagcctactgaatactcaactatcagtcggccatag

SEQ ID NO: 237822 - DNA, 873 bp, Artificial Sequence
  derived and/or modified sequence
atgcctttactgactctgtatttgctgctattctggctgtctggttattcgatcgtcacccagatcaccggtcccactaccgtcaacggactcgaacggggtagtctgacagtgcagtgtgtatatcggtctggctgggaaacctaccttaaatggtggtgtaggggggcaatttggagggattgcaaaatcctggtgaagacgagcggatcagaacaggaggtgaaaagagacagggtgagcatcaaggataaccagaagaacaggacttttaccgtaaccatggaagaccttatgaaaaccgacgcagacacttattggtgtgggatcgagaaaactggtaatgacctcggggtcaccgtgcaggttaccatcgaccctgccccagtgacccaggaggagacgagctcatcacccaccctgaccggccaccatctggacaaccgtcacaagcttctcaagctatccgtgttgctccccctgatatttactatcctgctgttattgctagtggccgctagtctactggcctggagaatgatgaagtatcagcaaaaggctgctgggatgtccccagagcaagtgctacagcctctagaaggcgacctctgctacgcagatctgactctgcagctcgcagggacgtcaccccagaaagccaccaccaagttatcctcagctcaggtggaccaggtggaggtggagtatgtcaccatggcttctcttcccaaagaggacatcagctacgcgtcattaaccctcggagcggaagaccaggaaccaacgtactgcaatatgggacacctgtccagccatctgcccggtagagggcctgaggagcccacagagtactccacgatctcgaggccatag

SEQ ID NO: 237823 - DNA, 1764 bp, Artificial Sequence
  derived and/or modified sequence
tgaaggaggaagttcaagggcgagagtgagtaccagcagaaggctgggagtctgtagtttgttcctgctgccaggctccactgaggggaacggggacctgtctgaagagaagatgcccctgctgacactctacctgctcctcttctggctctcaggctactccattgtcactcaaatcaccggtccaacaacagtgaatggcttggagcggggctccttgaccgtgcagtgtgtttacagatcaggctgggagacctacttgaagtggtggtgtcgaggagctatttggcgtgactgcaagatccttgttaaaaccagtgggtcagagcaggaggtgaagagggaccgggtgtccatcaaggacaatcagaaaaaccgcacgttcactgtgaccatggaggatctcatgaaaactgatgctgacacttactggtgtggaattgagaaaactggaaatgaccttggggtcacagttcaagtgaccattgacccagcaccagtcacccaagaagaaactagcagctccccaactctgaccggccaccacttggacaacaggcacaagctcctgaagctcagtgtcctcctgcccctcatcttcaccatattgctgctgcttttggtggccgcctcactcttggcttggaggatgatgaagtaccagcagaaagcagccgggatgtccccagagcaggtactgcagcccctggagggcgacctctgctatgcagacctgaccctgcagctggccggaacctccccgcaaaaggctaccacgaagctttcctctgcccaggttgaccaggtggaagtggaatatgtcaccatggcttccttgccgaaggaggacatttcctatgcatctctgaccttgggtgctgaggatcaggaaccgacctactgcaacatgggccacctcagtagccacctccccggcaggggccctgaggagcccacggaatacagcaccatcagcaggccttagcctgcactccaggctccttcttggaccccaggctgtgagcacactcctgcctcatcgaccgtctgccccctgctcccctcatcaggaccaacccggggactggtgcctctgcctgatcagccagcattgcccctagctctgggttgggcttggggccaagtctcagggggcttctaggagttggggttttctaaacgtcccctcctctcctacatagttgaggagggggctagggatatgctctggggctttcatgggaatgatgaagatgataatgagaaaaatgttatcattattatcatgaagtaccattatcgtaatacaatgaacctttatttattgcctaccacatgttatgggctgaataatggcccccaaagatatctgtgtcctaatcctcagaacctgtgactgttaccttctgtggcagaaagggacagtgcagatgtatgtaagttaaggactttgagatagagaggttattcttgctgattcaggtgggcccaaaatatcaccacaagggtcctcataagaaagaggccagaaggtcaaagaggtagagacaaagtgatgatggaagtggacgtgggtgtgacgtgagcaggggccatgaatgccgcagccttcagatgccagaaagggaaaggaatggattcccctgcctggagcctccaaaagaaaccagccctgcccacgccttgacttgagcccattgaaactgatcttgagctcctggcctccagaattgcaggagaataaatttgtgttgtttttaatga

SEQ ID NO: 237824 - DNA, 873 bp, Artificial Sequence
  derived and/or modified sequence
atgcccctgctgaccctgtacctgctgctgttctggctgagcggctacagcatcgtgacccagatcaccggccccaccaccgtgaacggcctggagagaggcagcctgaccgtgcagtgcgtgtacagaagcggctgggagacctacctgaagtggtggtgcagaggcgccatctggagagactgcaagatcctggtgaagaccagcggcagcgagcaggaggtgaagagagacagagtgagcatcaaggacaaccagaagaacagaaccttcaccgtgaccatggaggacctgatgaagaccgacgccgacacctactggtgcggcatcgagaagaccggcaacgacctgggcgtgaccgtgcaggtgaccatcgaccccgcccccgtgacccaggaggagaccagcagcagccccaccctgaccggccaccacctggacaacagacacaagctgctgaagctgagcgtgctgctgcccctgatcttcaccatcctgctgctgctgctggtggccgccagcctgctggcctggagaatgatgaagtaccagcagaaggccgccggcatgagccccgagcaggtgctgcagcccctggagggcgacctgtgctacgccgacctgaccctgcagctggccggcaccagcccccagaaggccaccaccaagctgagcagcgcccaggtggaccaggtggaggtggagtacgtgaccatggccagcctgcccaaggaggacatcagctacgccagcctgaccctgggcgccgaggaccaggagcccacctactgcaacatgggccacctgagcagccacctgcccggcagaggccccgaggagcccaccgagtacagcaccatcagcagaccctag

SEQ ID NO: 237825 - protein, 544 aa, Artificial Sequence
  derived and/or modified sequence
MCTVVDPRIVRRYLLRRQLGQGAYGIVWKAVDRRTGEVVAIKKIFDAFRDKTDAQRTFREITLLQEFGDHPNIISLLDVIRAENDRDIYLVFEFMDTDLNAVIRKGGLLQDVHVRSIFYQLLRATRFLHSGHVVHRDQKPSNVLLDANCTVKLCDFGLARSLGDLPEGPEDQAVTEYVATRWYRAPEVLLSSHRYTLGVDMWSLGCILGEMLRGRPLFPGTSTLHQLELILETIPPPSEEDLLALGSGCRASVLHQLGSRPRQTLDALLPPDTSPEALDLLRRLLVFAPDKRLSATQALQHPYVQRFHCPSDEWAREADVRPRAHEGVQLSVPEYRSRVYQMILECGGSSGTSREKGPEGVSPSQAHLHKPRADPQLPSRTPVQGPRPRPQSSPGHDPAEHESPRAAKNVPRQNSAPLLQTALLGNGERPPGAKEAPPLTLSLVKPSGRGAAPSLTSQAAAQVANQALIRGDWNRGGGVRVASVQQVPPRLPPEARPGRRMFSTSALQGAQGGARALLGGYSQAYGTVCHSALGHLPLLEGHHV

SEQ ID NO: 237826 - protein, 277 aa, Artificial Sequence
  derived and/or modified sequence
MCTVVDPRIVRRYLLRRQLGQGAYGIVWKAVDRRTGEVVAIKKIFDAFRDKTDAQRTFREITLLQEFGDHPNIISLLDVIRAENDRDIYLVFEFMGCPPSPPPPTAVRTLSADTDLNAVIRKGGLLQDVHVRSIFYQLLRATRFLHSGHVVHRDQKPSNVLLDANCTVKLCDFGLARSLGDLPEGPEDQAVTEYVATRWYRAPEVLLSSHRYTLGVDMWSLGCILGEMLRGRPLFPGTSTLHQLELILETIPPPSEEDLLALGSGCRASVLHQLGSR

SEQ ID NO: 237827 - protein, 254 aa, Artificial Sequence
  derived and/or modified sequence
MCTVVDPRIVRRYLLRRQLGQGAYGIVWKAVDRRTGEVVAIKKIFDAFRDKTDAQRTFREITLLQEFGDHPNIISLLDVIRAENDRDIYLVFEFMDTDLNAVIRKGGLLQDVHVRSIFYQLLRATRFLHSGHVVHRDQKPSNVLLDANCTVKLCDFGLARSLGDLPEGPEDQAVTEYVATRWYRAPEVLLSSHRYTLGVDMWSLGCILGEMLRGRPLFPGTSTLHQLELILETIPPPSEEGAQTACRSGTGAST

SEQ ID NO: 237828 - DNA, 834 bp, Artificial Sequence
  derived and/or modified sequence
atgtgcaccgtagtggaccctcgcattgtccggagatacctactcaggcggcagctcgggcagggggcctatggcattgtgtggaaggcagtggaccggaggactggtgaggtcgtggccatcaagaaaatctttgatgcttttagggataagacagatgcccagagaacattccgggaaatcacgctcctccaggagtttggggaccatcccaacatcatcagcctccttgacgtgatccgggcagagaacgacagggacatttacctggtgtttgagtttatgggttgcccccccagccccccacccccgactgcagtgcgcaccctctctgcagacactgacctgaacgcagtcatccggaagggcggcctgctgcaggacgtccacgtgcgctccatcttctaccagctcctgcgggccacccggttcctccactcggggcacgttgtgcaccgggaccagaagccgtccaatgtgctcctggatgccaactgcacagtgaagctgtgtgactttggcctggcccgctccctgggcgacctccccgaggggcctgaggaccaggccgtgacagagtacgtggccacacgctggtaccgagcaccggaggtgctgctctcttcgcaccgatacacccttggggtggacatgtggagtctgggctgtatcctgggggagatgctgcgggggagacccctgttccccggcacgtccaccctccaccagctggagctgatcctggagaccatcccaccgccatctgaggaggacctcctggctctcggctcaggctgccgtgcctctgtgctgcaccagctggggtcccggtga

SEQ ID NO: 237829 - DNA, 765 bp, Artificial Sequence
  derived and/or modified sequence
atgtgcaccgtagtggaccctcgcattgtccggagatacctactcaggcggcagctcgggcagggggcctatggcattgtgtggaaggcagtggaccggaggactggtgaggtcgtggccatcaagaaaatctttgatgcttttagggataagacagatgcccagagaacattccgggaaatcacgctcctccaggagtttggggaccatcccaacatcatcagcctccttgacgtgatccgggcagagaacgacagggacatttacctggtgtttgagtttatggacactgacctgaacgcagtcatccggaagggcggcctgctgcaggacgtccacgtgcgctccatcttctaccagctcctgcgggccacccggttcctccactcggggcacgttgtgcaccgggaccagaagccgtccaatgtgctcctggatgccaactgcacagtgaagctgtgtgactttggcctggcccgctccctgggcgacctccccgaggggcctgaggaccaggccgtgacagagtacgtggccacacgctggtaccgagcaccggaggtgctgctctcttcgcaccgatacacccttggggtggacatgtggagtctgggctgtatcctgggggagatgctgcgggggagacccctgttccccggcacgtccaccctccaccagctggagctgatcctggagaccatcccaccgccatctgaggagggggcccagactgcctgcaggtcaggcacaggggcatctacctag

SEQ ID NO: 237830 - DNA, 1635 bp, Artificial Sequence
  derived and/or modified sequence
atgtgcactgtagtagatccaaggatcgtaaggagatacttactgagacgtcagcttggccaaggcgcttatggtattgtgtggaaagcagtggatcgcaggaccggtgaggtagtggctatcaagaagatcttcgatgccttcagggacaagaccgatgcccagaggacatttagggagataaccctgctgcaggaattcggtgatcaccctaacattatcagcctgcttgacgtgattcgggctgaaaacgatcgagacatctatttagtctttgagtttatggatactgatctaaacgcagtgatccgaaagggcggactactgcaagatgtgcacgtccggtcaattttctaccagctgctgcgcgctaccagatttctgcacagcggccacgtggtgcaccgggatcagaagccctctaacgttttgctcgacgctaactgcacagttaagctttgcgattttggacttgcccgatctctcggggatctgcccgaagggccagaggaccaggcagtgaccgaatacgtcgcgacacgctggtatcgggcaccggaggttctcctgtcatcccataggtataccctcggtgtcgatatgtggagcctcggatgtattcttggggagatgctgcggggacgccctttgtttcctggtacaagtactttacaccagttagagctgattttggaaacaatacctccaccctccgaagaagacttgctggccctgggctccggctgtcgcgctagtgtactgcatcaactgggcagcagaccacgccaaacattggacgctttgttgccccctgataccagccccgaggccctcgatctcctgagacgactgctggtgtttgcaccagacaagcgactgagcgcaactcaggccctgcagcatccgtatgtacagcggttccattgcccctccgatgagtgggccagggaagcggacgtgcgccctagggcccacgagggggtccagctgtcagtgccagagtatcgctctagagtctaccagatgatccttgagtgcgggggttcctcgggaacttctcgggaaaaggggcctgaaggagttagtccttcccaggctcatctgcataagccaagagccgacccccaattaccctctaggacaccagtgcagggcccacgaccaaggccccagtcctcccccggtcatgatcctgcggagcacgaatctcccagggcggctaagaatgtgccaaggcagaattctgcgccactcctccagacagcactgttgggaaatggtgaacgcccaccaggagcaaaggaggcgcctccgttaactctgtcgttggtgaaaccctctggcaggggcgcagccccttcattaacgtctcaggccgcagcacaggtagcgaatcaggcactgataagaggcgattggaatcgcggagggggagtgagagttgcttccgtccagcaggttcctcctcgtctgccccctgaagctcgccctggcaggcgcatgtttagcacatctgcgttacagggtgcacaagggggtgccagagcactgctggggggttactcccaggcatatggaaccgtatgccacagcgccctggggcacctaccacttctagagggacatcacgtatag

SEQ ID NO: 237831 - DNA, 834 bp, Artificial Sequence
  derived and/or modified sequence
atgtgcacagttgtggatccgagaatagtgcgcaggtatttgctcagacggcaactgggccagggggcatacgggattgtgtggaaggcagtagataggagaacgggagaagttgtggcaatcaagaagatcttcgatgccttccgggacaagacagatgcccagagaacgttccgggagatcaccctgctgcaagaatttggagaccaccccaacatcatcagcctgctcgatgtgatcagagctgaaaacgatcgggatatttacctagttttcgagttcatgggctgccctccttctcctccccctcccaccgcggtgcgcacgttgtcagcagataccgatcttaacgcagtgattcgaaagggcggtctgctgcaggacgtgcacgtcagaagcatcttctaccagcttctccgcgctactcggtttttacattcaggtcatgtcgtgcaccgggaccagaaaccaagcaatgtactgttagacgcaaactgcacggttaagctgtgtgactttgggcttgccagaagtctcggcgatctgcccgagggtccagaggaccaagcggtcacagagtatgtggcgacacgttggtaccgagcgccagaggtgctgctcagttctcaccggtataccctcggggtggacatgtggtccttggggtgcatcctgggggagatgctgcgcggaaggcctctcttccccggaacctcaacattacatcaactggaactcatactggagacaataccacccccttctgaggaagacttactcgctttgggatctggttgtcgggcatcagtactgcatcagttgggctctaggtag

SEQ ID NO: 237832 - DNA, 765 bp, Artificial Sequence
  derived and/or modified sequence
atgtgtaccgtagtagatccccgtatagttcgtagatatctactgaggcggcaattggggcagggcgcatacggcatcgtttggaaggcagtggatcgtcgtaccggggaagtggtcgccattaagaaaatttttgatgccttcagagacaaaacggatgcccagaggactttccgagaaatcacacttctgcaggagttcggcgaccaccccaatatcatctctctgctggatgtcatcagagcagagaacgatcgggatatctacctggtgttcgagttcatggataccgacctgaacgcagttatcaggaagggcggactcctgcaggatgtccatgtgcggtcgatattctaccagctgctgagagcgactcggtttttacatagcggacacgtcgttcatcgggaccaaaaacctagcaatgttctgcttgacgccaactgtacggtgaagctttgtgactttgggctggctcgctctcttggcgaccttcccgaaggccctgaggaccaggccgtgacagaatatgtagccactcgatggtaccgcgctcccgaagtgctgctttcctcgcaccgttatactcttggcgtggacatgtggtccctcgggtgcatacttggagagatgttgcgaggccgaccactcttccccggaactagcaccctgcaccaactggaacttatcctggagactatccccccaccatccgaggaaggagcacaaactgcctgtagatccggaaccggggcttctacatag

SEQ ID NO: 237833 - DNA, 1635 bp, Artificial Sequence
  derived and/or modified sequence
atgtgtacagtggttgatcccagaattgttagacgataccttctgagacggcaactgggtcagggagcctacggcatcgtctggaaggcagtcgaccgtcgaacaggggaagtcgttgcaattaaaaaaatatttgacgctttccgcgacaaaaccgatgcgcagcgtaccttccgcgagatcaccctcctgcaagaatttggcgatcacccaaatatcatttctctcctggacgtgattcgggccgaaaatgacagagacatctaccttgtgtttgaattcatggacactgatctgaatgcagtgatacgaaaaggcggcctcctccaggacgttcacgtgcggagtattttctaccagctgttacgggcgactcgctttctccatagcggccatgtggtccatcgcgatcagaagccttccaatgttctccttgatgcaaattgtacagtaaaactctgtgacttcggcttagccaggagccttggagatcttccagagggaccggaggaccaagccgtgacggagtatgtcgcaaccaggtggtatcgtgcccccgaagtgttactgtcttctcacagatacactctgggcgtcgacatgtggtcactgggctgcatactcggcgaaatgcttagaggtcgccctctgttccccggcacttccaccttgcaccagctagagctaatactcgaaacgatcccacccccttctgaagaggatttgcttgcccttgggtcgggatgccgagccagcgtgctgcatcagctgggctctcgtcctagacagacacttgacgcactcctgcctccagatacctcacccgaagcactggacctcttaaggagactcctggtattcgcccccgacaaaaggttatcggcgacacaggctctacagcacccatacgtgcagcgtttccactgtccttccgatgaatgggcccgcgaagctgacgtccggccccgtgcccacgagggggttcaattgtcagtgccagagtacagaagtcgggtgtatcaaatgatcctggaatgtggtggttcttcgggaacctccagagagaagggaccagaaggcgttagccctagccaagcccatctgcataagcctagggccgaccctcaactgccttcccgtacaccagtccaaggaccccgacctaggccacagtcaagtccaggacacgacccagctgaacacgagtcacccagggccgccaaaaacgtgccacgacagaatagcgctccattactccaaacagccctgctcggtaacggcgaacgtccacccggtgccaaggaggctcccccattaaccctgagcctcgtgaagcccagcggccgaggggccgcgccaagcttgacttctcaagccgcagcccaagtggctaatcaggcccttattagaggcgattggaatcgtggggggggggtaagagtggcctccgttcagcaggttcctccacgacttcctccagaagctaggccagggaggcgcatgttcagtaccagcgccctacagggagctcaggggggtgcacgcgctctgctagggggctattcacaggcatatggaaccgtgtgtcactcagctctcggccacctgcctctgctcgaaggacaccacgtctag

SEQ ID NO: 237834 - DNA, 834 bp, Artificial Sequence
  derived and/or modified sequence
atgtgtacggtggttgatcctcgaattgttcgtcgatacctcctgaggagacagctgggccagggggcatatggcattgtctggaaagcagtggatcggcgcactggagaagtggtcgccattaagaaaatattcgatgcttttcgcgataagaccgacgcccaaagaacctttcgcgagatcactctgctccaagaatttggcgaccatccaaatattatctcattgttggacgttattagagcagagaatgaccgcgacatctatctcgtgtttgaatttatgggatgtcccccctcacctccccctcccactgccgtccggactctgtctgcagataccgatttgaatgccgttattaggaaagggggactgcttcaagatgttcacgtgagaagtattttctaccagctattaagagccacaagatttttacattccggacatgtggtgcaccgggatcagaaaccgagtaatgtactcctggacgctaattgcactgtcaaactctgtgattttggccttgccagatctttaggcgaccttccagaaggccctgaagaccaggccgtgaccgagtatgtggccacgagatggtaccgggcccccgaagtcctgctgagcagccacagatacacgctgggagtggatatgtggtccctgggatgtatactcggagagatgctccgtggaagacccctgtttcctgggacctctaccttacatcagctagagctaattctagaaactatcccaccaccctctgaagaagatttgcttgcccttggtagcggctgccgagcctcggtgctccaccaactgggctctcgatag

SEQ ID NO: 237835 - DNA, 765 bp, Artificial Sequence
  derived and/or modified sequence
atgtgcacggtcgtggacccgcggattgtacgccgatacttgctgagacgccagctcggccaaggcgcttacggaatcgtttggaaagcggttgatagaaggacaggagaggttgtggccattaagaagattttcgacgcgtttagagataagacagatgctcagcgaacatttagagagatcacattgctccaggagttcggcgatcaccccaacatcatcagcttactagacgtcattagggcagaaaatgatcgggatatttatttagtatttgagtttatggacactgaccttaacgccgtcatccggaaaggtgggcttctccaggatgtacatgtgaggtccattttctatcagttacttagagcaacacgctttctgcactctgggcatgtggtacacagggaccagaaaccctcgaacgtcctgcttgatgctaattgcacagtcaaactctgcgattttggactcgccagatctcttggggatctccccgaaggacccgaagatcaggccgttaccgagtacgtggcaacacggtggtatcgagcaccagaggtattattatccagccacaggtacacgcttggcgttgatatgtggagtctggggtgtatacttggcgaaatgcttcgtggtaggccactctttcctggtacatccactctgcatcagctggagcttattctggagactattcccccccctagcgaggagggggctcagaccgcttgcagaagcggaacaggagcatcaacatag

SEQ ID NO: 237836 - DNA, 1635 bp, Artificial Sequence
  derived and/or modified sequence
atgtgtacagtggtggaccccagaatagttcgcagatacttgctgagaagacaactcggacagggcgcttacggaatagtgtggaaggcagtcgatcgccgtaccggagaagtcgtggccattaaaaaaatctttgacgctttccgcgacaaaacagatgcccaaagaacgttccgcgagattacactattacaggaatttggcgatcatcccaacattatttccctcctcgacgtgatacgcgccgagaacgacagggacatttaccttgtgtttgaatttatggataccgacctcaacgcagtaatcagaaaaggcggactgttacaggatgttcatgtacggagcattttctatcagttattacgcgctacgcgttttctgcactccggccatgtggtgcatcgcgatcagaagccatctaatgttctgctcgacgcaaactgcacagtcaagctatgcgacttcgggctagctcgaagtctaggagatcttcccgaagggcccgaggaccaggctgttacagaatacgtcgccacccgatggtaccgggctcctgaagtgttattaagttctcacaggtacactctgggtgtggacatgtggtctttaggatgtattttaggtgagatgctgcgaggaaggccgctctttccaggcacgtcgacactccaccaactcgagttaattcttgagaccataccaccccctagcgaagaggacttgttggccttgggctcaggttgccgtgcatccgtgttacaccaacttggctcacgtcctcgccaaacccttgatgccttgttgccacccgatactagtcccgaagccctggatctgttacgccgcctgttagtgttcgcccccgacaaacgactgtctgccacccaggccctccaacacccctatgttcagcgcttccactgccctagcgatgaatgggcaagagaagctgatgttcgccccagagctcacgaaggcgttcagctatccgtaccggaatatagatctagagtgtaccagatgatattagaatgtggaggttccagcggaacaagccgggaaaaaggccccgagggggtcagcccaagccaggcacatttgcacaagccacgcgccgatccacagctgccaagcagaacccccgtacagggccccaggcccagacctcagagcagccccggccacgaccccgccgaacacgagagcccgcgcgcagcaaaaaatgttccccgacagaattcggcccctttgctgcaaaccgcactcctaggcaatggagaacggccccctggagctaaagaggctccaccgctgacactgtcccttgttaagccttccggccgcggcgctgctccctcactcacgtctcaggctgccgcccaagttgcaaaccaggctcttattcggggcgactggaatcgtggaggaggcgtgcgagtggcaagcgtgcagcaggtacccccacggcttccacctgaggcccgaccaggccgtagaatgttttccacttcggcactgcagggagcacagggaggcgcccgtgcattgctgggtggttactcccaagcatatggaaccgtctgtcattctgcccttggacatcttcccttgctcgaaggccatcatgtctag

SEQ ID NO: 237837 - DNA, 834 bp, Artificial Sequence
  derived and/or modified sequence
atgtgcacagtcgtggaccccaggattgtccggcgatatctgctgagaagacagttgggacaaggagcatacggcatagtgtggaaagccgttgacaggcgaaccggagaggttgtggcgataaagaagatttttgatgctttccgcgataaaactgatgcgcaacgaacctttagagaaattactttgctgcaagaattcggagaccaccctaatatcatcagcctgctggacgttattcgggccgagaacgaccgggatatttatctagtctttgagttcatgggttgtccgccttcccctcccccccccaccgccgtccggaccctctcagctgacaccgatctgaacgctgtcattaggaaaggaggcctccttcaagacgttcacgttcgctctattttctaccaacttctacgtgccactagattcctccattccggtcacgtggttcatagggaccagaagccaagcaatgttctgcttgacgcaaactgcactgtgaaattgtgtgattttggcctcgcccgatcactcggcgatcttcccgaagggccggaggatcaagccgtgacagagtatgtggccactagatggtatcgggcccccgaagtcctgctgagcagccacagatacacgctgggagtggatatgtggtccctgggatgtatactcggagagatgctccgtggaagacccctgtttcctgggacctctaccttacatcagctagagctaattctagaaactatcccaccaccctctgaagaagatttgcttgcccttggtagcggctgccgagcctcggtgctccaccaactgggctctcgatag

SEQ ID NO: 237838 - DNA, 765 bp, Artificial Sequence
  derived and/or modified sequence
atgtgcacggtcgtggacccgcggattgtacgccgatacttgctgagacgccagctcggccaaggcgcttacggaatcgtttggaaagcggttgatagaaggacaggagaggttgtggccattaagaagattttcgacgcgtttagagataagacagatgctcagcgaacatttagagagatcacattgctccaggagttcggcgatcaccccaacatcatcagcttactagacgtcattagggcagaaaatgatcgggatatttatttagtatttgagtttatggacactgaccttaacgctgttatcagaaaggggggcctgttacaggacgtgcacgtcagatccattttctatcagctgctgcgagcaacacgatttttgcattccggtcatgtggtgcaccgtgaccagaaaccttccaacgtactgctggacgccaattgtaccgtcaaattatgcgactttggcttagcccgctccctgggcgacctgccagaaggacccgaggatcaggcagtgaccgagtatgtcgcaaccagatggtatcgagcccccgaggtgctgctctcatcccaccgctacacactgggcgttgacatgtggagcctaggatgcatcctcggcgaaatgctccgcggacgaccactctttcctggtacttcgacgctacatcaactggaattaatcttggagaccatcccacccccctctgaggaaggcgcccagacagcttgcaggtccggaacaggggccagcacttag

SEQ ID NO: 237839 - DNA, 1635 bp, Artificial Sequence
  derived and/or modified sequence
atgtgcaccgtggtggaccccagaatcgtgagaagatacctgctgagaagacagctgggccagggcgcctacggcatcgtgtggaaggccgtggacagaagaaccggcgaggtggtggccatcaagaagatcttcgacgccttcagagacaagaccgacgcccagagaaccttcagagagatcaccctgctgcaggagttcggcgaccaccccaacatcatcagcctgctggacgtgatcagagccgagaacgacagagacatctacctggtgttcgagttcatggacaccgacctgaacgccgtgatcagaaagggcggcctgctgcaggacgtgcacgtgagaagcatcttctaccagctgctgagagccaccagattcctgcacagcggccacgtggtgcacagagaccagaagcccagcaacgtgctgctggacgccaactgcaccgtgaagctgtgcgacttcggcctggccagaagcctgggcgacctgcccgagggccccgaggaccaggccgtgaccgagtacgtggccaccagatggtacagagcccccgaggtgctgctgagcagccacagatacaccctgggcgtggacatgtggagcctgggctgcatcctgggcgagatgctgagaggcagacccctgttccccggcaccagcaccctgcaccagctggagctgatcctggagaccatccccccccccagcgaggaggacctgctggccctgggcagcggctgcagagccagcgtgctgcaccagctgggcagcagacccagacagaccctggacgccctgctgccccccgacaccagccccgaggccctggacctgctgagaagactgctggtgttcgcccccgacaagagactgagcgccacccaggccctgcagcacccctacgtgcagagattccactgccccagcgacgagtgggccagagaggccgacgtgagacccagagcccacgagggcgtgcagctgagcgtgcccgagtacagaagcagagtgtaccagatgatcctggagtgcggcggcagcagcggcaccagcagagagaagggccccgagggcgtgagccccagccaggcccacctgcacaagcccagagccgacccccagctgcccagcagaacccccgtgcagggccccagacccagaccccagagcagccccggccacgaccccgccgagcacgagagccccagagccgccaagaacgtgcccagacagaacagcgcccccctgctgcagaccgccctgctgggcaacggcgagagaccccccggcgccaaggaggccccccccctgaccctgagcctggtgaagcccagcggcagaggcgccgcccccagcctgaccagccaggccgccgcccaggtggccaaccaggccctgatcagaggcgactggaacagaggcggcggcgtgagagtggccagcgtgcagcaggtgccccccagactgccccccgaggccagacccggcagaagaatgttcagcaccagcgccctgcagggcgcccagggcggcgccagagccctgctgggcggctacagccaggcctacggcaccgtgtgccacagcgccctgggccacctgcccctgctggagggccaccacgtgtag

SEQ ID NO: 237840 - DNA, 834 bp, Artificial Sequence
  derived and/or modified sequence
atgtgcaccgtggtggaccccagaatcgtgagaagatacctgctgagaagacagctgggccagggcgcctacggcatcgtgtggaaggccgtggacagaagaaccggcgaggtggtggccatcaagaagatcttcgacgccttcagagacaagaccgacgcccagagaaccttcagagagatcaccctgctgcaggagttcggcgaccaccccaacatcatcagcctgctggacgtgatcagagccgagaacgacagagacatctacctggtgttcgagttcatgggctgcccccccagcccccccccccccaccgccgtgagaaccctgagcgccgacaccgacctgaacgccgtgatcagaaagggcggcctgctgcaggacgtgcacgtgagaagcatcttctaccagctgctgagagccaccagattcctgcacagcggccacgtggtgcacagagaccagaagcccagcaacgtgctgctggacgccaactgcaccgtgaagctgtgcgacttcggcctggccagaagcctgggcgacctgcccgagggccccgaggaccaggccgtgaccgagtacgtggccaccagatggtacagagcccccgaggtgctgctgagcagccacagatacaccctgggcgtggacatgtggagcctgggctgcatcctgggcgagatgctgagaggcagacccctgttccccggcaccagcaccctgcaccagctggagctgatcctggagaccatccccccccccagcgaggaggacctgctggccctgggcagcggctgcagagccagcgtgctgcaccagctgggcagcagatag

SEQ ID NO: 237841 - DNA, 765 bp, Artificial Sequence
  derived and/or modified sequence
atgtgcaccgtggtggaccccagaatcgtgagaagatacctgctgagaagacagctgggccagggcgcctacggcatcgtgtggaaggccgtggacagaagaaccggcgaggtggtggccatcaagaagatcttcgacgccttcagagacaagaccgacgcccagagaaccttcagagagatcaccctgctgcaggagttcggcgaccaccccaacatcatcagcctgctggacgtgatcagagccgagaacgacagagacatctacctggtgttcgagttcatggacaccgacctgaacgccgtgatcagaaagggcggcctgctgcaggacgtgcacgtgagaagcatcttctaccagctgctgagagccaccagattcctgcacagcggccacgtggtgcacagagaccagaagcccagcaacgtgctgctggacgccaactgcaccgtgaagctgtgcgacttcggcctggccagaagcctgggcgacctgcccgagggccccgaggaccaggccgtgaccgagtacgtggccaccagatggtacagagcccccgaggtgctgctgagcagccacagatacaccctgggcgtggacatgtggagcctgggctgcatcctgggcgagatgctgagaggcagacccctgttccccggcaccagcaccctgcaccagctggagctgatcctggagaccatccccccccccagcgaggagggcgcccagaccgcctgcagaagcggcaccggcgccagcacctag

SEQ ID NO: 237842 - DNA, 1961 bp, Artificial Sequence
  derived and/or modified sequence
ccggggcctgccgggggcggggggtgttgggaggggcgccccgaggggcggggccgggccgccgtcggttcccacggcaaccgactcaacagtaaggccccgcgggcgtcctggccgccatgtgcaccgtagtggaccctcgcattgtccggagatacctactcaggcggcagctcgggcagggggcctatggcattgtgtggaaggcagtggaccggaggactggtgaggtcgtggccatcaagaaaatctttgatgcttttagggataagacagatgcccagagaacattccgggaaatcacgctcctccaggagtttggggaccatcccaacatcatcagcctccttgacgtgatccgggcagagaacgacagggacatttacctggtgtttgagtttatggacactgacctgaacgcagtcatccggaagggcggcctgctgcaggacgtccacgtgcgctccatcttctaccagctcctgcgggccacccggttcctccactcggggcacgttgtgcaccgggaccagaagccgtccaatgtgctcctggatgccaactgcacagtgaagctgtgtgactttggcctggcccgctccctgggcgacctccccgaggggcctgaggaccaggccgtgacagagtacgtggccacacgctggtaccgagcaccggaggtgctgctctcttcgcaccgatacacccttggggtggacatgtggagtctgggctgtatcctgggggagatgctgcgggggagacccctgttccccggcacgtccaccctccaccagctggagctgatcctggagaccatcccaccgccatctgaggaggacctcctggctctcggctcaggctgccgtgcctctgtgctgcaccagctggggtcccggccacgacagacgctggatgccctcctaccgccagacacctccccagaggccttggacctccttaggcgactcctggtgttcgccccggacaagcggttaagcgcgacccaggcactgcagcacccctacgtgcagaggttccactgccccagcgacgagtgggcacgagaggcagatgtgcggccccgggcacacgaaggggtccagctctctgtgcctgagtaccgcagccgcgtctatcagatgatcctggagtgtggaggcagcagcggcacctcgagagagaagggcccggagggtgtctccccaagccaggcacacctgcacaaacccagagccgaccctcagctgccttctaggacacctgtgcagggtcccagacccaggccccagagcagcccaggccatgaccctgccgagcacgagtccccccgtgcagccaagaacgttcccaggcagaactccgctcccctgctccaaactgctctcctagggaatggggaaaggccccctggggcgaaggaagcgccccccttgacactctcgctggtgaagccaagcgggaggggagctgcgccctccctgacctcccaggctgcggctcaggtggccaaccaggccctgatccggggtgactggaaccggggcggtggggtgagggtggccagcgtacaacaggtccctccccggcttcctccggaggcccggcccggccggaggatgttcagcacctctgccttgcagggtgcccaggggggtgccagggctttgcttggaggctactcccaagcctacgggactgtctgccactcggcactgggccacctgcccctgctggaggggcaccatgtgtgagccgccctactcccttcacctggccctctgttcctgccccagccccttccccagacccctctccagtctcctgcaccccttagccctccctgctttgcctggcccgttgaagttccagggagcttgcccgggtctcctcgggggagcagatgagggccctgcccccgccccactgacttcctccaataaagtcatgtctgcccccaa

SEQ ID NO: 237843 - DNA, 1635 bp, Artificial Sequence
  derived and/or modified sequence
atgtgtactgtggtcgacccgcggattgtgcgtcgctacctgttacgtaggcagcttggccagggtgcctatggtattgtgtggaaggctgtcgacagaaggactggggaagtggtggcaataaagaagatctttgatgcgttccgcgacaagacagacgctcagaggactttccgcgagatcacactgttgcaggaattcggagaccatcccaacataatctcgcttcttgatgtcatccgcgccgagaacgaccgtgacatctatctggtcttcgaattcatggacaccgatctgaacgcagtgattagaaagggaggtctgctacaagacgtgcatgtgcggagcattttctaccaactgctgagggccaccaggtttcttcactcagggcatgtcgtgcacagggaccaaaagccctccaatgtgctgctggacgctaactgcacagtcaagttgtgtgacttcggactggctcggtctcttggcgatctccccgaggggcccgaagaccaggccgtgacggaatacgtcgctacaagatggtacagggccccagaggttctgctgagttcccataggtacactctgggcgtggacatgtggagcctgggatgtattttgggcgaaatgctgagaggaaggccgctgtttcccggaacatccacgctgcatcagctggagttaattctggaaacaatccccccacctagtgaggaggacctgttagcactggggtccggatgccgcgcctcagtccttcaccagctaggctcacgacctcgccaaacccttgacgccctgctgccacctgatacaagtcctgaagccctggacctcctgcgtagactgctggtgtttgccccagataagcgtttgagcgccacacaagctcttcagcatccttatgtacagagattccactgtccatcagatgaatgggccagggaagctgacgtgagacctcgggcccacgagggcgtccaactgtctgtccctgagtatcgctcccgggtctaccagatgattctggagtgcggcgggtcgtccggaacctcccgggagaaaggaccagaaggggtgagcccttctcaagcacacctccacaagccccgcgcggaccctcagctgccgtccagaactccagtgcagggcccccggcctcggccgcagtcatcacccggtcacgaccccgccgagcatgagagccctagagcagcaaagaatgtgccaaggcagaatagcgctccattgttacagaccgccctcctgggtaatggggagcgcccaccgggggcaaaggaggctccgcctctgactctctccctcgtgaaacccagcggcaggggagccgctcccagtttaacctcacaggctgctgcacaggtcgcgaaccaggcccttattcgcggcgactggaaccgtgggggcggagtgcgggtcgcctcagtccagcaggttcctcctcggctgcccccagaagctcgcccgggccgcaggatgttttctacatcagccctccagggagcccaaggcggtgcaagagcattgcttggaggctacagccaagcctacgggacagtctgtcactccgccttgggccacctacctttgctcgaagggcaccacgtctag

SEQ ID NO: 237844 - DNA, 834 bp, Artificial Sequence
  derived and/or modified sequence
atgtgcactgtcgtagacccccgaattgttcgccgatatcttctcagacgtcagctgggccaaggagcctacggcatagtgtggaaagcagtcgatcgtaggacaggagaggtcgtcgccatcaaaaaaatctttgacgccttcagagacaaaaccgatgcccagagaacttttagagaaatcaccctcctgcaggagttcggagatcaccccaacatcatcagcttacttgatgttatcagagcagagaatgaccgggatatctatctagtgtttgagttcatggggtgcccgccatctccccctccaccaaccgctgtgaggacactctctgccgacactgatttgaacgcagtcataaggaaagggggactgctccaggatgtacatgtacgctcaatcttctaccaactgcttcgagccacccgtttcctgcatagcggtcacgtggtgcaccgcgatcaaaaaccatcaaacgtgttgctggatgctaactgcaccgtgaagctgtgtgatttcggattagccagaagcttaggcgatctgccagagggcccagaagatcaggcggtcaccgaatacgtcgccactcgctggtatcgcgcacccgaggtgctgctgtccagccatcggtacacactgggcgtggacatgtggtcacttggctgtatactcggggaaatgctgcgaggcagacccctgttcccagggactagtacattgcatcagcttgagctcattctggaaacaatacctccacccagcgaggaagatctgctggccttgggtagcggctgcagggccagcgtgctccatcagctcgggtcacggtag

SEQ ID NO: 237845 - DNA, 765 bp, Artificial Sequence
  derived and/or modified sequence
atgtgcacggttgtcgacccacgcatcgtgcgtcgctatcttcttagacggcagctaggacagggtgcctacggtattgtgtggaaggcagtggatcgacggacaggcgaagttgtggccattaaaaagatattcgatgccttccgtgacaagaccgatgcgcagagaacattccgggagattactttgctgcaggaattcggggaccacccaaatattatcagcttactcgacgttattagggcagagaatgatagggacatttacttggtgtttgaattcatggacactgacctgaacgcagtcatcaggaagggagggctcctgcaggacgtgcacgtgcgctccattttttatcagctcctgagggcgaccagattcttgcattcagggcacgtggtacacagagaccaaaagccctccaatgtgctgttagacgcaaactgtacagtgaagctgtgcgattttggtctggctcggtcactgggagatctcccagaggggcccgaggaccaggccgttaccgaatatgttgctacacgctggtatcgcgccccggaagtgcttctttcttctcacagatacactcttggtgtggacatgtggagcctgggctgcattttgggcgagatgcttcgcggtagacctctatttccgggtacttctacgttgcaccaactcgaactgatccttgaaacaatcccacccccctcagaggaaggagctcaaacggcctgtcgaagtggaactggagctagcacctag

SEQ ID NO: 237846 - DNA, 1635 bp, Artificial Sequence
  derived and/or modified sequence
atgtgcaccgtggtggaccccagaattgtgcggcgctacctgctgcggcggcagctgggccagggcgcctacggcatcgtgtggaaggctgtggacagaagaactggagaggtggtggccatcaagaagatctttgatgccttccgggacaagacagatgcccagaggaccttccgggagatcaccctgctgcaggagtttggagaccaccccaacatcatcagcctgctggatgtgatccgggcagaaaatgaccgggacatctacctggtgtttgagttcatggacacagacctgaatgctgtgatcagaaaaggaggcctgctgcaggatgtgcacgtgcgcagcatcttctaccagctgctgcgggccacccgcttcctgcacagcggccacgtggtgcaccgggaccagaagcccagcaatgtgctgctggatgccaactgcaccgtgaagctgtgtgactttggcctggcccggagcctgggggacctgcctgagggccctgaggaccaggccgtgacagaatatgtggccacccgctggtaccgggcccctgaggtgctgctgagcagccaccgctacaccctgggcgtggacatgtggagcctgggctgcatcctgggggagatgctgcggggccggcccctcttccctggcaccagcaccctgcaccagctggagctgatcctggagaccatccccccacccagcgaggaggacctgctggccctgggcagcggctgccgggcctctgtgctgcaccagctgggcagccggccccggcagaccctggatgccctgctgcccccagacaccagccctgaggccctggacctgctgcggcggctgctggtgtttgccccagacaagaggctgagcgccacccaggccctgcagcacccctacgtgcagcgcttccactgccccagtgatgagtgggcccgggaggctgatgtgcggccccgggcccatgaaggagtgcagctgtctgtgcctgagtaccgcagccgggtgtaccagatgatcctggagtgtggcggcagcagcggcaccagccgggagaagggccctgagggcgtgagccccagccaggcccacctgcacaagcccagggctgacccccagctgcccagcaggacccctgtgcagggcccccggccccggccccagagcagccctggccatgaccctgctgagcacgagagcccccgggccgccaagaatgtgccccggcagaacagcgcccccctgctgcagacagccctgctgggcaatggagagcggcccccaggggccaaggaggccccacccctgaccctgagcctggtgaagcccagcggcagaggagctgcccccagcctgaccagccaggccgccgcccaggtggccaaccaggccctgatccggggggactggaacagaggaggcggcgtgcgggtggcctctgtgcagcaggtgcccccccggctgcccccagaggcccggcctggaagaaggatgttcagcaccagcgccctgcagggcgcccagggcggggcccgggccctgctgggcggctacagccaggcctatggaacagtgtgccacagcgccctgggccacctgcccctgctggagggccaccacgtgtag

SEQ ID NO: 237847 - DNA, 834 bp, Artificial Sequence
  derived and/or modified sequence
atgtgcaccgtggtggaccccagaattgtgcggcgctacctgctgcggcggcagctgggccagggcgcctacggcatcgtgtggaaggctgtggacagaagaactggagaggtggtggccatcaagaagatctttgatgccttccgggacaagacagatgcccagaggaccttccgggagatcaccctgctgcaggagtttggagaccaccccaacatcatcagcctgctggatgtgatccgggcagaaaatgaccgggacatctacctggtgtttgagttcatgggctgcccccccagccccccaccacccacagctgtgaggaccctgtctgctgacacagacctgaatgctgtgatcaggaagggcggcctgctgcaggatgtgcacgtgcgcagcatcttctaccagctgctgcgggccacccgcttcctgcacagcggccacgtggtgcaccgggaccagaagcccagcaatgtgctgctggatgccaactgcaccgtgaagctgtgtgactttggcctggcccggagcctgggggacctgcctgagggccctgaggaccaggccgtgacagaatatgtggccacccgctggtaccgggcccctgaggtgctgctgagcagccaccgctacaccctgggcgtggacatgtggagcctgggctgcatcctgggggagatgctgcggggccggcccctcttccctggcaccagcaccctgcaccagctggagctgatcctggagaccatccccccaccttctgaggaggacctgctggccctgggcagcggctgccgggcctctgtgctgcaccagctgggcagcaggtag

SEQ ID NO: 237848 - DNA, 765 bp, Artificial Sequence
  derived and/or modified sequence
atgtgcaccgtggtggaccccagaattgtgcggcgctacctgctgcggcggcagctgggccagggcgcctacggcatcgtgtggaaggctgtggacagaagaactggagaggtggtggccatcaagaagatctttgatgccttccgggacaagacagatgcccagaggaccttccgggagatcaccctgctgcaggagtttggagaccaccccaacatcatcagcctgctggatgtgatccgggcagaaaatgaccgggacatctacctggtgtttgagttcatggacacagacctgaatgctgtgatcagaaaaggaggcctgctgcaggatgtgcacgtgcgcagcatcttctaccagctgctgcgggccacccgcttcctgcacagcggccacgtggtgcaccgggaccagaagcccagcaatgtgctgctggatgccaactgcaccgtgaagctgtgtgactttggcctggcccggagcctgggggacctgcctgagggccctgaggaccaggccgtgacagaatatgtggccacccgctggtaccgggcccctgaggtgctgctgagcagccaccgctacaccctgggcgtggacatgtggagcctgggctgcatcctgggggagatgctgcggggccggcccctcttccctggcaccagcaccctgcaccagctggagctgatcctggagaccatccccccacccagcgaggagggcgcccagacagcctgccgcagcggcaccggggccagcacctag

SEQ ID NO: 237849 - DNA, 1635 bp, Artificial Sequence
  derived and/or modified sequence
atgtgcaccgtggtggacccccggatcgtgcggcggtacctgctgcggagacagctgggccagggcgcctatggaattgtatggaaggccgtcgatcgcagaacgggagaagtagtggcgatcaaaaaaatttttgatgcgttcagggacaagacagatgctcagcggacttttagggagattacgttactgcaggaattcggggaccaccctaacataatttccctgcttgatgtgatcagggcagagaacgacagggatatataccttgtgttcgagttcatggacactgacctcaatgcagtgatcagaaaggggggcctgcttcaggatgtgcacgtgcgcagtatcttttaccagttgctgagagccacaagattcttgcactccgggcatgtggtgcaccgtgatcagaaaccttcaaacgtccttctggacgcaaactgcacagtcaaactctgtgactttgggctcgccaggagtctgggggatcttccagaaggcccagaggaccaggctgttacagagtacgttgcaactcgctggtatcgcgccccagaagtgctgctttcaagccatcggtatacactcggggttgacatgtggagtttgggctgcatactaggcgagatgctccgcggcagaccactattcccaggtacttccaccttacatcagctggagctcattctggagacaatcccacctccgtctgaggaggacctgcttgccctggggtctggctgccgcgcctctgtactgcaccagctcggctctagacctcgtcagacacttgacgcgctgttgccaccggacacctctcccgaggccctagaccttctgcgccggctactggtttttgctcccgacaaaaggcttagtgctacacaggccctacagcatccctacgtccaacgcttccattgtccctctgatgagtgggcaagagaggcagatgttcgaccgagggcgcacgaaggagtccaattatctgtgcctgagtaccgaagccgggtttatcagatgattctggaatgcgggggctccagcgggacaagtcgtgaaaagggccccgaaggcgttagtccatcccaggcccacttgcataagccccgggccgaccctcagctgccatcccgaactcccgtgcaaggcccgaggcctaggccacagagcagtcccggtcacgatcctgccgagcacgagtccccaagagctgccaagaacgttcctaggcaaaacagtgcaccccttttacagacagctctcctgggaaacggcgagagacctccgggcgcgaaggaggcccccccactgaccctgtctctggttaaaccatcagggagaggagccgccccctctctgacttcgcaggcagctgcccaggtggccaatcaagctctgatccgcggagactggaaccgcggcggcggagtgagggtggcaagtgtccagcaggtgccgcccaggctgccccccgaggcgaggcccggacggcgaatgttcagtactagcgccttgcaaggtgcccaaggaggagctcgtgccctgcttggtggctattcccaagcttatggcactgtctgtcatagcgcactggggcacctgcccctgttagagggacaccacgtgtag

SEQ ID NO: 237850 - DNA, 834 bp, Artificial Sequence
  derived and/or modified sequence
atgtgcaccgtggtggacccccggatcgtgcggcggtacctgctgcgtcgacaactcggtcaaggggcctacggcatagtctggaaagccgtagaccgtcgtaccggcgaggtcgtcgcaattaaaaagatctttgatgcatttcgggacaaaaccgacgcccaaaggacctttagggagataactcttctgcaggaatttggagatcacccaaacatcattagcctgctcgatgtcattcgcgctgagaacgaccgcgatatttatctggttttcgaatttatgggctgcccaccctctccgcctccacctaccgcagtaagaactctttcagccgacacagatctgaatgccgtgataagaaagggaggcctgctgcaggatgtacatgtccgtagcatattctatcagttactgcgggccacgcggtttctgcacagcgggcatgttgtgcacagagaccagaagccatccaatgtgctgctggatgccaactgcacagttaaattgtgcgacttcggtctggcacggtcactgggagatctacccgaaggaccagaagatcaagcagtgaccgagtatgtggcaactaggtggtacagagctcctgaggtcctgcttagctctcacagatatactctgggcgttgacatgtggagcctcgggtgcattttgggggagatgctccggggaaggccactgttcccggggacttccactctgcaccagctcgagttgattttagaaacaattccacccccctcggaagaggaccttctggctcttggatcagggtgccgggccagcgtgctgcaccaattaggctcccggtag

SEQ ID NO: 237851 - DNA, 765 bp, Artificial Sequence
  derived and/or modified sequence
atgtgcaccgtggtggacccccggatcgtgcggcggtacctgctgaggcgccagttgggtcaaggcgcctatgggatagtgtggaaggcagttgaccgcaggaccggagaggtcgttgcaatcaagaagatcttcgatgctttccgggataaaaccgacgcgcaacgcacatttagggaaataacactgcttcaagagtttggggatcaccccaatatcatctccctgctcgatgtgatccgggccgaaaatgatcgcgatatctatctcgtgtttgagttcatggataccgatcttaatgctgtcatcagaaaaggaggcctgttacaggatgttcatgtgagatccattttttaccagctgctacgggcaacgcgctttctgcactcaggccacgtggtgcacagagatcaaaagccttctaatgtactgctggacgctaactgcaccgttaaactttgcgattttggcctcgccaggagcctgggagacctgccagagggacctgaagaccaggcagtgacagagtatgttgcaacgcgctggtacagagcccccgaggtacttcttagcagtcatcgctacactctgggtgtagacatgtggagccttggatgcattctcggggagatgctgagggggaggcccctctttcctggaacgtctactctgcaccagctggaattgattctggaaacgattccccctccttctgaggagggggcccagaccgcttgcaggtccggaacgggtgccagtacttag

SEQ ID NO: 237852 - RNA, 1635 nt, Artificial Sequence
  derived and/or modified sequence
auguguacagugguugaucccagaauuguuagacgauaccuucugagacggcaacugggucagggagccuacggcaucgucuggaaggcagucgaccgucgaacaggggaagucguugcaauuaaaaaaauauuugacgcuuuccgcgacaaaaccgaugcgcagcguaccuuccgcgagaucacccuccugcaagaauuuggcgaucacccaaauaucauuucucuccuggacgugauucgggccgaaaaugacagagacaucuaccuuguguuugaauucauggacacugaucugaaugcagugauacgaaaaggcggccuccuccaggacguucacgugcggaguauuuucuaccagcuguuacgggcgacucgcuuucuccauagcggccaugugguccaucgcgaucagaagccuuccaauguucuccuugaugcaaauuguacaguaaaacucugugacuucggcuuagccaggagccuuggagaucuuccagagggaccggaggaccaagccgugacggaguaugucgcaaccaggugguaucgugcccccgaaguguuacugucuucucacagauacacucugggcgucgacauguggucacugggcugcauacucggcgaaaugcuuagaggucgcccucuguuccccggcacuuccaccuugcaccagcuagagcuaauacucgaaacgaucccacccccuucugaagaggauuugcuugcccuugggucgggaugccgagccagcgugcugcaucagcugggcucucguccuagacagacacuugacgcacuccugccuccagauaccucacccgaagcacuggaccucuuaaggagacuccugguauucgcccccgacaaaagguuaucggcgacacaggcucuacagcacccauacgugcagcguuuccacuguccuuccgaugaaugggcccgcgaagcugacguccggccccgugcccacgaggggguucaauugucagugccagaguacagaagucggguguaucaaaugauccuggaauguggugguucuucgggaaccuccagagagaagggaccagaaggcguuagcccuagccaagcccaucugcauaagccuagggccgacccucaacugccuucccguacaccaguccaaggaccccgaccuaggccacagucaaguccaggacacgacccagcugaacacgagucacccagggccgccaaaaacgugccacgacagaauagcgcuccauuacuccaaacagcccugcucgguaacggcgaacguccacccggugccaaggaggcucccccauuaacccugagccucgugaagcccagcggccgaggggccgcgccaagcuugacuucucaagccgcagcccaaguggcuaaucaggcccuuauuagaggcgauuggaaucgugggggggggguaagaguggccuccguucagcagguuccuccacgacuuccuccagaagcuaggccagggaggcgcauguucaguaccagcgcccuacagggagcucaggggggugcacgcgcucugcuagggggcuauucacaggcauauggaaccgugugucacucagcucucggccaccugccucugcucgaaggacaccacgucuag

SEQ ID NO: 237853 - RNA, 834 nt, Artificial Sequence
  derived and/or modified sequence
auguguacggugguugauccucgaauuguucgucgauaccuccugaggagacagcugggccagggggcauauggcauugucuggaaagcaguggaucggcgcacuggagaaguggucgccauuaagaaaauauucgaugcuuuucgcgauaagaccgacgcccaaagaaccuuucgcgagaucacucugcuccaagaauuuggcgaccauccaaauauuaucucauuguuggacguuauuagagcagagaaugaccgcgacaucuaucucguguuugaauuuaugggauguccccccucaccucccccucccacugccguccggacucugucugcagauaccgauuugaaugccguuauuaggaaagggggacugcuucaagauguucacgugagaaguauuuucuaccagcuauuaagagccacaagauuuuuacauuccggacauguggugcaccgggaucagaaaccgaguaauguacuccuggacgcuaauugcacugucaaacucugugauuuuggccuugccagaucuuuaggcgaccuuccagaaggcccugaagaccaggccgugaccgaguauguggccacgagaugguaccgggcccccgaaguccugcugagcagccacagauacacgcugggaguggauauguggucccugggauguauacucggagagaugcuccguggaagaccccuguuuccugggaccucuaccuuacaucagcuagagcuaauucuagaaacuaucccaccacccucugaagaagauuugcuugcccuugguagcggcugccgagccucggugcuccaccaacugggcucucgauag

SEQ ID NO: 237854 - RNA, 765 nt, Artificial Sequence
  derived and/or modified sequence
augugcacggucguggacccgcggauuguacgccgauacuugcugagacgccagcucggccaaggcgcuuacggaaucguuuggaaagcgguugauagaaggacaggagagguuguggccauuaagaagauuuucgacgcguuuagagauaagacagaugcucagcgaacauuuagagagaucacauugcuccaggaguucggcgaucaccccaacaucaucagcuuacuagacgucauuagggcagaaaaugaucgggauauuuauuuaguauuugaguuuauggacacugaccuuaacgccgucauccggaaaggugggcuucuccaggauguacaugugagguccauuuucuaucaguuacuuagagcaacacgcuuucugcacucugggcaugugguacacagggaccagaaacccucgaacguccugcuugaugcuaauugcacagucaaacucugcgauuuuggacucgccagaucucuuggggaucuccccgaaggacccgaagaucaggccguuaccgaguacguggcaacacggugguaucgagcaccagagguauuauuauccagccacagguacacgcuuggcguugauauguggagucugggguguauacuuggcgaaaugcuucgugguaggccacucuuuccugguacauccacucugcaucagcuggagcuuauucuggagacuauuccccccccuagcgaggagggggcucagaccgcuugcagaagcggaacaggagcaucaacauag

SEQ ID NO: 237855 - RNA, 1635 nt, Artificial Sequence
  derived and/or modified sequence
auguguacagugguggaccccagaauaguucgcagauacuugcugagaagacaacucggacagggcgcuuacggaauaguguggaaggcagucgaucgccguaccggagaagucguggccauuaaaaaaaucuuugacgcuuuccgcgacaaaacagaugcccaaagaacguuccgcgagauuacacuauuacaggaauuuggcgaucaucccaacauuauuucccuccucgacgugauacgcgccgagaacgacagggacauuuaccuuguguuugaauuuauggauaccgaccucaacgcaguaaucagaaaaggcggacuguuacaggauguucauguacggagcauuuucuaucaguuauuacgcgcuacgcguuuucugcacuccggccauguggugcaucgcgaucagaagccaucuaauguucugcucgacgcaaacugcacagucaagcuaugcgacuucgggcuagcucgaagucuaggagaucuucccgaagggcccgaggaccaggcuguuacagaauacgucgccacccgaugguaccgggcuccugaaguguuauuaaguucucacagguacacucuggguguggacauguggucuuuaggauguauuuuaggugagaugcugcgaggaaggccgcucuuuccaggcacgucgacacuccaccaacucgaguuaauucuugagaccauaccacccccuagcgaagaggacuuguuggccuugggcucagguugccgugcauccguguuacaccaacuuggcucacguccucgccaaacccuugaugccuuguugccacccgauacuagucccgaagcccuggaucuguuacgccgccuguuaguguucgcccccgacaaacgacugucugccacccaggcccuccaacaccccuauguucagcgcuuccacugcccuagcgaugaaugggcaagagaagcugauguucgccccagagcucacgaaggcguucagcuauccguaccggaauauagaucuagaguguaccagaugauauuagaauguggagguuccagcggaacaagccgggaaaaaggccccgagggggucagcccaagccaggcacauuugcacaagccacgcgccgauccacagcugccaagcagaacccccguacagggccccaggcccagaccucagagcagccccggccacgaccccgccgaacacgagagcccgcgcgcagcaaaaaauguuccccgacagaauucggccccuuugcugcaaaccgcacuccuaggcaauggagaacggcccccuggagcuaaagaggcuccaccgcugacacugucccuuguuaagccuuccggccgcggcgcugcucccucacucacgucucaggcugccgcccaaguugcaaaccaggcucuuauucggggcgacuggaaucguggaggaggcgugcgaguggcaagcgugcagcagguacccccacggcuuccaccugaggcccgaccaggccguagaauguuuuccacuucggcacugcagggagcacagggaggcgcccgugcauugcugggugguuacucccaagcauauggaaccgucugucauucugcccuuggacaucuucccuugcucgaaggccaucaugucuag

SEQ ID NO: 237856 - RNA, 834 nt, Artificial Sequence
  derived and/or modified sequence
augugcacagucguggaccccaggauuguccggcgauaucugcugagaagacaguugggacaaggagcauacggcauaguguggaaagccguugacaggcgaaccggagagguuguggcgauaaagaagauuuuugaugcuuuccgcgauaaaacugaugcgcaacgaaccuuuagagaaauuacuuugcugcaagaauucggagaccacccuaauaucaucagccugcuggacguuauucgggccgagaacgaccgggauauuuaucuagucuuugaguucauggguuguccgccuuccccucccccccccaccgccguccggacccucucagcugacaccgaucugaacgcugucauuaggaaaggaggccuccuucaagacguucacguucgcucuauuuucuaccaacuucuacgugccacuagauuccuccauuccggucacgugguucauagggaccagaagccaagcaauguucugcuugacgcaaacugcacugugaaauugugugauuuuggccucgcccgaucacucggcgaucuucccgaagggccggaggaucaagccgugacagaguauguggccacuagaugguaucgggcccccgaaguccugcugagcagccacagauacacgcugggaguggauauguggucccugggauguauacucggagagaugcuccguggaagaccccuguuuccugggaccucuaccuuacaucagcuagagcuaauucuagaaacuaucccaccacccucugaagaagauuugcuugcccuugguagcggcugccgagccucggugcuccaccaacugggcucucgauag

SEQ ID NO: 237857 - RNA, 765 nt, Artificial Sequence
  derived and/or modified sequence
augugcacggucguggacccgcggauuguacgccgauacuugcugagacgccagcucggccaaggcgcuuacggaaucguuuggaaagcgguugauagaaggacaggagagguuguggccauuaagaagauuuucgacgcguuuagagauaagacagaugcucagcgaacauuuagagagaucacauugcuccaggaguucggcgaucaccccaacaucaucagcuuacuagacgucauuagggcagaaaaugaucgggauauuuauuuaguauuugaguuuauggacacugaccuuaacgcuguuaucagaaaggggggccuguuacaggacgugcacgucagauccauuuucuaucagcugcugcgagcaacacgauuuuugcauuccggucauguggugcaccgugaccagaaaccuuccaacguacugcuggacgccaauuguaccgucaaauuaugcgacuuuggcuuagcccgcucccugggcgaccugccagaaggacccgaggaucaggcagugaccgaguaugucgcaaccagaugguaucgagcccccgaggugcugcucucaucccaccgcuacacacugggcguugacauguggagccuaggaugcauccucggcgaaaugcuccgcggacgaccacucuuuccugguacuucgacgcuacaucaacuggaauuaaucuuggagaccaucccaccccccucugaggaaggcgcccagacagcuugcagguccggaacaggggccagcacuuag

SEQ ID NO: 237858 - protein, 320 aa, Artificial Sequence
  derived and/or modified sequence
MGPWSRVRVAKCQMLVTCFFILLLGLSVATMVTLTYFGAHFAVIRRASLEKNPYQAVHQWAFSAGLSLVGLLTLGAVLSAAATVREAQGLMAGGFLCFSLAFCAQVQVVFWRLHSPTQVEDAMLDTYDLVYEQAMKGTSHVRRQELAAIQDVFLCCGKKSPFSRLGSTEADLCQGEEAAREDCLQGIRSFLRTHQQVASSLTSIGLALTVSALLFSSFLWFAIRCGCSLDRKGKYTLTPRACGRQPQEPSLLRCSQGGPTHCLHSEAVAIGPRGCSGSLRWLQESDAAPLPLSCHLAAHRALQGRSRGGLSGCPERGLSD

SEQ ID NO: 237859 - DNA, 963 bp, Artificial Sequence
  derived and/or modified sequence
atgggcccctggagcagagtgagagtggccaagtgccagatgctggtgacctgcttcttcatcctgctgctgggcctgagcgtggccaccatggtgaccctgacctacttcggcgcccacttcgccgtgatcagaagagccagcctggagaagaacccctaccaggccgtgcaccagtgggccttcagcgccggcctgagcctggtgggcctgctgaccctgggcgccgtgctgagcgccgccgccaccgtgagagaggcccagggcctgatggccggcggcttcctgtgcttcagcctggccttctgcgcccaggtgcaggtggtgttctggagactgcacagccccacccaggtggaggacgccatgctggacacctacgacctggtgtacgagcaggccatgaagggcaccagccacgtgagaagacaggagctggccgccatccaggacgtgttcctgtgctgcggcaagaagagccccttcagcagactgggcagcaccgaggccgacctgtgccagggcgaggaggccgccagagaggactgcctgcagggcatcagaagcttcctgagaacccaccagcaggtggccagcagcctgaccagcatcggcctggccctgaccgtgagcgccctgctgttcagcagcttcctgtggttcgccatcagatgcggctgcagcctggacagaaagggcaagtacaccctgacccccagagcctgcggcagacagccccaggagcccagcctgctgagatgcagccagggcggccccacccactgcctgcacagcgaggccgtggccatcggccccagaggctgcagcggcagcctgagatggctgcaggagagcgacgccgcccccctgcccctgagctgccacctggccgcccacagagccctgcagggcagaagcagaggcggcctgagcggctgccccgagagaggcctgagcgactag

SEQ ID NO: 237860 - DNA, 963 bp, Artificial Sequence
  derived and/or modified sequence
atgggcccatggagcagagtacgagtagctaaatgtcagatgcttgtgacctgtttttttatattgcttctggggctgtcagtcgctacaatggtgacacttacctatttcggggcccactttgctgtgatcaggagagcctctctggagaaaaatccatatcaggccgtccaccagtgggcctttagtgctggtttatcccttgttggcctactcactttgggtgcagtgctttcagctgctgccaccgtgcgcgaggcacagggcctcatggcaggtgggttcctgtgcttctcactggccttttgcgcgcaggtgcaggtggtgttttggcgactacactctcccactcaagtagaagacgctatgctggacacgtatgacctcgtctacgaacaggccatgaaagggactagccacgttaggcgccaggagctagcagccatacaggacgtcttcctgtgctgtgggaaaaagagtccattcagtagactcgggagcacggaggccgatctgtgccagggggaagaggctgctagagaggactgtctccaaggaatccgttcctttctccggactcatcagcaggtggcaagctctctgacgagcattgggctagcgctcaccgtttccgccttgcttttctccagttttctctggttcgccatccgctgcggatgctcgctggaccgtaagggaaagtacacccttaccccacgcgcgtgtggcagacagccccaagagccgtcgttactccggtgctcccaaggaggacccacacactgcctccactctgaggcggtcgcaattggcccacgtggttgctctgggagtctgcggtggctacaggagtccgatgccgcccccttaccactatcctgccaccttgctgcccaccgagccctgcagggacggagccgtggaggcctcagcggatgtccagagcgtggcttgtcagattag

SEQ ID NO: 237861 - DNA, 963 bp, Artificial Sequence
  derived and/or modified sequence
atgggcccctggagccgggtgcgggtggccaagtgccagatgctggtgacctgcttcttcatcctgctgctgggcctgtctgtggccaccatggtgaccctgacctactttggagcccactttgctgtgatcagaagagccagcctggagaagaacccctaccaggccgtgcaccagtgggccttctctgctggcctgagcctggtgggcctgctgaccctgggcgctgtgctgtctgctgctgccaccgtgcgggaggcccagggcctgatggccggcggcttcctgtgcttcagcctggccttctgtgcccaggtgcaggtggtgttctggaggctgcacagccccacccaggtggaggatgccatgctggacacctatgacctggtgtatgagcaggccatgaagggcaccagccacgtgcggcggcaggagctggccgccatccaggatgtgttcctgtgctgcggcaagaagagccccttcagccggctgggcagcacagaggccgacctgtgccagggcgaggaggccgcccgggaggactgcctgcagggcatccgctccttcctgcggacccaccagcaggtggccagcagcctgaccagcatcggcctggccctgactgtgtctgccctgctcttcagcagcttcctgtggtttgccatccgctgtggctgcagcctggacaggaagggcaagtacaccctgaccccccgggcctgtggccggcagccccaggagcccagcctgctgcgctgcagccagggcggccccacccactgcctgcacagcgaggccgtggccatcggcccccggggctgcagcggcagcctgcgctggctgcaggagagtgatgctgcccccctgcccctgagctgccacctggccgcccaccgggccctgcagggccgcagccggggcggcctgagcggctgcccagagcggggcctgagtgactag

SEQ ID NO: 237862 - DNA, 963 bp, Artificial Sequence
  derived and/or modified sequence
atgggcccctggagccgggtgcgggtggccaagtgccagatgctggttacatgcttcttcattttactattggggctgtctgttgctactatggtcacacttacctatttcggggctcactttgccgttatccgccgcgcttcgctggagaaaaatccctaccaagctgtccaccagtgggcttttagtgcagggctctccttggtggggctgctaaccttaggggccgtcttgagcgctgctgccacagtgcgggaagcgcaaggcttaatggccggcggctttctgtgtttctccctagcattctgcgcccaggtacaagttgtgttctggagacttcacagcccgactcaagtggaggatgcaatgttggacacgtacgacctcgtgtacgaacaggcaatgaagggaacatcccatgtaaggcggcaagaactggcggcaatccaggatgttttcctgtgttgtgggaagaagagccccttttcaagactcggctctactgaggccgacctctgccaaggcgaagaggctgcaagagaggactgcctccaaggcatcagaagctttctaagaacccatcaacaggtcgcgtcttctctgacctcaataggcctggcccttacagtgagcgcactcctgttttcctcattcctatggttcgcgattcgatgcgggtgcagtctcgacaggaagggaaaatacaccctgacaccgagggcctgcgggcgacagccccaggaaccatcgcttctgagatgttcacaaggcggccccacccattgcctgcactcggaggccgtggcaatagggcctagaggatgcagcggaagcctccggtggcttcaggagtctgacgcagctccactccccttatcatgtcacctggcagctcaccgcgccctgcagggacggtctcggggcggcctatccggatgtcccgagcgggggctgtctgattag

SEQ ID NO: 237863 - DNA, 963 bp, Artificial Sequence
  derived and/or modified sequence
atgggtccctggagcagagtacgagttgccaaatgccagatgctggtgacttgcttctttatattactgctgggcctgtctgtggccactatggttactctcacttactttggtgcccattttgcggtgatcaggcgcgcatctctcgagaaaaacccctatcaagccgtgcatcagtgggctttttcagccggtctcagcctcgtcggactgttgacccttggagcggtgctcagtgccgctgccacggtccgagaggcccaggggctgatggccggtgggtttctgtgcttttcgttagcattttgtgcccaggtgcaggttgtcttctggaggttgcactccccaacacaggtcgaggacgctatgctggatacttatgatcttgtgtatgaacaggcaatgaagggcacatcacatgtgcgtcgccaggaactagccgcaatacaggacgtgtttttatgctgcggcaaaaaatcacccttctcccgtctggggagtactgaagcggatttgtgccagggcgaggaagcagcaagggaagactgtctccagggcatcagaagcttcctgagaacccatcaacaagtcgcgtcatcccttacatcgataggcctggcattaaccgtcagtgcgctcttattctccagctttctctggttcgctatccggtgtggctgctcactggataggaaagggaaatacacattgactcccagggcttgtgggcgacagcctcaggagcccagcctgctgcgttgcagtcagggcggaccaacgcactgcttacactcagaagcagtcgccatcggccctcgtggctgttcaggatctttgagatggctccaggaatctgacgctgcaccactcccactctcttgccaccttgctgcacaccgcgctcttcagggtcgctctcgaggcggattatctggatgtcccgagagggggctgagcgattag

SEQ ID NO: 237864 - protein, 1427 aa, Artificial Sequence
  derived and/or modified sequence
MHQRHPRARCPPLCVAGILACGFLLGCWGPSHFQQSCLQALEPQAVSSYLSPGAPLKGRPPSPGFQRQRQRQRRAAGGILHLELLVAVGPDVFQAHQEDTERYVLTNLNIGAELLRDPSLGAQFRVHLVKMVILTEPEGAPNITANLTSSLLSVCGWSQTINPEDDTDPGHADLVLYITRFDLELPDGNRQVRGVTQLGGACSPTWSCLITEDTGFDLGVTIAHEIGHSFGLEHDGAPGSGCGPSGHVMASDGAAPRAGLAWSPCSRRQLLSLLSAGRARCVWDPPRPQPGSAGHPPDAQPGLYYSANEQCRVAFGPKAVACTFAREHLDMCQALSCHTDPLDQSSCSRLLVPLLDGTECGVEKWCSKGRCRSLVELTPIAAVHGRWSSWGPRSPCSRSCGGGVVTRRRQCNNPRPAFGGRACVGADLQAEMCNTQACEKTQLEFMSQQCARTDGQPLRSSPGGASFYHWGAAVPHSQGDALCRHMCRAIGESFIMKRGDSFLDGTRCMPSGPREDGTLSLCVSGSCRTFGCDGRMDSQQVWDRCQVCGGDNSTCSPRKGSFTAGRAREYVTFLTVTPNLTSVYIANHRPLFTHLAVRIGGRYVVAGKMSISPNTTYPSLLEDGRVEYRVALTEDRLPRLEEIRIWGPLQEDADIQVYRRYGEEYGNLTRPDITFTYFQPKPRQAWVWAAVRGPCSVSCGAGLRWVNYSCLDQARKELVETVQCQGSQQPPAWPEACVLEPCPPYWAVGDFGPCSASCGGGLRERPVRCVEAQGSLLKTLPPARCRAGAQQPAVALETCNPQPCPARWEVSEPSSCTSAGGAGLALENETCVPGADGLEAPVTEGPGSVDEKLPAPEPCVGMSCPPGWGHLDATSAGEKAPSPWGSIRTGAQAAHVWTPAAGSCSVSCGRGLMELRFLCMDSALRVPVQEELCGLASKPGSRREVCQAVPCPARWQYKLAACSVSCGRGVVRRILYCARAHGEDDGEEILLDTQCQGLPRPEPQEACSLEPCPPRWKVMSLGPCSASCGLGTARRSVACVQLDQGQDVEVDEAACAALVRPEASVPCLIADCTYRWHVGTWMECSVSCGDGIQRRRDTCLGPQAQAPVPADFCQHLPKPVTVRGCWAGPCVGQGTPSLVPHEEAAAPGRTTATPAGASLEWSQARGLLFSPAPQPRRLLPGPQENSVQSSACGRQHLEPTGTIDMRGPGQADCAVAIGRPLGEVVTLRVLESSLNCSAGDMLLLWGRLTWRKMCRKLLDMTFSSKTNTLVVRQRCGRPGGGVLLRYGSQLAPETFYRECDMQLFGPWGEIVSPSLSPATSNAGGCRLFINVAPHARIAIHALATNMGAGTEGANASYILIRDTHSLRTTAFHGQQVLYWESESSQAEMEFSEGFLKAQASLRGQYWTLQSWVPEMQDPQSWKGKEGT

SEQ ID NO: 237865 - DNA, 4281 bp, Artificial Sequence
  derived and/or modified sequence
atgcaccagcgccacccccgcgcccgctgcccccccctgtgcgtggccggcatcctggcctgcggcttcctgctgggctgctggggccccagccacttccagcagagctgcctgcaggccctggagccccaggccgtgagcagctacctgagccccggcgcccccctgaagggccgcccccccagccccggcttccagcgccagcgccagcgccagcgccgcgccgccggcggcatcctgcacctggagctgctggtggccgtgggccccgacgtgttccaggcccaccaggaggacaccgagcgctacgtgctgaccaacctgaacatcggcgccgagctgctgcgcgaccccagcctgggcgcccagttccgcgtgcacctggtgaagatggtgatcctgaccgagcccgagggcgcccccaacatcaccgccaacctgaccagcagcctgctgagcgtgtgcggctggagccagaccatcaaccccgaggacgacaccgaccccggccacgccgacctggtgctgtacatcacccgcttcgacctggagctgcccgacggcaaccgccaggtgcgcggcgtgacccagctgggcggcgcctgcagccccacctggagctgcctgatcaccgaggacaccggcttcgacctgggcgtgaccatcgcccacgagatcggccacagcttcggcctggagcacgacggcgcccccggcagcggctgcggccccagcggccacgtgatggccagcgacggcgccgccccccgcgccggcctggcctggagcccctgcagccgccgccagctgctgagcctgctgagcgccggccgcgcccgctgcgtgtgggaccccccccgcccccagcccggcagcgccggccacccccccgacgcccagcccggcctgtactacagcgccaacgagcagtgccgcgtggccttcggccccaaggccgtggcctgcaccttcgcccgcgagcacctggacatgtgccaggccctgagctgccacaccgaccccctggaccagagcagctgcagccgcctgctggtgcccctgctggacggcaccgagtgcggcgtggagaagtggtgcagcaagggccgctgccgcagcctggtggagctgacccccatcgccgccgtgcacggccgctggagcagctggggcccccgcagcccctgcagccgcagctgcggcggcggcgtggtgacccgccgccgccagtgcaacaacccccgccccgccttcggcggccgcgcctgcgtgggcgccgacctgcaggccgagatgtgcaacacccaggcctgcgagaagacccagctggagttcatgagccagcagtgcgcccgcaccgacggccagcccctgcgcagcagccccggcggcgccagcttctaccactggggcgccgccgtgccccacagccagggcgacgccctgtgccgccacatgtgccgcgccatcggcgagagcttcatcatgaagcgcggcgacagcttcctggacggcacccgctgcatgcccagcggcccccgcgaggacggcaccctgagcctgtgcgtgagcggcagctgccgcaccttcggctgcgacggccgcatggacagccagcaggtgtgggaccgctgccaggtgtgcggcggcgacaacagcacctgcagcccccgcaagggcagcttcaccgccggccgcgcccgcgagtacgtgaccttcctgaccgtgacccccaacctgaccagcgtgtacatcgccaaccaccgccccctgttcacccacctggccgtgcgcatcggcggccgctacgtggtggccggcaagatgagcatcagccccaacaccacctaccccagcctgctggaggacggccgcgtggagtaccgcgtggccctgaccgaggaccgcctgccccgcctggaggagatccgcatctggggccccctgcaggaggacgccgacatccaggtgtaccgccgctacggcgaggagtacggcaacctgacccgccccgacatcaccttcacctacttccagcccaagccccgccaggcctgggtgtgggccgccgtgcgcggcccctgcagcgtgagctgcggcgccggcctgcgctgggtgaactacagctgcctggaccaggcccgcaaggagctggtggagaccgtgcagtgccagggcagccagcagccccccgcctggcccgaggcctgcgtgctggagccctgccccccctactgggccgtgggcgacttcggcccctgcagcgccagctgcggcggcggcctgcgcgagcgccccgtgcgctgcgtggaggcccagggcagcctgctgaagaccctgccccccgcccgctgccgcgccggcgcccagcagcccgccgtggccctggagacctgcaacccccagccctgccccgcccgctgggaggtgagcgagcccagcagctgcaccagcgccggcggcgccggcctggccctggagaacgagacctgcgtgcccggcgccgacggcctggaggcccccgtgaccgagggccccggcagcgtggacgagaagctgcccgcccccgagccctgcgtgggcatgagctgcccccccggctggggccacctggacgccaccagcgccggcgagaaggcccccagcccctggggcagcatccgcaccggcgcccaggccgcccacgtgtggacccccgccgccggcagctgcagcgtgagctgcggccgcggcctgatggagctgcgcttcctgtgcatggacagcgccctgcgcgtgcccgtgcaggaggagctgtgcggcctggccagcaagcccggcagccgccgcgaggtgtgccaggccgtgccctgccccgcccgctggcagtacaagctggccgcctgcagcgtgagctgcggccgcggcgtggtgcgccgcatcctgtactgcgcccgcgcccacggcgaggacgacggcgaggagatcctgctggacacccagtgccagggcctgccccgccccgagccccaggaggcctgcagcctggagccctgccccccccgctggaaggtgatgagcctgggcccctgcagcgccagctgcggcctgggcaccgcccgccgcagcgtggcctgcgtgcagctggaccagggccaggacgtggaggtggacgaggccgcctgcgccgccctggtgcgccccgaggccagcgtgccctgcctgatcgccgactgcacctaccgctggcacgtgggcacctggatggagtgcagcgtgagctgcggcgacggcatccagcgccgccgcgacacctgcctgggcccccaggcccaggcccccgtgcccgccgacttctgccagcacctgcccaagcccgtgaccgtgcgcggctgctgggccggcccctgcgtgggccagggcacccccagcctggtgccccacgaggaggccgccgcccccggccgcaccaccgccacccccgccggcgccagcctggagtggagccaggcccgcggcctgctgttcagccccgccccccagccccgccgcctgctgcccggcccccaggagaacagcgtgcagagcagcgcctgcggccgccagcacctggagcccaccggcaccatcgacatgcgcggccccggccaggccgactgcgccgtggccatcggccgccccctgggcgaggtggtgaccctgcgcgtgctggagagcagcctgaactgcagcgccggcgacatgctgctgctgtggggccgcctgacctggcgcaagatgtgccgcaagctgctggacatgaccttcagcagcaagaccaacaccctggtggtgcgccagcgctgcggccgccccggcggcggcgtgctgctgcgctacggcagccagctggcccccgagaccttctaccgcgagtgcgacatgcagctgttcggcccctggggcgagatcgtgagccccagcctgagccccgccaccagcaacgccggcggctgccgcctgttcatcaacgtggccccccacgcccgcatcgccatccacgccctggccaccaacatgggcgccggcaccgagggcgccaacgccagctacatcctgatccgcgacacccacagcctgcgcaccaccgccttccacggccagcaggtgctgtactgggagagcgagagcagccaggccgagatggagttcagcgagggcttcctgaaggcccaggccagcctgcgcggccagtactggaccctgcagagctgggtgcccgagatgcaggacccccagagctggaagggcaaggagggcacc

SEQ ID NO: 237866 - DNA, 4934 bp, Artificial Sequence
  derived and/or modified sequence
aaccacgatgtctttggcacagcctctcatctgtcagatgggagcggggaccccggagagggagtcagccgaggtcctggcattccttgtgaacccccgtctgtgggtttctggtccagtgtcccttctccagattagatggcttaggcctcctctaagggggtgggcgtgcacatccggagagctgtctggtgtgcaggactgggctgcaggttaccctgaactgcaaccatcttagagcaaggcccagcttgcagcaggaggagctgcaggccgcccaccctagccacggcccctgccctggcaggaagcttccaagagtaaacactgcctaatcgtcccgcccagtagtgagcaggcctgtcccattccatactgaccagattcccagtcaccaaggccccctctcactccgctccactcctcgggctggctctcctgaggatgcaccagcgtcacccccgggcaagatgccctcccctctgtgtggccggaatccttgcctgtggctttctcctgggctgctggggaccctcccatttccagcagagttgtcttcaggctttggagccacaggccgtgtcttcttacttgagccctggtgctcccttaaaaggccgccctccttcccctggcttccagaggcagaggcagaggcagaggcgggctgcaggcggcatcctacacctggagctgctggtggccgtgggccccgatgtcttccaggctcaccaggaggacacagagcgctatgtgctcaccaacctcaacatcggggcagaactgcttcgggacccgtccctgggggctcagtttcgggtgcacctggtgaagatggtcattctgacagagcctgagggtgctccaaatatcacagccaacctcacctcgtccctgctgagcgtctgtgggtggagccagaccatcaaccctgaggacgacacggatcctggccatgctgacctggtcctctatatcactaggtttgacctggagttgcctgatggtaaccggcaggtgcggggcgtcacccagctgggcggtgcctgctccccaacctggagctgcctcattaccgaggacactggcttcgacctgggagtcaccattgcccatgagattgggcacagcttcggcctggagcacgacggcgcgcccggcagcggctgcggccccagcggacacgtgatggcttcggacggcgccgcgccccgcgccggcctcgcctggtccccctgcagccgccggcagctgctgagcctgctcagcgcaggacgggcgcgctgcgtgtgggacccgccgcggcctcaacccgggtccgcggggcacccgccggatgcgcagcctggcctctactacagcgccaacgagcagtgccgcgtggccttcggccccaaggctgtcgcctgcaccttcgccagggagcacctggatatgtgccaggccctctcctgccacacagacccgctggaccaaagcagctgcagccgcctcctcgttcctctcctggatgggacagaatgtggcgtggagaagtggtgctccaagggtcgctgccgctccctggtggagctgacccccatagcagcagtgcatgggcgctggtctagctggggtccccgaagtccttgctcccgctcctgcggaggaggtgtggtcaccaggaggcggcagtgcaacaaccccagacctgcctttggggggcgtgcatgtgttggtgctgacctccaggccgagatgtgcaacactcaggcctgcgagaagacccagctggagttcatgtcgcaacagtgcgccaggaccgacggccagccgctgcgctcctcccctggcggcgcctccttctaccactggggtgctgctgtaccacacagccaaggggatgctctgtgcagacacatgtgccgggccattggcgagagcttcatcatgaagcgtggagacagcttcctcgatgggacccggtgtatgccaagtggcccccgggaggacgggaccctgagcctgtgtgtgtcgggcagctgcaggacatttggctgtgatggtaggatggactcccagcaggtatgggacaggtgccaggtgtgtggtggggacaacagcacgtgcagcccacggaagggctctttcacagctggcagagcgagagaatatgtcacgtttctgacagttacccccaacctgaccagtgtctacattgccaaccacaggcctctcttcacacacttggcggtgaggatcggagggcgctatgtcgtggctgggaagatgagcatctcccctaacaccacctacccctccctcctggaggatggtcgtgtcgagtacagagtggccctcaccgaggaccggctgccccgcctggaggagatccgcatctggggacccctccaggaagatgctgacatccaggtttacaggcggtatggcgaggagtatggcaacctcacccgcccagacatcaccttcacctacttccagcctaagccacggcaggcctgggtgtgggccgctgtgcgtgggccctgctcggtgagctgtggggcagggctgcgctgggtaaactacagctgcctggaccaggccaggaaggagttggtggagactgtccagtgccaagggagccagcagccaccagcgtggccagaggcctgcgtgctcgaaccctgccctccctactgggcggtgggagacttcggcccatgcagcgcctcctgtgggggtggcctgcgggagcggccagtgcgctgcgtggaggcccagggcagcctcctgaagacattgcccccagcccggtgcagagcaggggcccagcagccagctgtggcgctggaaacctgcaacccccagccctgccctgccaggtgggaggtgtcagagcccagctcatgcacatcagctggtggagcaggcctggccttggagaacgagacctgtgtgccaggggcagatggcctggaggctccagtgactgaggggcctggctccgtagatgagaagctgcctgcccctgagccctgtgtcgggatgtcatgtcctccaggctggggccatctggatgccacctctgcaggggagaaggctccctccccatggggcagcatcaggacgggggctcaagctgcacacgtgtggacccctgcggcagggtcgtgctccgtctcctgcgggcgaggtctgatggagctgcgtttcctgtgcatggactctgccctcagggtgcctgtccaggaagagctgtgtggcctggcaagcaagcctgggagccggcgggaggtctgccaggctgtcccgtgccctgctcggtggcagtacaagctggcggcctgcagcgtgagctgtgggagaggggtcgtgcggaggatcctgtattgtgcccgggcccatggggaggacgatggtgaggagatcctgttggacacccagtgccaggggctgcctcgcccggaaccccaggaggcctgcagcctggagccctgcccacctaggtggaaagtcatgtcccttggcccatgttcggccagctgtggccttggcactgctagacgctcggtggcctgtgtgcagctcgaccaaggccaggacgtggaggtggacgaggcggcctgtgcggcgctggtgcggcccgaggccagtgtcccctgtctcattgccgactgcacctaccgctggcatgttggcacctggatggagtgctctgtttcctgtggggatggcatccagcgccggcgtgacacctgcctcggaccccaggcccaggcgcctgtgccagctgatttctgccagcacttgcccaagccggtgactgtgcgtggctgctgggctgggccctgtgtgggacagggtacgcccagcctggtgccccacgaagaagccgctgctccaggacggaccacagccacccctgctggtgcctccctggagtggtcccaggcccggggcctgctcttctccccggctccccagcctcggcggctcctgcccgggccccaggaaaactcagtgcagtccagtgcctgtggcaggcagcaccttgagccaacaggaaccattgacatgcgaggcccagggcaggcagactgtgcagtggccattgggcggcccctcggggaggtggtgaccctccgcgtccttgagagttctctcaactgcagtgcgggggacatgttgctgctttggggccggctcacctggaggaagatgtgcaggaagctgttggacatgactttcagctccaagaccaacacgctggtggtgaggcagcgctgcgggcggccaggaggtggggtgctgctgcggtatgggagccagcttgctcctgaaaccttctacagagaatgtgacatgcagctctttgggccctggggtgaaatcgtgagcccctcgctgagtccagccacgagtaatgcagggggctgccggctcttcattaatgtggctccgcacgcacggattgccatccatgccctggccaccaacatgggcgctgggaccgagggagccaatgccagctacatcttgatccgggacacccacagcttgaggaccacagcgttccatgggcagcaggtgctctactgggagtcagagagcagccaggctgagatggagttcagcgagggcttcctgaaggctcaggccagcctgcggggccagtactggaccctccaatcatgggtaccggagatgcaggaccctcagtcctggaagggaaaggaaggaacctgagggtcattgaacatttgttccgtgtctggccagccctggagggttgacccctggtctcagtgctttccaattcgaactttttccaatcttaggtatctactttagagtcttctccaatgtccaaaaggctagggggttggaggtggggactctggaaaagcagcccccatttcctcgggtaccaataaataaaacatgcaggctga

SEQ ID NO: 237867 - DNA, 4427 bp, Artificial Sequence
  derived and/or modified sequence
gggaaataagagagaaaagaagagtaagaagaaatataagagccaccatgcaccaacgacatccacgagcacgatgccctcccctgtgcgtagcgggaatcttggcatgcgggtttcttctcggttgctggggaccaagccacttccagcaatcctgcctccaagcgcttgagccccaggcggtgtcgtcctacctgtcgcctggggcacccctcaagggtagacccccttcccccggtttccagaggcaacgacagagacagcggcgggccgcgggtggcatcttgcatctggaactgctggtcgctgtaggaccggacgtattccaggcgcatcaggaggacacagagcgatatgtcctgactaacttgaacatcggtgcagaattgttgagggacccttcgttgggggcgcagtttcgggtacatcttgtaaagatggtaatcctgacagaaccggaaggagcgcccaatatcacggcaaatctgacatcgagcttgttgtcggtctgcggttggagccaaaccatcaaccccgaggacgacacagatcccggccacgcggacctggtcctctatatcacacgattcgaccttgagctgcccgatggtaaccgacaggtccgaggagtcacacagttgggtggagcatgctcccctacttggtcatgcttgatcacggaggacaccgggtttgaccttggggtgacgatcgcacatgagattggccattcgttcggattggaacacgacggggcccccggaagcgggtgcggaccgtcgggacacgtgatggcgagcgatggggccgccccgcgagcaggactcgcctggagcccgtgtagccgccgacagctcctctcccttctttcggcgggacgcgcgaggtgcgtgtgggatccccctcgaccgcagcccgggagcgcgggtcatccgccagacgcacagcccggtctttactatagcgcaaacgagcagtgcagggtcgccttcggacctaaagccgtagcgtgtacattcgcgcgagaacatctcgacatgtgccaggcactcagctgccataccgacccgctggaccagtcatcctgttcaaggcttttggtccccctcctggatggcacagagtgtggggtggaaaagtggtgttcaaaaggtcggtgtagatcacttgtcgaattgacgccaattgccgccgtccacgggaggtggtcatcatggggccctcgcagcccgtgctcgcgatcgtgtggagggggcgtcgtgactcggaggagacagtgcaacaaccccagaccggccttcggcggtagagcctgcgtcggggcggaccttcaagcggagatgtgtaacacgcaggcctgtgaaaagactcagttggagtttatgagccaacagtgtgccagaaccgatgggcaacccctgcggtcatcgccaggaggggcgtcattttaccactggggagccgcagtgcctcactcacaaggggacgcgctgtgccggcatatgtgcagggccattggggaatcattcatcatgaaacggggtgactcattccttgacggaacacgatgtatgcctagcgggcctagagaggacggaaccctttccttgtgtgtgtcgggatcatgtagaacatttgggtgcgatggtcggatggacagccaacaggtgtgggacagatgccaagtgtgcgggggtgacaactcgacgtgctcgccacgaaaaggctcgttcaccgccggtcgagcccgggagtatgtgacattcctcacggtaacgcccaatctgacgagcgtctacatcgccaaccacagacccctctttacccaccttgctgtgcggatcggagggcgctacgtcgtagcggggaagatgtcgatctcgccaaatactacatacccgtcgcttctcgaagatgggcgcgtcgagtacagggtggcgttgaccgaggaccggctcccgcgcttggaagagattaggatttggggacctcttcaagaggatgcggatatccaagtatacaggcgctacggagaggagtacggaaacctcacaagaccggatattacgtttacgtattttcagccgaagcctcgacaggcgtgggtctgggcagctgtgcgcggtccttgttcagtctcatgtggtgcggggttgaggtgggtcaactactcgtgcctcgaccaggcgcgaaaggaactcgtggaaacagtacagtgtcaggggtcccagcagccgccagcatggcctgaagcgtgtgtgttggaaccttgtccgccctattgggcggtgggagacttcgggccctgttcggcttcgtgcggtggtggactgagagaacgcccggtgagatgcgtcgaggcccagggctcacttcttaagactcttcctccagcaagatgtagagcgggagcgcagcagcccgccgtggcacttgaaacttgcaacccgcaaccatgcccagctaggtgggaggtgtcggaaccgtcgtcgtgcacgtcagccggaggtgcagggttggcgcttgagaatgagacttgcgtaccgggagccgacgggcttgaggcacctgtcactgagggaccgggttcggtcgacgaaaaactccccgcccctgagccttgcgtaggcatgtcgtgcccgccaggatggggacacctggacgcgaccagcgcaggcgaaaaagctccgtcgccgtggggttccattcgcaccggagctcaagcagcacacgtctggaccccggcagcggggtcatgctccgtatcgtgcggcagagggctgatggaactcagattcttgtgtatggattcggcgctgcgggtgcctgtgcaagaagagctttgtgggctcgcctcaaagcctggtagcagacgcgaagtgtgtcaagcggtgccgtgcccagcaagatggcagtacaaactggcagcctgctcggtatcgtgtggtagaggagtcgtccggcgaattctctattgcgcacgggcgcacggagaggacgatggggaggagatccttttggatactcagtgccagggattgcccaggcccgaaccccaagaagcgtgttcgctcgaaccctgtccgccacggtggaaagtaatgtcgctcgggccgtgctcagcgtcgtgtgggttgggaactgcacggcggagcgtggcgtgtgtccagttggatcaagggcaggatgtggaggtggacgaggcagcgtgtgcggcacttgtacggcccgaagcgtcggtgccgtgcttgatcgcagattgcacataccgctggcatgtcggcacgtggatggagtgttccgtgtcatgcggggacggaatccagcggcgacgcgatacgtgtcttgggccgcaggcgcaggcaccggtcccggctgacttctgccagcacctcccgaagcctgtcacggtgcgcgggtgctgggcgggaccctgcgtggggcagggaactccctcactcgtgccgcatgaggaagcagctgctccgggacggactactgcgaccccggcaggggcatcattggaatggtcacaggccagagggttgttgttctcgcctgcaccacaaccgcgcagactcctccctggaccacaagagaacagcgtccagtcaagcgcatgtggacgacagcaccttgaaccgactggaacgatcgacatgaggggtccggggcaggcagactgcgccgtggccatcggtagaccgttgggtgaggtggtaacgcttagggtcctcgaatcatcgcttaattgctcagccggtgacatgctcctgttgtgggggaggctgacctggcggaagatgtgtcgcaagctcctcgatatgacgttttcgtccaaaacgaatacacttgtggtgagacagagatgtggtcgaccgggtggcggtgtgctgctcagatatggctcgcagttggcacccgaaacattctaccgagaatgtgacatgcaactgtttgggccatggggagagattgtcagcccgtcgctctcaccggcaacttcgaacgccggaggctgtcgactcttcatcaatgtggcccctcatgcccgcattgcaatccacgctctcgcgacgaacatgggggcaggaactgaaggggcgaatgcgtcctatatcttgatcagggatacacactcattgcgaacaacggcgtttcatggtcagcaagtactgtattgggaatcggagtcctcgcaagcggagatggagttttcggaaggctttcttaaagcccaggcctcgcttaggggccagtattggacccttcagagctgggtccctgaaatgcaagacccccagtcgtggaaagggaaagagggaacgtgataagctgccttctgcggggcttgccttctggccatgcccttcttctctcccttgcacctgtacctcttggtctttgaataaagcctgagtaggaag

SEQ ID NO: 237868 - DNA, 4284 bp, Artificial Sequence
  derived and/or modified sequence
atgcaccagagacaccccagagccagatgcccccccctgtgcgtggccggcatcctggcctgcggcttcctgctgggctgctggggccccagccacttccagcagagctgcctgcaggccctggagccccaggccgtgagcagctacctgagccccggcgcccccctgaagggcagaccccccagccccggcttccagagacagagacagagacagagaagagccgccggcggcatcctgcacctggagctgctggtggccgtgggccccgacgtgttccaggcccaccaggaggacaccgagagatacgtgctgaccaacctgaacatcggcgccgagctgctgagagaccccagcctgggcgcccagttcagagtgcacctggtgaagatggtgatcctgaccgagcccgagggcgcccccaacatcaccgccaacctgaccagcagcctgctgagcgtgtgcggctggagccagaccatcaaccccgaggacgacaccgaccccggccacgccgacctggtgctgtacatcaccagattcgacctggagctgcccgacggcaacagacaggtgagaggcgtgacccagctgggcggcgcctgcagccccacctggagctgcctgatcaccgaggacaccggcttcgacctgggcgtgaccatcgcccacgagatcggccacagcttcggcctggagcacgacggcgcccccggcagcggctgcggccccagcggccacgtgatggccagcgacggcgccgcccccagagccggcctggcctggagcccctgcagcagaagacagctgctgagcctgctgagcgccggcagagccagatgcgtgtgggacccccccagaccccagcccggcagcgccggccacccccccgacgcccagcccggcctgtactacagcgccaacgagcagtgcagagtggccttcggccccaaggccgtggcctgcaccttcgccagagagcacctggacatgtgccaggccctgagctgccacaccgaccccctggaccagagcagctgcagcagactgctggtgcccctgctggacggcaccgagtgcggcgtggagaagtggtgcagcaagggcagatgcagaagcctggtggagctgacccccatcgccgccgtgcacggcagatggagcagctggggccccagaagcccctgcagcagaagctgcggcggcggcgtggtgaccagaagaagacagtgcaacaaccccagacccgccttcggcggcagagcctgcgtgggcgccgacctgcaggccgagatgtgcaacacccaggcctgcgagaagacccagctggagttcatgagccagcagtgcgccagaaccgacggccagcccctgagaagcagccccggcggcgccagcttctaccactggggcgccgccgtgccccacagccagggcgacgccctgtgcagacacatgtgcagagccatcggcgagagcttcatcatgaagagaggcgacagcttcctggacggcaccagatgcatgcccagcggccccagagaggacggcaccctgagcctgtgcgtgagcggcagctgcagaaccttcggctgcgacggcagaatggacagccagcaggtgtgggacagatgccaggtgtgcggcggcgacaacagcacctgcagccccagaaagggcagcttcaccgccggcagagccagagagtacgtgaccttcctgaccgtgacccccaacctgaccagcgtgtacatcgccaaccacagacccctgttcacccacctggccgtgagaatcggcggcagatacgtggtggccggcaagatgagcatcagccccaacaccacctaccccagcctgctggaggacggcagagtggagtacagagtggccctgaccgaggacagactgcccagactggaggagatcagaatctggggccccctgcaggaggacgccgacatccaggtgtacagaagatacggcgaggagtacggcaacctgaccagacccgacatcaccttcacctacttccagcccaagcccagacaggcctgggtgtgggccgccgtgagaggcccctgcagcgtgagctgcggcgccggcctgagatgggtgaactacagctgcctggaccaggccagaaaggagctggtggagaccgtgcagtgccagggcagccagcagccccccgcctggcccgaggcctgcgtgctggagccctgccccccctactgggccgtgggcgacttcggcccctgcagcgccagctgcggcggcggcctgagagagagacccgtgagatgcgtggaggcccagggcagcctgctgaagaccctgccccccgccagatgcagagccggcgcccagcagcccgccgtggccctggagacctgcaacccccagccctgccccgccagatgggaggtgagcgagcccagcagctgcaccagcgccggcggcgccggcctggccctggagaacgagacctgcgtgcccggcgccgacggcctggaggcccccgtgaccgagggccccggcagcgtggacgagaagctgcccgcccccgagccctgcgtgggcatgagctgcccccccggctggggccacctggacgccaccagcgccggcgagaaggcccccagcccctggggcagcatcagaaccggcgcccaggccgcccacgtgtggacccccgccgccggcagctgcagcgtgagctgcggcagaggcctgatggagctgagattcctgtgcatggacagcgccctgagagtgcccgtgcaggaggagctgtgcggcctggccagcaagcccggcagcagaagagaggtgtgccaggccgtgccctgccccgccagatggcagtacaagctggccgcctgcagcgtgagctgcggcagaggcgtggtgagaagaatcctgtactgcgccagagcccacggcgaggacgacggcgaggagatcctgctggacacccagtgccagggcctgcccagacccgagccccaggaggcctgcagcctggagccctgcccccccagatggaaggtgatgagcctgggcccctgcagcgccagctgcggcctgggcaccgccagaagaagcgtggcctgcgtgcagctggaccagggccaggacgtggaggtggacgaggccgcctgcgccgccctggtgagacccgaggccagcgtgccctgcctgatcgccgactgcacctacagatggcacgtgggcacctggatggagtgcagcgtgagctgcggcgacggcatccagagaagaagagacacctgcctgggcccccaggcccaggcccccgtgcccgccgacttctgccagcacctgcccaagcccgtgaccgtgagaggctgctgggccggcccctgcgtgggccagggcacccccagcctggtgccccacgaggaggccgccgcccccggcagaaccaccgccacccccgccggcgccagcctggagtggagccaggccagaggcctgctgttcagccccgccccccagcccagaagactgctgcccggcccccaggagaacagcgtgcagagcagcgcctgcggcagacagcacctggagcccaccggcaccatcgacatgagaggccccggccaggccgactgcgccgtggccatcggcagacccctgggcgaggtggtgaccctgagagtgctggagagcagcctgaactgcagcgccggcgacatgctgctgctgtggggcagactgacctggagaaagatgtgcagaaagctgctggacatgaccttcagcagcaagaccaacaccctggtggtgagacagagatgcggcagacccggcggcggcgtgctgctgagatacggcagccagctggcccccgagaccttctacagagagtgcgacatgcagctgttcggcccctggggcgagatcgtgagccccagcctgagccccgccaccagcaacgccggcggctgcagactgttcatcaacgtggccccccacgccagaatcgccatccacgccctggccaccaacatgggcgccggcaccgagggcgccaacgccagctacatcctgatcagagacacccacagcctgagaaccaccgccttccacggccagcaggtgctgtactgggagagcgagagcagccaggccgagatggagttcagcgagggcttcctgaaggcccaggccagcctgagaggccagtactggaccctgcagagctgggtgcccgagatgcaggacccccagagctggaagggcaaggagggcacctag

SEQ ID NO: 237869 - DNA, 4632 bp, Artificial Sequence
  derived and/or modified sequence
aaccacgatgtctttggcacagcctctcatctgtcagatgggagcggggaccccggagagggagtcagccgaggtcctggcattccttgtgaacccccgtctgtgggtttctggtccagtgtcccttctccagattagatggcttaggcctcctctaagggggtgggcgtgcacatccggagagctgtctggtgtgcaggactgggctgcaggttaccctgaactgcaaccatcttagagcaaggcccagcttgcagcaggaggagctgcaggccgcccaccctagccacggcccctgccctggcaggaagcttccaagagtaaacactgcctaatcgtcccgcccagtagtgagcaggcctgtcccattccatactgaccagattcccagtcaccaaggccccctctcactccgctccactcctcgggctggctctcctgaggatgcaccagcgtcacccccgggcaagatgccctcccctctgtgtggccggaatccttgcctgtggctttctcctgggctgctggggaccctcccatttccagcagagttgtcttcaggctttggagccacaggccgtgtcttcttacttgagccctggtgctcccttaaaaggccgccctccttcccctggcttccagaggcagaggcagaggcagaggcgggctgcaggcggcatcctacacctggagctgctggtggccgtgggccccgatgtcttccaggctcaccaggaggacacagagcgctatgtgctcaccaacctcaacatcggggcagaactgcttcgggacccgtccctgggggctcagtttcgggtgcacctggtgaagatggtcattctgacagagcctgagggtgccccaaatatcacagccaacctcacctcgtccctgctgagcgtctgtgggtggagccagaccatcaaccctgaggacgacacggatcctggccatgctgacctggtcctctatatcactaggtttgacctggagttgcctgatggtaaccggcaggtgcggggcgtcacccagctgggcggtgcctgctccccaacctggagctgcctcattaccgaggacactggcttcgacctgggagtcaccattgcccatgagattgggcacaggatatgtgccaggccctctcctgccacacagacccgctggaccaaagcagctgcagccgcctcctcgttcctctcctggatgggacagaatgtggcgtggagaagtggtgctccaagggtcgctgccgctccctggtggagctgacccccatagcagcagtgcatgggcgctggtctagctggggtccccgaagtccttgctcccgctcctgcggaggaggtgtggtcaccaggaggcggcagtgcaacaaccccagacctgcctttggggggcgtgcatgtgttggtgctgacctccaggccgagatgtgcaacactcaggcctgcgagaagacccagctggagttcatgtcgcaacagtgcgccaggaccgacggccagccgctgcgctcctcccctggcggcgcctccttctaccactggggtgctgctgtaccacacagccaaggggatgctctgtgcagacacatgtgccgggccattggcgagagcttcatcatgaagcgtggagacagcttcctcgatgggacccggtgtatgccaagtggcccccgggaggacgggaccctgagcctgtgtgtgtcgggcagctgcaggacatttggctgtgatggtaggatggactcccagcaggtatgggacaggtgccaggtgtgtggtggggacaacagcacgtgcagcccacggaagggctctttcacagctggcagagcgagagaatatgtcacatttctgacagttacccccaacctgaccagtgtctacattgccaaccacaggcctctcttcacacacttggcggtgaggatcggagggcgctatgtcgtggctgggaagatgagcatctcccctaacaccacctacccctccctcctggaggatggtcgtgtcgagtacagagtggccctcaccgaggaccggctgccccgcctggaggagatccgcatctggggacccctccaggaagatgctgacatccaggtttacaggcggtatggcgaggagtatggcaacctcacccgcccagacatcaccttcacctacttccagcctaagccacggcaggcctgggtgtgggccgctgtgcgtgggccctgctcggtgagctgtggggcagggctgcgctgggtaaactacagctgcctggaccaggccaggaaggagttggtggagactgtccagtgccaagggagccagcagccaccagcgtggccagaggcctgcgtgctcgaaccctgccctccctactgggcggtgggagacttcggcccatgcagcgcctcctgtgggggcggcctgcgggagcggccagtgcgctgcgtggaggcccagggcagcctcctgaagacattgcccccagcccggtgcagagcaggggcccagcagccagctgtggcgctggaaacctgcaacccccagccctgccctgccaggtgggaggtgtcagagcccagctcatgcacatcagctggtggagcaggcctggccttggagaacgagacctgtgtgccaggggcagatggcctggaggctccagtgactgaggggcctggctccgtagatgagaagctgcctgcccctgagccctgtgtcgggatgtcatgtcctccaggctggggccatctggatgccacctctgcaggggagaaggctccctccccatggggcagcatcaggacgggggctcaagctgcacacgtgtggacccctgcggcagggtcgtgctccgtctcctgcgggcgaggtctgatggagctgcgtttcctgtgcatggactctgccctcagggtgcctgtccaggaagagctgtgtggcctggcaagcaagcctgggagccggcgggaggtctgccaggctgtcccgtgccctgctcggtggcagtacaagctggcggcctgcagcgtgagctgtgggagaggggtcgtgcggaggatcctgtattgtgcccgggcccatggggaggacgatggtgaggagatcctgttggacacccagtgccaggggctgcctcgcccggaaccccaggaggcctgcagcctggagccctgcccacctaggtggaaagtcatgtcccttggcccatgttcggccagctgtggccttggcactgctagacgctcggtggcctgtgtgcagctcgaccaaggccaggacgtggaggtggacgaggcggcctgtgcggcgctggtgcggcccgaggccagtgtcccctgtctcattgccgactgcacctaccgctggcatgttggcacctggatggagtgctctgtttcctgtggggatggcatccagcgccggcgtgacacctgcctcggaccccaggcccaggcgcctgtgccagctgatttctgccagcacttgcccaagccggtgactgtgcgtggctgctgggctgggccctgtgtgggacagggtacgcccagcctggtgccccacgaagaagccgctgctccaggacggaccacagccacccctgctggtgcctccctggagtggtcccaggcccggggcctgctcttctccccggctccccagcctcggcggctcctgcccgggccccaggaaaactcagtgcagtccagtgcctgtggcaggcagcaccttgagccaacaggaaccattgacatgcgaggcccagggcaggcagactgtgcagtggccattgggcggcccctcggggaggtggtgaccctccgcgtccttgagagttctctcaactgcagtgcgggggacatgttgctgctttggggccggctcacctggaggaagatgtgcaggaagctgttggacatgactttcagctccaagaccaacacgctggtggtgaggcagcgctgcgggcggccaggaggtggggtgctgctgcggtatgggagccagcttgctcctgaaaccttctacagagaatgtgacatgcagctctttgggccctggggtgaaatcgtgagcccctcgctgagtccagccacgagtaatgcagggggctgccggctcttcattaatgtggctccgcacgcacggattgccatccatgccctggccaccaacatgggcgctgggaccgagggagccaatgccagctacatcttgatccgggacacccacagcttgaggaccacagcgttccatgggcagcaggtgctctactgggagtcagagagcagccaggctgagatggagttcagcgagggcttcctgaaggctcaggccagcctgcggggccagtactggaccctccaatcatgggtaccggagatgcaggaccctcagtcctggaagggaaaggaaggaacctgagggtcattgaacatttgttccgtgtctggccagccctggagggttgacccctggtctcagtgctttccaattcgaactttttccaatcttaggtatctactttagagtcttctccaatgtccaaaaggctagggggttggaggtggggactctggaaaagcagcccccatttcctcgggtaccaataaataaaacatgcaggctg

SEQ ID NO: 237870 - DNA, 4934 bp, Artificial Sequence
  derived and/or modified sequence
aaccacgatgtctttggcacagcctctcatctgtcagatgggagcggggaccccggagagggagtcagccgaggtcctggcattccttgtgaacccccgtctgtgggtttctggtccagtgtcccttctccagattagatggcttaggcctcctctaagggggtgggcgtgcacatccggagagctgtctggtgtgcaggactgggctgcaggttaccctgaactgcaaccatcttagagcaaggcccagcttgcagcaggaggagctgcaggccgcccaccctagccacggcccctgccctggcaggaagcttccaagagtaaacactgcctaatcgtcccgcccagtagtgagcaggcctgtcccattccatactgaccagattcccagtcaccaaggccccctctcactccgctccactcctcgggctggctctcctgaggatgcaccagcgtcacccccgggcaagatgccctcccctctgtgtggccggaatccttgcctgtggctttctcctgggctgctggggaccctcccatttccagcagagttgtcttcaggctttggagccacaggccgtgtcttcttacttgagccctggtgctcccttaaaaggccgccctccttcccctggcttccagaggcagaggcagaggcagaggcgggctgcaggcggcatcctacacctggagctgctggtggccgtgggccccgatgtcttccaggctcaccaggaggacacagagcgctatgtgctcaccaacctcaacatcggggcagaactgcttcgggacccgtccctgggggctcagtttcgggtgcacctggtgaagatggtcattctgacagagcctgagggtgccccaaatatcacagccaacctcacctcgtccctgctgagcgtctgtgggtggagccagaccatcaaccctgaggacgacacggatcctggccatgctgacctggtcctctatatcactaggtttgacctggagttgcctgatggtaaccggcaggtgcggggcgtcacccagctgggcggtgcctgctccccaacctggagctgcctcattaccgaggacactggcttcgacctgggagtcaccattgcccatgagattgggcacagcttcggcctggagcacgacggcgcgcccggcagcggctgcggccccagcggacacgtgatggcttcggacggcgccgcgccccgcgccggcctcgcctggtccccctgcagccgccggcagctgctgagcctgctcagcgcaggacgggcgcgctgcgtgtgggacccgccgcggcctcaacccgggtccgcggggcacccgccggatgcgcagcctggcctctactacagcgccaacgagcagtgccgcgtggccttcggccccaaggctgtcgcctgcaccttcgccagggagcacctggatatgtgccaggccctctcctgccacacagacccgctggaccaaagcagctgcagccgcctcctcgttcctctcctggatgggacagaatgtggcgtggagaagtggtgctccaagggtcgctgccgctccctggtggagctgacccccatagcagcagtgcatgggcgctggtctagctggggtccccgaagtccttgctcccgctcctgcggaggaggtgtggtcaccaggaggcggcagtgcaacaaccccagacctgcctttggggggcgtgcatgtgttggtgctgacctccaggccgagatgtgcaacactcaggcctgcgagaagacccagctggagttcatgtcgcaacagtgcgccaggaccgacggccagccgctgcgctcctcccctggcggcgcctccttctaccactggggtgctgctgtaccacacagccaaggggatgctctgtgcagacacatgtgccgggccattggcgagagcttcatcatgaagcgtggagacagcttcctcgatgggacccggtgtatgccaagtggcccccgggaggacgggaccctgagcctgtgtgtgtcgggcagctgcaggacatttggctgtgatggtaggatggactcccagcaggtatgggacaggtgccaggtgtgtggtggggacaacagcacgtgcagcccacggaagggctctttcacagctggcagagcgagagaatatgtcacatttctgacagttacccccaacctgaccagtgtctacattgccaaccacaggcctctcttcacacacttggcggtgaggatcggagggcgctatgtcgtggctgggaagatgagcatctcccctaacaccacctacccctccctcctggaggatggtcgtgtcgagtacagagtggccctcaccgaggaccggctgccccgcctggaggagatccgcatctggggacccctccaggaagatgctgacatccaggtttacaggcggtatggcgaggagtatggcaacctcacccgcccagacatcaccttcacctacttccagcctaagccacggcaggcctgggtgtgggccgctgtgcgtgggccctgctcggtgagctgtggggcagggctgcgctgggtaaactacagctgcctggaccaggccaggaaggagttggtggagactgtccagtgccaagggagccagcagccaccagcgtggccagaggcctgcgtgctcgaaccctgccctccctactgggcggtgggagacttcggcccatgcagcgcctcctgtgggggcggcctgcgggagcggccagtgcgctgcgtggaggcccagggcagcctcctgaagacattgcccccagcccggtgcagagcaggggcccagcagccagctgtggcgctggaaacctgcaacccccagccctgccctgccaggtgggaggtgtcagagcccagctcatgcacatcagctggtggagcaggcctggccttggagaacgagacctgtgtgccaggggcagatggcctggaggctccagtgactgaggggcctggctccgtagatgagaagctgcctgcccctgagccctgtgtcgggatgtcatgtcctccaggctggggccatctggatgccacctctgcaggggagaaggctccctccccatggggcagcatcaggacgggggctcaagctgcacacgtgtggacccctgcggcagggtcgtgctccgtctcctgcgggcgaggtctgatggagctgcgtttcctgtgcatggactctgccctcagggtgcctgtccaggaagagctgtgtggcctggcaagcaagcctgggagccggcgggaggtctgccaggctgtcccgtgccctgctcggtggcagtacaagctggcggcctgcagcgtgagctgtgggagaggggtcgtgcggaggatcctgtattgtgcccgggcccatggggaggacgatggtgaggagatcctgttggacacccagtgccaggggctgcctcgcccggaaccccaggaggcctgcagcctggagccctgcccacctaggtggaaagtcatgtcccttggcccatgttcggccagctgtggccttggcactgctagacgctcggtggcctgtgtgcagctcgaccaaggccaggacgtggaggtggacgaggcggcctgtgcggcgctggtgcggcccgaggccagtgtcccctgtctcattgccgactgcacctaccgctggcatgttggcacctggatggagtgctctgtttcctgtggggatggcatccagcgccggcgtgacacctgcctcggaccccaggcccaggcgcctgtgccagctgatttctgccagcacttgcccaagccggtgactgtgcgtggctgctgggctgggccctgtgtgggacagggtacgcccagcctggtgccccacgaagaagccgctgctccaggacggaccacagccacccctgctggtgcctccctggagtggtcccaggcccggggcctgctcttctccccggctccccagcctcggcggctcctgcccgggccccaggaaaactcagtgcagtccagtgcctgtggcaggcagcaccttgagccaacaggaaccattgacatgcgaggcccagggcaggcagactgtgcagtggccattgggcggcccctcggggaggtggtgaccctccgcgtccttgagagttctctcaactgcagtgcgggggacatgttgctgctttggggccggctcacctggaggaagatgtgcaggaagctgttggacatgactttcagctccaagaccaacacgctggtggtgaggcagcgctgcgggcggccaggaggtggggtgctgctgcggtatgggagccagcttgctcctgaaaccttctacagagaatgtgacatgcagctctttgggccctggggtgaaatcgtgagcccctcgctgagtccagccacgagtaatgcagggggctgccggctcttcattaatgtggctccgcacgcacggattgccatccatgccctggccaccaacatgggcgctgggaccgagggagccaatgccagctacatcttgatccgggacacccacagcttgaggaccacagcgttccatgggcagcaggtgctctactgggagtcagagagcagccaggctgagatggagttcagcgagggcttcctgaaggctcaggccagcctgcggggccagtactggaccctccaatcatgggtaccggagatgcaggaccctcagtcctggaagggaaaggaaggaacctgagggtcattgaacatttgttccgtgtctggccagccctggagggttgacccctggtctcagtgctttccaattcgaactttttccaatcttaggtatctactttagagtcttctccaatgtccaaaaggctagggggttggaggtggggactctggaaaagcagcccccatttcctcgggtaccaataaataaaacatgcaggctga

SEQ ID NO: 237871 - DNA, 4284 bp, Artificial Sequence
  derived and/or modified sequence
atgcaccagcggcacccacgggcccgctgtccaccactgtgcgtcgcaggtatcctcgcatgcggattcctgttgggctgctgggggccctcacacttccagcaaagctgcctgcaggccctggagccacaggccgtaagctcatacctatctcccggagctccactcaaggggcgcccacccagcccaggctttcagcgacagagacaacggcagcggcgggccgctggagggatactccatctcgaactgctcgtggcggtgggacccgacgtcttccaggcccatcaagaggacaccgaacgctatgtcttaactaacttgaacataggagccgagctattgagagatccctccctgggagcacagtttcgcgttcatcttgtgaagatggtgattcttaccgagccagaaggcgcccccaatatcaccgccaatctgacatcctccctccttagtgtttgcggctggtcccaaacaatcaatcctgaagatgatacggaccctggccacgctgatttggtcctgtatattacgaggtttgatttggagctgcctgacgggaatcggcaggtcaggggcgtcacccaactcggtggcgcttgctctcctacctggagttgtttgattacagaggatacaggtttcgatctgggcgtcaccattgcacacgaaattgggcactcattcgggttagaacacgacggagcccccggcagcggctgcgggccctccggccatgttatggcctccgatggcgccgcaccccgcgctgggttagcttggagcccttgctctcgtaggcagttgctgtcactgctgtccgctggcagagcacgttgcgtgtgggaccctcctcggccccagccggggtcagcaggacaccctcccgacgcccagccaggactatactattccgccaacgagcaatgtagagtagcattcggccccaaagccgtcgcctgcacatttgccagggaacaccttgacatgtgccaggccctttcgtgccacaccgaccctctggaccagtcttcatgctccaggctgcttgtgccccttctggacggaaccgagtgcggagtcgagaaatggtgtagtaaaggtcggtgtagaagcctggtggaactaacacctatcgctgctgtacacgggagatggagctcttggggcccaagaagcccttgttcgagatcgtgtggcggtggagttgtgacccgtagacggcagtgtaacaaccctaggcccgcattcggagggagagcatgcgtgggggccgatttacaagcagaaatgtgtaatacccaggcatgcgaaaagacacagcttgaatttatgtctcagcagtgtgcaagaaccgatgggcagccgctgcggagtagcccaggaggagcgtcattttaccattggggagccgcagtcccccactcccagggtgatgccctgtgtcggcacatgtgtcgagctatcggcgaatcttttattatgaaacgtggtgactcatttctggacggcaccaggtgcatgccttcagggcctagagaggatgggactttatcgctatgcgtgtccgggtcctgccggaccttcggatgcgatgggagaatggactcgcagcaggtctgggatagatgccaggtgtgcggaggtgataacagcacttgttcaccgaggaagggttccttcaccgcaggccgtgcccgcgaatacgtgacatttctcaccgttacacccaacctgacatctgtgtacattgcaaaccacaggcccttgtttacacatctggcggtgagaattggaggtcgttacgtggtggcaggcaaaatgtctatatctcccaacacaacctacccttctctgctggaggatggtcgcgtcgagtatcgggtcgctctcactgaggacaggctgccacggctcgaggaaatccggatttgggggcctcttcaggaggatgccgatatccaagtctatagaagatacggcgaggagtacggcaatttaactaggccagatatcacattcacttactttcagccaaagccaaggcaggcttgggtgtgggcggccgtcagaggtccatgtagcgtgtcctgtggcgctggcctgaggtgggttaattactcatgtttggatcaggcccgaaaagagctggtggaaaccgtgcaatgtcagggatcacagcagccccccgcatggcccgaagcgtgtgtgctagagccctgccccccgtactgggccgtgggtgatttcggcccatgctctgcctcttgcgggggcggcctcagagagagacctgtacggtgcgtcgaggctcagggctccctgctgaagactttaccccccgctcgctgtagggccggggcacaacagcccgcagtggccctggaaacctgcaacccacaaccatgtcctgcccggtgggaggtgagtgagccaagcagctgcacttcagccggcggggcaggactggcgttggaaaatgagacctgtgtgcctggcgccgatgggttggaggcccctgtgacagagggccctgggtctgtggacgagaagctgcctgcccctgagccttgcgtcggaatgagctgtcctccaggctgggggcatctcgacgccacatccgctggagaaaaagctccctcaccatggggctcaattaggactggggcccaggccgcacacgtttggacccctgccgccggcagctgctccgtcagctgcggccgaggtctgatggagctacgctttctttgtatggattctgcacttcgcgtgccggtgcaggaggaactttgcggactggcttccaagcctggctcaaggcgcgaggtatgccaggcagtgccttgtcccgcaaggtggcagtataagctggctgcctgttctgtgtcttgtgggagaggagtggtcagaagaatcctgtattgcgcgagagcccatggggaagatgacggcgaggaaatactgctagacacacagtgccagggactgccccgacctgagcctcaagaagcctgctcgttagagccttgccccccgaggtggaaggtaatgagtctcggtccctgttcagcctcttgtggtctcgggactgcccggcgcagcgtggcctgtgtgcaactagatcagggccaagacgtggaagttgacgaagccgcttgtgctgcccttgttaggcccgaagcttcggttccatgtttaattgcagattgtacctacagatggcatgtaggcacctggatggagtgcagcgtgtcttgcggcgatggaattcagagacgccgggatacttgtctgggcccacaggcccaagcccctgtgcccgctgacttttgccagcacctgccgaaaccggtaaccgtgcgtgggtgctgggccggcccctgcgtcggacagggaacaccttccttagttccgcacgaggaagccgccgcccctggcagaactacagcaacccccgctggcgcctctctcgagtggtctcaggcacgcggcctgctgttctctcccgcgccacaaccccgcagattgctcccaggcccccaagagaattcagttcagagctccgcctgtgggaggcagcatcttgagcctaccggcacaattgatatgcggggcccagggcaagccgactgtgctgtagcgattgggcggcctttgggggaggtggtgaccctcagggtgctggagtctagcctgaactgttctgcaggcgacatgctcctgctctggggccggctgacctggcgcaagatgtgcagaaagcttctcgacatgaccttttcgtctaagacaaacacgttggtggtgagacaacgatgcggtcgaccaggcgggggtgtgctgttgagatatggaagccaacttgcacccgagactttttatagagagtgtgacatgcagttattcggcccatggggagagatcgtgtctccatctctgtcccccgcaacgtcaaacgctggcggttgccgtctgttcatcaatgtggcaccgcacgcaagaatagccatccacgcccttgcaaccaacatgggcgccggcactgagggcgcgaacgcatcatacatcctgatccgcgacactcacagcctgagaaccaccgctttccacggtcaacaggtgctctactgggaatcagagagttctcaggccgagatggaatttagcgaggggttccttaaagctcaggcttcactccgcggacagtattggacactgcagtcctgggtgcctgagatgcaggatccccagtcgtggaagggcaaagagggcacttag

SEQ ID NO: 237872 - DNA, 4284 bp, Artificial Sequence
  derived and/or modified sequence
atgcatcagcggcaccctcgggctaggtgccctccattatgtgtcgctgggatattggcttgcggcttcctgctcggctgctggggccctagccattttcagcagtcctgcctccaggccctggaaccccaggctgttagctcatatttatcccctggcgcccccttgaagggacggccgccgagccctggtttccagcgtcaacgccagcggcagcggcgggccgcgggcggaattctacacctggagctgctagttgcagtgggccccgacgtgtttcaggcccaccaggaagataccgagcggtacgtcctcacaaatctcaacattggcgcagagctgctgcgagacccttcccttggagctcagttccgcgtgcacttggtgaaaatggtgattctaaccgagcccgaaggtgcaccaaacatcacagccaacctgacttcttcactgctgagtgtgtgtggttggtcccagactataaaccctgaagatgacacggatcccggtcatgccgacctcgttttgtacataacgagatttgacctcgagctcccagatggcaacagacaggtgcgcggtgttactcagctggggggggcctgcagccctacatggtcatgtctgatcaccgaggacacaggtttcgaccttggcgtgaccatagcacacgagataggacattctttcgggcttgagcacgatggcgccccaggatctggttgcggcccttctgggcacgttatggcatccgacggcgcggccccgcgtgctggattggcctggtccccttgcagcagacgccagttgctaagtcttctgtctgccggacgggctcggtgcgtgtgggacccccccaggcctcagccagggtctgctggccatcctcccgacgctcaacctgggctgtattactcggcaaacgagcagtgtagagtcgcattcgggcctaaagctgtcgcttgcacattcgcaagagagcacctggacatgtgtcaggcccttagctgtcatacagaccctctcgatcagtcgtcgtgttcaaggttgctcgtgccgctactggacggtacagagtgtggcgtggagaaatggtgctccaaagggcgttgccgctcactggtggaattgactccgatcgctgctgtgcatgggaggtggtcctcttggggacctcgctctccctgttccagaagctgcggcggaggggtagtcaccagacggcgtcagtgtaataacccccgcccggctttcgggggcagagcttgtgttggcgcagatttgcaggcggagatgtgcaatacccaggcgtgtgaaaaaactcaactcgagttcatgtcccagcagtgcgcaaggaccgatggacagccactgcgctcttccccgggcggagccagtttctaccattggggagcagccgtaccccactcccagggagatgcactgtgccgccacatgtgccgggcaatcggagaaagtttcattatgaagcggggagattcattcctcgatgggacccgctgtatgccaagtggaccccgtgaagacggcactctgtcactttgcgtctccggcagctgtcgcacttttgggtgtgacgggcggatggacagtcagcaagtctgggaccggtgccaggtgtgtggaggtgataactctacttgctccccacgaaagggatcgtttactgccggtcgtgccagggagtacgttaccttcttgaccgtgacaccaaatttgacttccgtctatatcgcaaatcacaggccactgttcacacacctggctgtcaggatagggggcaggtacgtcgtcgcgggcaagatgtccatttctccaaacacaacttatccatcccttctcgaagatggcagagtagagtacagggttgccctcactgaagaccggcttccacggctcgaagagattcgcatatgggggcctctgcaggaagacgccgacattcaggtctacagacgctacggcgaagagtacggaaaccttacgcgccccgacatcacatttacctatttccagcccaaaccaaggcaggcatgggtttgggccgccgtaaggggaccatgttccgtgagttgcggggccggtctacgctgggtgaactactcttgcctggatcaggctcgtaaggaattggttgagacggtgcagtgccaagggtcgcagcagcctccagcttggcccgaggcctgcgtactcgaaccctgtcctccctactgggccgttggtgactttggaccctgctcggccagctgtggcggcggccttcgtgagaggccagtgaggtgtgtggaggcccagggtagcctgcttaaaaccctgccccctgccaggtgcagagcaggggcgcagcaaccagcagtcgcattagagacctgcaacccacagccttgccctgccagatgggaggtgagtgagccttctagttgcacgtccgcaggaggcgccggattggcactggagaacgagacttgtgtcccgggggccgacggcttggaggcgcccgtgactgaaggacctgggagtgtggacgaaaagctgcccgctcctgagccctgcgtcgggatgtcctgtccgcccggctggggccatttggacgccacctcggctggggaaaaagcgccatctccctgggggtctatacgcaccggggctcaagctgcccatgtttggacaccagcagccggctcatgctctgtgtcctgtggaagaggcttgatggagctccgattcctgtgcatggactccgctctccgggtgccagtgcaggaagaactgtgtggcctcgcctccaaacccggctccaggcgggaggtgtgccaggcagttccgtgtcccgccaggtggcagtacaaacttgccgcatgtagcgtgagctgcggcaggggtgtggtgcggcgcatcctgtattgtgctagggcccatggtgaggatgacggcgaggagattctacttgatactcagtgccaggggcttccccggccagaaccacaggaagcatgctccctggaaccttgcccgccaaggtggaaagtcatgtcactgggcccttgctccgctagttgtggcctgggaaccgctaggagaagtgtggcttgtgtgcagctggatcaaggtcaggacgtggaagtggacgaggccgcctgtgctgctctggtgcgacccgaggccagcgttccctgcctgatagcagactgcacgtatcgatggcacgtagggacatggatggaatgcagcgtttcttgcggcgatgggatccaaaggcgccgcgatacttgtcttggtccccaagcgcaagctccagtgcccgccgatttttgccaacacttgccgaaacccgtcactgtgagagggtgctgggcgggcccatgcgtgggccagggaacaccttctctggtgccacatgaagaagccgccgcccctggccgtaccacagctacccccgcgggggcaagtctggaatggtctcaggccagaggcctcttattcagcccagccccgcagccacgcagacttctgccgggtcctcaagagaactcagtgcagagcagcgcttgtggccgtcaacatctagagccaaccgggaccatagatatgaggggaccaggtcaggcagattgtgcagtcgctatcgggcggcccctgggcgaagtggtgactcttcgggtactggagtcttccttgaactgttccgcaggcgacatgcttctactgtggggaaggctcacatggcgaaaaatgtgtcggaaactgctggacatgacctttagctctaaaaccaacacccttgtcgttaggcaacgttgtggacggcccggaggaggtgttctcctgagatacggcagtcaactcgctcccgagactttttacagagagtgcgacatgcagttattcggaccatggggtgaaatcgtctctccttcactgagtcccgcaaccagcaatgcgggcgggtgtcggctgttcatcaacgtggctcctcacgctagaatcgcgatacatgcactggcaaccaatatgggagctggcaccgaaggcgcgaacgcctcatatattctcatacgcgatactcacagcctccgcacaacagcctttcatggtcagcaagtcctctactgggagagtgagtcttcccaggccgagatggagttctccgagggatttcttaaggcacaggcctccttaagaggccaatattggaccctgcagagttgggtgcccgagatgcaggatccccagagttggaaggggaaggaagggacctag

SEQ ID NO: 237873 - DNA, 4284 bp, Artificial Sequence
  derived and/or modified sequence
atgcaccagaggcacccccgggcccgctgcccccccctgtgtgtggccggcatcctggcctgtggcttcctgctgggctgctggggccccagccacttccagcagagctgcctgcaggccctggagccccaggccgtgagcagctacctgagccctggggcccccctgaagggccggccccccagccctggcttccagaggcagaggcagaggcagaggagagctgctgggggcatcctgcacctggagctgctggtggccgtgggcccagatgtgttccaggcccaccaggaggacacagaaagatatgtgctgaccaacctgaacatcggggctgagctgctgcgggaccccagcctgggcgcccagttccgggtgcacctggtgaagatggtgatcctgacagagcctgagggcgcccccaacatcacagccaacctgaccagcagcctgctgtctgtgtgtggctggagccagaccatcaacccagaagatgacacagatcctggccacgccgacctggtgctgtacatcaccaggtttgacctggagctgcctgatggcaaccggcaggtgcggggcgtgacccagctgggcggggcctgcagccccacctggagctgcctgatcacagaggacaccggctttgacctgggcgtgaccatcgcccacgagatcggccacagctttggcctggagcatgatggagcccctggcagcggctgcggccccagcggccacgtgatggccagtgatggagctgccccccgggccggcctggcctggagcccctgcagccggcggcagctgctgagcctgctgtctgctggccgggcccgctgtgtgtgggaccccccccggccccagcccggcagcgctggccaccccccagatgcccagcccggcctgtactacagcgccaatgagcagtgccgggtggccttcggccccaaggctgtggcctgcacctttgcccgggagcacctggacatgtgccaggccctgagctgccacacagaccccctggaccagagcagctgcagccggctgctggtgcccctgctggatggaacagaatgtggggtggagaagtggtgcagcaagggccgctgccgcagcctggtggagctgacccccatcgctgctgtgcacggccgctggagctcctggggccccaggagcccctgcagccgcagctgtggcggcggcgtggtgacccggcggcggcagtgcaacaaccccaggcctgccttcggcggccgggcctgtgtgggcgctgacctgcaggccgagatgtgcaacacccaggcctgtgagaagacccagctggagttcatgagccagcagtgtgccaggacagatggccagcccctgcggagcagccctgggggcgccagcttctaccactggggcgctgctgtgccccacagccagggagatgccctgtgccgccacatgtgccgggccatcggggagagcttcatcatgaagagaggagacagcttcctggatggcacccgctgcatgcccagcggccccagagaagatggcaccctgagcctgtgtgtgtctggcagctgcaggaccttcggctgtgatggccgcatggacagccagcaggtgtgggaccgctgccaggtgtgtggcggggacaacagcacctgcagccccaggaagggcagcttcaccgctggccgggcccgggagtatgtgaccttcctgactgtgacccccaacctgacctctgtgtacatcgccaaccaccggcccctcttcacccacctggccgtgagaattggaggccgctacgtggtggccggcaagatgagcatcagccccaacaccacctaccccagcctgctggaggatggccgggtggagtacagagtggccctgacagaggaccggctgccccggctggaggagatccgcatctggggccccctgcaggaggatgctgacatccaggtgtacagaagatatggagaggagtatggcaacctgaccaggccagacatcaccttcacctacttccagcccaagccccggcaggcctgggtgtgggccgctgtgcggggcccctgcagcgtgtcctgtggggccggcctgcgctgggtgaactacagctgcctggaccaggccaggaaggagctggtggagaccgtgcagtgccagggcagccagcagcccccagcctggccagaggcctgtgtgctggagccctgccccccctactgggccgtgggggactttggcccctgcagcgccagctgtggcggcggcctgcgggagaggcctgtgcgctgtgtggaggcccagggcagcctgctgaagaccctgcccccagcccgctgcagagctggggcccagcagcctgctgtggccctggagacctgcaacccccagccctgcccagcccgctgggaggtgtctgagcccagcagctgcaccagcgctggaggagctggcctggccctggagaatgagacctgtgtgcctggagcagatggcctggaggcccctgtgacagagggccctggctctgtggatgagaagctgcctgcccctgagccctgtgtgggcatgagctgccccccaggctggggccacctggatgccaccagcgctggggagaaggcccccagcccctggggcagcatcagaactggagcccaggccgcccacgtgtggaccccagctgctggcagctgcagcgtgtcctgtggccggggcctgatggagctgcgcttcctgtgcatggacagcgccctgcgggtgcctgtgcaggaggagctgtgtggcctggccagcaagccaggcagccggcgggaggtgtgccaggccgtgccctgcccagcccgctggcagtacaagctggccgcctgcagcgtgtcctgtggccggggcgtggtgcggcgcatcctgtactgtgcccgggcccatggagaagatgatggagaggagatcctgctggacacccagtgccagggcctgcccaggcctgagccccaggaggcctgcagcctggagccctgccccccacgctggaaggtgatgagcctgggcccctgcagcgccagctgtggcctgggcacagcccggcgctctgtggcctgtgtgcagctggaccagggccaggatgtggaggtggatgaagctgcctgtgccgccctggtgcggcctgaggcctctgtgccctgcctgattgctgactgcacctaccgctggcacgtgggcacctggatggagtgcagcgtgtcctgtggagatggcatccagaggagaagagacacctgcctgggcccccaggcccaggcccctgtgcctgctgacttctgccagcacctgcccaagcctgtgacagtgcggggctgctgggccggcccctgtgtgggccagggcacccccagcctggtgccccatgaggaggccgccgcccctggccgcaccacagccaccccagctggggccagcctggagtggagccaggcccggggcctgctcttctccccagccccccagccccggcggctgctgcccggcccccaggagaacagcgtgcagagcagcgcctgtggccggcagcacctggagcccaccggcaccatcgacatgaggggccctggccaggccgactgtgctgtggccatcggccggcccctgggggaggtggtgaccctgcgggtgctggagagcagcctgaactgcagcgctggggacatgctgctgctgtggggccgcctgacctggaggaagatgtgcaggaagctgctggacatgaccttcagcagcaagaccaacaccctggtggtgcggcagagatgtggccggcctgggggcggcgtgctgctgcgctatggcagccagctggcccctgagaccttctaccgggagtgtgacatgcagctgtttggcccctggggcgagatcgtgagccccagcctgagccctgccaccagcaatgctgggggctgccgcctcttcatcaacgtggccccccacgccagaattgccatccacgccctggccaccaacatgggcgccggcacagagggcgccaatgccagctacatcctgatccgggacacccacagcctgcggaccacagccttccacggccagcaggtgctgtactgggagagcgagagcagccaggccgagatggagttcagcgagggcttcctgaaggcccaggccagcctgcggggccagtactggaccctgcagagctgggtgcctgagatgcaggacccccagagctggaagggcaaggagggcacctag

SEQ ID NO: 237874 - DNA, 4284 bp, Artificial Sequence
  derived and/or modified sequence
atgcaccagcggcacccccgggcccggtgcccccccctgtgcgtggcagggattctcgcatgcggcttcctgttgggctgttggggcccctctcacttccagcagtcatgccttcaggcactggaaccacaggctgttagttcatatctgagccccggagcccccctcaagggccgtcccccatctcccggatttcaacggcagcggcagaggcagcggagagccgcaggaggcatcctgcatctggagcttctggtagctgtaggccctgacgtctttcaggcacaccaggaagacacggagagatacgtgttaaccaacctgaatattggagccgaactgctgcgagatccctctttgggggcgcagtttcgcgtgcatctcgtgaagatggtaatcctgaccgagcccgagggcgcaccaaatataaccgcaaatctgacctcaagtctgctctctgtgtgcggctggtcccaaacgataaatcctgaagacgatacagatccaggccacgctgaccttgttctgtatattacccgtttcgacttggaattgccggatggcaatagacaagtaagaggtgtgacccaactgggaggagcatgtagccctacttggagttgcttgatcacagaggatactggcttcgacttaggggtgaccatcgcccacgagatcgggcatagctttgggctggaacacgatggggctcctgggtccggatgcggtcctagtggccacgtgatggccagtgatggagccgctcctagagccggactcgcctggtctccctgttcccggaggcagttactgagtctcctgagcgccggcagagctcggtgcgtatgggatcctccccggccacagcccggatcagccggacatccccccgatgctcagccaggtctgtactactccgctaatgaacagtgtcgcgtggcctttggaccaaaggccgtagcatgcacttttgccagagaacacctggatatgtgtcaggctctctcatgccacactgaccctcttgaccagagttcttgttcacggctactggtcccactgcttgatggcacggaatgcggagtggaaaagtggtgcagtaagggccggtgcaggtccctcgtcgagctgacacctatcgccgctgtccacggacggtggagcagctgggggcctcggagcccctgttctaggtcttgcggcggcggggtcgtcactcggaggcggcagtgcaataatcctcgacctgcattcggtggacgagcttgcgtcggcgccgatctgcaagccgagatgtgcaacacccaggcctgcgaaaaaacccaactggaatttatgagtcagcagtgcgcgcgcacagacgggcagcccctaagatccagccctgggggggcttcgttttaccattggggagctgcagtgcctcactcacagggggatgccctctgtagacatatgtgcagagccattggcgagtcattcatcatgaaacgcggggatagcttcctggatgggacgcgatgtatgcccagtggccccagggaggacggaacactaagtctatgtgtgagcgggagctgccgcacctttgggtgcgacggaaggatggattcacagcaggtctgggaccgctgccaggtgtgtggtggtgataattcaacttgtagtccaagaaaaggctcattcacagcaggccgggcaagagaatacgtaaccttccttacagtgaccccgaaccttactagcgtttacattgcaaatcatagaccactctttacacatctcgcggtgaggatcggaggcaggtatgtcgtggcaggaaagatgagcatctccccaaacacgacttacccaagcctgctggaggatggccgggttgagtatagggtagctctgactgaagataggttacccagactggaagaaattagaatttgggggccccttcaggaggatgctgacatccaagtatatagacggtatggggaagagtacggtaacctgacccgccccgacataactttcacctatttccagccaaagccgcggcaggcttgggtttgggcagcagtcagggggccatgttctgtttcttgtggcgcaggcctgcgctgggtgaattactcatgcctggaccaagcaagaaaagaactcgttgagaccgtacagtgccaaggctcacagcagccccctgcctggccagaagcctgcgttctggagccttgcccaccttactgggcggtgggcgatttcggtccatgctcagccagttgtgggggaggcctccgggagcggcccgtacgctgcgtggaagctcagggctcactgctgaaaacactccccccagccaggtgcagagccggcgcgcagcagcccgctgtggccctggaaacttgcaacccacagccttgtcctgcgaggtgggaggtctctgaacctagctcttgtacctccgccggcggagctggacttgcgttagagaatgaaacctgcgtgcctggcgctgatggcctggaggcaccagtcactgaagggcctggcagcgtggatgagaagctgccagccccagagccctgcgttggcatgtcctgccctccaggatgggggcatctagacgctaccagtgctggcgaaaaggccccatcaccctgggggtcaatcagaacgggggcccaggccgcccacgtgtggacaccagctgctggaagctgttccgtttcatgcgggaggggcctgatggagctgagatttctgtgtatggacagtgccctgagggttcctgtgcaggaggaactctgcgggctcgcctctaaacctggatcaagacgcgaggtatgccaggcggttccgtgtcccgctcggtggcagtacaagctagccgcatgcagtgtcagctgcggccgtggagtcgtcagacggattctctattgcgcacgagcacatggggaggatgacggagaggaaattctgttagacactcaatgccaggggcttcctcggcccgagccccaggaagcctgctccctggagccttgcccccctcgatggaaggtgatgagtctgggtccatgtagtgcctcttgcggactaggcacggccagacggtctgttgcctgtgtgcagctggatcagggccaagatgtggaagtcgatgaagctgcgtgtgcagccctggtacgacccgaggcttcagtgccgtgtctgatcgccgattgcacttaccgatggcacgtgggcacatggatggaatgcagcgtgagctgcggcgatggcattcaacgccgcagggatacatgcttgggcccgcaggctcaagctcccgttccggcagacttctgtcagcacctacccaagccagtgactgtgagggggtgttgggccgggccttgcgtcggtcagggtactccttccctggtgccacacgaggaagcggccgctcccggcagaactacggccactccagcaggagctagtcttgaatggagccaggcccggggcttactgttttctccagcgccacagcctagacgattgttacctgggccacaagagaactccgttcaaagttcagcatgtggtaggcagcacttggaacctactggaaccatagacatgagaggacctggacaggcggattgcgcagttgcaatcggccgccccctgggcgaggtggtgacactcagggtactggagtctagcttgaactgctctgctggagacatgctgctcctgtggggcaggctcacctggcgcaaaatgtgtagaaaactccttgacatgacattttcctccaagaccaacacactggtggtcagacagcgctgtgggagaccagggggaggagttcttttgagatatggatcgcagctggcccctgagaccttctatagggaatgtgatatgcaattatttggaccctggggcgagatagtgagtccctccttatcccccgctacaagcaacgcgggagggtgccggttgtttattaatgtggcccctcacgcgagaatcgccattcacgccctggccactaacatgggcgctgggacagaaggtgcaaatgcaagttatattctcattagagatacgcactctctccgtacgaccgccttccacgggcagcaggtgctttattgggaaagtgaaagctcccaagctgagatggaattctcggaggggttccttaaagcccaggcctctctgaggggtcagtactggactctccagtcctgggtgccagaaatgcaggatcctcagagttggaaaggtaaggagggtacctag

SEQ ID NO: 237875 - DNA, 4284 bp, Artificial Sequence
  derived and/or modified sequence
atgcaccagcggcacccccgggcccggtgcccccccctgtgcgtggcggggatcctggcatgcggtttcctgctgggctgttggggaccaagccacttccagcagtcttgtttacaggcgttggaaccccaggccgtgagctcatacctcagtccgggggcccctctgaagggtagaccacccagtcctggctttcagagacagagacagcgacaacgccgagccgcaggggggatcctacatctggagcttctggtggccgtgggccccgatgtgttccaagcgcatcaagaggataccgagcgctacgtactgaccaatcttaatataggagcggaactgctccgggacccttcgctaggcgcacaattccgggtgcatctcgttaaaatggttatcctcaccgagcctgagggcgccccaaacatcaccgcaaatcttacaagttccctgctgtccgtatgtggttggagtcaaaccatcaatcccgaggatgacaccgacccagggcacgccgacctggtgctctatattacaaggtttgacttagaactccctgacggtaacaggcaggtgagaggcgtcacacagctcggcggagcttgctcgccgacatggagctgcctcattacagaagatactggcttcgacctgggcgtgacaatcgctcatgagattggccacagtttcggcttggagcacgatggggctccagggtctgggtgcgggcccagtgggcacgtgatggcctctgatggagccgcgccacgggccggtctggcatggtctccatgctcccgcagacagctgttgtccttactcagtgctggtagagcgcgctgtgtgtgggatccaccaagaccacagcccgggagtgctgggcaccccccggacgcacagccaggactgtactattccgctaatgaacagtgcagggtggcattcgggcccaaagcagtggcttgtaccttcgcgcgcgagcacttagacatgtgtcaagccctgtcgtgtcacaccgatccactggatcagagttcttgttcccgcttactcgtgcctttgcttgatgggactgagtgtggtgtggaaaaatggtgcagcaagggccgatgtagatcactcgtggagctgacgcctatcgcggcagtccatggaaggtggtcctcttggggacctcgtagtccttgttcgcgaagctgtggtggcggcgtggttactagaaggagacagtgcaacaatccacggccggcgtttggagggagggcatgtgttggggctgatctgcaagcggaaatgtgtaatacccaagcatgcgaaaagacccaattggagttcatgagccagcagtgtgccagaactgacggccagcctcttcgatcctcaccaggcggcgcttctttttatcattggggggcggccgttccccattctcaaggggatgccctttgcagacatatgtgtcgagctattggcgaatcctttattatgaaacgtggggatagcttcctggacggcacaagatgcatgccttccggtcctagagaggacggaacgctttccctttgcgtatcaggatcatgtagaacctttggatgcgacggaagaatggacagccaacaggtgtgggataggtgtcaggtgtgtggcggagacaattccacctgtagtccccgcaagggatctttcacggcaggccgagcacgagagtacgttacttttctaactgtgaccccaaatcttacttccgtgtacatcgctaatcaccggcctttgttcactcatttggctgttagaatcggaggaaggtacgtggtcgctgggaagatgtccatatcaccgaacaccacttacccgagcctgctggaggacggtagggtcgaatatagagtggcccttacggaggaccgcttaccccggctcgaagagattcggatatggggccccctgcaggaagatgctgatatccaggtctatcgcaggtatggcgaggagtatggtaacctcacaaggcccgatattacatttacatattttcagccaaagccgcgccaagcctgggtgtgggccgctgttagggggccttgctccgtttcatgcggggctggattaaggtgggttaactacagctgccttgaccaggccaggaaggagttggtggaaacggtgcagtgtcaaggatcgcagcagcctccagcttggcccgaggcctgcgtcctggagccctgtcctccatattgggcagttggcgactttggtccctgttccgccagttgcggcggagggttacgcgagcggcccgttagatgtgtggaggctcagggaagcctgcttaagactctgccaccagcacgatgcagagctggtgcacagcagcccgctgtggcgctcgagacatgtaatccccagccatgtccagcacggtgggaggtcagtgagcctagctcctgtacgtccgctggcggagccggcctggccttagaaaacgagacctgcgtgcctggcgccgatggattggaagctccagtaacagaaggaccaggctccgttgacgaaaagctcccggctcctgaaccatgtgtggggatgtcctgcccccccggttggggacatctcgatgctacttccgccggtgagaaagccccctccccctgggggtcaatccgcaccggggcccaagctgcgcacgtgtggacaccagcagccggcagctgctccgtgagctgcggtcgcgggctgatggagctcagatttttatgtatggattctgctctgcgtgtacccgtgcaagaagagctgtgcgggctggctagcaaacctggatcccggcgcgaggtgtgccaagcagtgccctgtcctgcaagatggcagtataaactggccgcctgctctgttagctgcggacgtggcgtggtccggaggattctgtactgtgcgcgcgcgcatggggaagatgacggcgaagaaattctgctcgacactcagtgccagggacttccccgccctgagccccaggaggcctgcagcctcgagccgtgtccacccagatggaaagtgatgtctttaggtccctgcagcgccagctgcggactaggaaccgcccggaggagtgtggcctgcgtccagctggatcaaggccaagacgtcgaggtcgacgaggccgcctgcgcagccctggtgcgaccagaggctagcgtcccttgcctaatcgccgactgtacttatcgttggcacgtcgggacttggatggaatgctcagtatcctgtggggacggcattcagagaagacgcgacacgtgtctgggccctcaggcccaagccccggtccctgcggatttttgccaacacctcccgaagcccgtcactgttcgcggttgttgggctgggccctgtgtaggccaaggtactccatccctggttccacacgaagaggccgcggcccctggtagaacaaccgcaacaccagcaggcgcctcccttgagtggagccaggcccgcggactcctgttctcacctgcccctcaacccaggaggctcctgcccggaccacaggaaaattcagttcaatcttcagcatgtggtcggcagcacctggagcctaccggcaccattgatatgcgcggccctggtcaggcggattgcgcagtcgccatcggtcggccactcggcgaggtggtgactctcagagttctggaaagcagtctcaattgcagcgccggagatatgttgctgctatggggacggctcacctggagaaagatgtgcaggaaactcctggacatgaccttctcatccaagacaaataccctagtcgtcaggcagcggtgtggtcgtcctggaggaggagtcttattacggtatggcagccaactcgccccggagacattttatcgggaatgcgacatgcagctttttgggccttggggggaaatagtgagcccatccctgtccccggcaacatctaacgccgggggatgccgactgtttattaatgtggccccccatgccagaatcgcgatacacgccctggccacgaacatgggcgccggtactgagggtgctaacgcttcatacattctcattcgcgacacccattccctccgtacgactgcctttcatggacagcaggtgctctattgggaaagcgagtcatctcaagcagagatggaatttagtgaagggtttcttaaagcccaggcaagcttaaggggccagtactggacgctgcagtcgtgggtgcccgaaatgcaagatccgcagagctggaagggcaaggaggggacttag

SEQ ID NO: 237876 - DNA, 4284 bp, Artificial Sequence
  derived and/or modified sequence
atgcatcagaggcaccctcgcgcaaggtgtcctccactgtgcgtggctggcattctggcttgcggatttctcttaggatgctggggacctagccacttccaacagtcatgtctgcaggcccttgagccccaggccgtatccagctacctgtcccccggtgcaccgctgaaaggacggcctccctctcctggattccagagacagcgccaacggcagcggagagccgctggcggaatcctccatctcgagctgctggtggcagtgggtccagacgtgtttcaggcgcatcaggaagataccgagaggtatgtgttgaccaacctgaatattggcgctgagctgctcagggatccttctttgggggctcagtttcgagttcatctcgtgaagatggttattctcactgagcctgagggagcacctaatataacagccaatttgacatcttcgctgcttagcgtgtgcggctggtcacagaccattaatccggaagacgataccgatccaggccatgcagatctggtactttacatcacacggtttgacttggagctgccggatggtaacagacaagtaagaggcgtgacccaactcggcggagcgtgttctcccacctggtcctgtctgattacagaagacactggcttcgatctgggagttaccatagcacacgagatcggccattccttcggcctggaacatgatggagctccaggttctggttgcggaccctcgggacacgtaatggcttctgacggtgcggcacccagggcgggtctcgcatggtccccttgttcacggagacagctccttagcttactgagcgctggcagggccaggtgcgtgtgggatccccctcgacctcagccaggcagtgcaggtcatcctcctgacgcccagccagggctttactattctgccaatgaacagtgtcgagtggctttcgggccaaaagccgtggcttgcaccttcgccagggagcacctggacatgtgtcaagctctgtcctgccacacggatccgctggaccaatcgagctgtagccgactgctggtcccactgctcgacggcactgagtgtggcgtcgaaaagtggtgcagcaaaggaaggtgcaggagtctcgttgaactgacgccaattgctgctgttcacggcagatggtccagttggggcccacggtcgccttgctctcgttcttgcggcggaggggtcgtaactagacgtaggcagtgcaacaacccaagacccgcttttggcggacgcgcttgcgttggggctgacctgcaggcagagatgtgcaacactcaggcgtgcgagaagacccagctggagttcatgtcccagcagtgtgcgcgaacggatggtcagcctctccgtagctccccaggcggagcctcattttaccactggggtgccgctgtgccccactctcagggagatgctttgtgtaggcatatgtgtcgggctatcggtgaatcatttataatgaaaaggggtgacagtttcctggatggcacgcggtgcatgcctagtgggcctcgagaagatggcactctgtcactttgcgtaagtggctcttgccggacctttgggtgcgatggtcgcatggactctcaacaggtgtgggatagatgccaggtatgtggaggcgataattccacttgctcccctcggaaaggctccttcacagccggtagagcacgcgagtacgttactttccttacagttaccccgaatctcacttctgtgtatattgccaatcacagacctctcttcacccaccttgcggtgagaatcggcggtagatacgtcgtggcagggaaaatgtctattagccccaatacaacatacccatctttgctggaggatggcagagtggagtaccgggtggcattaacagaagaccggctgccacgactcgaggaaatacggatttgggggccactgcaggaggatgccgatatccaggtctatcggagatacggtgaggaatacgggaatctcacccgccctgatattacgtttacctattttcagcccaagccacggcaggcctgggtctgggccgcagtgagaggtccttgttctgtctcctgtggcgcaggattgaggtgggtcaactattcatgccttgatcaggccaggaaggagctcgtcgagacagtgcagtgtcaaggcagccagcagccacccgcatggccagaggcgtgcgtgcttgagccctgccccccatattgggcagtcggggactttggcccttgttccgcaagttgcggaggcggtctacgagaaagacctgtgcgatgcgttgaagcacaggggagtctgcttaaaacacttcctcctgcccgttgcagagctggagcacagcaacccgctgtagcactcgagacctgcaatccacagccatgccctgcccgatgggaggttagcgaacctagttcttgtacctcagcagggggtgcaggcctggcactggagaacgagacatgtgttcctggcgctgatggtctcgaagcccctgtcaccgaggggccagggtcagtggacgagaaactgccagcccctgagccatgtgtgggcatgtcgtgtcccccaggatggggccatcttgatgcaaccagcgccggagaaaaggcacccagtccatggggatccattaggacaggggctcaagccgctcatgtgtggacacccgcagccggaagctgctccgtcagctgcggtcgcggactcatggagctgaggttcctgtgtatggatagcgccctgagggtgccggtgcaggaagagttatgcggcttggcttcgaaacctggaagtcgcagggaggtctgccaggcagtgccttgcccagcccgttggcagtacaagctggccgcatgttcagtgtcatgtggcagaggagtagttcgaagaatcctgtattgcgccagagcccacggggaggacgatggcgaagaaatcctgctcgatacacagtgccagggacttcctagacccgagccgcaggaagcatgttccttggaaccttgtccaccacgctggaaggtgatgagtcttggcccatgcagcgccagttgtggtctgggcactgctagacgcagcgtggcttgcgttcaactggaccagggtcaggatgtggaggtcgacgaggctgcgtgtgctgctcttgtgcgcccagaggcctcggtgccatgtctgatcgccgactgtacctatcggtggcatgtcggcacttggatggaatgcagcgttagctgcggcgatggcattcaacggaggcgcgacacatgccttggccctcaagctcaggcgccagtgcctgcggacttctgccagcacctgcccaaacccgtcaccgtgcgcggatgctgggctggaccatgcgtgggtcaaggaactccttcccttgtgccccacgaggaagctgcagctcctggcagaaccacagctactcccgcaggggcaagcctcgagtggtctcaagctcgcggtctgttattttccccagcccctcagcccagacgcctactgcctggaccacaggagaattccgtgcaaagtagtgcctgcggtaggcagcacttggagcccacggggactattgacatgagggggcctggacaggcagattgcgccgttgctatcgggaggcctctgggagaagttgtaaccctgagggtgttggaatcctctttgaattgcagtgccggtgacatgcttctgctttggggccgactaacttggcggaagatgtgcaggaagttgcttgacatgacattctcttcaaagacgaacaccctggtggtgaggcaacgatgtggcaggcccggaggaggggtcctgctgcggtatgggagtcagctggcccctgagactttttatagagagtgtgatatgcaactgttcggaccttggggcgagatcgtgtctcccagcctcagtcctgccactagtaatgctggtggttgtaggctattcatcaacgtcgcccctcatgccagaattgccatccacgcactagcaacgaacatgggtgcagggaccgaaggcgctaacgcctcctatattcttatcagagatactcactctcttagaaccacagctttccatggccagcaggtactgtactgggagagcgagtcttcgcaagctgagatggagttttctgaaggtttcctcaaggcccaggctagcctgcggggacagtattggacacttcagtcttgggtcccggaaatgcaagacccgcagtcgtggaaggggaaggaagggacatag

SEQ ID NO: 237877 - DNA, 4284 bp, Artificial Sequence
  derived and/or modified sequence
atgcatcagaggcaccctagggcgcgatgcccccctctatgcgtggccggaatcctcgcttgtggctttctgttggggtgttggggacccagtcatttccaacagtcctgcttgcaggcgctggagccacaggccgtgtcgtcttatctgtcccctggcgctcccctgaagggtcggccaccatctcctggtttccaaagacaaagacaacgccagaggcgtgcagcgggaggaatcctgcacctggagctgctcgtcgccgtaggcccagatgtttttcaggcccatcaagaggataccgagcgctatgtcctgactaatctgaacatcggggcagagctcctgcgggaccctagcctgggggcacaattccgtgtccatctcgtgaaaatggtcatcctgacagagccagagggggctccaaatattacagctaacttaacttcctctctcctgagcgtgtgcggatggagccagactataaaccctgaggatgataccgatcccggacacgccgatctagtgctgtacattactcggtttgacttggagctgccggacggcaataggcaagtgagaggcgtcactcagctaggcggtgcttgcagtcccacgtggtcctgcttgatcaccgaggacaccggatttgacctgggggtaacaattgcccatgagattggccactcattcggcctcgagcatgatggggcacctggcagtggctgcggtccaagcggacacgtgatggcttcagacggcgctgctcccagagccggactcgcatggtcaccatgtagccgaagacagctgctcagccttctgagcgccggtagagccagatgcgtgtgggatccccctcgaccccaaccagggtctgctggccacccccctgatgcacagcctggtctgtattattccgcaaatgagcaatgtcgagttgccttcggtcctaaggcagttgcatgtacctttgctcgcgagcacctggatatgtgccaggctctcagctgtcacaccgacccactggaccagtcttcatgttctcggctcttagtgcccctgcttgacggcaccgagtgcggcgtcgagaagtggtgttcaaaagggagatgtagaagtcttgtcgagcttacacccattgctgctgtgcatggtcgctggtccagttggggccctcgatccccgtgcagccgaagttgcggaggcggagtggtaactcgccgaaggcagtgcaataatcctcggccagccttcggcggtcgcgcatgcgtgggagctgatctgcaggccgagatgtgtaacacccaggcctgtgagaagacccagctggagttcatgagtcagcaatgtgccaggacggacggtcagcctctcagatccagccctgggggagccagtttctaccattggggggctgcagtcccccatagccaaggtgatgcattatgtcggcatatgtgtagagctattggcgaatcatttattatgaagagaggggactcatttcttgacggtactcgctgcatgccgtctggaccacgcgaggacggtacgttgagtctctgtgtgtctggctcatgccggacatttggctgtgatggcaggatggattcacagcaggtatgggaccgctgccaagtttgcggaggcgacaactcaacatgctcaccacgcaaagggagttttaccgctggacgcgcacgtgagtatgtgaccttcctgacagtgactcctaacctgacatcggtgtacatcgccaatcatcgtccactcttcacacacctggccgtgcggatcggaggcagatacgtggtggcgggaaaaatgtccatctctcccaacaccacttacccttcccttctggaggacggacgggtcgaataccgagtggccctgacagaagataggttaccccgtctagaggaaatcaggatctggggtcctttgcaggaggatgctgacatacaggtctataggcggtatggagaggagtatggcaatttaacgcggcctgacataaccttcacatacttccagccaaaacccagacaggcatgggtttgggccgcagtacgtggaccatgctccgtctcatgcggcgctggacttagatgggttaactattcctgcctggaccaggcgagaaaggagctcgtggagacggtgcagtgtcagggctcccaacagccaccggcttggccagaagcatgtgtgctggaaccatgccccccttactgggccgtcggggacttcggaccgtgctccgctagttgcgggggtggattgagagagagacctgtcagatgcgtggaagctcagggatccctgctgaagacccttccaccagctaggtgtagagctggcgctcagcaaccagccgttgctttagaaacatgtaacccccagccctgcccggcaagatgggaagtatcagaaccctctagttgcacctcagctggcggtgccggacttgccctggagaacgagacttgtgtccccggtgcagacggattagaggcaccagttaccgagggacctggttccgtcgacgagaagctgcccgctcctgagccctgcgtcggaatgtcatgccctcccggatggggccacttggacgccacatccgcaggtgaaaaagctccatctccgtggggaagcattaggacgggcgcacaggcagcccacgtctggacacccgcagcaggttcttgctcagtcagttgcggccgaggcctgatggagctccgctttctttgtatggattcagccctgagggtgccagtccaggaggaactctgcggactcgcctctaaacccggtagcaggagggaggtttgccaggcagtgccgtgtccggctagatggcagtacaagctcgctgcttgttccgtatcatgcggcaggggagtggtgcgcagaatcttgtattgtgccagggctcacggcgaagatgatggagaagagatcttacttgatactcagtgtcagggccttccccgacctgagccccaggaggcctgctccctggaaccatgtccacccagatggaaggtgatgtccctgggtccctgctctgcatcatgtggattgggtaccgctagacgtagtgtagcctgcgtgcagttagaccaggggcaggatgtggaggttgatgaggccgcatgcgccgcacttgtgcgaccagaggcttcggtcccgtgccttattgcagattgcacatacaggtggcatgtgggcacatggatggaatgttctgttagctgtggcgatgggattcaacgccgacgagatacatgcctgggccctcaggcgcaggcaccggttccagccgatttttgccaacatcttccaaagccggtgaccgtgcggggatgctgggctggcccatgcgtgggccagggcactccatcactcgtcccccacgaggaagcagccgctcccggtcgcaccactgcgacgcccgcaggggcaagcctggaatggtcacaggccaggggcctactatttagcccagccccacaacctcgtagactcctgccaggcccacaggagaatagtgtccagtccagcgcttgtggaaggcagcatttggagccgactggaacaattgacatgcgcggacccggtcaagctgattgcgcggtagcgattggtagacccctgggagaagtggtcaccctgagggtgttggaatctagcctgaattgctcagccggtgatatgctgttgctctggggcagactgacctggagaaagatgtgccggaaactgctggatatgaccttcagctcaaagacaaacaccctggtcgttagacagcggtgtggaaggcctggcggaggcgtcctcctgcggtacggctcccagctcgcgcctgagaccttctacagggagtgcgatatgcagttgttcggcccatggggcgagatagtgtctccttctctgtccccagctacttccaatgcaggagggtgcaggctgtttattaacgtggcaccacacgcaaggatcgccattcacgcactggctacgaatatgggggctgggacagagggggcaaacgccagctacatcctcatccgggatacacattccttacgcacaacagccttccacgggcagcaggtgttgtactgggaatcggagtcctctcaagccgagatggaatttagcgaaggctttctgaaggcccaggcctctctcaggggacaatattggacattgcagagctgggtgccagagatgcaagatcctcagagctggaaaggcaaggagggaacttag

SEQ ID NO: 237878 - DNA, 4284 bp, Artificial Sequence
  derived and/or modified sequence
atgcatcaacgccacccccgggcccgatgtccgcctctgtgtgtcgctgggatcctcgcttgtggcttcctgctgggatgctggggtccctcacactttcaacagtcttgcctgcaggccttggagccacaggctgtgtcttcctacctctccccgggagcgcccctgaagggaagaccaccatcacccggtttccaaagacagcgtcaacgccaacgtagggcagccggtggcatcctacatctcgagttgctggttgctgtgggccccgacgttttccaggcccaccaagaggacaccgagcgctacgtccttactaacctcaatatcggggcggaattattaagagacccctcacttggagcgcaatttagagtgcaccttgtgaagatggttatcctgacggaaccagaaggcgccccgaacatcactgcaaatcttaccagctctcttttatccgtgtgcggctggtctcagacaattaaccctgaggatgataccgacccagggcatgcagatctcgtgctatatattacccggttcgatctcgagttgcctgacggcaacagacaggtcagaggcgtgactcagctcggcggggcatgctcacccacctggagctgtctgatcactgaagataccggctttgatttgggcgtaaccattgctcacgaaatcggacactcctttgggcttgagcacgatggggctccaggaagcggctgtggaccaagcggccacgtgatggcgtccgatggggccgctccccgggccgggttagcttggtccccttgctctcggagacagctgctctctcttttaagcgctggaagagctagatgcgtatgggatcccccacgaccacagcctggctctgccggtcaccctcctgatgcccagccaggcctctattatagcgctaatgagcagtgtcgagtcgcctttgggcctaaggcagtcgcgtgtacctttgccagagagcatcttgatatgtgtcaggctctatcttgtcacactgatccccttgaccagagctcctgttcccgcctccttgttccccttctggacggcactgaatgtggtgtagaaaaatggtgcagtaaagggcggtgtcgaagtctcgtggagctgacaccaattgctgccgtccacggccgctggtcaagttggggcccgaggagcccttgctcccgatcctgtggaggtggtgtggtgaccagaagacgacaatgcaataatcctcggccagcttttggtggccgagcatgcgtgggggccgacctgcaggctgagatgtgcaatactcaggcctgcgaaaagacccagctcgagtttatgagccagcaatgtgctcgcactgatggccagccattaagatcctcaccaggaggagcaagcttctatcactggggagcggcagttccccattcccagggtgatgctctgtgcaggcatatgtgccgagctatcggcgagtcgtttatcatgaaacggggagatagtttccttgacggcacaaggtgtatgccctctggtccacgggaagatggcaccctgtccctatgtgtgagcggaagttgtaggacttttggctgcgacggaagaatggatagccagcaagtttgggatcgatgtcaggtgtgcgggggagacaattccacatgttcaccccgcaaggggtcatttactgcagggcgcgcccgggaatatgtaaccttcctcactgtcacacctaacctgacatccgtctatatcgcaaatcatagacccctctttactcatctggccgtccggataggcggcaggtacgttgttgcaggcaagatgagcattagtccaaacacaacataccccagcctcctggaagacggaagggtggagtatcgcgtggctctcacggaagacagactacctcgacttgaagagataagaatttggggtcctctgcaggaagacgcggatatccaggtgtaccggagatacggcgaagagtacggcaacttgaccaggcctgatatcacgtttacctacttccaaccaaagccccgccaggcgtgggtgtgggcagccgtgcggggcccctgctctgttagctgtggggccgggctgaggtgggtgaattattcgtgcctagatcaggctaggaaagaactggtcgaaaccgtccagtgtcagggtagccagcagccacctgcatggcccgaagcatgcgtgcttgagccgtgcccgccatactgggccgttggtgactttggaccctgctctgcttcttgcggtggcggtctgcgagaaaggccagtgaggtgcgtggaagcccaaggttcgctgcttaaaacacttccccctgctcggtgtagagctggcgctcagcagccagcggttgccctcgagacctgtaacccccagccatgtccggcccgttgggaagtcagcgagccatcctcctgtacgtcagccggaggggccggcttggcacttgagaatgagacctgcgtgcccggagctgacggcttggaagctcccgtgacagaaggccctggttccgtggacgagaaactcccggcacctgaaccctgcgtcggaatgagttgccctcctggttgggggcacctggatgcaacctccgctggagaaaaagccccatctccctggggctcaattagaaccggggcacaggctgcacacgtatggacacctgcagcaggtagctgttctgtctcctgcggccgcggccttatggagctgcgcttcctgtgcatggattcagccctgcgggtccctgtgcaagaggagttgtgcggtcttgctagtaagccaggatccaggcgtgaggtttgtcaagctgtgccttgccctgcccggtggcagtacaagctcgcggcttgcagcgtctcttgcggcagaggcgtggtgaggaggatcctttactgtgcaagggcacacggggaggacgatggggaagaaatacttcttgatacacagtgtcaagggctgcctagaccggagcctcaggaagcttgctcactagagccctgcccaccgcggtggaaagtgatgtctctcggaccgtgttctgcttcttgtggtctggggaccgcaaggcgaagtgtggcttgcgttcaactcgaccagggccaggatgtcgaggttgatgaggccgcatgcgctgctttggttcggcccgaggccagtgtcccttgcctgattgctgactgtacttatcgctggcacgtgggcacttggatggagtgcagcgtgtcatgtggggacggaatacagcgtagacgtgatacctgcctgggtcctcaggcacaagccccagtcccagcggacttctgtcagcatctgccaaaacccgtgacagtccggggatgctgggctggtccctgcgtcggacaggggacccctagcctcgtaccacacgaggaagccgctgctcccggtcggactacggccacgccagctggagcatctttagagtggtcacaggcacgaggcctcctcttcagccctgcgccccagccaaggcgcctgttacctggacctcaagaaaacagtgtgcagagcagcgcctgtggcagacagcatctcgaacccacagggaccatagacatgcgcggccccggacaggcagactgcgccgtcgccataggcagaccgcttggcgaggtggtgacactgagagtgcttgagtcttccttaaactgtagtgcaggcgatatgttactgctgtggggacgtctgacctggcggaagatgtgtcgcaaattgctcgacatgacatttagcagcaaaacgaacacactggtcgtgaggcagagatgcggtcgtcccgggggcggggtgctactgcgatacgggtcccagctagctccggagaccttttatcgagaatgtgacatgcagctgtttggcccctggggagagattgtttctcctagcctcagccccgccacatctaacgcaggtggatgtaggttattcattaacgtcgccccccatgcccggatcgctatccatgctcttgccacgaatatgggtgccggaaccgaaggtgcaaacgctagttacatcctcattcgggatacacactcccttcgcacaacggcattccacggtcagcaggtgctgtactgggagtctgaatcctcccaggccgaaatggagttctctgagggatttctcaaggcccaggctagcctcagaggacagtattggactttgcagtcttgggtccccgaaatgcaggacccacaaagctggaaggggaaggagggcacatag

SEQ ID NO: 237879 - DNA, 4284 bp, Artificial Sequence
  derived and/or modified sequence
atgcaccaacggcacccacgagcacgatgtcctccactctgtgttgccggcatcttggcctgtggatttcttctgggatgttggggccccagtcacttccagcagtcctgcctgcaggccctcgaaccacaggccgtgtcaagctatttaagtcccggagcccctctgaaaggcagacctcccagcccaggatttcagaggcagaggcagcgccagagacgcgctgctgggggtatcctgcacttggaactgttagtagccgtgggtcccgatgtgttccaggcacatcaggaagacactgaacgttacgttttgaccaacctgaatattggcgccgaattactcagggatcctagccttggagcccagttccgagtccatcttgttaaaatggtgatcttgactgaacccgagggcgctcccaatataactgctaacctcacctcatcactcttgagtgtctgtggctggtctcaaactattaacccagaggatgacacagatcctggacacgccgacctggtcctgtatatcacccgttttgatctggaactgcctgacggcaaccggcaggtcagaggcgtgactcagctcggcggggcctgctcccctacatggtcttgcttaatcaccgaggacaccggctttgacctgggagttacgatcgcacatgagatcggccactctttcggacttgagcatgatggtgcccccggctccggttgcggacctagtggacatgtaatggcgtccgacggcgccgccccgcgcgctggcctggcctggtcgccatgcagtcgtcggcaactgttatcactgctctctgctgggcgggctcgttgcgtgtgggatccaccccgcccccagccaggctccgcaggccatccacccgatgcacaacctggcctctactatagcgcgaatgagcagtgtcgtgtagctttcggaccgaaggctgtagcgtgcacctttgcacgcgaacacctggacatgtgccaggccctgtcatgtcatacagatcccttggaccaatctagttgctcaaggttattagtgcctcttctggatggcacagagtgtggagtggagaaatggtgttcgaaaggcaggtgccgatccttggtggagctgacgccaatcgccgccgtgcatggcaggtggtcaagctggggacctaggagtccctgttcccgaagttgcggcgggggcgtggtgacccgccggagacagtgcaataatccacgacctgcattcggaggaagggcatgcgtgggcgccgacttgcaagctgagatgtgtaacacacaagcctgcgaaaagacacaactggaattcatgagccagcagtgcgcacgtactgatggccagcctctacgctcaagtccaggtggtgcctcgttctaccactggggagcagccgtcccccactcacagggggatgccctgtgcaggcacatgtgccgcgccataggagagtcttttatcatgaaacgtggggactctttcctagacggaacccggtgtatgcctagcggcccacgtgaggatgggacactctccctctgtgtctccggttcctgtcggactttcggatgcgacggaaggatggattcccagcaggtctgggatcgatgccaggtgtgcggcggagacaactctacatgttctcccaggaaaggctcattcaccgcaggccgggcacgcgaatacgtgacctttctcaccgtgacccccaaccttacctccgtatacatagcaaatcatcggccactgtttacacatctcgctgtccggatagggggacgctacgtagtggcagggaagatgagtatttcccctaatactacctacccttcgttgctggaagacggccgtgttgaatatagagtggccttgacagaagatagattgccacgactggaagaaatccgcatctgggggccactgcaggaggatgcggatatccaggtgtacaggcgctacggagaagagtatgggaatctcacaagacctgacattacttttacgtacttccagccaaagcctagacaggcttgggtgtgggccgctgtgcgaggaccttgtagcgtctcctgtggagccggcctacgatgggttaattactcctgtttagatcaggcacgtaaggagctggtagagaccgtacaatgccagggctcacagcagcccccggcttggcctgaggcttgcgtacttgagccatgtcctccatactgggcagtcggggattttggaccttgtagtgctagttgtggcggtggattgagggagagacctgtaagatgcgtggaagctcagggcagtctcttaaagacgcttcctcccgcccgctgtcgtgctggtgcacagcagcccgctgttgctttggaaacttgcaatccccaaccctgcccagctagatgggaggtatccgaaccttcctcctgtaccagtgccggcggcgcaggactggctcttgagaatgaaacttgtgtgcccggcgccgatggcttggaggcccccgtcacagagggaccaggctctgttgacgagaaactgcccgcaccagaaccatgcgtgggcatgtcttgtccacccggttggggacacctggacgcgactagtgctggagaaaaagcaccgtcaccttggggatccatcagaacaggggcccaggctgcgcacgtgtggaccccagccgccgggtcttgcagtgtgagctgtggacgcggactgatggagctgaggttcctgtgtatggacagcgccctcagggtgccagttcaggaggaattatgcggattggccagcaaaccaggttcacgacgggaggtgtgccaggccgttccatgtccagcccgctggcagtacaaactggccgcatgctcagtctcatgcggaagaggcgtggttagacggatcctgtattgcgctcgcgcccacggcgaggacgacggagaggagatcctgctcgacacccaatgccagggccttccccgacccgagccgcaggaagcatgctcccttgagccttgcccgcctcgatggaaggttatgagcctgggtccttgcagcgcctcctgcgggctgggtaccgcgcgccgttccgtggcctgtgtgcagctcgatcagggccaggatgttgaggtagacgaggctgcatgcgccgctttggtccgcccagaggcatccgtcccatgcctgatcgcagattgtacttatcgttggcacgttggaacctggatggagtgttctgtgagctgtggcgacgggatccagcgaaggcgcgatacttgcctgggcccacaggcccaggcgcccgtgcccgctgatttctgtcagcaccttccaaaaccagttaccgtgcgcggttgttgggcgggtccatgcgttggtcagggaacccccagcctcgtgccccacgaggaggctgcggccccgggcagaaccactgccaccccagccggagcttccctggagtggagtcaggctagaggtctactgtttagcccagctcctcagccaagacgactgctaccaggtcctcaggagaactctgtccagagtagcgcctgcggtaggcagcatctggaaccaactggaaccatcgacatgcggggccccggacaggccgactgcgccgtggccatcggacgcccactcggcgaggtagtgacattacgggtactggaatcatccctcaactgttcagccggcgatatgcttctgttgtggggaagacttacttggagaaaaatgtgtagaaagttgctggacatgaccttctcttctaagacaaatacccttgttgtccgccaaagatgtgggagaccaggaggcggcgtcctccttcggtatggttctcagctagcacctgaaacattctaccgggagtgcgatatgcagctctttggcccttggggcgaaatcgtgtcacccagcctcagccccgcaacgtcaaacgctggcggttgtagactgttcattaacgtggctccgcatgcacgtatcgccatccatgctctggccaccaacatgggtgcagggaccgagggcgcgaacgcatcttacattctgattagggatacacatagcctgaggactacagccttccatgggcagcaggtcctctactgggagtccgaaagtagccaggcagagatggaatttagcgagggctttctgaaagctcaagcctctctgcgaggacaatattggaccctacagtcatgggtgcccgagatgcaggatcctcagtcctggaaaggaaaagaaggaacttag

SEQ ID NO: 237880 - DNA, 4284 bp, Artificial Sequence
  derived and/or modified sequence
atgcaccaaagacacccacgagcacgatgccccccattgtgcgtggcagggatccttgcatgcggcttcctcctgggctgctggggcccctctcatttccagcaatcatgtttgcaggcgctagaacctcaggccgtgtcttcctacctctcaccaggagctcctttaaaaggccgccctccttcgcccggattccagcgacaaagacagcgccagagacgtgctgcaggaggcattcttcatctcgaattgctggtagcagtgggccccgacgtgtttcaagcccatcaagaagacaccgagaggtacgtgttgactaaccttaacataggcgcagagctcctgagagacccctccttaggcgcacagttcagggtgcatttggtgaaaatggtgatacttactgaaccagaaggagcaccgaatattactgccaatctcactagctctttgctttctgtctgcggctggagccaaactataaatcccgaagacgatacagacccaggccatgctgacctcgtgctatacattactcgattcgatcttgaactacccgatgggaatcggcaagttcggggggttacccagttgggaggtgcctgttccccaacttggtcctgtcttattacggaggataccggctttgacctgggtgtaacaatcgcccacgaaatcggtcacagtttcggattggagcacgatggagccccaggttccggttgtggacccagcggacatgttatggcaagcgacggggcagcaccgagagcagggctagcctggtcaccatgctccagacggcagctactctctctcttgtctgcgggcagagccagatgcgtttgggacccccctaggccacagccagggtcagcaggacatcctcccgatgcccaacctggtctgtactattccgctaatgagcagtgccgggttgcttttggccctaaagccgtcgcatgcacatttgcacgggagcacctcgatatgtgccaagccctatcctgccacaccgatcccttagatcagtctagttgttctcgtctgctcgtacctctgttggacggtactgaatgcggggtggagaagtggtgcagcaagggtcgatgccggtctctagtcgaactaactccaatagccgctgtccacgggcgctggtcttcatgggggccacgcagtccatgcagccgatcctgcggtggcggcgtggtcacccgcagaagacagtgtaacaatcctcggcctgcctttggcggccgggcctgcgtaggagctgacctacaggctgagatgtgcaatacgcaggcgtgtgaaaaaacccagctggagtttatgtcacagcagtgtgctagaaccgacggccaacctctgagatcaagtcccgggggagctagtttctaccattggggcgcagctgttcctcactcgcaaggcgatgccctctgtagacatatgtgccgggccattggagaatcatttattatgaaaagaggggactcttttttggatgggactcgttgcatgccttccggcccaagagaggatggaacactcagcctatgcgtgtctgggtcttgcaggacatttggctgcgatggacgtatggactctcaacaggtgtgggatagatgtcaagtctgcggaggggataatagtacgtgttcacccagaaaagggtcttttaccgccggtcgggcccgggagtatgttacatttctgaccgtaacgccaaacctcacaagcgtgtacatagccaatcacagaccactgttcacccatcttgccgtgcgcatcgggggaaggtacgtagttgctggcaaaatgtccatcagtcctaatactacttacccttcccttctagaggacggacgcgtcgagtaccgtgtagccctgacggaggatagactgcccagacttgaggagatccggatctggggccccctacaggaggatgccgatatccaggtgtaccgcagatacggagaagagtacggcaacctaaccagacccgatatcacctttacatattttcaaccgaagcccaggcaagcatgggtatgggctgctgtgcgcgggccctgttcagtgtcatgtggcgccggactcagatgggtcaattacagttgcttagatcaagcaagaaaagagctggtggagactgtccagtgccagggctcccagcaacctccagcctggccagaagcgtgcgtcctcgagccttgtcctccctactgggcagtgggtgatttcggaccatgttccgcaagctgcggtggggggctcagagagaggcccgttagatgtgtggaagctcagggcagcctgctaaagaccctgccacctgctagatgccgcgcgggggctcagcaaccagccgtcgctctggagacatgtaacccacagccatgtcctgcgcggtgggaggtctccgaaccatcgtcttgcacatccgctggcggagccgggctggccttggaaaacgaaacctgcgttcctggagctgacgggctggaagcccctgttaccgaaggcccaggatccgttgatgagaagttacctgctcctgaaccctgtgtcggcatgtcctgcccccctggctggggccacttggacgccacatcagctggtgagaaagcaccgtcgccatggggatccattcgcactggagctcaggctgctcacgtgtggactcctgctgcaggaagttgtagcgtctcatgcggccggggtttaatggaactgagatttctttgtatggactccgctcttagggtccctgtacaggaggagctctgcgggctggcctccaaacctggatcacggcgggaggtgtgccaggctgtaccttgcccagccaggtggcagtataaactagctgcgtgcagtgtgagttgcggaaggggcgtggtgagacggatcttgtattgcgccagagcacatggcgaggatgacggcgaagagattctgctggatacccaatgccagggcttacctcggcctgaaccgcaggaagcttgctcactcgaaccctgtccccccagatggaaggttatgtccctgggaccatgtagtgcatcatgtggactgggaaccgctcgtaggtcagttgcctgtgtccagcttgaccagggccaggatgtagaagtcgacgaagcagcctgcgccgcattagtgcgcccagaggcatccgtgccttgtctgatcgccgattgcacctataggtggcatgtcggcacgtggatggaatgctctgtgtcatgtggagacggcattcagagacgccgagatacatgtttaggacctcaggctcaagcaccagtgccagcagatttttgtcaacaccttcctaagcccgttaccgtgcgtggatgctgggcaggtccatgcgtcggccagggtactccgtcattggtgcctcacgaggaggccgccgcaccaggccgcactacagcaacacctgcaggcgcatcactagagtggtcacaggcacggggacttctgtttagcccggctccgcagcctcggaggctccttcccggtcctcaggagaattcggttcaaagctcagcatgtggaaggcagcacctcgagccgaccgggaccatcgatatgagggggccaggtcaggcagactgtgctgtcgccatagggagaccattaggagaagttgtcaccttacgcgtgctggagagttcactgaattgcagtgccggagacatgctcttattgtggggtagactgacttggagaaagatgtgccgaaagttactcgatatgacattttcgtccaagacaaacacactggtcgtgcggcagagatgtggacgaccgggcggaggggtgcttctgaggtacggatctcagctcgctccagagacattttacagggaatgtgatatgcagttgtttggcccctggggggagatcgtttcacccagtctaagccctgccaccagcaacgcggggggatgccgcctctttatcaacgttgctccacacgccagaatagcgatacacgctctagctactaatatgggcgccggcactgaaggggctaatgcatcatatattttaatccgcgacacacattctcttcgcacaacagcttttcacggccagcaggtattgtattgggagagtgagagcagccaagcggaaatggagttttctgagggcttcctgaaggcgcaggcctctctgcgaggacaatactggacactacagagctgggtgccagagatgcaggatccccagagttggaaaggaaaagaaggaacctag

SEQ ID NO: 237881 - DNA, 4284 bp, Artificial Sequence
  derived and/or modified sequence
atgcatcagcgtcaccccagagctagatgccctcctctgtgcgttgccgggattctggcatgcggatttctgctgggatgctggggcccctcccacttccaacaaagctgcctgcaagctcttgaaccccaagccgtctcctcttacctgtcccctggcgcccctctgaaaggaagacctcctagccctgggtttcagcgccaaagacagcggcaacgcagggccgcgggaggaattctccatttggagttgctggtcgcagtgggcccagacgtgtttcaggcacatcaagaagacaccgagagatacgttttaacaaacctgaatattggcgctgaactcctacgtgacccatctctaggcgcacaatttagggtgcatcttgtcaagatggtgattctaacagaacctgagggcgcccctaacattacggcaaacttaacctcttccctgctgagtgtctgtggctggagccagaccatcaatccagaggatgatacagatccaggccatgccgaccttgttctgtacattacaagattcgatctggaattgcctgacggaaataggcaggtgcgcggggtaacccagcttggcggtgcttgttcccccacctggtcttgcttgattactgaagatactggattcgaccttggagtcactatcgcacacgaaattggtcactcattcgggctggagcacgacggagcccctggtagcggatgtgggccaagcggacatgtgatggcctcagacggcgccgccccccgagcaggcctcgcttggagcccttgtagtcgcagacaactcctgagtctgctgtcagccggtcgggctagatgcgtgtgggaccctcccaggcctcagccaggcagcgcaggacaccccccagacgcacagcccggtctgtattattccgctaatgagcagtgccgtgttgcctttgggcctaaagccgtcgcctgcaccttcgctcgcgagcacctcgacatgtgccaggctttgtcatgtcacaccgacccactggatcaaagtagttgctcacggttactggtaccactgcttgacgggactgagtgtggagttgaaaagtggtgtagcaaaggccggtgcagatctcttgtggaattgactcccattgctgccgtccatggccggtggtcctcctggggccctcgctccccctgcagccgctcttgtgggggcggcgtggtgacaagaagacgccagtgcaataacccacggcccgcgtttggcggcagagcttgcgtgggagccgaccttcaggccgaaatgtgcaatacccaagcctgcgagaaaacacagctcgaatttatgtctcagcagtgcgcccgcaccgacggacagcctctcagatcttcaccgggcggagcttcattctatcactggggcgctgcagtacctcactcacagggcgacgccctgtgcagacatatgtgtagagccatcggggaatccttcattatgaagagaggagactcatttctggatggaacccggtgtatgccgtcgggacctagagaagatggcaccttgtctttatgtgtctccggatcttgccgcacttttggctgcgacggtagaatggatagtcaacaggtctgggatagatgccaagtctgcggcggcgacaattcaacatgcagtccacggaaaggttcgttcacagcagggcgagcacgagagtacgtcactttcctcacagttacgccaaatctaacaagcgtttatatcgctaatcatcgaccactgttcacgcatctcgccgtgagaatcggtgggcgttatgtcgtcgccggaaaaatgtcgatctcaccaaatactacctaccccagtctcctggaagacggtcgggtggagtatcgagtggcactgactgaagatagattgccccggctggaggagattagaatatgggggccattgcaagaagacgcagacattcaagtgtacaggaggtatggagaggaatatggtaaccttacccgtcctgacatcacattcacctatttccagcctaaacctcggcaagcatgggtatgggcagctgttagagggccttgttccgtctcgtgcggggccggcctacgatgggttaattactcctgtttagatcaggcacgtaaggagctggtagagaccgtacaatgccagggctcacagcagcccccggcttggcctgaggcttgcgtacttgagccatgtcctccatactgggcagtcggggattttggaccttgtagtgctagttgtggcggtggattgagggagagacctgtaagatgcgtggaagctcagggcagtctcttaaagacgcttcctcccgcccgctgtcgtgctggtgcacagcagcccgctgttgctttggaaacttgcaatccccagccctgtcccgccagatgggaggtctctgaaccctctagttgtactagcgccggcggggctggactcgccttggaaaacgaaacatgcgtccccggcgccgatggcctagaagcaccagttacagaaggacccggatccgtagacgaaaagctgcccgcgcccgaaccttgcgttggcatgtcttgcccccccggttggggtcatctcgacgccacctctgcgggagaaaaagctccttctccatggggtagcataagaaccggtgcgcaagccgcacacgtgtggaccccagcagcaggaagttgctccgtctcatgcggccgcggactcatggagctaaggtttctttgcatggatagcgcccttagagtcccagttcaggaggagctgtgtgggctggccagcaagcccggctctcgaagggaagtttgccaggccgtaccttgccccgcccgctggcagtataaactcgctgcctgtagcgtatcctgcggaagaggagtcgtccggagaatactgtattgtgccagagcccacggagaagatgacggggaagagattttactggacacacaatgccagggcctgccaaggcctgaaccacaggaagcgtgtagcctggagccctgcccccctcggtggaaagtcatgtctctcggtccctgctctgcatcctgcggcctgggtaccgccaggagatcagtggcctgcgtacagttggatcagggacaggatgtggaagtcgacgaagccgcctgtgccgcacttgtgcggcccgaagctagtgtgccttgcttaatagctgattgtacttaccggtggcatgtcggtacgtggatggagtgctctgtttcctgcggcgatggcatccagcgtagaagggacacatgtctcggacctcaggctcaggctcccgtgcccgccgacttctgccagcatctaccaaagcccgtgactgtaagaggatgctgggccggaccctgtgtgggtcagggcaccccttctctggtcccgcatgaagaagctgccgcccccggccgcactactgcaactcccgctggcgcgtctctggagtggtcccaagccaggggtctgctgttctctcccgcaccgcagccacgtcgtttgcttcccgggccccaagagaactcagtgcagagcagcgcatgtggtcgtcagcatctggaacccactggaaccatcgacatgcggggccccggacaggccgactgcgccgtggccatcggacgcccactcggcgaggtagtgacattacgggtactggaatcatccctcaactgttcagccggcgatatgcttctgttgtggggaagacttacttggagaaaaatgtgtagaaagttgctggacatgaccttctcttctaagacaaatacccttgttgtccgccaaagatgtgggagaccaggaggcggcgtcctccttcggtatggttctcagctagcacctgaaacattctaccgggagtgcgatatgcaactatttggaccctggggtgagatcgtgagcccttcattgtctcccgccacttccaatgccggagggtgccggctctttattaacgtcgccccccatgcccgtatcgcaattcacgcgctcgctactaatatgggggccgggaccgagggtgccaatgctagctatatccttattcgagatactcactccctgcgaacgacagccttccatggacagcaggttctatactgggaatcagaaagttcccaagccgagatggaattcagcgaagggtttctgaaagctcaggcttctctccggggacaatattggactcttcaatcatgggtaccagaaatgcaagacccacagagttggaagggcaaagaaggaacttag

SEQ ID NO: 237882 - DNA, 4281 bp, Artificial Sequence
  derived and/or modified sequence
atgcaccagcggcatccgcgggcacggtgtccaccgctctgcgtggcaggaatccttgcttgcgggtttctcctcggatgctgggggccgtcgcatttccaacaatcatgcctgcaggcgctggaaccacaggctgtatcttcctacttgagccctggagccccgctgaaaggacggccaccctcgccaggattccaacgccagcgccagaggcagcgccgcgccgcgggcggaatcctgcacctggagctgctggttgcagtcggacctgacgttttccaggcccatcaggaggacactgaacgctacgtgcttacgaacctgaatatcggggcggagctcctgcgcgacccgtcgctgggtgcgcagtttcgcgtccatctggtgaagatggttatcctcactgaaccagaaggagcaccaaacatcactgctaatctgacctcaagcctcctgagcgtgtgcgggtggagccaaactatcaacccggaggatgataccgaccctggccacgcagacctggtgctgtacatcacccggttcgacctggagctcccagatggaaaccgccaggtacgcggagtgacccagctgggaggggcatgctctccgacctggtcgtgtctgatcacggaagataccggtttcgacctgggcgtcactatcgcacatgagatcggacactccttcggactggaacatgacggagcccccggatcaggatgtgggccttccggacacgtcatggcctccgatggcgcggcaccccgggcaggactcgcatggtcgccttgctcgcgacgccagctcctgagcttgctgtcggccgggcgggcacgctgtgtgtgggacccaccgcggccacaacccggctcggcaggccaccccccagatgcgcagcccggactctattacagcgccaacgaacaatgtcgcgtggccttcggaccgaaagcagtggcttgtaccttcgctagggagcaccttgatatgtgccaagccctgagctgccacaccgatcctctggaccagtcatcctgctcgcggcttctggtgccgctgctggacggcaccgagtgtggtgtggaaaagtggtgctccaagggacgctgccggagcctggtcgaactcaccccgatagctgccgtgcacgggaggtggagttcctggggccctcgctcaccgtgcagccgctcctgcggaggcggcgtcgtaacccggcgtcgccagtgcaacaatcctcgcccagctttcggaggacgggcctgcgtgggagcagacctgcaggccgaaatgtgcaatactcaagcctgtgaaaagactcagctggaattcatgtcacaacaatgtgcaagaactgatggtcaacctttgagatcgtcccccggcggcgcatcattctaccactggggtgccgcggtgccacatagccagggagacgcgctctgcaggcacatgtgtagggcgattggagaatcgttcatcatgaaaagaggggactcgtttctggacggcactcgctgcatgccttccgggccacgagaggacggaactctgtccctgtgcgtcagcggctcctgcagaaccttcggatgcgacggacgcatggactcccagcaagtgtgggatcggtgccaggtgtgcggaggggataatagtacctgctcgccgaggaaggggtctttcactgcaggtagagccagggagtacgtcacgtttctgaccgttacgccaaacctgacttcagtgtacatcgccaaccacaggccgttgtttactcatctggccgtgagaatcggtgggcgctacgtggtggcgggcaagatgtctatttccccgaacactacctacccctccctgctcgaggacggcagagtcgaataccgcgtggcacttacggaggaccgtttgcccagactcgaagagatccggatttggggaccgctgcaggaggacgcggatatccaggtgtaccgcaggtacggagaagagtacggaaatcttacccggcctgacattacgttcacttacttccagcccaagccgcgccaggcctgggtgtgggcggctgtgcggggcccgtgttccgtgtcatgtggagccgggctccgctgggtgaactattcctgcctggaccaggcccgcaaggagttggtcgagacggtgcaatgccaggggtcccagcagccaccggcgtggccggaagcgtgcgtccttgaaccttgcccaccatactgggctgttggagacttcggcccgtgctcggccagctgcggtgggggactgcgcgaacggccagttagatgcgtggaggcgcaaggctcccttctcaaaaccctgccgccggcccggtgtcgggcgggtgctcagcagccggccgtggcacttgaaacttgcaacccgcagccgtgcccggccaggtgggaagtgtccgagccatcatcgtgcacttccgcaggaggggctggattggcgctggaaaacgaaacctgcgtgccaggagcggatggactcgaagcgccggttaccgaaggcccaggcagcgtcgatgagaagctcccagccccagaaccttgcgtgggaatgtcatgtccacccggctggggacacctggatgcgacttcagcgggagagaaggccccatcaccatggggaagcatcagaacgggtgcacaggccgcacacgtctggaccccagccgccgggtcctgttccgtgtcgtgcggcaggggattgatggagctcaggttcctgtgcatggattcagccctgagagtgccagtgcaagaagaactgtgtgggcttgccagcaagccggggtcccggagggaagtctgccaagccgtcccgtgccctgcccgttggcagtataagttggcggcatgttcggtgtcctgtggacgaggagtggtccggagaatcctctactgcgcacgggcccatggagaggatgatggtgaggagattttgctggacacccagtgccagggactcccgcggcctgagccgcaagaagcctgctcactcgagccttgtccgcctcgatggaaggtgatgtcactcggtccgtgttcggcttcatgcggactcggcaccgccagacggagcgtcgcatgtgtgcagctcgaccagggccaggatgtagaagtcgacgaagctgcgtgcgccgccctggtgcgcccggaagcctccgtgccatgccttatcgcggattgcacctaccggtggcacgttggaacctggatggaatgctccgtgagctgcggcgacggtatccaacggcgaagagatacctgcctgggccctcaggcgcaggctccggtccctgcagacttttgccaacacctcccgaagccggtgaccgtgcgcggatgctgggcgggcccgtgtgtaggacaagggaccccctctctggtgccgcatgaggaggctgcagcaccggggagaactactgcgactcctgcgggggcatcgctcgaatggagccaggcgagagggctgctgttttccccggctccgcaacctcggcgcttgctccctggtccccaggaaaattctgtgcaatcatcggcgtgtgggagacagcaccttgagcccaccggcactattgatatgaggggaccgggccaagccgactgcgcggtggctatcgggcggccactgggagaagtggtgactctcagagtgctggaatcatccttgaactgttcggccggcgacatgctgctgttgtggggacggttgacctggagaaagatgtgcagaaaacttctggatatgaccttttcgtcgaaaacgaatactcttgtcgtccgccagcgctgcggacgccccggtggtggcgtcctgcttcgctacggatcgcagttggccccggaaactttttacagggagtgcgacatgcaattgttcggtccctggggggaaatcgtgtcgccctccctttccccggcgacgagcaacgccggcggatgccgcctgttcatcaacgttgcaccgcatgcccgcatcgcgatccacgccctcgcaaccaatatgggagccggaacggaaggagccaacgcctcatacatcctgatacgagacacccacagtctccgcactactgcgttccatggtcaacaagtgctgtactgggaatcggaaagctcgcaagcagaaatggagttttccgagggcttcctgaaagcacaagcctctctccggggccagtactggaccctgcagagctgggtgccagagatgcaagatccccagtcctggaagggaaaggaaggcacc

SEQ ID NO: 237883 - DNA, 4281 bp, Artificial Sequence
  derived and/or modified sequence
atgcaccagcgacacccacgggcccgctgtcctcctctgtgtgtggctggtatactggcatgcggctttctcctgggatgttggggaccaagccacttccaacaatcctgcctgcaagcgctggagcctcaggcggtatcctcttacctttccccgggagcccccctcaagggccggccaccttcacctggatttcaaagacaaagacagcggcagcggcgcgcggcaggcggaatcctccatctcgagctgttggtggcagtgggtcccgacgtgtttcaagcccaccaagaagataccgaacgatatgtccttactaacttgaatatcggcgcggagcttctccgagatccgtcccttggagcacaatttagagtgcatctcgtgaagatggttattctgaccgaaccagagggggcacccaacatcaccgcaaaccttacctcgtcacttcttagtgtgtgcggatggtcccaaactatcaatccagaggatgacaccgaccccggacacgcagatctggttctgtacattaccaggtttgatctggaactgccagatggaaacagacaggtccgcggggtgacccagcttgggggagcctgttcgcccacttggagctgtcttatcactgaagataccggttttgatcttggagtgacgatcgcacacgaaataggccatagctttgggcttgagcacgacggcgcacctggcagcggttgtggtcctagcggtcatgtcatggcgtcggacggggcagcacctagagcaggtcttgcatggtccccatgttccagacgtcaactgctgtccctgctgtccgctggtcgagcacggtgtgtctgggatccaccaaggcctcagcctggaagcgcaggtcacccacccgatgcccaacctgggctgtactacagcgcaaatgaacagtgtagagtggctttcggacctaaggctgtcgcttgtaccttcgcccgagaacatcttgatatgtgccaagcactgagctgtcatacggatcccttggatcaatcatcctgttccagactcctggtgcctctgctggatggcacggaatgtggagtggagaaatggtgttcaaaaggaagatgcagatcccttgtcgagctgacccctatcgcagccgtgcatggcagatggtcatcctggggacccaggagcccttgctcgcgctcatgtggtgggggcgtggtcacccggcggagacaatgcaataatcctcggcctgcctttggaggaagggcgtgtgtgggcgcagatcttcaagcagaaatgtgtaacactcaagcatgtgaaaaaactcaacttgaattcatgagccaacagtgcgctcggaccgatggacaacctcttagatcctccccaggtggagcctcattttaccattggggtgcagcagtccctcattcgcagggagacgccctgtgtagacatatgtgtagagcaataggtgagtctttcataatgaagagaggtgattcctttctggatggcacccgttgcatgccatcggggccgagagaagatggaaccctttcgctgtgcgtcagcggaagctgcaggacttttggctgcgatggtagaatggattcacagcaggtgtgggatcgttgccaggtgtgtgggggtgataacagcacttgtagcccacggaagggatcattcaccgccggccgagcacgagaatacgtgactttcctcaccgtgaccccgaacctgacttccgtgtacatcgccaaccacagacctctctttactcacttggcagtgagaattggaggtaggtacgtggtcgcaggtaagatgtcgatttcccctaacactacttacccatcacttctcgaagatggaagggtcgaataccgcgtcgctctgacggaggaccggcttcccagactggaggaaatcaggatctggggtccactccaagaagatgcggatatccaagtctacagacggtacggtgaggaatacggaaacctgacccggcctgacattaccttcacttacttccaacccaaacctaggcaagcatgggtgtgggcagcggtgcggggaccatgtagtgtgtcctgtggtgctggcctgagatgggtcaattactcatgcctggatcaagcgcgcaaggaactggtcgaaaccgtgcaatgtcaaggttctcaacaaccgcccgcttggccggaagcgtgtgtgctcgaaccttgtcccccctactgggcagtgggtgattttggaccctgttccgctagctgtggcggtggtctgagggaacgccctgtccggtgtgtggaggcacaagggtcacttctgaaaacgctcccccctgcacgatgtcgtgcaggggcgcagcaaccagcagttgcacttgagacttgtaatccacagccatgtcctgcaagatgggaggtgtcagagccatcgtcgtgtacttccgcaggtggtgcaggtctggctctggaaaacgagacgtgtgtccccggtgcggacggtctggaggcaccggttactgaagggccgggatcggtggatgaaaaactgccagcgccagagccttgcgttggaatgtcctgtcctcccggatggggacatcttgatgccacgtcggcaggtgaaaaagccccctctccctggggctccatccgaaccggtgcacaggcagcgcatgtgtggacccctgcagctgggtcatgttccgtctcatgtggacgaggactgatggaactgcgttttctttgtatggattctgctcttcgggtcccagtgcaagaagaactgtgtgggctggcatcgaagccaggttcacggagggaggtgtgtcaagcagtcccctgccctgcacggtggcagtacaagttggcagcctgtagcgtctcgtgtgggagaggagtggtgaggcggattctttactgtgcaagggcgcatggagaggatgatggagaagagatccttttggatacccagtgccagggtctgccgcggcctgaacctcaagaagcgtgctcgctggaaccatgccctcccagatggaaggtgatgtcgctgggtccctgttcagcgagctgcggtctgggaacggcacgcagatcggtggcatgtgttcagctggatcaaggacaagatgtcgaggtggatgaagcggcatgcgccgccctcgtcagaccggaggcgtcagtgccatgcctgatcgccgattgcacctaccgctggcacgtgggaacttggatggaatgttcggtgtcatgtggagatggcatccaacgccgtcgggacacttgcctcgggccacaggcacaagcgcctgtgcctgcagacttctgtcaacatctccctaagccagtgactgtccggggctgctgggcgggcccttgtgtgggacagggtactccgagcttggtgcctcacgaagaagcagcagcgcctggtcgtactacggcaaccccagcgggagcgagcctggaatggtcacaggcacgaggcctgctgtttagcccagcacctcaaccacgtaggctgctccctgggccacaagaaaatagcgtgcaatcgtcagcgtgtgggaggcagcatcttgaacctaccgggactattgacatgcgcggaccaggtcaagcagattgtgctgtcgcgattgggaggccactgggtgaagtggtgacgctccgcgtgcttgaatcgtcacttaactgttccgcgggcgacatgctgctgctctggggacgcctgacctggaggaaaatgtgtagaaaacttttggatatgaccttttcaagcaagactaacaccctcgtggtgagacaacgatgcgggcgcccagggggtggagtgctgttgcgttacggcagccaactggccccggagactttttaccgcgagtgcgatatgcagctttttggaccttggggcgaaattgtttctccctcactgagtcctgcaacttcgaatgcaggcgggtgcagattgttcatcaacgtcgcaccacatgcccgtatcgcaattcatgcactggctaccaacatgggcgcgggcactgaaggggccaacgcatcgtacatacttatacgcgacacccacagcctccggactactgcatttcatggacagcaggtgctgtactgggaatcggaatcaagccaggcggaaatggaattttcggagggcttcctcaaggcacaggcctccctgcgcggtcagtactggaccctgcagtcatgggtgccagagatgcaggaccctcaatcgtggaaggggaaggaagggacc

SEQ ID NO: 237884 - DNA, 4281 bp, Artificial Sequence
  derived and/or modified sequence
atgcaccaacgccacccacgcgcacggtgtccgccactgtgtgttgcaggaatcctcgcctgtggctttctgctgggttgttgggggccatcgcacttccagcagtcctgccttcaagcattggaaccccaggccgtgtcgagctacctgagccccggtgcgccgctgaagggtcgcccgccgtcaccgggtttccagcgtcaacgacagcggcagaggagggccgctggggggatactacatctggaactgctggtcgctgttggacccgatgtgttccaggcccaccaggaggacaccgagcgctacgtcctcaccaatctgaatattggggccgaactgctgcgggacccttcccttggggcacagttccgggtgcacctggtgaagatggttatactcacggagccggagggggctccaaacatcaccgccaacctgacatctagccttctatcagtgtgtggatggagccagacgattaaccctgaagacgatacagatccgggacacgccgatctcgtcctgtacattacccgcttcgatctagaactgccagatgggaatagacaggttagaggggtgacccagctaggaggtgcctgcagtcctacctggagctgtctcatcaccgaggatactggctttgacctaggagttaccatcgctcatgaaattggacatagctttggccttgagcacgacggagcaccgggatcaggctgtggaccctccggtcatgtgatggccagcgacggtgcggccccacgagccgggctcgcctggagtccatgctctcgtcgccagctcctatcactgttgagcgcgggtagggcccggtgcgtttgggacccacccagaccacagcccggatctgccgggcaccctccggacgcacagcccgggctctactactctgctaatgaacagtgcagggtggcatttgggcctaaggccgttgcctgtacattcgccagggagcatctcgatatgtgccaggcactctcctgccacacagatccattggaccagtcctcctgcagcagactcctggtacccctgcttgatggaacagaatgcggcgtggagaagtggtgctccaaaggcaggtgtaggtcactggtggagctcactcctatcgcggcagtgcacgggagatggagctcatggggcccgcggtccccatgctctcgctcttgcggaggaggggtcgtgacacgtcgacgtcagtgcaataacccccgtcctgcctttggggggcgagcttgcgttggggctgacctccaggccgagatgtgcaacacgcaggcctgcgagaagactcagctggagtttatgtcgcaacaatgtgcaagaacagacggtcagccgttgagatcctcgccaggaggggcgtcgttttatcattggggggccgccgtgccacattctcagggagacgccttatgtaggcatatgtgtcgggccataggggagtcattcataatgaagcggggagatagtttcctagacggcactcggtgcatgccgtccggcccaagggaggacggcacgctaagtctgtgcgtgtcaggctcttgccgaaccttcgggtgcgatgggcgcatggatagccaacaagtgtgggatcgctgccaggtgtgcggtggcgacaactccacctgtagtcctcgtaagggctcgtttacagccggacgagcccgggagtatgttaccttcttgaccgttactcccaatttgacttctgtgtacattgctaatcaccgtcctctgttcacccacctggcagtgcggatcggtgggcggtacgtcgtggcaggaaagatgtctatcagccctaacactacatatccgtccctcctcgaagacgggcgcgtagagtaccgggtagctctgacagaagatcgtctgccaagactggaagagatacgcatatgggggcctttacaggaggatgctgacatacaggtgtatcgaagatatggggaggaatacggcaacttgacacgccctgacatcaccttcacttattttcagccgaagcctcggcaggcttgggtctgggctgccgtgagggggccatgctccgttagctgcggcgctgggctgagatgggtcaattacagttgtttggaccaagccagaaaggagctggtcgagaccgttcagtgccagggcagccagcaacctcctgcctggcccgaggcgtgtgttctggagccatgccccccttattgggccgtaggggacttcggaccctgcagcgccagctgtggaggtggacttcgcgagagacccgtgcggtgtgttgaagcccaggggtcactgttaaagacactacctccagctagatgccgcgctggagcccagcagcccgctgtcgccctcgagacctgtaatccccagccttgcccagctcggtgggaagtgtcagagccctcatcttgcacttctgccggcggggcaggtctcgctctggagaacgaaacttgcgtccctggggcggatggtctggaggctcctgtaactgaggggccaggctcagtggatgagaaactccccgcacccgagccatgcgttgggatgtcatgtccaccggggtgggggcaccttgacgccactagtgcaggggagaaggccccctccccctggggaagcatacgcaccggggctcaggctgcgcatgtgtggactcccgccgctggcagttgctccgtttcatgcggccgaggtcttatggagctccggttcctgtgcatggactccgcactcagagtcccggtacaggaagaactgtgcgggctagccagtaagcctgggagcagaagagaagtgtgtcaagccgttccatgcccagccaggtggcagtacaaactggctgcatgctcagtgtcttgtgggcgcggcgtagtccggcgcattctctactgtgctcgagcccatggggaggacgacggcgaggaaatactgctggacacacagtgccagggactgccgcgccctgaaccccaggaagcgtgttcgctagaaccttgtcctccaagatggaaggtcatgagcttgggaccatgttccgctagctgcgggctaggtaccgcacgaagatcagtcgcatgcgtgcagctggatcaaggacaggacgttgaggtcgatgaggctgcctgcgcggccctagtccgccctgaagctagcgtcccctgtctgattgccgattgcacctacaggtggcacgtggggacatggatggagtgctcagtgtcatgcggtgatggtatacaaagaagacgcgatacctgtttggggccacaggcgcaggctccagtgcccgcggacttttgccagcatttgcccaaacctgtgacagttcgcggatgttgggccggtccatgtgtaggacaagggactccttcgctcgtgccccacgaggaggcggctgctccggggcggaccaccgccacccctgccggggcgtctctggaatggtcccaggcacgcggtctgctgttctctccagctccccagcccaggcgactgctccccggccctcaagagaactctgtacagtcctcagcttgtggaagacagcacctcgagcctaccgggacaatagacatgcgagggcccggtcaagctgattgtgccgtcgcaatcgggcgaccccttggggaggtggtgactctgcgcgtgctggaatcctcactgaattgcagcgcgggcgacatgctgctgctgtggggcaggctgacatggcgcaaaatgtgtcgcaagttgcttgatatgacgttttccagcaaaactaacacactggtggtgaggcagaggtgcggaaggcctggaggaggggtgctcctgagatacggcagccagcttgccccagagactttctatagagagtgtgatatgcagctgtttggaccttggggtgaaatcgtgtctccatcgttgtctcctgccacatctaatgctggcggctgtcgcctgtttatcaatgttgcgccgcacgctcggatcgcaatccacgcccttgctacaaacatgggcgcagggacagagggtgctaacgcctcctacattctcatccgggatacgcattcgttaagaacgaccgcttttcacggccagcaggtcctctattgggaatccgaatcaagccaagccgagatggagttcagtgagggctttctgaaggcccaagcaagtctccggggccagtattggacactacagtcttgggtccctgagatgcaggacccgcagtcgtggaagggcaaggaagggacg

SEQ ID NO: 237885 - DNA, 4281 bp, Artificial Sequence
  derived and/or modified sequence
atgcatcagcgtcacccacgcgcccgttgccctccgctctgtgttgcgggtatcctggcctgcggattcctcctgggctgttggggcccgagccacttccagcaaagctgcctccaggccttagaacctcaggctgtctcttcgtacctctcaccgggcgcccctctcaagggccgacccccctctccgggcttccaacgtcagcgtcaacgtcaacgccgtgccgccggcggaatcctgcatctagaactgctggtcgccgtgggccccgacgtttttcaagcccaccaggaggatactgagcgctacgtgctcaccaacctcaacatcggcgctgagctccttcgcgaccccagcctgggcgcgcagtttcgcgttcatcttgtaaaaatggttatcctgactgaacccgagggagctccaaacattactgccaacctgacttcgtcccttttgtcagtttgcggttggtctcagactatcaaccccgaggatgataccgacccgggtcacgcagacctggtcctctacatcacccggttcgacctggaacttcccgacggaaatcgccaggtgcgcggagtgacccagttgggcggtgcatgctcaccgacatggtcgtgtctcattaccgaggacaccggcttcgatttgggagtgaccattgctcacgagatcggacactccttcggtctcgagcatgatggtgctcctggttctggatgcgggccttccggacacgtgatggcgagcgatggagccgcccctcgcgccgggctggcgtggtcgccttgcagcaggcgccagttactgagtcttctcagcgccggcagagcccgttgtgtctgggatcctccccgcccccagccgggttccgccggacacccccccgatgcccagcccggtctctactatagtgccaacgagcagtgtcgcgtcgccttcggccctaaggctgtcgcttgcaccttcgcccgcgagcatctcgacatgtgccaggccctcagctgccacacagaccccctcgatcagtcatcttgttcgcggctacttgtcccactgctcgacggtacagaatgcggtgtcgagaagtggtgctctaagggccgttgccgatccctagtcgaactcactcctattgctgccgtccacggacgctggtcgtcgtggggacctcgttccccgtgttcccgctcgtgcggtggcggcgtggtcaccaggcgccggcaatgtaataatccacgccccgcattcggtggccgtgcctgcgtcggcgccgatctgcaggccgagatgtgcaatacacaggcgtgcgagaagacccagttggaattcatgagccagcagtgcgcccggaccgatggccagccccttcgctcttcccctggcggcgcgtccttctaccactggggggccgcggtgccacacagccaaggtgatgctctgtgccggcacatgtgccgcgcaattggtgaaagcttcattatgaagcgtggcgacagcttcctcgacggcacgcgttgcatgccgagcggcccccgcgaggatggcactttatctctatgcgtttcgggatcctgccgcaccttcggctgtgacggccgtatggattctcagcaggtctgggatagatgccaggtttgtggaggtgataacagtacctgctcgccccgtaagggaagtttcaccgcaggcagagcacgggagtacgtgaccttcctgaccgttacgccgaacctcacctcggtttacattgcaaaccaccgtccgctcttcactcacctggccgttcgtataggtgggcgctacgttgtagcggggaagatgtccatcagcccaaacaccacctacccgtcgctgttggaggacggtcgcgtcgagtaccgcgtcgctttgactgaggaccgtctccccaggctcgaagagatccgcatctggggcccgttgcaggaggatgccgatatccaagtgtaccggcggtacggcgaggaatacggcaacctaacccgtcctgacattaccttcacctactttcagcccaagcctcgccaggcctgggtctgggccgcggtgcgcggcccctgttctgtttcttgcggagccgggcttcgttgggtcaactactcctgtctggaccaggcgcgaaaagaacttgtcgagactgttcagtgtcagggctctcagcagccgcccgcctggcctgaggcctgtgtcctcgaaccttgtccaccctactgggcagtcggcgactttggcccctgttctgccagttgtggcggaggtcttcgtgagcgtcccgtccgctgtgttgaagctcagggttccctcctcaagacgctcccgccggcacgttgcagagctggtgcccagcagcctgcggttgctctggagacttgcaatccacagccgtgccccgcccgctgggaggtgtcagagccttcctcctgtacctccgcaggcggcgcgggtctggctctcgaaaacgagacatgcgttcccggtgccgacggcctagaggctcccgtcactgagggtcctggctcggtcgacgaaaagttgccagctcccgaaccctgcgtcggaatgagctgccccccaggctgggggcacctggacgccacctctgccggtgagaaggccccatctccatggggctccattcgtactggagctcaagctgctcatgtctggacgcccgctgctggctcctgttctgtgagctgcggccggggtctgatggagcttcgtttcctgtgcatggactccgccctgcgtgtcccggtgcaggaggagctctgtggtctcgcctccaagccgggctcacgtcgtgaggtttgccaagcagtcccctgtcccgctcgttggcagtacaagctcgctgcgtgctccgtctcctgcggccgcggagtcgtccgccgtatcctgtactgtgcccgggcccacggcgaagatgacggtgaggagatattgttggatactcagtgccagggacttcccagaccggagccgcaagaggcgtgttctctggagccttgccctcctcggtggaaggtgatgagcctgggcccgtgtagcgcttcatgcggcctcggcactgcccgccgctccgttgcttgcgtccagctcgatcagggccaggacgtcgaggtcgatgaggccgcctgtgcagccctcgttagaccggaggcctccgttccctgcctcattgccgattgcacctataggtggcacgtgggcacgtggatggagtgctccgttagttgtggcgatggaattcaacgccgccgcgacacctgtctgggcccccaggctcaggctcccgtaccggctgatttctgccagcaccttcctaagcctgtgaccgtcaggggatgttgggcggggccgtgcgttggacagggcacgccgtcactggtgccccatgaagaggccgcggctccagggcgcaccactgccacccctgctggtgctagcctcgagtggtcccaggccaggggcctccttttctcgccggcccctcagccgcggcggcttttgcccggcccccaggagaactcggttcaatcttccgcctgcggccgtcagcacctggagcccaccgggaccatcgacatgcgcggtccaggccaggccgactgcgctgtcgctatcggtcggcctctgggcgaggttgtgaccctcagggtcctggagagctcactgaactgctctgccggcgacatgcttctgttgtggggtcgcctgacttggcgtaagatgtgtcggaagctcttggacatgactttctcctccaagactaacactttggtagtccgccagcgttgcggccgtccgggcggtggtgtcttgctgcgttatggctcgcaacttgctcctgaaactttttaccgggagtgcgacatgcaactcttcggtccatggggggagatagtctcgccttcgctctcccctgccacatctaacgccggcggttgccgcctgttcatcaacgtggccccacatgcccgaatcgctatccacgctctagccaccaacatgggtgccggcaccgagggtgcaaacgcctcctatatcttgatcagggacactcactctcttcgcactaccgcgtttcacggccaacaggttttatactgggagagcgagagctcgcaggcggagatggagttctcggagggtttcttaaaggctcaggccagcctccggggccagtactggacccttcaaagttgggtccctgagatgcaggatccgcagtcttggaaggggaaggagggcaca

SEQ ID NO: 237886 - DNA, 4281 bp, Artificial Sequence
  derived and/or modified sequence
atgcatcaacggcaccctcgcgccagatgtccccccctgtgcgtggccgggatattggcatgcggatttctgctgggctgctgggggccaagccactttcagcagtcatgtctgcaggccctagagccccaggctgtctctagttacctgagccccggagcaccactgaaagggcggccaccatcccctggcttccagcgccagcggcagcgacagcgacgcgccgccggcggtatccttcatcttgaactgctggtggcagtcggtcccgatgtgtttcaagcccatcaagaggatactgagcggtacgtgttaaccaatctgaatattggagctgagctgctacgagaccctagtcttggtgctcaattccgtgtgcacctggttaaaatggtgattctgacagaaccagaaggggcccccaatattaccgcaaacctgaccagctctctgctgtcagtctgtggctggtcacagaccatcaaccctgaggacgatacagatccaggccatgccgacctagttctgtatataactcgctttgacctagagctgcccgacggaaatagacaggtgcgcggagtgacccagctgggaggagcctgcagcccaacttggagttgtctcatcactgaggatacaggtttcgacctgggtgtgaccatagcccacgaaattggtcattcctttggtctggagcacgatggggccccagggtctggctgcggcccaagtggccacgttatggccagcgatggggccgccccacgcgctggcttagcttggtccccctgctctcggcggcagctattgagcctgttatctgctgggagagccagatgcgtgtgggatcccccgcgcccacagcctggctctgccgggcaccctcccgacgctcaaccaggcctatactattccgccaacgagcagtgcagggtggctttcggaccaaaggctgttgcctgtacctttgcccgggagcacctagacatgtgtcaggccctgtcttgtcacacagatcccctggaccagagcagctgttctagacttctcgtccccctactcgacggcacagagtgcggggtggagaaatggtgttctaagggcaggtgcagatcactggttgagttaacaccaattgctgcagtgcacggcagatggtcttcttgggggccacggagcccttgctcaagaagctgcgggggcggagtcgtcacccgtcgccggcagtgtaataacccccgacccgccttcgggggcagggcctgtgtcggtgccgacctgcaggctgaaatgtgcaacacccaagcatgtgaaaagactcagcttgagtttatgtctcagcagtgcgcacgtaccgatggccagccattgagatcttctccggggggtgccagtttttatcactggggcgccgccgtgccgcattctcagggtgatgctctatgcagacatatgtgccgggctattggcgagtccttcatcatgaagcggggcgacagctttttagacggcacaagatgcatgccctccgggccccgtgaagacgggactttgtctctgtgcgttagcggcagctgtagaacctttgggtgtgacggacggatggatagccagcaggtgtgggaccgttgtcaggtgtgtgggggtgataacagcacatgttctcctcggaaaggctcctttaccgccgggagagcccgcgaatatgtgactttcctgactgtgacacccaacctgacaagtgtgtacattgccaaccaccggcctctatttacccacttagccgtgcgaattggagggaggtacgtggtggctggtaagatgagcatttctccaaacaccacctatccctccctgctggaagatggcagggtggagtatagagtggccctgactgaggataggctgcccagactggaggaaatccgtatatggggccccctgcaggaagacgccgatatacaggtgtataggagatacggggaggaatacggcaatctgacccgccctgacatcacatttacttatttccagccaaaaccccggcaggcctgggtctgggctgctgtccgcgggccttgttccgttagttgtggggccggcctgcggtgggtgaattatagctgtctggaccaagcacgaaaagagctggtcgaaaccgtgcagtgccagggcagccagcagccaccagcttggcccgaggcatgtgtcttagaaccatgtcctccctattgggccgtgggcgatttcggaccatgcagcgcctcttgtggcggcggccttagggagagaccagtgaggtgtgtggaagcccagggaagcctgctgaaaaccttgcctccagcacgctgccgtgctggggcccaacagcccgcagtagctttagagacctgcaacccacaaccatgccccgcccgatgggaagttagtgagcctagttcttgcactagcgcaggcggcgctggcctagcactagaaaacgaaacttgcgtacctggcgcagatggtctggaagcaccagtgaccgaaggaccagggtctgttgatgagaaactcccagctccagaaccttgcgtgggcatgagctgcccgcccggatgggggcacctagatgctaccagtgccggcgaaaaggctccaagtccctggggtagtatacgcaccggcgcccaggctgctcacgtatggactccagcagccggctcctgctctgtctcttgcgggcggggcctcatggagctgagattcctgtgtatggatagtgcacttcgggtgcctgttcaagaggagctatgcggcttagcctccaagcctggatcacgacgcgaggtttgccaagcagtcccttgccctgccagatggcagtacaagctggccgcctgcagtgttagttgtggccgcggcgtcgtgcgtcgcatcctgtactgcgcacgtgcacacggcgaagacgacggcgaggagatactgctggacactcaatgtcagggcctacctcgccccgagccccaggaagcttgtagccttgaaccatgtccccctcggtggaaggtgatgagcctcggaccctgttctgcttcatgtggcctgggcactgcccgccggagcgtggcctgcgttcagctagatcagggccaagatgttgaggtggatgaggcagcctgcgcagccctggttcgccccgaggcctcagtgccctgcctaatagccgattgcacataccgatggcacgttgggacatggatggagtgttctgtgtcctgtggagacggaatccagaggcggagggacacctgcctggggccacaggcacaggcacccgtgcccgccgacttctgccaacacctgcctaaaccggtgaccgtgcgcgggtgctgggctggcccctgcgtgggccaaggcaccccgagtctggttccacacgaagaagcagctgcccccggccgtacaactgccacacctgctggcgcctccctggagtggagtcaggctagagggctcctgttctcaccagctcctcagcctcgtcgcctgttgcctggcccacaggaaaacagtgtgcagagctccgcttgtggccgacagcacctagagcccacaggcaccattgatatgagaggaccaggacaagccgactgcgcagtggcaataggccgccctcttggtgaggtggtgacactaagagtgctggaaagtagtctgaactgttccgctggcgatatgctgctgctttggggccggctaacatggaggaagatgtgtaggaagctcctcgatatgacattcagcagtaagacaaatacactcgtagtgcgtcagcgctgcggtcgaccaggcggaggcgttctactgcggtacggctctcagctggccccagaaaccttctatcgagagtgcgatatgcagctattcggcccatggggcgaaatagtgagcccatctctcagccccgccaccagcaatgctgggggctgcagactgtttataaatgtcgccccacatgcccgcatcgctatccacgccctggcaacaaatatgggagccggcacagaaggggccaatgcttcatatatccttatacgcgatacccattcattacgcacaacagcctttcatggtcaacaagtgctgtactgggaatccgagtccagtcaggccgagatggaattctctgaaggcttcttaaaggcacaagcatcccttcgcggccagtattggaccctgcaaagctgggttcccgaaatgcaggacccccagagctggaaaggcaaggaggggact

SEQ ID NO: 237887 - DNA, 4281 bp, Artificial Sequence
  derived and/or modified sequence
atgcaccagcgccatcccagagcacggtgcccccctctgtgcgtggctgggattcttgcttgtggcttccttctgggatgctggggaccatctcatttccaacagagctgtttgcaggcactggagcctcaggccgtcagtagttacctctcccctggcgcccccctcaagggaagaccaccttctcctggtttccagcggcagcgacagcgccaacggcgcgccgcaggtgggatactgcacttggaactgttggtggctgtcgggccagatgtgttccaggcgcatcaggaggatacggaaaggtatgttcttactaatttgaatatcggggccgaacttctgagggatccctcccttggagctcagttccgggtgcatctggtcaaaatggtgatcctgaccgagccagagggtgcgccgaacataacggcaaacctgacatcctctcttttgtcagtgtgcgggtggtcccaaacaattaacccagaggatgacacggatcccgggcatgccgatctggttctctatatcacacgcttcgatctggagctcccagacggtaataggcaggtgcgcggcgtcacgcaactcggcggtgcctgctcccccacttggtcatgcctgatcactgaagataccggatttgacctcggagttacaattgcccacgagatcggccattccttcgggcttgagcatgatggtgcgcctggcagcgggtgcggtccaagcgggcacgttatggcaagcgacggtgccgccccacgggcagggctggcatggtccccttgtagtcgcaggcagctcctgtccctgctgtctgctggcagagcaagatgcgtctgggatccaccgaggcctcagccagggagtgcgggccacccacccgacgcccaaccagggctgtactatagcgccaacgagcagtgtcgggtcgcgtttggacctaaagccgttgcttgcacattcgctcgagaacatctcgacatgtgccaagctctgagctgccatacagatccactcgatcagagcagttgttcacgcctgcttgtacctttgctggatggaactgaatgcggtgtggagaaatggtgttcaaaaggacgatgcagatctctcgtcgagctgacccccatcgctgccgttcacggaaggtggtccagttggggaccccggtccccctgcagccgcagttgcggaggcggagtcgtgacacggaggagacagtgcaacaatcctcgacctgcattcggtggccgggcttgcgtaggcgctgacctgcaggctgagatgtgcaatactcaggcatgtgagaagactcaactggaattcatgtcccagcagtgcgcgagaactgacgggcagccactcaggtcctccccgggcggtgcctctttctaccattggggagcagccgtgccacattcccagggcgatgctttgtgccggcacatgtgtcgcgcaattggtgagtcatttatcatgaagagaggggattcttttctggatggcaccagatgtatgccatctggaccccgcgaagacgggaccttgtcattgtgcgtgtctgggtcctgtcgaacatttggctgtgacggacggatggactcccagcaggtctgggacaggtgccaagtgtgtggaggagacaattcaacatgtagccctcggaagggatcatttaccgccgggagggccagagaatacgtgaccttcttgaccgtgacgccgaacctgacctctgtttacatcgcgaaccacagacccctgtttacccacctcgccgttagaatcggaggtcgctatgtggtggctggcaaaatgtcaatatcccctaataccacatacccgagcctgcttgaagacggacgagtcgaataccgggtggcgctcacagaagacaggctgccccggttggaggaaatacgcatatggggtccactccaagaggacgccgacatccaggtctatcgccgatatggtgaggagtatggtaatctgacccggcccgacatcacgttcacttactttcagccgaagccccggcaggcgtgggtttgggctgcggtcagagggccatgctcagtgtcctgcggagccgggcttcgatgggtaaactactcttgcctggatcaagcacggaaggaactcgtcgagactgtgcagtgtcaggggagccagcagccccctgcatggcccgaggcctgcgtgttggaaccatgtcccccatattgggccgtaggggactttggaccctgttccgcctcctgtggcggaggtctccgggaacgacccgttcgatgtgtggaagcgcagggctctctgctcaaaactctcccccctgcgaggtgtcgcgccggggcgcagcagccggccgtggccctcgaaacatgcaacccccagccatgcccagctcgctgggaggtctctgaaccatccagttgtacgtccgcagggggtgcaggactggcgctcgagaacgaaacctgtgtgcccggggctgatggactggaggcccccgttaccgagggaccaggttctgtcgacgaaaagctgccagcccccgaaccctgtgtgggcatgtcctgtccaccaggctgggggcacctggatgcaacgagtgcaggcgagaaggcccctagtccctgggggagtattcgcacgggggcgcaggccgcccacgtgtggaccccagcagcgggtagctgtagcgtgtcctgcggacggggactcatggagctcagattcctttgcatggactcagctttgagggtacccgtgcaggaggaattgtgtggcttggcttccaaacctgggtcaagaagggaggtgtgccaggctgttccatgtcctgccaggtggcaatataagctggcggcatgttcagtttcttgcgggaggggggtcgtgaggagaattctgtactgcgccagggcccacggcgaggatgacggcgaggaaatcttgctggatacccagtgccaggggctcccacggcctgagcctcaggaagcctgcagcctggagccgtgcccgcccaggtggaaggttatgagtttggggccctgctccgccagctgcggactgggaacagcacggcgctcagtggcctgcgtgcagctggatcagggccaggacgttgaggtggatgaggcggcctgtgccgcccttgtgcgaccagaagcttccgtgccctgtctgatcgcggactgcacctatagatggcatgtggggacgtggatggaatgttccgtgagctgtggcgatggcatccagagaaggagagatacctgcctgggcccccaggcccaggccccggttcccgcagatttttgccagcacctgccaaaacccgtgaccgtgcggggttgctgggccgggccatgcgtgggccagggaacgccctccctggtaccacacgaagaggctgccgctcctgggagaaccaccgccacccctgccggggcctcacttgaatggagccaggcccggggcctgctgttttcccctgcgccccaaccacgcagactcctgcccggaccccaggaaaatagcgtgcaatcctcagcttgcgggaggcagcacctggagcccaccggtaccatcgatatgagaggcccaggacaggcggattgtgccgtcgctatagggagacctctgggggaggtggtgactctccgcgtgttggaaagttccctcaattgttctgctggagatatgctgctgctgtgggggagactgacctggagaaaaatgtgtcggaagctcctggacatgacctttagtagcaaaacaaacaccctcgtcgtcagacagaggtgtgggagaccggggggcggagtcctcctccggtacggttctcagctggctcctgagactttctatagagaatgcgatatgcagctctttggaccttggggcgagattgttagtccatccttgtcacctgccacctctaacgccgggggatgtagactgtttattaacgtagcaccacacgctcgcatcgctattcacgccctggccaccaacatgggcgctgggacagagggcgcgaatgcgagctatatccttatccgcgatacccattctctgcgaacgacggcttttcacggacaacaggtactgtactgggaaagcgaaagttcccaggccgagatggagtttagcgagggatttctgaaagcacaggccagtctgcgcggccagtattggacgctgcagagctgggttcctgagatgcaagatccgcagtcctggaagggcaaagagggaaca

SEQ ID NO: 237888 - DNA, 4281 bp, Artificial Sequence
  derived and/or modified sequence
atgcaccagagacacccgcgcgcacgctgcccgccactctgtgtggcaggaattctggcctgcggcttccttttgggctgttggggaccctcccactttcagcaatcctgtctgcaggctctggagcctcaggccgtgtcttcttatctgagccctggcgccccactgaaaggacgcccgccgtctcccggctttcagaggcagagacaacgccaacgccgcgctgccggcggcatcctgcacctggaactcttggtagcggtgggcccggatgtcttccaagcccatcaagaggatacagagcgctacgtgctcacaaatttgaacattggtgctgaattgctgagggatccctccttgggagctcaattccgcgtccatttggttaaaatggtgatcctgaccgagcccgagggagccccaaatattactgctaatctgacaagttcccttttgtcagtttgcggttggagccagaccatcaacccggaagacgatactgaccctggtcacgccgacctggtgctgtacattacccgcttcgacttggaactgcccgatggtaatagacaagtgagaggagtaacccagttgggcggagcatgcagtcctacgtggtcatgcttgattaccgaagatacaggtttcgaccttggcgtgacaatcgcgcacgagatcggtcactcttttggcctcgaacacgatggtgcccccggcagcggttgcggaccatcaggccatgtgatggcatcagatggcgcggctccgagggccggactggcgtggagtccttgtagcaggcgccagctcttgtctctgcttagtgccggccgcgctaggtgtgtttgggatcccccaaggccccaacccggatctgcaggacatcctccagacgcacagccaggtctctactactctgcaaacgagcaatgtcgcgtcgcctttggccctaaggccgtcgcctgcactttcgccagagaacacctggatatgtgtcaggccttgagctgtcacactgacccactggaccaaagctcctgttctaggctgctggtgcccctgctggatggcaccgagtgcggcgtggaaaagtggtgtagcaagggcaggtgcaggagtctggttgagttgactccaatagctgctgtacacggaaggtggtcatcttggggacctaggtctccctgctcaagaagctgtggcggcggagtggtcaccagaaggaggcagtgcaacaaccccaggcccgccttcggtggtagggcttgcgtgggagcggatcttcaggctgaaatgtgtaacacccaagcttgtgagaagacgcagctggaatttatgtcccagcagtgcgcaaggactgacggccagccgctgaggtcatctcccggcggcgcatccttctaccactggggcgcagccgttccccattctcagggcgatgctctgtgcagacatatgtgcagggcgatcggtgaatcctttattatgaagcgcggcgatagtttcctggatggtactcgctgcatgccttcaggtcccagagaggacggaacactgtccctttgcgtcagcggcagctgtagaacattcggctgcgacggaaggatggacagccagcaggtctgggaccgctgccaggtatgtggcggcgataattctacttgctctcctcgcaagggatcattcactgccggacgcgcacgcgagtacgtcaccttccttaccgtgactcctaaccttacttctgtgtatattgctaaccatagacccttgttcacccatttggccgttaggatcggcggtaggtatgtggttgctggcaaaatgagtatttctcctaatacgacatacccgagcctgttggaggacggacgcgttgaataccgcgttgcgcttaccgaggacaggttgcctaggttggaagagatcaggatctggggtcctcttcaggaggacgctgacatccaagtgtacagaagatacggcgaagaatacggcaatttgactcgccctgacatcacatttacttactttcaacccaaacccagacaagcatgggtgtgggcagcggtcagaggaccgtgctccgtgtcctgtggtgctggcctgagatgggtcaactactcctgtctcgaccaggccaggaaggaactcgtggaaaccgtccagtgccagggatctcaacaaccaccggcctggcctgaagcatgcgttctggagccctgccccccctattgggctgtaggcgatttcggtccctgcagcgccagttgcggcggcggcctgcgcgagaggcctgtgaggtgcgtagaagctcagggctctctcttgaagaccttgccccctgcacgctgcagggctggtgctcaacagcccgcagtggctctggagacctgcaatccacagccctgcccagctaggtgggaagtgtccgagccgagtagttgtacgagtgctggtggagccggactcgcactggagaacgagacgtgtgtaccgggagctgatggccttgaagcacccgtgaccgaaggacccggttcagtggacgaaaagttgcctgcacccgagccatgtgtgggtatgtcttgcccacccggctggggtcatctggacgctacctccgccggagaaaaggcaccgtccccatggggcagcatcaggaccggtgcgcaggctgctcacgtttggacccccgcggccggatcctgctctgtcagctgtggaaggggtctcatggagctgagattcctgtgcatggactcagccctgagggtacctgtgcaggaagagctttgcggcttggctagcaagcccggatctcgcagagaggtgtgtcaagccgtgccgtgcccggccagatggcaatataaacttgccgcctgttccgtctcatgcggccgcggagtggtcagaagaattttgtattgtgctcgcgctcacggcgaggatgacggcgaggagatactgctggacacccagtgccagggtcttccacgcccagagccccaagaggcatgctcccttgaaccctgtccaccccgctggaaggtaatgtcactgggaccttgttctgcttcttgcggactgggtaccgccaggagatccgttgcttgtgtgcagctggaccagggacaggatgtcgaggttgatgaggctgcatgcgctgctctggtgagacccgaagctagtgtcccctgcttgattgccgattgcacctaccgctggcacgtcggcacctggatggagtgtagtgtgagttgcggtgatggaattcaacgcaggagagacacatgtctgggtccccaggctcaagcacccgtgcccgcagacttttgtcagcatttgcccaagcctgttaccgttcgcggctgctgggctggcccgtgtgtgggacagggcacaccaagtctcgtgccccatgaagaagctgcagcgcctggtcgcaccacagctactccagctggagcgtccctggagtggagccaggcgagaggactgctgttttcaccagctccacagccccgcaggctgctgccgggaccacaagagaactcagtgcagagtagcgcatgtggaaggcagcacctcgaacccaccggcaccatcgacatgcgcggccctggtcaggccgattgcgcagtcgcgataggtagacctctgggcgaagttgtgaccctgagggttctggagtcaagtctgaattgttctgcaggcgacatgttgctcctgtggggccgcttgacctggagaaaaatgtgccgcaagctgttggatatgactttttcctcaaagaccaacacactggtagtgaggcaacgctgcggcagacccggaggaggtgtgctgctgagatacggtagccagcttgcgcctgagactttctacagagagtgtgacatgcagcttttcggcccttggggagaaatcgtgagcccttctctttctccggctacttctaacgccggtggatgtagacttttcataaacgtcgctccgcatgcccgcatcgccatccatgctttggctaccaacatgggagccggaaccgagggcgctaatgcttcatatatcctcattagagacacacattcactgaggactactgcctttcacggccagcaagtcctctattgggagagtgagagttcccaggccgaaatggagttttcagaaggtttcctcaaggcccaggcctccctgagaggacagtactggaccttgcagtcatgggtaccagaaatgcaggacccccaaagctggaagggtaaggagggcact

SEQ ID NO: 237889 - DNA, 4281 bp, Artificial Sequence
  derived and/or modified sequence
atgcaccagcggcatccgagggctcgttgtcccccactttgcgtcgctggaatcctcgcatgtgggtttttgcttggatgttgggggccatcgcattttcagcaaagctgccttcaggcgcttgaaccacaggcggtgtcttcatacttgtcaccaggagccccattgaagggaagaccgccgtcgccaggatttcaaagacaaagacagcgccaacgtcgcgcggcgggagggattttacacctggaattacttgtagctgtaggaccagatgtattccaggcacatcaagaggacacagaaaggtatgtgctaacaaatctcaacattggagctgaactcttgcgcgacccatccttgggagcccaattccgcgtccaccttgttaagatggtcattcttactgaaccagagggagcacctaatatcaccgcgaatttgacgtcttcattgctatcagtctgcgggtggagccaaactattaatccagaagatgataccgatcctggtcatgctgatttagtcttgtacataacgcgttttgatttggaactgcctgatggaaatcgacaagtcagaggagtgacccaattgggcggtgcatgctccccaacttggtcatgccttattaccgaggacacgggattcgatctgggagtaaccattgcccatgaaatcggtcattccttcggattggaacatgacggagccccaggaagtggatgtggtcctagtgggcatgtcatggcaagtgacggtgccgcgccaagagcaggattggcgtggagcccgtgctcgaggagacagttgctatcacttctctcagctgggcgagctcgatgcgtttgggacccacccagacctcagccgggatctgcgggtcatcctccagatgctcagccgggattgtattactctgcaaacgaacagtgtagagttgcatttggaccaaaagcagttgcttgtacgtttgcacgggaacacttagatatgtgccaagccctgtcatgccacactgacccgctcgatcaatcaagttgttccaggctgctcgtgccactgctggatggtacagaatgtggtgtggagaaatggtgttctaaggggagatgtcgatctctggttgagctgacaccaattgcagccgtccatggacgatggtcctcctggggacctcgctcaccgtgctccagatcatgcggagggggagttgtcaccaggcggcgccaatgcaataatccaagaccggcctttggtggcagggcatgtgttggcgcagatcttcaagcagaaatgtgcaatacacaagcatgcgaaaaaactcaactcgaatttatgtcccagcaatgtgcccgaactgatggacaaccattgcgttctagccccggaggtgcctctttctatcattggggagcagcagtcccgcattcccaaggcgatgctctatgtcgccatatgtgcagagctataggagagagtttcatcatgaaaagaggagattcattcttggatggcacacgatgtatgccctccggacctcgagaggatggtacattgtctctatgcgtttccggatcttgtagaacctttggttgtgatggaagaatggacagccaacaggtctgggatagatgccaggtctgcggaggagataattctacatgtagtccacggaaaggaagttttaccgcaggaagagcccgcgaatatgtgactttcctcacagttacaccaaacctaacctccgtctatattgcgaaccaccgaccgctgtttactcacttagctgttcgtataggaggacgctatgtcgttgccggaaagatgtccatcagtccaaacaccacatatccgtcgctactagaagatggacgagttgagtatcgagttgctttaaccgaggatagattgcctagactcgaggaaattcgcatctggggcccattgcaggaggatgcagacatccaagtttatcgacggtatggagaagagtacgggaacttgactagaccagatattacctttacttattttcaacctaaaccgcgacaagcttgggtctgggcagcagttcgtgggccatgttcggtttcgtgtggagcaggtctgcgatgggtcaattattcttgcttggatcaagcccgtaaggaactcgtggagacagtacagtgtcaaggatcccagcaacctcccgcctggccagaggcatgtgtccttgagccgtgtccaccttattgggcagtgggtgattttggcccttgcagcgcatcatgtggtggaggtttgcgagaacgaccagttcgttgtgtcgaggcgcaagggtccctgctgaagactctacctccggcccgttgccgagctggagcacaacaaccagcagttgctttggaaacatgcaacccacagccttgtccggctagatgggaagtttcagaaccgtcatcctgcacatcagcaggtggagctggacttgcacttgagaacgaaacgtgtgtgccgggagctgacggattggaagctccggtcactgaggggccagggtcggtcgacgaaaaattaccagcacctgaaccttgtgttggaatgtcttgtccaccaggatggggacatttggatgcaaccagtgctggcgaaaaagcaccgtcaccgtggggatcaatacgaactggagctcaggctgctcacgtgtggactccagcggctggctcctgttctgtttcgtgcggacggggacttatggaattacgttttctttgcatggatagcgcattacgtgtgccagttcaagaagaactttgcggtcttgcttctaagcctggaagccgcagagaagtgtgtcaagccgttccatgcccggctcggtggcaatacaaacttgctgcttgttcggtctcatgtggacgaggagttgttcgacgaattttgtattgtgccagagcccatggagaggatgacggagaggagatcctccttgatacccaatgccagggactcccgcgtcctgagccacaggaggcatgctctctcgaaccatgtcccccacgatggaaagtcatgagtctcggaccatgtagtgcctcatgtggacttggaactgccagaaggtcggttgcttgcgtccaactggatcaaggtcaggacgtcgaggtcgatgaagcggcttgtgctgctcttgttagaccggaagcatcggtaccttgtctgattgcagattgcacatatcgctggcatgttggaacatggatggaatgcagcgttagttgcggagacggaattcaacgtcgtagagacacttgtcttggtcctcaggctcaggctcctgttccagcagatttctgtcaacatcttccgaagccggtgacagttcgaggatgctgggccggcccctgtgtgggacaaggaacaccttcactcgtaccccacgaagaggcggcagcgcccggtagaacaactgcgacgccggctggggcaagcttggaatggagtcaggctagaggtcttttgtttagtccagctccacaaccacgtagactgttgccaggacctcaagagaattctgtgcaatcctcagcttgtggaagacagcacctcgaaccaacgggaacgatcgatatgcgagggcctggtcaggctgactgcgctgttgccattggtcggcctcttggtgaggtagtgacattacgtgttcttgaaagttccttgaattgttctgctggagatatgttgcttctgtggggaaggttgacctggcgtaaaatgtgcagaaaactactcgatatgactttttcttctaagacgaacactctcgtagttagacagagatgtggaaggcctggaggtggagttttgctacgatatggttcgcaacttgcaccggaaactttttatcgtgagtgtgacatgcagctgttcggtccatggggagaaattgtttccccgagcctgtcaccagcgacttctaatgctggaggttgtcgcctttttattaacgttgcgccacacgcccgtattgctattcatgccctcgctaccaatatgggcgccggtactgaaggcgccaacgcttcgtatattctcattagagatacccactcgctcaggacaacggcctttcatggccagcaggttctttattgggagtctgagagttcacaagcagaaatggaattttcagaaggattcctcaaagcacaagcaagcttgcggggacagtattggacgctccaatcttgggtcccagagatgcaggacccacaatcgtggaaaggaaaggagggaacg

SEQ ID NO: 237890 - DNA, 4281 bp, Artificial Sequence
  derived and/or modified sequence
atgcaccaaaggcaccctagagctagatgtcctcccctgtgcgttgctggaatactcgcttgcgggttcctgctgggatgttggggtccatcccactttcagcagagctgcttgcaagctcttgagccacaggccgtatccagctacctgtctcccggcgcaccactgaaaggccggccaccctcaccaggattccaacgccagaggcagcggcagcgaagggccgccggaggcatcctccacctcgagctgctggtggcggtaggtccagatgtctttcaggcccaccaggaagatactgaaaggtacgtgctgacaaacctcaacataggggccgagctgttgagagacccgtcactgggagctcaatttagagtgcatctcgtgaagatggtgatcctgacagagccggaaggcgctcctaatatcacagcaaacctcacttcttccctgcttagtgtgtgcgggtggagtcaaacaataaacccagaggacgacaccgatcccggacacgcggatctggtcttgtacatcacccggtttgaccttgagctgcctgatggcaataggcaagtgcggggcgtaacccagctcgggggggcctgctctcccacatggagctgtttgatcaccgaagatacgggattcgatttgggggttaccatcgcccatgagatcgggcactcttttggcttggagcacgacggcgcaccagggtctgggtgcggaccttcaggtcatgtgatggcctctgacggggccgctccccgcgctggcctggcgtggtctccatgtagccgcaggcaactgctgagcctgcttagcgccggtcgcgccagatgcgtttgggaccccccacgccctcagcccggaagcgcaggtcaccctccggacgctcagccaggcttgtattattctgccaacgaacagtgtagggtcgcctttggcccaaaagctgtcgcatgtaccttcgcccgggagcacctggacatgtgccaggcactgagttgccacacggaccccctcgaccagagttcttgctctcgacttctggtgccgttgctggatggcaccgaatgcggcgttgagaagtggtgttccaaaggtaggtgtcggagtttggtggaactgacacccattgcagctgtccatgggaggtggtcaagctgggggcctcggtcaccttgctctagaagctgcgggggtggggttgtcactagaagacgccagtgcaataatccaaggcccgctttcgggggacgcgcttgcgttggcgccgatctgcaggcagaaatgtgtaatacacaggcgtgtgagaagacccagctcgagtttatgagtcagcagtgtgccaggacagacggtcagccgctgaggagctctccagggggagctagcttttatcactggggagcggctgtccctcattctcaaggggatgcattgtgtaggcatatgtgccgggcaatcggcgaatcattcattatgaagcgcggggactccttcctggatgggacacgctgcatgccgtctggcccgagagaagatggtacgttgagcctgtgcgtgtccggcagttgtagaacatttggctgcgatggccgcatggattctcagcaagtgtgggacaggtgtcaagtgtgtgggggggacaacagtacatgttcacctcggaaggggagcttcacagctggccgagcgcgagaatacgtcacgtttctgaccgtgacaccgaatcttacctctgtgtacatcgccaatcaccggccccttttcactcacctcgccgtacggattggtgggcggtacgtagtggccggaaaaatgtccattagtcccaataccacctacccttccttgctggaagatggcagagtagagtaccgagtcgctctgactgaggatcgcttgcctcgcctggaggaaatcagaatatgggggcctttgcaggaggatgccgacatacaggtttatcgaagatatggcgaagagtatggcaatctgaccaggccggatatcacattcacatattttcagcccaagcctaggcaggcttgggtgtgggccgctgtgagggggccttgcagcgtctcttgtggggccggattgagatgggtcaactattcctgccttgaccaggccaggaaagagctggtagagactgtccagtgccaggggagtcaacaaccacctgcctggcccgaggcatgtgtcctcgaaccctgcccaccttactgggccgtaggggatttcgggccatgtagcgcttcttgcgggggggggctgcgcgagcgaccagtcagatgtgtggaggcccagggttctcttctgaaaacactgccgccggctagatgccgcgccggcgctcaacaaccggcagttgctcttgagacttgtaatcctcagccatgtccagcccgctgggaggtctcagaaccatcaagctgcacaagcgctggaggggcaggcttggccctggaaaacgagacttgcgtgcctggtgccgatgggctggaggcaccagtgacagaaggcccaggctccgtggacgagaagctgcccgccccagaaccatgtgtgggcatgtcttgcccaccagggtggggccatctggacgcaacaagcgctggcgagaaggcccccagcccctggggaagcattagaaccggagctcaggccgcccatgtgtggactccagcagctgggagctgctcagtcagctgcggtaggggcttgatggaactgaggttcctttgtatggactcagccctgagggttccagtacaggaggaactctgtgggcttgcctccaagcccggatcccgacgcgaagtgtgtcaggcagttccgtgccccgcaaggtggcagtataagctcgctgcgtgtagcgtaagctgcggccgcggtgtggtgcgccgcatactttattgcgccagagcccatggagaggacgacggcgaagaaattctgctggacacacagtgtcagggcctcccccgcccagagcctcaggaagcctgctctctggagccctgcccccccagatggaaagtgatgtctctcggtccttgtagcgcctcctgcggactcggtaccgctagacggtcagtcgcatgcgtgcagcttgaccagggccaggatgtggaggtggacgaggctgcatgtgccgcactcgtccggcccgaggcatcagttccttgtcttatcgctgattgcacatacaggtggcacgtgggcacgtggatggagtgctcagttagctgtggagacggcatacagcgccgcagagatacatgccttggtccccaggcgcaagcccccgtccctgccgacttctgccagcatctccccaagcccgtgaccgtaaggggttgttgggctggcccttgtgtgggacaaggtaccccctccttggtgcctcacgaagaggctgcggcccccggcagaacaacagccacccccgctggagcctctcttgagtggtcacaggccaggggcttgctgtttagtcccgcgcctcagcctcgccgattgctgcccggaccgcaggaaaacagtgtgcagtctagcgcgtgcggaagacagcatctggaacccactggaactatagacatgcgcgggccaggtcaagctgattgcgccgtcgcaattgggagaccacttggagaggtggtgaccttgcgggtgctggaatccagcttgaactgttccgctggcgatatgttgctgttgtgggggagactgacttggaggaagatgtgtagaaagctgcttgacatgacattttctagcaagaccaacacactcgtggtaaggcagaggtgtggccgccctggtggaggggttctgctgagatatgggagtcaactcgcacccgagacattctatcgagaatgcgatatgcagctgttcggcccctggggcgagatagttagcccttctctgtctccagccacatctaatgcaggtgggtgtcgacttttcatcaatgttgcaccgcatgctagaatcgccatccacgctctggcaacaaacatgggcgccggaacggagggggcgaatgccagttatatcctgatccgggatacccattcactgagaactactgccttccatggccagcaggtcttgtattgggaatcagaatcatcccaagcagagatggagttcagcgaggggtttctgaaggcccaggcatcactgaggggccagtactggactctccagagctgggtccctgaaatgcaggatccccagtcttggaaggggaaagagggaaca

SEQ ID NO: 237891 - DNA, 4281 bp, Artificial Sequence
  derived and/or modified sequence
atgcaccaaaggcatcctagggcaaggtgccccccactgtgcgtagccggcatcctggcgtgcggtttcctgctgggttgctggggtccttcacacttccagcagtcctgtctgcaagcactcgagccccaggctgtgtctagctatctgtctccgggtgcaccgcttaaagggagaccaccctccccagggtttcagaggcagaggcagcgacaacgcagagccgcaggtgggatactacatctggagcttttagtggcggtcggtcctgacgttttccaggcccaccaggaggatacagaaagatatgtactgaccaacttgaacattggtgccgagctccttcgggatccttccctgggtgcccagttcagagttcacctggttaagatggttattctgaccgagcccgagggcgcaccgaacattacagccaacctaactagtagtctgctgagtgtttgtgggtggagccagacaattaatcctgaggatgacaccgatcccggtcatgcagacttggtcttatacatcacacggttcgacctggagctacccgacggtaaccggcaggttcgcggagtgacccagctgggcggtgcatgttccccgacatggagttgcctgatcaccgaggatacgggcttcgaccttggcgtgactatcgcacacgagatcggacattcttttggcctggagcatgatggcgctcccggatcagggtgcggaccgtcagggcatgtgatggcctccgacggggctgcgccccgcgccggactggcttggtccccgtgctcccggagacagctgctctccctccttagcgccggaagagcccggtgcgtttgggaccccccccgccctcagccaggttccgccggacaccctcccgacgcgcagccgggcctatactattccgccaatgagcagtgcagggtcgcattcggccctaaggccgtggcatgcacctttgccagggagcatctggacatgtgccaagctctctcctgtcacaccgaccctctagatcagtccagctgtagccgactgcttgtacctctgctcgatggcacagagtgcggcgtcgaaaaatggtgctctaagggaagatgcaggagcttggtggagctgacccctattgccgcagtacatgggcggtggagctcttgggggcctcgcagtccttgttcccggtcatgcgggggtggcgtggttacacgacgcagacagtgtaataatcctcgaccagccttcggcggacgggcttgcgttggagcagatctgcaggccgagatgtgcaatactcaggcatgcgagaaaactcaactggaatttatgtcccagcaatgcgccagaactgacggccagcccttgagatcctcacctggaggtgcatctttctatcattggggggcagccgtcccccactctcagggggatgccttgtgtcgtcatatgtgccgagcaattggtgaaagcttcatcatgaaaagaggggatagcttcttggacggtaccaggtgtatgccgtccggaccccgcgaggatgggacattgagcctgtgcgtttcaggcagctgtaggactttcgggtgcgacggaaggatggactcgcagcaggtatgggatcgttgtcaagtctgcggcggcgataattccacctgctccccaagaaagggctcattcacagctggaagagccagggaatacgtgacatttttgacggtgacacccaatttgacaagtgtgtacattgctaatcatcgccccctattcacccatttggctgtcagaattggcgggcggtatgtggtcgctggtaaaatgtctatatcgcctaacacaacttacccaagccttctcgaggacgggcgagtcgagtaccgtgtggcattgacagaggacaggctgccaaggttagaggaaatcagaatttggggccctctccaggaggatgcagacatccaagtctatcgaaggtatggagaggagtacgggaatttgacacgacctgatatcacattcacatactttcagccgaagcctaggcaggcgtgggtctgggccgctgttagggggccctgtagcgtttcttgcggcgcaggtcttcggtgggtgaactactcctgtctcgaccaggccaggaaggagcttgtggaaaccgtgcagtgtcagggatcacagcagccaccggcgtggccagaagcgtgcgtgctggaaccatgtcctccttactgggccgtgggtgattttggaccctgctctgcatcctgcggaggcgggctcagagagcgcccagtgagatgcgtggaggcgcaggggagcctgctcaaaaccctacccccggccaggtgccgggccggggcacagcaaccagccgtggctctggaaacttgcaaccctcagccatgtcctgcccgctgggaagtgtccgagccaagtagctgtacgtccgccggaggggctggtctcgctctggagaacgagacatgcgttcctggcgcggacggactggaagcgcccgtgacggaagggcccggaagcgtggacgagaagcttccagcccctgagccatgcgttggcatgtcctgccctcctggctggggacacctggacgctacctcggccggcgagaaggccccttctccttggggctcgatcagaaccggcgcgcaggcggcccatgtatggacacccgccgcaggctcatgttcagtcagttgtggcaggggccttatggagctgcgctttctctgtatggattccgctctacgggtgcctgtgcaggaggaactttgcggcctggcgtcaaaacctggctctcgccgggaagtctgtcaggccgtgccatgcccggccaggtggcagtacaagctagcagcttgctctgtgtcttgcggccgaggagtggtgcggagaattctgtactgtgctagggctcacggagaggacgatggggaggagattctgctcgatacacagtgccaggggctgccaaggcctgagccccaggaagcttgctctttagaaccgtgtcctccacgctggaaggtcatgtccctaggaccgtgtagtgcctcctgcggactgggcaccgcaaggaggagtgtcgcctgcgttcagctggatcaagggcaagatgttgaagtcgatgaggccgcctgtgccgcattggtcaggcccgaagctagtgtcccctgtctgatcgctgattgcacttataggtggcatgtcggcacatggatggagtgttccgtgagctgcggagacgggatccagcgtcggcgggatacctgcctaggcccgcaggctcaggccccggtgcctgccgacttctgccaacaccttcccaagcctgtcacggtccgagggtgttgggccggcccttgcgtggggcagggcacaccctcattggttcctcatgaggaagcagcagcccccggacggacgaccgcaacccctgccggggctagcctagagtggagtcaggcacgtggacttctattttcgcccgcgcctcagccacgaagattgctacctgggccacaggaaaatagtgtgcagtcgtccgcctgtggaagacagcatctggaacctaccggaactatcgatatgaggggacctggtcaagcggattgtgccgttgctattgggagaccactcggcgaagtggtgaccttgagggtgctggaatcctccctgaactgcagcgcaggcgacatgctgcttttatggggacgcctgacctggcgaaaaatgtgtcgcaaacttctcgacatgactttcagtagtaaaacaaatactctggtggtgcgacaacggtgtggaaggcctggtggaggagtgctgttgcggtacggaagccagctagctcccgagacattctaccgcgagtgcgacatgcagctgttcggaccctggggcgagatagtgagtccaagtctgtctccagcaacctctaacgccggaggttgtcggcttttcatcaacgtggcaccgcacgcccgtatagccattcatgctctggccactaatatgggagcaggcaccgaaggcgcaaacgcttcgtacatcttgatcagggacacacactccctgagaacaacagcctttcatggacaacaggtcctgtattgggagagcgaatcttcccaggctgagatggaattttccgaaggatttctgaaggcccaggctagcctcagaggacagtactggacactgcagtcatgggtgcccgaaatgcaggatcctcagtcctggaagggcaaagaaggtacc

SEQ ID NO: 237892 - DNA, 4281 bp, Artificial Sequence
  derived and/or modified sequence
atgcatcagcgccaccctcgggcccggtgccctccactgtgcgtggctggaatcctcgcctgcggattcctgctgggatgctggggcccatcgcactttcaacaatcgtgtctgcaggctctcgagccgcaagcagtgtccagctacctctcccctggcgccccgctcaaaggacgccccccaagccctggattccaacggcaacgccagcggcagcggcgagcagcagggggaatcctgcatctcgagctgctcgtggcagtgggacctgacgtgtttcaggcccaccaggaagatactgaaagatacgtcctcactaacttgaacattggggccgaactgctccgtgacccatccttgggagctcagttcagagtgcaccttgtgaaaatggtgattctcactgaaccggagggcgccccaaatatcacggccaacctcacttcctcgctgctctccgtctgcggctggtcacagaccatcaacccggaagatgatactgaccctgggcacgcggacctcgtcctgtatatcactagattcgacttggaacttcctgatggaaatcggcaggtccgcggggtgacccagctgggcggagcgtgtagcccgacttggtcgtgtctcatcactgaagatactggcttcgacctgggagtcaccattgctcatgagattggccacagcttcggcctggaacacgatggagcgccgggctccggctgtggcccaagcggacatgtgatggcctcggatggtgccgcccctcgcgcgggtttggcctggtcaccgtgttcccgccgacagcttctgtcgctcctgagcgcggggcgcgctcggtgcgtgtgggacccacctaggcctcagccgggctccgcggggcacccgcccgatgcccaacccggactgtactactccgcaaatgaacaatgccgggtggcctttggacccaaggcggtggcctgtacgttcgccagggagcatctcgacatgtgccaagctctgtcgtgccacaccgaccccctcgaccagtcctcctgctcccggctgctggtgcccctcttggacgggactgagtgcggcgttgagaaatggtgctccaagggcaggtgtcgctccctcgtggaactgacgccgatcgccgccgtccatggaagatggtccagctggggacctcggtccccgtgcagtcgatcgtgcggaggaggtgtggtgaccaggaggcgccagtgcaataatccgaggccggcgttcggaggcagagcctgcgtcggagcagatctgcaggcagagatgtgcaatacgcaagcgtgcgagaaaacccagctcgaattcatgtcccaacagtgcgccagaactgatggacagccgctgcgctcgagccccggaggagcctccttttaccattggggagcggccgtgccccactcgcagggtgacgcactctgtagacatatgtgtcgcgctatcggggaatcatttatcatgaagcggggagactctttcctcgacggcaccagatgcatgccgagcggaccacgagaggacggcactctgtcactgtgcgtctctggaagctgcagaaccttcggctgcgacggaagaatggatagccagcaggtctgggaccggtgtcaggtgtgtggcggtgacaactcgacctgttcgccgcgcaaaggctcctttactgccggacgcgccagggaatacgtgacctttttgactgtgaccccaaacctgacttccgtgtatatcgccaatcatcggccgctgtttacgcatctggccgtcagaatcgggggacgatacgtcgtggcagggaagatgtcaatctcgccaaatactacttatccgtcgctgctggaggatggcagggtggagtaccgggtcgctctgaccgaggaccgattgccaaggcttgaggagatcaggatttggggaccgcttcaggaggatgccgatatccaagtctaccgtcgctacggagaggagtacggaaacctgacccggcctgacatcactttcacttacttccaacctaagccccgccaggcgtgggtgtgggccgccgttagggggccgtgctcggtgagctgtggcgcaggactccgctgggtgaactactcttgcctcgaccaggctcgcaaggagctggtggagactgtgcagtgccaaggtagccaacagcccccggcttggccggaggcatgcgtcctggaaccgtgcccaccgtactgggctgtgggagacttcgggccgtgttctgcgtcctgcggaggaggacttagagaaaggcccgtccggtgcgtggaagcccaaggttccctgttgaaaacccttccacctgcaaggtgccgtgcaggcgcccagcagccagcggtggcgttggaaacgtgcaacccccagccatgcccggcccgatgggaggtgtctgaaccctcttcctgtactagcgccggaggagcaggactggcccttgaaaacgaaacctgcgtcccgggcgccgatggcctcgaggcaccggtcaccgagggaccgggatcggtggatgagaagttgccggcacctgagccgtgcgtcggcatgtcgtgccctccaggttggggtcatctcgacgcgacttccgccggcgaaaaggcgccgtctccgtggggcagcattcgcacgggagcccaagcggcgcacgtgtggactccggctgcgggttcatgctccgtaagctgcgggcgcggactgatggagcttaggttcttgtgtatggactctgcccttagagtgccagtgcaagaagagctctgcgggctcgcgtcgaaacctggatcaagacgggaagtatgccaagccgtgccctgtccggcgcggtggcaatacaagctggctgcctgctcagtgagttgcggccgaggagttgtgcgccggatcctgtactgcgcccgcgcgcacggagaggatgatggagaagagatcctgctggatacgcagtgtcagggtctgccgcgcccggaaccgcaagaggcgtgcagccttgaaccatgccctcctagatggaaggtgatgagccttggaccgtgctccgcgtcctgtggtctgggaaccgcgcggagatctgtggcttgtgtccaactcgaccagggacaagacgtggaagtcgatgaggcggcttgcgcagcgctggtgaggccggaagcgtccgtgccatgtctgatcgccgattgcacttaccgatggcacgtgggcacctggatggaatgttcagtctcgtgcggcgatggaatccagcggcgcagggatacttgtctgggacctcaggcccaggcccctgtgcctgcggacttctgccagcatctgccaaagcccgtgaccgttcgcgggtgctgggctgggccatgcgtggggcaggggacgccctcgctggtcccacacgaggaggccgcagcaccagggcgcactaccgcaactccagcaggggcctcacttgaatggagccaagcgcggggcctgttgttctcgcctgcccctcaacctcgccggctcctgcctggaccgcaagaaaactccgtccaatcgagcgcgtgtggacggcagcatctggagccgacgggaaccatcgacatgcggggtccgggtcaggcggactgtgctgttgccatcggccgcccactgggagaggtggtgacccttagagttttggaatcgtcccttaactgcagcgcaggggacatgctgctcctctggggtcggttgacgtggcgcaagatgtgccgcaagctgctggatatgaccttctcgtccaagaccaacactttggtcgtgcggcagcggtgcggacgcccggggggaggggtgctgttgcgctacggatcccagctggcaccagaaactttctacagagaatgcgacatgcagctgttcggaccgtggggagagatcgtctccccaagcctgtcgccagctactagcaacgccggagggtgtcggctcttcatcaatgtggcgccgcatgcccggatagccatacacgcactcgcgactaacatgggagccggaaccgaaggagcgaatgcgtcatacatcctgatccgggacactcatagccttcgcactactgcctttcacggacagcaagtactctactgggagtcagagagctcccaggcagaaatggagttttcggaaggcttcctgaaggcccaagcatctctgcggggccagtactggacgctccaatcctgggtgccggaaatgcaagacccacaatcgtggaaaggaaaggaaggaacc

SEQ ID NO: 237893 - DNA, 4281 bp, Artificial Sequence
  derived and/or modified sequence
atgcatcaacggcatccaagggctcgctgcccgccattgtgtgttgccggaattttagcttgtggattccttttaggctgttggggtccaagccactttcaacagtcatgccttcaagcactagaaccgcaagcggtttcctcatatctttccccaggagcgcctctgaagggacgacccccttcacccggctttcagagacagcgccagcgccagcgtcgtgcggccggaggcattttacacttggaattactggtggcagtcggaccggatgtcttccaggcgcaccaagaagacacggagagatacgttttaacaaatctaaatattggagctgagcttctgcgtgatccgtcactgggtgcccagtttcgtgtacacttggttaaaatggtgattctcaccgaacctgaaggggcacccaatataacagcaaatctgactagttccctactttctgtctgcggttggtctcagacaattaatccggaagacgacaccgacccgggacatgcagatttagtgctttatattacacgtttcgacttagaactgccggacggcaacaggcaggtgcgtggtgttacacaattaggcggtgcgtgcagcccaacatggtcttgtctgattaccgaagatacggggttcgacctgggggtaacgattgctcatgagatcggccattcttttggccttgagcatgatggcgccccaggtagtgggtgcgggccttccggccatgttatggcctcagacggtgctgcaccgcgggcgggcttagcttggtcaccgtgtagtcgaagacaactgttaagtcttctttccgcagggcgagccagatgtgtatgggacccgccaagaccccaacccggatcggccggccatcctccggatgcccaaccgggactctactattctgctaatgaacaatgtcgcgtggcgttcggtccgaaggcggtagcatgcacatttgcgcgtgaacacttggacatgtgtcaagctttgtcttgtcatactgatccattagatcagtcttcatgcagccgcttgcttgtgcctcttctggatggcactgagtgcggcgttgaaaaatggtgttcaaaaggccgttgtcgttctctggtggaacttactccaattgcggcggtgcatggcagatggtcctcttggggaccgcgctcaccttgtagccggtcttgtggcggaggtgtcgtaacccgcaggcgccagtgtaacaatcctagacctgcctttggcgggcgtgcctgcgtcggggccgatctgcaggctgagatgtgtaatacccaggcatgcgaaaaaacacaattagagtttatgtcacagcagtgcgcgcgtacagatggccagcctttgagatcttccccgggcggcgccagtttctaccattggggcgcggccgtcccgcattcccagggagacgcgttatgcagacatatgtgtagagcgattggcgaatcgtttatcatgaaaagaggcgactctttcttggacggaacgcgctgtatgccgtcaggacctcgtgaagatggcactttaagcttgtgcgtgtcaggctcgtgcagaacatttggctgcgatggtcgaatggacagtcaacaggtatgggatagatgtcaggtctgtggtggcgataattcaacttgctcacctagaaaagggtcttttactgccggacgagcccgtgaatatgtgacgtttctgaccgtaacgccgaatttaacctccgtatatattgccaaccaccgccctttatttactcaccttgccgttcggattggcgggaggtatgtcgttgcgggcaaaatgtctatcagccctaatacaacgtacccgagcttattagaagatggacgagtcgagtatcgcgtagcgctgactgaggataggctcccgcgtctggaagagataaggatctggggacccctacaggaagatgccgacattcaggtttaccgcaggtatggtgaggagtatggtaacctaacacgtccggatataacatttacctactttcagccgaaaccgcgacaagcgtgggtttgggcagcagtacgtgggccatgttctgttagctgtggtgcaggtttacgatgggtcaactattcttgtctggaccaggcaagaaaagaattagtggaaactgttcagtgccaaggcagccaacagcctccggcgtggcctgaagcttgcgtgttagaaccgtgccctccgtactgggctgtcggcgattttggcccgtgcagtgcaagctgcggaggcggacttcgcgagcgcccagtgagatgcgtggaagcacaaggaagcttactgaaaaccttgccaccggcacgatgcagagcgggtgcccaacagccggccgtagctctggaaacttgtaatccgcagccatgccctgcacggtgggaagtttctgagccatcgagctgtactagcgctggtggagcgggcttggccttggaaaatgagacctgcgtaccgggcgccgatgggctagaggcgccagtcacagagggcccgggatcagtggacgaaaagctcccggctccggaaccgtgcgtaggaatgagctgtcctccgggatggggtcatttagatgctacatctgcgggggaaaaagctccttctccttggggctcaattcgtacaggagcgcaagctgctcatgtttggactccggctgcgggcagttgttccgtttcctgtggtagaggcttgatggaactcagatttctttgtatggattcagcccttcgagtgccggtgcaggaagaactgtgtggattggcaagcaaaccggggagccgaagagaagtgtgtcaagcagtgccgtgtccggctcgttggcagtacaaacttgcagcttgcagtgtcagttgcggtagaggcgtggtgcgtcgtattttgtactgcgcacgtgcccatggcgaagatgatggagaagaaattttattagatacccaatgccagggacttccgcgtccggaacctcaggaagcctgctcattggagccatgtccgccgagatggaaagttatgtctcttggaccatgcagcgcttcctgcgggttgggaactgcacgtcgctctgtcgcatgtgttcagctcgatcagggccaggacgtcgaagtggacgaagctgcttgcgcagcgctggttcggccagaggcgagtgtgccgtgtcttattgcggattgcacgtaccgctggcatgttggcacatggatggaatgctcagtcagctgcggcgacgggatacaaagaagaagggatacatgcttagggccgcaagctcaagcgccagtcccggctgatttttgccaacatttgccgaaaccggtgaccgtccgcggctgctgggctggaccgtgcgtcggacaaggcacgccgtcgttagtaccacatgaagaagctgccgccccgggcagaacgacagcaactcccgctggcgcgtccttggaatggagccaagcgcggggccttcttttttcaccggcaccgcaaccacgacgtcttctgccaggaccgcaagagaactcggttcaatcctctgcctgtggaagacaacatctggaacctaccggaacgatcgatatgagagggccaggacaagccgactgtgccgtagctattgggcgccccctgggcgaagtggtaaccttacgcgttctggaaagttctcttaactgctctgccggagatatgctattactttggggtaggctaacctggcggaaaatgtgccgtaaattattagacatgactttcagttcaaaaacgaacacactggttgtgcggcagcgatgtggacgccctgggggcggtgtcttgttaagatatggcagccaactcgcaccagaaacgttctatcgcgaatgtgacatgcaactttttggaccgtggggcgaaatcgtttctccgagcctgtcccctgctaccagcaacgcgggaggttgccgcttgtttatcaatgtggcaccgcatgctaggattgcaatccacgcgttagctacaaatatgggagcaggaacagaaggagcgaacgcctcctatatcttgatccgtgatacacatagcttgcgcaccacagcgtttcacgggcagcaggttttatattgggaaagtgaatcaagccaagctgaaatggagttctcagagggctttttgaaagcgcaagcatctttacgtggtcaatactggacccttcagtcgtgggtacctgagatgcaggatccgcaaagctggaagggaaaagaggggact

SEQ ID NO: 237894 - DNA, 4281 bp, Artificial Sequence
  derived and/or modified sequence
atgcaccagcgacatcccagagccaggtgtccgcctctgtgcgtggctggtattctggcgtgtgggtttcttctcggctgttggggcccctcacactttcagcagtcttgtttgcaggctctggagccacaggcggtctcctcatacctatcccctggggcacctctcaaagggcgtcctcccagccctggttttcagagacagagacagcggcaacgcagagccgccggcggaattctacacctggagctgcttgtagctgtaggtcccgacgtcttccaggctcaccaagaagatacggaaaggtatgtgctgaccaatctcaatattggggcggagctgctgcgcgatccttcattgggcgcacagtttcgggtacatctcgtcaagatggtgatcttaaccgagccagaaggcgcaccaaacattaccgccaatctcactagcagcctactgagcgtgtgcggctggtctcagacaatcaacccggaggatgacactgaccctggacacgccgacttagtgctctacattacaagattcgatttggagctcccggatggcaacagacaagtgcgaggtgtgacccaactgggcggtgcgtgcagtcccacttggtcatgtctcatcaccgaagatacgggatttgaccttggtgtaaccatcgcacacgagattggacactcatttggactggaacacgatggtgcaccaggttctggctgtggtccttcagggcacgtgatggctagtgatggcgccgcacctcgggctggtctcgcttggtcaccctgttcccgccgacagctgctgagcctgctgagtgcaggccgtgcaagatgcgtatgggacccccctcgaccccagccaggcagtgccggacacccccctgacgcgcaacctggcctgtattatagcgccaatgaacagtgccgcgtggcattcggaccaaaagcagtcgcatgtaccttcgctcgcgaacacctcgacatgtgtcaggccctttcctgtcataccgaccccttggatcagagttcttgtagtcgcctcttggtccccctcctggatggcacagagtgtggtgtggaaaagtggtgctccaaaggtcggtgccgcagtctggttgagttgactccaattgcagccgtccacgggcgctggtcatcctggggccccaggtctccgtgctcaaggtcttgcggtggtggagttgtcacacgccgcagacagtgtaacaatcctcggcccgccttcggcggccgggcctgtgtgggggcagatcttcaggcggagatgtgtaacacacaggcttgtgagaagacccaactagagttcatgtcgcagcagtgtgcacgaactgatggccagcctttgcgatcgagcccaggtggagccagcttttatcactggggtgctgctgtgccccactctcagggcgatgccctctgccgtcatatgtgccgagccattggggagtcgttcatcatgaaacggggggactcattcctggacggcaccagatgcatgccttctgggcctcgggaggacggcaccctcagcctttgcgtgagcggaagctgtagaacgttcggatgcgacggacgtatggatagtcagcaggtgtgggacagatgccaggtttgtggtggggacaactcgacctgttcaccacgcaagggttcttttaccgccggtcgcgcccgtgagtacgtgacatttttgaccgttactcccaacttgacatccgtttacattgctaatcaccgcccgctgttcacacacttggcggtgaggattggcggcaggtacgttgttgccggaaagatgtcaattagcccgaatacgacttatccaagtttgttagaagacggcagggtggagtacagagtggccctgactgaggacagactgccacgactggaggaaatccggatatgggggcccctgcaagaggatgctgacatccaggtttaccggcggtacggcgaggaatatggaaacctgactcggccagatattaccttcacatacttccagcctaagccccgccaggcctgggtgtgggccgcagtgcgcggtccctgtagcgttagctgtggcgcgggactccggtgggtgaactactcctgtctcgatcaggctaggaaggagctggtggagaccgtgcagtgccaaggatctcagcagcccccagcgtggcccgaagcttgtgtgctcgagccctgccccccttattgggctgttggcgacttcggcccctgtagcgcctcttgtggaggtgggcttcgcgagcgacccgtgcggtgtgtcgaagcgcaaggatctctcttgaaaacactgccccccgcccgttgcagggccggcgcccagcagccggctgtcgccttggagacatgtaatcctcagccttgtcctgcacgatgggaggtttccgagccaagttcatgtaccagcgctgggggggccggattagcccttgagaacgaaacttgtgttcccggagcagacggactggaagcgccagtcactgaaggtcctggctccgttgacgagaagctcccggcacctgaaccctgtgttgggatgagctgtccgccaggatgggggcacctggatgctacctccgccggggagaaggcaccttcaccttggggatctatccgcacaggagcacaggcggcccacgtatggactccggccgcgggatcctgttccgttagttgcgggcgcgggttaatggagctgcggttcctatgcatggattctgctctgagggtcccggtgcaggaagagctgtgtggcctggctagtaagcccgggtcccgccgcgaagtgtgtcaggccgtcccttgtcccgctagatggcaatataagctggctgcctgctctgtcagctgcggcagaggggtagttagacgcatcttatactgtgctcgggctcatggggaggatgatggagaggagatcctgctggatacccagtgtcaaggccttccccgcccagagccccaagaagcatgctcgctggagccttgcccaccgaggtggaaggtgatgagtttgggtccttgcagcgcttcttgcggcctgggtactgccaggcggtctgttgcctgcgtgcaactggaccaggggcaggatgtagaggtggatgaggctgcatgcgccgctctagtgagacctgaagcctcagtcccctgcctgatagccgattgtacctacagatggcatgtggggacctggatggagtgtagcgtcagttgtggtgacggtatacaacgcagaagggacacctgtttaggaccgcaagcacaggcacctgtgcccgctgacttttgtcagcacctgcctaagcctgtcactgtccgaggatgctgggccggtccatgcgttggacaggggactccgagtctcgtgccccacgaagaggctgccgcaccaggccgcaccacagcgacaccagctggcgcgtccctcgagtggagtcaggcccgaggactgcttttctctccagcgccacaacctaggagactgctgcctggaccgcaggagaactccgtgcagtctagcgcctgtggtagacagcacctcgaacctactggaactatcgacatgcgggggcctggccaggcggactgcgcagtggcaatagggcgcccgctgggggaggtggtgaccctgagggtgctggagtcctcactcaattgttccgcaggcgacatgctgttgttgtggggaagactaacttggcgaaagatgtgtaggaagcttctggatatgaccttttccagcaaaactaatactctcgtagtccgccagcggtgcggccgccccggaggaggagtcctgttgcgatatggtagtcagctggccccagagacattttatcgtgagtgcgatatgcagctgtttgggccatggggcgagattgtcagcccgagtctgagcccagccacttcgaatgcaggtggctgtagacttttcattaatgtggccccgcatgctcggatcgccattcatgctctggccacgaacatgggtgctggcacagagggcgcaaacgccagctatattctgattcgggacacccactctcttaggaccaccgcatttcatggtcagcaggtgctttactgggagtccgaaagcagtcaggcagagatggagttctcagagggatttctgaaagctcaagcctccttgcgtggacaatattggactctgcagagttgggtgccggagatgcaggaccctcagtcatggaagggtaaggaagggaca

SEQ ID NO: 237895 - DNA, 4281 bp, Artificial Sequence
  derived and/or modified sequence
atgcatcagcggcatccccgcgcgagatgtccaccgctttgtgtcgccggtattcttgcatgcggcttcttgcttggatgttggggtccgtcacactttcagcaatcttgcctgcaagccttggagccccaggctgtgtcgtcctacctctccccaggcgctcctcttaagggtcggccacccagcccaggcttccaacgtcaacgacaaagacaacggcgagcagcaggtgggattctgcacctggaacttcttgtggcggtggggccagacgtgttccaggcacaccaggaagatactgaaaggtacgtactcactaaccttaacatcggagcggagcttcttagggatccctcgcttggcgcgcaatttagggtccatctcgtcaagatggtgatccttaccgaacctgaaggtgcaccaaatatcactgcgaacctgacctcgtccctcctgtcagtgtgtggatggtcgcaaactataaaccctgaggacgatactgacccagggcatgctgatcttgtcttgtacatcacgaggtttgatctcgaactccccgatgggaacaggcaagtgcgcggggtgacgcaactgggtggagcatgttcgcccacctggtcctgtctcattactgaggatactggctttgacttgggtgtcaccattgcccatgagataggacactcattcggactcgaacacgacggagcacctggcagcgggtgcgggcctagcggtcacgtcatggcctccgatggggcagctccgcgcgcaggactcgcctggtcaccgtgctcccgtagacaactgttgtcgctgctgtccgcaggtcgcgcgcgatgtgtctgggaccccccacgccctcaacctggttcggccgggcatccccctgacgcccaacctggattgtattactcggctaatgaacagtgccgggttgcattcgggccaaaggcagtggcctgtacctttgcgcgcgaacatctggacatgtgccaagcactgtcctgccataccgacccgctcgaccagtcgtcgtgtagcaggctgttggtgcccctgctggatgggactgagtgtggtgtggaaaagtggtgctcgaagggaagatgccggagcctggttgaattgaccccaattgcagccgtccatggtagatggtcgagctgggggcccaggagcccatgcagcagatcctgtggcggaggcgtggtgacgcgtcgtcgacaatgcaataaccctaggcctgctttcggaggaagagcctgtgtgggcgcggatcttcaggccgagatgtgtaatactcaggcctgcgaaaagactcagcttgagtttatgtcccagcaatgcgcacggacggacggacagcctcttagatcctcacccggaggagcgtcattttaccactggggcgccgcagtgccacacagtcagggtgatgcgctgtgtcgtcacatgtgtcgagcaattggagagtcatttatcatgaagcgaggtgattcgtttctggacgggacccgctgtatgccctccggtccacgggaggatggcaccctttctctttgcgtttcagggtcctgtcggacctttggatgtgacggtcgtatggactcacaacaggtgtgggataggtgtcaagtttgcggaggagacaatagcacctgttcccccagaaagggttcgttcactgcaggaagagctcgggaatacgtgaccttccttaccgtgacgcctaaccttactagcgtgtacattgccaatcaccgaccccttttcacgcacttggcggtgcgtatcggtggccggtacgtggtggcaggtaagatgtcaatctcccctaacacgacttacccatccctgcttgaagatggaagagtcgaatacagagtggccctgaccgaggaccggctccctcgcctggaagagattcgaatttggggcccactccaggaggatgccgacattcaagtttaccggcgctatggagaagagtacggaaatttgacccgccctgatatcaccttcacctacttccaaccaaagcctagacaagcatgggtgtgggccgcagtgagggggccctgtagcgtgtcctgtggggcgggactcagatgggttaactactcctgcttggatcaagcgcgaaaagaattggtcgagacggtgcagtgtcaaggctctcagcagccacctgcctggccagaggcttgcgtgctggaaccatgcccgccatactgggccgtgggtgattttggaccctgttccgcgagctgtggaggaggacttcgagaacgaccggtgcgctgtgttgaagcacaggggtccttgcttaagactcttccgccggcacgttgcagggctggagcccagcagcctgcagtcgcacttgaaacttgtaacccgcagccttgtcctgcacgctgggaagtctcggaaccctcgtcatgtacctcggccggcggagcaggtctggcgctcgagaatgaaacctgtgtgcctggagcagatggcctcgaagcgccagtcaccgaagggccaggttcagtggacgagaagctgcctgcaccagaaccgtgcgtcgggatgtcatgtcctcccggttgggggcatctggatgcaacctcggcaggcgagaaggcaccgtcgccttggggttccatccgaacgggcgcgcaggccgcacatgtgtggactccagcggcaggttcatgttctgtgtcttgtggaagaggtcttatggaacttagattcctgtgcatggattcagcacttcgagttccagtgcaggaagaactctgtgggctggcatccaagcccggatcgagacgagaagtgtgccaagcagtcccttgtccggctcgctggcaatacaagctcgccgcatgttcggtgtcctgtggccgtggagtcgtgcgccggattctgtactgtgcccgcgcgcatggagaggatgatggagaggaaatcctgcttgatacccaatgtcaaggtttgcctcgacctgaaccacaagaggcgtgctcgcttgagccttgtcctccccggtggaaggtcatgtcactgggaccgtgcagcgcttcctgcgggctgggaactgcgagacgctccgtggcctgtgtgcaactcgaccaaggacaagatgtggaggtggatgaagcagcgtgcgcagcactggttagaccagaagcatcagtgccttgcctgatagccgattgtacctaccggtggcatgtgggaacctggatggaatgttcagtgagctgtggggatggaatccagagacgtagggatacctgtctcggccctcaggcacaggcacccgtacctgccgacttctgccagcatctgcctaagccagtgactgtgcggggatgttgggccggaccttgtgtcggccaaggcactccatcgcttgtcccacacgaagaagcggctgcacctggccgtactactgccaccccggccggagcttcgctcgagtggtcgcaagccaggggactgctgttctcccctgcacctcagcctcgacggctgctccctggaccacaagaaaattcggtgcaatcctcagcatgtgggcgtcaacatttggaaccgaccggcaccattgatatgagaggaccgggtcaggcagattgtgctgtcgcaatcggaaggcctcttggcgaagtcgtgaccctcagagtgctggaatcaagccttaactgctccgcaggagatatgctgcttttgtggggtaggcttacttggcggaaaatgtgtcggaagctgttggatatgaccttttcgtcgaaaactaacaccttggtggtcaggcagcgatgcggacgtcccggaggaggagtgcttctgcgttacggatcgcagcttgcacccgaaactttttaccgggaatgtgatatgcaactgtttggaccgtggggcgaaattgtctccccctccctgtctcccgcaacgagcaacgctggaggctgtcggctgtttatcaacgtggccccccatgcgaggattgctatccatgccctggcgactaacatgggggcagggactgagggagctaacgcaagctacattcttattagagacactcattccctgcgcaccactgcatttcatggtcagcaggtcctttattgggagtcagagtcctcgcaagcagaaatggaattctcggagggctttcttaaggcacaagctagcctgagaggacagtactggaccctccaaagctgggtccccgagatgcaagacccacagtcttggaaaggaaaggaaggtacc

SEQ ID NO: 237896 - DNA, 4281 bp, Artificial Sequence
  derived and/or modified sequence
atgcatcagaggcatccaagagccaggtgtccaccgctgtgtgtggctggcattctggcttgtggttttctcctgggctgctgggggccaagtcacttccagcaatcctgcctccaagccttggagccgcaggctgtatcttcatacctgtcccctggggctccactgaaaggcaggccgccttcccctggattccagcgccagcgacaacggcaacgaagagccgcaggtggcatcctccacctggagctgcttgttgccgtaggccctgatgtgtttcaagcccaccaggaagatacggagcgatacgtactgacaaacttgaacattggtgctgagctgctgcgcgacccaagcctgggcgcccagttcagagtgcacctggtcaagatggtcatcctgaccgaaccagagggcgccccaaacataactgcgaacttgacgtcttcattgctgtcagtctgtggatggtctcagaccatcaatccagaggatgacaccgacccagggcacgctgacttggtactctacataacacggtttgatctggaactccccgatggcaataggcaggtcagaggggtgacccaactcggaggtgcttgcagccctacctggtcatgcttgataacagaagatactggctttgacctgggtgtcacaatcgctcacgaaattggccactcattcggcttggagcacgacggcgcgccgggcagtggatgcgggccaagtggacacgttatggcctccgacggcgcggccccaagggcagggctcgcctggtccccatgcagtcggaggcagctgctcagcctgctgtcagcaggcagggcccggtgcgtgtgggatccccccaggcctcagccaggctcagcgggtcacccccccgatgcccagcccggcctgtactactccgctaacgaacaatgccgggtggcgtttgggccgaaggctgtggcctgcacattcgcccgcgaacacctggacatgtgtcaggccttgagttgccataccgatccacttgaccagtcttcctgtagcagactgctcgtcccactgctcgatggaactgagtgtggggtagagaagtggtgcagtaagggacggtgtcggtctcttgttgagcttacaccaattgctgctgtgcacggacggtggtcatcctggggcccgcggtcaccttgctctaggtcttgcggaggaggagtcgtaactcgcagaagacagtgcaacaatcctaggcccgcattcggcggtcgggcatgtgtgggtgcagatctccaggcagagatgtgcaatactcaagcatgtgaaaagacgcagctggagttcatgagccagcagtgtgctagaaccgatgggcagcctctcaggagcagtcctgggggcgcttccttctatcactggggagccgcagtgccacatagccagggggatgcactctgcagacacatgtgtcgagccatcggagagtctttcattatgaaaaggggcgattcttttctggatggtactaggtgtatgccttctggaccacgggaggacggaacactcagcctctgcgtgtcaggatcatgtcgaacattcgggtgtgacgggcgcatggacagccagcaggtttgggaccggtgccaagtgtgtggcggcgacaacagtacctgtagtccaaggaagggatcttttacggccggtagggctcgggaatatgtaaccttccttacagtgacccctaatttgaccagcgtgtacatcgccaaccatcggccgctgttcacccatctggcggtgcgcataggtggcaggtacgttgtggccggtaaaatgtctattagcccaaataccacctacccaagcctccttgaagacggccgagtggaatacagagtggctttgactgaagatcgcctgccccgacttgaggagattaggatctggggtccactccaggaagacgcagacatccaagtgtatcgcagatacggcgaggagtacggaaatctgacaagacccgatatcacattcacatatttccagccaaagccccgacaggcctgggtctgggctgctgtacggggaccttgctccgtgtcctgcggcgcagggttgcgctgggtgaattattcttgcctggatcaggcacgcaaggagctggtggagaccgtccagtgtcaggggtctcagcagccacctgcctggcccgaagcctgtgtgcttgaaccttgtcccccgtattgggctgtaggcgattttggcccatgctcagcttcatgtggcggaggcttgagggaacgcccggtgagatgcgtggaggcacaaggttcattgctgaagacccttccccccgctcggtgcagagcgggagctcagcagccagctgtcgcgctggagacctgcaacccccaaccctgtccggcacggtgggaggtgtctgagcctagttcttgtaccagcgctggcggcgcaggtttggccctggaaaatgagacctgtgtgcccggtgctgatgggctggaggctcccgtcaccgagggaccagggtctgtcgacgagaagctgccagcaccagagccctgtgtcggtatgtcctgtcctccgggttggggacacctggatgccacctctgccggcgaaaaggctccttccccgtggggtagcattagaacaggtgcccaagcagcgcatgtttggacacccgctgccgggtcttgtagtgttagttgtgggcgcggcctgatggaattgcggtttttgtgtatggattccgcattgcgcgttcctgtgcaggaggagttgtgcggactcgcctctaaacccggctcaagacgggaggtatgtcaggccgtcccgtgtccggccagatggcaatacaagctcgctgcatgttctgtttcctgcggccggggagtggtccggcgaatcctgtactgtgcccgggcccacggcgaagacgacggcgaggaaatcctgctcgacactcagtgccaggggttgccccggccagaaccccaggaggcctgtagcctcgagccttgcccccctagatggaaggttatgagcctgggtccttgtagtgctagctgtgggctggggaccgctaggaggagcgtggcatgtgttcagctggaccagggtcaggacgtcgaagtggatgaggcagcatgcgccgcgctggtgcgaccagaagcgagcgtgccgtgcttgatcgcagactgcacttaccgctggcacgtcggcacctggatggagtgttctgtctcatgcggggacggaattcaaaggagacgggatacatgcttgggtccccaggctcaggcgcccgtccccgcagatttctgtcagcatctccctaaacccgtcacagtgaggggatgctgggcggggccttgcgtgggtcagggcacgccttcacttgtgccccacgaggaagctgccgccccaggcaggaccacagctaccccagctggcgcctctttggaatggtctcaggctagaggcttgctcttttcccctgccccacaaccccggcggttgctccctggtccgcaggaaaatagcgtgcaatctagtgcttgcgggagacagcacctcgagccaactgggacgattgacatgagaggtccagggcaggctgattgcgccgtggctattggaagacctctcggggaagtcgtaacccttcgcgtgctcgagtcctccttgaattgttctgccggtgatatgctcctgctgtggggccgccttacctggagaaagatgtgcaggaagctcttggacatgaccttctcttccaaaaccaacaccctcgtggtgagacaacgatgcggacggccaggcggcggcgtactgctcaggtacggctctcagctggcgccagaaaccttctacagggaatgcgacatgcagctcttcggaccttggggcgagattgtctccccctctcttagccccgcaacctccaatgctgggggatgcagactgttcataaacgtggccccccacgcccgcatagccatccacgctctggccaccaacatgggagctgggactgagggagcaaacgccagctacatactcatcagagatacccactccctgagaacgacagcattccatggacagcaggtgctgtattgggagagcgagtcctcccaagctgagatggagtttagtgagggtttcctgaaggcacaggcgagcctgcgggggcagtattggacccttcagtcttgggtgccagagatgcaggaccctcagtcttggaaaggaaaagaaggtacc

SEQ ID NO: 237897 - DNA, 4281 bp, Artificial Sequence
  derived and/or modified sequence
atgcaccaaagacacccccgggcgaggtgcccaccgctgtgcgtggcagggatcctggcctgcggattcctgctgggttgttggggaccgagccattttcaacagagctgtctgcaagcgctggaaccccaggccgtgagctcctacctgtcacctggtgcgccgcttaaaggtcgcccgccctccccaggcttccagaggcaacgccaacgtcaacgccgagctgcaggaggcattctccacctggagcttctcgtcgccgtgggaccggacgtgttccaagcccaccaagaggataccgaaagatatgtgctcacgaatctgaacattggcgcggagctgctgcgcgacccttcgcttggcgcccagttccgggtccatctggtgaaaatggtcatcctgactgaacctgagggcgctccgaacatcaccgcgaatttgacctcttctctgctgtccgtgtgcggatggagccaaaccatcaaccctgaggacgacaccgatccgggccacgcagatctggtgctgtatatcactcgatttgaccttgagcttccagacgggaacagacaagtgcggggcgtgactcaactgggaggtgcctgctcgcccacttggtcgtgcctgatcactgaggacaccggattcgacttgggagtgactatcgcccatgagatcggtcacagcttcggccttgaacacgacggtgctccgggttcgggctgtgggccatcgggacacgttatggcctcggacggagcagcccctcgggccggccttgcctggtcgccgtgctcgagacgacaacttctgtccctcttgtcggccggcagagcccggtgcgtgtgggatccgccgcggcctcagcctggatccgccgggcatccacctgatgctcaaccgggtctgtactactcggcaaacgaacagtgccgggtggctttcggtcctaaggcagtcgcctgcacctttgcccgggagcatctggatatgtgccaggctctgtcatgccacactgacccactcgatcagtcgagctgttctcgcctgttggtgccgctgctggacggcactgaatgcggagtggagaagtggtgtagcaagggacgctgccgcagcctcgtcgagctcaccccgatcgcggcagttcatgggcgctggtcgtcgtggggacctcggtcgccttgttcacgctcatgcggaggcggtgtggtgacccgccgccgccagtgtaataacccacgcccggcattcgggggacgggcatgcgtgggagccgacctccaggcagagatgtgcaacacccaggcctgcgaaaaaactcaactggagttcatgtcccagcaatgcgcccgcacggacggacagccactgcggtccagcccaggtggcgcctcgttctaccactggggcgccgccgtgccgcactcccaaggtgacgccttgtgtcgccacatgtgccgggcgatcggagaatctttcatcatgaagaggggggatagctttctggacggaaccagatgcatgccgtcgggtccgcgggaagatgggacgctctccctctgtgtgtctggatcctgccgcaccttcggatgtgatggacgcatggattcgcagcaagtctgggaccgctgtcaggtctgcggcggtgataactcgacttgttcaccacggaagggttcgtttaccgccggacgcgccagagaatatgtgactttcctgactgtgactccaaacttgaccagcgtgtacatcgctaaccatagaccgctgtttacccacttggctgtgcgcattggcggacggtacgtcgtggcgggaaagatgagcatctcgcccaacaccacttacccgagcctcctggaagatggccgggtggaataccgggtggccctgactgaggatcgcctgccacgcctggaagaaatccgcatctggggtcctctgcaagaagatgcagacatccaggtgtaccggcggtacggcgaggaatacggaaacctgacgcgacctgatatcacgttcacgtacttccagccgaagccacggcaggcgtgggtatgggcagcagtgcgcgggccgtgcagcgtctcgtgcggagctggattgcgctgggtgaactactcttgccttgaccaggcacgcaaggaactggtcgagactgttcagtgccagggttcccagcaaccgcccgcgtggcctgaggcctgcgttcttgagccgtgcccgccctactgggccgtgggcgatttcggcccgtgttcggcttcatgcggagggggactgagagaaagacccgtgcggtgtgtggaggcgcaaggaagcctgctcaaaactcttccgccggcaagatgccgagccggagcgcaacagccggcagtcgcactggagacgtgtaatcctcaaccatgtccggccagatgggaggtgtccgagccgtcgagctgcacttccgctggaggtgccgggctcgccctggaaaatgagacttgcgtgccgggagccgacgggcttgaggccccggtcaccgagggcccgggaagcgtggatgaaaaactccctgcccccgagccgtgcgtgggcatgagctgcccaccaggctggggacaccttgatgcaacttcagcaggggaaaaggcacctagcccttggggttcaattcggaccggagcgcaggctgcacacgtgtggaccccggcagccgggtcgtgctcggtgtcatgtgggaggggccttatggaactgcggttcctgtgcatggactcggcgctgcgcgtgccggtccaggaagagctgtgcggtctggcctcaaagcccgggtcacggcgggaagtctgccaggctgtgccctgtccggctagatggcagtataagctcgcagcctgttcggtgagctgcggcagaggcgtggtccggcggatcctgtattgcgcccgagcccacggagaagatgatggtgaagaaatcctcctcgatactcagtgccaaggactgccacggccggagcctcaagaagcctgctcccttgaaccgtgtccgccacgctggaaggtgatgtccctcggaccgtgctcggcttcctgcggactgggcaccgcgaggcgctcggtggcctgcgtgcaactggatcagggccaggacgtcgaagtggacgaagcggcctgtgccgccctggttagaccggaggcgagcgttccatgtctgatcgcggactgcacctacagatggcatgtgggaacctggatggagtgcagcgtgtcctgcggagatggaattcagagacgccgggatacctgcctgggtccacaggcccaagcccctgtccccgctgacttttgtcagcatctccctaagccggtcaccgtccgcggctgttgggcggggccgtgcgtcggacaaggcaccccttcactggtgcctcatgaggaggcggcagcccccggacggaccaccgccaccccggcgggcgcctccctcgagtggtcccaagcgcgggggctcttgttcagcccagcaccacagcctcgtagacttttgccaggacctcaggagaacagcgtccagtcgtctgcatgcggacgccagcatctcgaaccaactggcaccatcgacatgcgcggaccaggtcaagcggactgcgcggtggccatcggacgcccgctgggggaggtggtgactctgagggtgctggaatcgtcgctgaattgctcggctggagacatgctcctgctttggggtcgcctgacctggagaaaaatgtgccggaagttgctcgacatgactttctcgtccaagaccaacaccctggtcgtcaggcaaaggtgcggtcgtccgggcggtggagtgcttctccggtacggctcccagcttgcaccggaaacgttctatcgggaatgtgatatgcagctctttggcccgtggggcgaaatcgtgtcaccgtccctgagccctgccacctccaatgctgggggatgtaggctcttcatcaatgtggccccgcatgcccggatcgcaattcacgcacttgcaactaatatgggagcggggactgaaggagctaacgcgtcatacatcctgattagagacacccattctctgcgcacgaccgctttccacggccagcaggtcctttactgggagagcgagagctcgcaggccgagatggagttcagcgaaggattcctgaaagcccaggcgtcactccgcggccagtactggaccctgcaaagctgggtgccggaaatgcaggatccccagtcatggaagggcaaggagggcact

SEQ ID NO: 237898 - DNA, 4281 bp, Artificial Sequence
  derived and/or modified sequence
atgcaccagagacacccccgtgcaaggtgcccccccctttgcgtcgccggcatcttggcctgcggatttcttcttggttgttggggcccctctcacttccagcagtcctgccttcaagctcttgaaccccaagccgtgtcatcttacctgagcccaggggcacctctgaaaggacgaccaccatctccaggcttccaaagacagaggcaacggcaacgccgcgcggccggagggattcttcatcttgagcttctggtcgccgtggggccagatgtcttccaggcgcaccaggaagatactgagagatacgtcctcactaatctcaatatcggcgcagaacttttgcgcgacccgtcattgggagcacagtttagggtccatctggttaagatggtcatcctcaccgagcctgagggagcgccaaacatcaccgccaacttgacctctagcttgctgagcgtctgcggttggtcccaaacaatcaacccggaggatgacacagaccctggccatgccgatcttgtgctgtacattaccagattcgatttggagctccctgatggaaacaggcaggtgcggggggtaacacagctgggcggagcgtgttccccaacttggtcttgcctcatcaccgaagacacagggttcgacctgggagttacaatcgcacacgaaatcggccactctttcggcctggagcatgatggagcaccagggtctggttgcgggccttcaggtcacgtgatggcatccgacggcgccgcaccgagggccggactggcttggagcccctgctctcgccgacagttgctgagcctcttgtctgctggacgcgccagatgtgtctgggatccaccgcggccacagccaggcagtgctggccacccacctgatgctcaaccgggtctgtattactcagctaatgagcagtgccgcgtggcattcggcccaaaggccgtggcttgtacctttgctcgcgaacatctggatatgtgccaagcactgagttgccacacagatccactcgatcaatcctcttgtagtaggcttctcgtccccttactcgatggaaccgagtgcggagtggagaagtggtgtagcaaaggacgttgcagaagcctggttgaattgactcccattgccgctgtgcatgggaggtggtcttcctggggccccaggagcccttgttcgcggtcctgcgggggaggcgtggttacacgcaggcgccaatgcaacaaccccaggcctgcttttggtggacgggcatgtgttggagcagacctccaggcggagatgtgcaacactcaggcttgcgagaaaacccagctggaatttatgagtcagcagtgtgccagaactgatggacaaccacttcggagcagccctgggggagcgtccttctatcactggggggctgccgtgccccattcacaaggcgatgccttgtgtcggcacatgtgtagagcaattggagaatctttcataatgaagagaggagattctttcctggacggtacacgctgtatgccgtcaggaccacgcgaggacggtacactcagcctttgcgtcagtggttcatgccgcaccttcggctgcgacggacgcatggacagccaacaagtatgggacagatgtcaggtttgtggtggagataattctacctgtagtccaaggaagggctctttcacagctgggagagcccgcgaatacgtcaccttcctgaccgtgaccccgaacctcacttccgtgtacatagccaaccacaggccgctcttcactcatctcgctgttcgcattggaggaaggtacgttgtcgcaggtaagatgtcgatctctccaaacactacgtatccatctctgcttgaggacggacgagtggagtacagagttgcactcacagaagataggttgccccgcctggaggaaatccgcatttggggccctcttcaagaagacgccgatatccaggtttacaggagatacggagaagagtacgggaacttgacacgccccgatattacctttacatacttccaacccaaacctcgtcaggcttgggtgtgggcagccgtgcgtggaccctgtagcgtgagttgcggggccgggctgaggtgggtgaattatagctgcctcgatcaggctaggaaggagcttgtggaaactgttcaatgccaaggtagccaacagccccctgcctggcctgaagcctgtgtcctcgagccatgtccaccttactgggctgtgggtgattttggaccttgctccgccagttgcggagggggcctgagggagcgtccagtcagatgtgttgaagcccaaggtagcctgttgaagaccctgcccccggctcggtgtcgcgccggcgcacaacagcctgccgtagctctcgaaacctgtaacccacagccatgtcccgctaggtgggaagtgagcgaaccatcatcttgtacgtccgcaggcggcgctggactcgctctggagaacgaaacgtgtgttcctggcgctgatggactggaagccccggtgaccgagggtcctgggtctgttgatgagaaactgcctgcccccgagccttgtgtcggcatgtcatgccccccaggatggggccatctggatgctacttcagccggggagaaagccccaagcccatggggctctattagaaccggggcccaggccgctcacgtgtggaccccggctgcgggctcctgctcagtgagctgcggccgtgggttgatggaacttaggttcctgtgcatggacagcgcacttcgggtgcctgtccaggaggagttgtgtggcctcgcaagcaagccaggatcccgtagggaggtgtgccaagctgtgccttgccctgctagatggcagtataaactcgcagcatgctcagtttcttgtggaagaggtgtcgtcagaagaatattgtattgtgctagggcccatggagaggatgatggagaggagatcttgctggacacccagtgccaggggctcccccgacccgagcctcaagaagcctgctctctagaaccctgcccccctcggtggaaagtcatgtccctcggaccttgcagcgcaagctgtggtctcggcaccgccagaagaagcgtggcctgtgtccagctcgatcaaggccaggacgttgaagtggatgaggcagcatgcgctgctctggttcgcccggaggcttcagtgccttgcctcatcgccgattgcacatataggtggcatgtgggcacctggatggaatgctctgtgagttgcggagatggaattcaacgtaggagagatacctgcctgggcccccaggctcaggctccagtacccgcagatttttgtcagcacctgccgaaacccgtgaccgtgaggggctgttgggcaggaccatgtgtgggccagggaacgccctcacttgtaccacacgaagaagctgcggcccccggcaggacaacagctacaccagcaggagctagcttggaatggtctcaagctagaggcttgttatttagtcctgccccacaacctcggcgtctattgcctggacctcaggagaactcggtgcaaagtagcgcctgtggtcgccagcatctggaacctactgggaccattgatatgaggggacctggccaggccgactgcgctgttgcaatcgggaggccgctcggtgaagtcgttacgcttagggtcctcgaaagctcattgaactgcagcgccggtgacatgctgttgctttggggacgccttacatggagaaagatgtgtaggaaactgctcgacatgaccttttccagcaagacaaacacattggtagttagacagcgctgcggaaggccaggaggcggcgttctcctccgatacggctcccagctagctccagagactttctaccgcgaatgcgatatgcaactgtttggaccctggggcgagattgtgtccccgagcctgagccccgcaaccagcaacgctggaggctgtcgactctttatcaatgtggcacctcacgctaggatcgctatccacgctcttgccactaacatgggcgcaggaaccgaaggcgctaacgccagttatatattgataagggacacccacagtttgcggacaaccgcattccatgggcaacaagttctctattgggagtctgagagttcacaagccgaaatggaattcagcgagggctttcttaaggcacaagccagtctgaggggccaatattggacactgcaatcatgggttcctgagatgcaggacccgcagtcttggaagggaaaggaggggacc

SEQ ID NO: 237899 - DNA, 4281 bp, Artificial Sequence
  derived and/or modified sequence
atgcaccagcgccaccccagagcaagatgccctcccctatgtgttgctggtatccttgcctgtggattcctgcttggatgctgggggcctagtcactttcagcagtcttgtctgcaggctctagaaccccaggcagttagcagctacctcagccctggcgctcccctgaaagggaggccaccttcacctgggtttcaacggcagaggcagagacaaagaagagctgccggcgggatcttgcacctggaattattagtggctgtcggaccagacgtgtttcaagctcatcaggaagacacagagaggtacgttttgaccaatctgaacattggggcagagctgctcagagatcctagcctgggcgctcaatttagggtgcacctggtaaaaatggtgattctgacagagcctgagggcgcccccaacataaccgctaacctgacctcctctttgctgtctgtgtgtgggtggagccagactataaatcctgaagacgacacagaccccggccacgcggaccttgttctgtatatcactcgattcgatcttgagctccctgacggcaaccgccaggtgcgcggtgtaacacagctgggcggggcctgctcccctacatggtcgtgcctgattacagaggatactggcttcgacttgggagtcacaatcgcacatgaaatcggtcacagcttcgggttagaacacgatggggcccctggatcagggtgtgggcctagtggccatgtcatggcatcagatggagccgcccctcgtgcagggttggcctggtcaccctgcagcagacggcagttgctatcactcttgagtgccggcagggccaggtgtgtctgggatcctccgcggccgcagcccgggagcgctggacatcccccagatgcccagcccggcttgtattacagcgctaacgagcagtgtagggtggctttcggacctaaagccgtggcatgtacctttgcccgggaacacctggatatgtgccaagccctttcctgtcatactgaccctctcgatcagagtagttgttcccggctgctggtgccgcttctggatggaactgaatgcggggtggagaagtggtgctctaagggccggtgccggtctctagttgagctgaccccaatcgcggccgtgcatggacgatggtccagctgggggccaagatctccatgttcacgctcatgtggcgggggcgtggtcacaagacggaggcagtgtaataatccgaggccagcttttggcggccgcgcctgtgtgggcgcagatctacaggctgaaatgtgcaatacacaggcatgcgaaaaaacccagctcgagtttatgtcgcagcagtgcgctcggacagacgggcagcctctgaggtcttcccccggcggcgccagtttttaccattggggggcagcagtgccacacagccagggggatgctctatgcagacatatgtgtcgtgctataggagaatcgtttatcatgaaaagaggagattcattcctagatggtacccgctgtatgccgtctggaccgagagaggacggcacactgtccctctgcgttagcggtagctgtcgcacctttggatgcgatggcagaatggactcacaacaggtgtgggaccggtgccaggtgtgtggaggggataatagcacatgctcaccaagaaaagggtcctttactgctggtagagccagggagtatgttacattcctgactgtgacacctaatctgacgtccgtctacattgcaaatcatcggcctttgttcacccaccttgctgtcaggatcggcggccgatacgtggtggctgggaagatgtccattagccccaacaccacttatcccagcttgctcgaagatggcagagtcgagtatcgcgttgccttaaccgaggacaggttacctaggttggaggagatacgtatctggggcccactgcaggaggatgcagacattcaagtttacaggcgttatggggaggagtacggaaaccttactcgccccgatattacattcacatatttccaacctaaacctcggcaggcctgggtttgggccgccgtgaggggcccttgcagcgtctcctgcggagctgggcttcgctgggtcaattactcatgtctggatcaggctcgcaaagaactcgtggaaaccgtgcagtgtcaaggctcccagcaacccccagcctggccagaggcctgtgtcctcgagccatgccccccttactgggctgtgggagattttggaccctgcagtgcctcttgtgggggcggcctccgagaaagacctgtgaggtgcgtggaggcccagggatccctgctgaagacactgccccctgcacggtgccgggccggggcccagcagccagccgtcgcccttgagacatgtaacccccagccctgtccggcgagatgggaggtgtctgagccatcttcttgtacttctgctggcggcgccggactggcactggaaaacgagacatgcgtcccaggagcagatggtcttgaggccccagtcactgagggtccaggcagcgtggatgagaagcttccagcacccgagccttgcgtcggcatgtcttgcccccccggatggggacatctggacgccacttcagccggggagaaagcaccctcaccatggggcagtatcagaacaggcgcgcaagctgctcatgtgtggacgccggccgcgggttcttgctctgtaagttgcgggcgtggcctaatggagctacggtttttatgtatggatagtgccttgagggttcccgtacaagaggagctatgcggccttgcctcaaagccaggtagcaggagggaggtgtgccaggccgtcccctgccccgctaggtggcagtacaagcttgcagcttgttctgtctcttgcggacgcggggttgtccgaagaatcctgtattgcgcacgagcacacggggaggacgatggagaggagatactgctggatacacagtgccaggggctcccaagacccgagcctcaggaagcctgcagtctagaaccctgtcctccgcgttggaaggtgatgagcctggggccatgttccgctagctgcggactgggtaccgctcgtcggtccgtggcctgtgtccagctggatcaaggccaggacgtggaagtggatgaggcggcctgcgccgcactggtgcgcccagaagcttctgttccttgtttaattgccgattgcacctacagatggcacgtagggacatggatggagtgttcggtgtcgtgtggcgatgggatccagaggcgacgagacacttgtttgggcccccaggcgcaggcccctgtacccgctgacttttgccagcaccttcccaagccagtgaccgtgaggggttgctgggccggaccatgcgtgggacagggcactcctagcctggtccctcatgaagaggccgcagcccccggccgaactaccgcgactccagccggcgcctcgctggagtggtcacaggctcgtggactcctgttttcaccagccccacagcctcggagactgctacccggaccacaggaaaactcagttcagagtagcgcatgtggcaggcagcatcttgaacccaccggcacaatagatatgaggggacctgggcaggctgactgcgccgtcgccataggtcggcccctgggagaggtagtaacactgagggtgctggaaagcagcctcaactgttccgccggggatatgctgctactgtggggacgactgacatggagaaagatgtgtcgcaagcttctagatatgacattcagcagtaagactaacactctggtcgtgcggcagagatgcggacgacccggcggtggagtgctgcttagatatggcagtcagctagcacctgaaaccttctatcgtgagtgtgatatgcagctattcggaccctggggcgaaatcgtgagtccgtccctgagccccgctacctccaacgctggtgggtgccgactgtttattaacgtggctcctcatgccaggatcgcaatacacgccctagccacaaacatgggcgccggaactgagggggccaacgccagttacattcttatccgagatactcattctctccgtactacggcctttcacggtcagcaagtgctgtactgggagtcagaatccagccaggccgagatggaattctcagaagggttcttgaaggcgcaggcttcgttgagaggacagtattggaccctgcagtcatgggtccctgaaatgcaggatcctcaaagttggaaaggcaaggagggcacg

SEQ ID NO: 237900 - DNA, 4281 bp, Artificial Sequence
  derived and/or modified sequence
atgcatcagcgccaccccagagctaggtgccctcccctgtgcgtggcaggtatactggcctgtggtttccttctgggctgctggggccctagtcactttcaacaatcatgtcttcaggccttggagccacaggccgtaagttcctatctgtctcccggcgctccactgaagggtaggcccccctcccctggattccagagacagaggcagcgtcagcgccgtgctgccggaggcatcctgcacctcgagctcctggtcgcagtgggacctgacgtcttccaggctcaccaggaggacacagagcgctacgtgctgaccaacttgaatatcggcgccgagttgctgagggacccaagtctgggagcacagttccgcgtccatctggtgaagatggtgatcctgaccgaacccgagggtgcccccaatatcactgcaaacctgacctcctctcttctgagcgtatgcggctggtcccagacaattaaccctgaagacgataccgatccaggacatgctgacctggtactctatattaccagattcgacctggagctcccagacggaaacaggcaggttaggggcgtcacccagcttggtggtgcatgttcaccaacttggtcttgccttatcactgaggacaccggtttcgacctcggcgttactatcgcccatgagatcggccattcttttggtctcgagcatgacggtgctccaggtagtggatgcggcccctccggacacgtaatggcttcagatggtgccgctcctcgtgccggactcgcctggtctccttgcagtcgtcgtcaactgctgtcactgttgtcagctggccgtgctcgctgtgtgtgggaccctcctcgcccacagccaggtagcgctggacatccccctgacgctcaacctggtctgtattatagcgctaacgagcaatgccgtgtcgccttcggtcctaaagccgtcgcctgcactttcgctcgcgaacatctcgacatgtgtcaggctctgtcttgtcatacagacccactggatcaatcttcttgttcacgcctcttggtgcccctcctggatggaaccgagtgcggagtagaaaagtggtgtagcaagggtcgttgccgctctttggtggaattgacccctatcgccgcagtccacggtcgctggtcaagttggggaccacgttcaccctgttctcgcagttgcggtggcggcgtggtaacccgtagaaggcaatgcaacaacccacgtccagctttcggcggaagagcctgtgtgggtgccgacctgcaggcagagatgtgtaatactcaagcttgcgagaagacacagctggagttcatgtcccagcagtgtgctcgtaccgatggacagcctttgaggtcttccccaggaggcgcctccttctaccactggggtgctgcagtgccacactcacagggcgatgccctgtgtcgccacatgtgcagggccattggtgaatccttcattatgaaacgtggagattccttccttgacggaactagatgcatgcctagtggtcctagagaggacggtacactttctttgtgcgtgagtggaagctgccgcacttttggatgcgacggtaggatggacagccaacaggtgtgggaccgctgtcaagtttgtggcggcgataacagcacatgttcccctcgcaaaggaagtttcacagctggtcgtgctagagagtatgtgaccttcctgacagtgacacctaatctgacctccgtgtacattgctaaccaccgtcctttgtttacacatctcgctgtgaggataggtggccgttatgtggtagcaggcaagatgtccatttccccaaacaccacctacccctccctcctggaagatggtcgcgtggagtacagagtggctctcaccgaggaccgcctcccaagattggaggagatccgcatttggggcccactccaggaagacgccgacattcaggtctaccgcagatacggtgaggaatatggtaatctgactcgtcctgatatcactttcacttatttccaacctaaacctaggcaagcttgggtttgggctgctgtgaggggtccctgttcagtctcctgcggtgctggattgcgctgggtaaactactcatgtctcgaccaagcccgtaaggagttggtcgagaccgtgcagtgtcaaggctctcagcagccccccgcttggcctgaggcctgcgtgcttgagccctgccctccttattgggccgttggtgattttggaccttgttctgcaagctgcggcggcggtctgcgtgagcgccccgtaagatgtgtggaggcacagggaagcttgcttaaaactctcccccccgctagatgccgtgctggtgctcaacagccagccgtggcacttgaaacctgcaacccacagccttgccccgctagatgggaagtctctgagccctccagttgcacttccgccggaggagccggattggcactggaaaacgaaacctgtgtgcctggcgctgacggactggaggcccccgtgactgagggtcctggatctgtggatgaaaaattgcccgctccagaaccttgcgtaggcatgtcttgcccacctggatggggccaccttgacgccactagcgccggagagaaggcaccatcaccctggggtagtataaggacaggcgcccaggctgcccacgtctggactccagccgcaggcagttgttcagtgtcctgcggtcgtggtttgatggagctgcgcttcctgtgtatggacagcgcattgcgcgttccagtgcaggaggaactgtgtggccttgctagtaagcccggctcacgccgcgaagtttgccaggctgtgccttgcccagcccgttggcagtacaagctggctgcatgtagcgtcagttgtggccgtggtgttgtgagacgtattctgtactgcgctagggcacacggcgaggatgacggagaagagattttgctggatacacaatgtcagggtctgccccgccctgagcctcaagaagcttgcagtttggagccttgtcctcctagatggaaggtcatgtctctgggcccttgctctgcctcctgtggcctgggtaccgcccgtaggtcagtcgcttgtgtgcagctcgaccagggacaggacgtcgaggtggatgaggctgcctgcgccgccttggttagacctgaagcctctgtgccttgcctcatcgccgactgcacttaccgctggcatgttggaacctggatggagtgttccgtatcctgtggagacggtatacagaggagacgcgacacatgtctgggccctcaggctcaggctcccgtgcctgcagatttctgtcaacacctgcctaaacccgtcaccgtgcgtggctgctgggcaggaccatgtgtcggacagggaactcctagtttggtaccccacgaagaggctgccgctcctggtaggacaaccgcaacacccgccggcgcttccctggaatggtctcaagcacgtggactcttgtttagccccgccccacagcccagacgtttgctgcccggtccacaagaaaactcagtgcagtccagcgcctgcggaaggcagcatcttgagcccacaggtacaatagacatgagaggcccaggtcaagccgattgtgccgttgcaattggaaggcctctgggtgaagtggtcaccctgcgtgtcctggagtcatccctcaattgttccgctggtgatatgctcctgttgtggggccgcctgacatggcgcaaaatgtgccgtaaactgctggatatgacatttagctctaaaaccaataccctggtggtcagacagcgttgtggaagaccaggaggcggtgttctgcttaggtacggaagccagcttgcacccgagactttctaccgcgagtgcgatatgcagctgtttggaccatggggagaaatcgtgtcccccagcctgtcaccagcaacctctaatgctggtggctgccgcctttttatcaatgtcgctcctcatgctcgcatcgcaatccatgctctcgctaccaatatgggcgctggtaccgaaggcgctaatgccagctacattctgatcagggacactcactctctgagaacaacagcatttcatggacagcaggtgctgtactgggagagtgagtcttcacaggctgagatggaatttagtgaaggcttcctcaaggctcaggcctctctgaggggccaatactggactctgcagtcatgggtgcccgagatgcaagacccccagagttggaagggaaaagagggcact

SEQ ID NO: 237901 - DNA, 4281 bp, Artificial Sequence
  derived and/or modified sequence
atgcaccagagacatccacgggctagatgtccccccctttgcgtggcaggaatcttggcctgcggcttcctcctcggatgttggggtccttcccattttcagcagtcttgtctgcaggccctcgagccccaggcagtctcgtcctacctctcgccgggagcacccctgaagggcaggcctcctagtccggggttccaacgacagcgtcaaagacagcggcgggcagccggggggatcctacatcttgagttgctggtggccgttggccccgatgtgtttcaggcgcaccaagaggacacagagcgatacgtgctgacaaacttgaatatcggtgctgaactgctcagggatccgagcctgggtgcccagtttcgagtgcatctcgttaaaatggtgattctgactgagccagagggcgctcccaatataaccgcaaatcttacatctagcttgctaagtgtatgcggatggagccagactattaaccccgaggatgacacagaccccggacacgcggacctggtcttatatataacacggtttgatctcgaattgccagacgggaatcgtcaggttagaggcgtgacccaactgggtggcgcttgttcacctacctggagttgcctgattacagaagacacgggatttgacctcggtgtgactatcgcacacgagatcggccactcgtttggtctggagcacgatggagcacctgggtcaggctgtggccctagcgggcacgtcatggcaagcgacggcgccgccccaagggctggcctggcctggtccccctgcagtagacggcagctgttgtctctgctgtctgccggcagggcaaggtgcgtttgggacccaccaaggccacagccaggctctgcggggcacccccccgacgcgcagcccggcctgtattacagcgcaaatgagcaatgccgcgtagcgttcggtccaaaggctgtagcctgtacattcgcaagggagcacctcgatatgtgtcaggccctgtcatgtcacacagaccctctcgaccaaagcagctgctcgcgacttttagtcccccttttagacggtaccgagtgtggggtcgagaagtggtgctccaagggacggtgtcgctctttggtggaacttacccccattgccgctgtgcacggtcgttggagctcatggggcccacgcagcccatgcagtcgaagctgcgggggtggtgttgtgacacgcagacgccagtgtaataacccacggcctgctttcggggggagggcatgtgtcggggccgatttacaggcggagatgtgtaatacacaggcatgcgagaaaacgcagctagagttcatgtcacagcagtgtgcccggaccgatggccagccgctaagatcaagtcccggcggtgccagtttttatcattggggggcagcagtgccccacagtcaaggtgacgctctgtgcagacatatgtgcagagcgatcggagaaagtttcattatgaagcggggcgatagcttcctcgatgggaccaggtgcatgccctctggtccaagggaagatggtaccctgtcactctgtgtgtctggctcgtgtaggactttcgggtgcgacggcagaatggactctcaacaggtgtgggatcgctgtcaggtatgtggcggcgataattccacatgcagcccaaggaaaggctccttcaccgcaggtagggcaagagagtacgtcacctttctgactgtgacccccaacctgacctcggtgtacatcgctaatcataggcctctcttcacacatcttgccgttcgaatcggcggtcggtatgtggtagctgggaaaatgagcatatctcccaacacgacgtatccctctttgttggaggacggacgagttgagtaccgtgttgcccttaccgaagaccgcttgccacgtctggaagagattcggatctggggccccctgcaggaggatgcagacatccaagtctatcggcgatatggggaagagtacgggaacttgactaggcctgacatcacatttacctattttcaacccaagccacgtcaggcctgggtgtgggcagcagttagaggcccatgctctgtctcatgtggagctggcctgaggtgggtgaattactcgtgcctcgatcaagcccgaaaagagctggtcgagaccgtgcaatgtcaagggtcacagcagcctcccgcttggcccgaagcctgcgttttggaaccatgcccaccctattgggctgtcggagattttggcccatgctcggccagctgtgggggcggactgcgcgagagacctgtcagatgcgtcgaggcacagggatctcttctcaaaaccctacctcccgcccgctgccgcgcaggtgcacagcaaccagctgttgccctggagacttgcaacccgcagccatgtcctgctcggtgggaggtcagcgaaccatcatcctgtacaagcgccggtggcgccggcttggctctggagaacgagacctgtgttccaggagcagatggtctggaagctccagtgacggagggacctgggagtgtcgatgagaagcttcccgcgcccgagccctgtgttggtatgtcctgcccacccggctggggccacctcgatgctaccagtgccggtgagaaagcaccatcaccatggggatctatcaggaccggtgcccaggccgcacacgtgtggacacctgcggctggctcgtgcagcgtgtcttgcggccgtggtttgatggagctccgatttctctgtatggatagcgccctcagagtgcctgtccaagaagaactttgcgggctggccagtaaacccggatctcgcagagaggtttgccaggctgttccgtgccctgcacggtggcagtacaagttggctgcatgttccgttagttgtgggcgcggagttgtgcgcagaatactctattgtgccagggcccacggcgaagatgatggcgaggagatactgctggatactcagtgccaggggttgcctcgcccagagcctcaggaagcttgcagcctggagccttgccctcctagatggaaggtcatgagtctggggccatgtagtgccagctgcggcctcgggacggccaggcggtctgtcgcatgtgtccaactagatcagggacaagacgttgaagtggatgaggccgcatgtgccgctctggttaggcctgaagcttcagttccttgtctgattgctgactgcacataccgctggcacgtaggtacctggatggagtgctcagtgtcctgcggtgacggtatccagagacggcgagatacatgtttggggccacaggcacaggccccggtgcctgccgatttttgccaacatctgcctaagcctgtcaccgtgcgaggttgctgggccgggccttgcgtgggccagggcacaccatctttggtccctcatgaagaggcggcggctcctgggcgaactacagccactccagcaggcgcttccctagagtggagtcaggctcgcggcctcctctttagtccagcccctcaaccgcggcgactcttaccagggccccaagaaaacagcgtgcagtcaagtgcatgtggccgacagcacttggagccaaccggtactatcgatatgcgcggtcccggccaagccgattgtgctgtagccatcggcagacctctgggcgaagtggttacactgcgggttcttgagagctccctcaattgtagcgctggagatatgctgcttctttggggaaggctcacctggaggaagatgtgcaggaagctgctcgacatgaccttttcaagcaaaacaaatacactggtggtaaggcagagatgtgggcgtcctggcggaggcgtactgctgcgatatggatcccaactggcccctgagacgttctatagggagtgtgatatgcagctgtttgggccatggggagagatcgtgtcaccgtcactgtctcctgccacatctaatgccggaggttgtagactcttcatcaacgtagcaccccacgcccgaatcgccatccacgccctagccaccaacatgggggccggcactgaaggcgctaacgctagctacatactgattagggacacccatagtctgaggacaacagcctttcacggtcaacaggtattgtattgggagtccgagtcttctcaagccgaaatggagttctctgaagggttcctgaaagctcaggcttctctgcgcggccagtattggactctgcagtcctgggtgcccgagatgcaggatccccagagttggaaggggaaggaaggcact

SEQ ID NO: 237902 - DNA, 4281 bp, Artificial Sequence
  derived and/or modified sequence
atgcaccaaaggcaccccagggcacgatgcccccccttgtgcgtggcagggattctggcctgtgggtttctactgggatgctggggaccatcccactttcagcagagctgtttacaggcactcgagccacaggctgtctcctcgtacttgtctccaggcgcccctctcaaggggcggcctccaagcccaggtttccagcgtcagaggcagaggcaacggcgggcggctgggggcatcctccacctggaattgttagttgcggtgggtcccgacgtgttccaagcgcatcaggaggacacagagcggtacgtgctgactaacttgaatattggtgccgagctgctgagggatcctagcctgggagcccaattcagagttcatctagtgaagatggtgatcctaacggaaccagagggcgcaccgaacatcaccgctaacctcaccagtagcctgctgtccgtttgcggatggtctcagaccatcaatcctgaggatgatactgaccctggccatgcagatctggtcttgtacattacgagattcgacctggagcttcccgatggaaaccggcaagtcagaggagtaacacagctcggcggtgcctgtagtccaacttggagctgtcttatcaccgaggataccggcttcgatctgggggtgacaatagcacatgaaatcggacatagctttggactggagcacgacggagcccccggctctggctgcgggccaagcggccacgtgatggcttccgacggcgctgcacccagggccggtctggcctggtctccttgctccaggaggcagcttctgagcctgctttcagcaggtcgcgctcgctgtgtctgggacccaccacggccccagccagggtcggctggccatcctcccgatgcccaaccaggactgtactattccgcaaacgagcagtgtcgcgtagctttcggtccgaaagcagtggcatgcaccttcgcccgcgagcaccttgatatgtgccaggccttgtcatgccacaccgatccccttgatcagagcagctgttcccggctgctggtgccgctgctggatgggaccgaatgcggggtggaaaaatggtgctccaaaggccgctgtcgatccttggtggagctgactcccattgctgccgttcacggtcggtggagctcctggggccccaggtccccttgctcacggagttgcggaggaggcgttgttactcgtcgtcggcagtgtaacaacccgcggcctgcttttggaggaagggcttgcgtcggagctgacctgcaggctgagatgtgtaacacccaagcgtgtgagaagacccagctggagtttatgtcccagcagtgcgcacgtactgacggccaaccattacgatcctcccccgggggggctagcttctaccactggggagccgccgtgccccactctcagggcgatgccctgtgcagacacatgtgccgcgctatcggagaaagtttcattatgaaaagaggtgactcgtttctggacggcaccagatgtatgcccagtgggcctcgggaggatggtaccttgtcactctgtgtgagtgggagttgtcggaccttcggatgtgacggcaggatggactctcaacaggtgtgggatagatgccaggtctgtggtggggataacagtacctgcagtccgcgaaaggggtcatttactgccggccgggctagagagtatgtaacctttctgacagtgacccctaatctgactagcgtatacatagccaaccatcggccgctgtttacacacctggcagtcagaataggcggtcgctatgttgtggccggcaagatgtcgattagtccgaatactacttacccatcgttgctggaggacgggagggtggaatatagggtcgccttgacagaggaccgcctaccaaggctcgaggagatcaggatatggggccccctgcaagaagacgccgatatacaggtgtacaggcggtatggagaagagtatgggaatctgacccggccagacataacgtttacatattttcaaccaaagccgagacaggcctgggtttgggccgccgtacgggggccctgctctgtgagctgtggggccggcttaaggtgggtgaattactcatgtctagatcaggcaagaaaggagttggtggaaaccgtgcagtgccagggcagccaacaaccccctgcctggccggaagcatgtgtgttggaaccttgcccaccttactgggccgtaggggacttcggaccttgcagcgctagctgtgggggaggattacgggagcggcccgtgcggtgtgtggaagcacaggggtctttattgaaaaccttacccccagccaggtgcagggccggagcacagcagcctgctgtggctctggaaacttgtaacccccagccctgtcctgctcggtgggaggttagtgaaccctcttcctgcacttctgctggcggcgccgggctggcgctcgagaacgagacctgtgtgccaggagctgacggcctggaggcccccgtgacggaagggccagggtccgtagatgaaaagcttcctgctcctgagccatgcgtggggatgtcctgccctcccggctggggccatctcgacgctactagcgccggagagaaagccccctccccctggggatccatccgtacaggcgctcaggctgcccatgtctggacccctgccgctggtagctgttccgtcagctgcggcagaggactgatggaactgcggtttctgtgcatggattctgcacttcgagtgcctgtgcaggaagaactgtgcggcctggcttcaaagccaggctcccggcgggaggtatgtcaagcagtgccctgtcccgccagatggcagtataagctggccgcctgttcggtgtcctgtgggagaggcgtagtgagacgcatcctgtattgcgcacgtgcccatggagaagacgacggcgaagagattctgctagatacccagtgtcagggactgcccagacccgagccccaagaggcatgctcccttgagccatgccctcccaggtggaaggtaatgagcctcggtccttgttcagcctcctgtgggctgggaacagcacgccgttctgttgcctgcgtccaattagatcagggtcaagatgtcgaggtggacgaggccgcctgcgcggccttagtcagacccgaagcgtctgttccgtgtctgatagcagattgtacttatagatggcacgtgggcacctggatggagtgctccgtgagttgcggcgacggaattcagagaagacgcgatacgtgcctgggccctcaggcccaggctcccgtgcccgcagatttttgccaacatctgcctaaacccgtgaccgttaggggatgctgggctggcccatgcgtcggccagggaaccccctccctggtccctcatgaggaggctgctgcccccggaaggaccaccgctaccccagcaggggcaagcctggagtggtctcaggccagagggctgcttttctcacccgcccctcagccaagaaggctgttaccaggcccacaggaaaattccgtgcagagctccgcctgtggcaggcagcatctcgagcccacaggcactatcgatatgcggggaccgggtcaggccgactgtgcagtcgctatcggccggccgctaggagaagtggtgactcttcgcgtgcttgagagcagtctgaactgctcggcaggggacatgctattgctgtgggggaggcttacatggaggaaaatgtgtaggaaactgttggatatgacttttagctcaaagaccaataccttggtggtccgacagagatgcggtcggcccggtggcggtgtcttattacgctatggaagtcagctcgctcccgagacattctatcgcgagtgtgacatgcagctatttggtccttggggcgagattgtgtccccttcacttagcccggccacatccaacgccggggggtgcaggttgtttattaacgtagcaccccacgcaagaatagccatccacgccctggccactaacatgggggcaggaaccgagggggccaacgcttcatacatcctgattcgtgatacccactcactccggacaaccgctttccacgggcagcaggtgctgtattgggagtctgagtctagccaggccgaaatggagttcagtgaggggttcctgaaagcccaggcgtccttgaggggacagtactggacattgcaatcatgggtcccagaaatgcaggacccacagtcatggaagggaaaagaaggcacg

SEQ ID NO: 237903 - DNA, 4281 bp, Artificial Sequence
  derived and/or modified sequence
atgcaccagcgacatccacgggcccgttgccctcccctgtgcgttgccggtattctggcctgtggcttcttgctggggtgttggggaccctcgcatttccaacagagctgtctgcaggcacttgaaccccaagctgtaagctcctacctctcgccaggagcccctctgaagggtaggccaccctctccgggcttccagcgtcagcgccagcgccagcggagggctgccggcggaatcctgcacctggaactgctggtggcagtcggtccagatgtattccaggcccatcaagaggacaccgagagatatgtcctcaccaacctgaatatcggagccgagctgctgcgtgatcccagtctaggagcccaatttagagttcacttggttaagatggtgatcctcaccgagccggaaggggctcccaacatcaccgccaatttgacttcaagtctattatctgtgtgcgggtggagtcaaacgattaaccccgaggacgataccgaccccggtcacgcggatcttgtcctttatataactcgatttgatctcgagctccccgacggcaaccggcaggttagaggcgttacacagttagggggcgcgtgctcacccacctggtcatgccttataactgaggacacgggctttgatctcggtgtgaccatcgctcacgaaattggccatagtttcgggctagaacacgacggtgcccctggatccggatgcggtccctctggccacgtcatggctagcgatggcgcagctcccagggcaggactggcctggagtccttgcagtcgccgacagctgctctctctgctatccgcgggccgggctcggtgtgtctgggacccacctagaccgcagccaggttctgcgggacacccccctgacgctcaaccaggactgtattatagtgcgaatgagcagtgccgagttgcctttgggcccaaagctgtagcctgtaccttcgcccgtgagcatctggatatgtgccaggccctgagctgtcataccgacccacttgaccagtcttcctgcagtagactcttagtacccctgctggatggaactgaatgcggcgtggagaaatggtgctctaaggggagatgccgatctctggtcgaactaaccccaattgcggccgtccatggccgctggagttcatggggcccccgatctccctgctctcgcagctgcggaggcggcgtggtgacacgtcgccggcagtgcaacaaccctaggcccgcttttggcggccgcgcatgcgtaggggcggacctgcaggctgaaatgtgcaatacacaggcctgcgagaagactcaactcgaattcatgtctcagcagtgcgccaggacagatgggcagcccttgagatcaagcccaggaggggcctctttttatcattggggggctgccgtcccacatagtcagggagacgctttatgtcgacacatgtgtcgcgcaatcggcgagtcattcatcatgaaacgaggggattcattcctggatggtacgcgatgcatgccctctggcccgagagaggatggcactctgtccctgtgcgtttccgggagctgtaggacattcggatgcgacggccggatggacagccagcaagtgtgggatagatgccaggtgtgtggtggagacaattccacatgttcaccacggaagggctcttttaccgccggaagagctagagagtatgttacgtttcttaccgtgacccctaacttaaccagcgtctatatcgccaatcatcgtcctctgtttacccacctggcggtgcgcatcggaggcagatatgtagtcgctggcaaaatgtctatctccccaaatacaacatatccttcccttctggaggacgggagagtggagtatagggtggctctgacagaggaccggctaccaagactggaggaaatccggatctggggaccactccaggaagacgctgacatccaggtctacagaagatatggggaagaatatggcaatctcaccaggccagacatcactttcacatattttcagccgaaaccaaggcaggcttgggtctgggctgctgttagggggccatgctcagtgagctgtggcgcaggcctgcggtgggtgaactatagctgcctcgaccaggcccgaaaagaacttgtcgagactgtacagtgtcagggctcccaacaacctcctgcgtggccggaggcatgtgtgcttgagccgtgtcctccctactgggcggtgggagacttcgggccatgttcagcgtcttgcggcggaggcttacgcgaacggcccgttagatgcgtggaggcgcaaggaagccttctgaaaacccttcctccagctaggtgtcgcgcaggggcacagcaacctgcagtggcattagaaacctgcaacccacagccatgccctgccagatgggaggtgagcgagccctcatcatgcactagtgctgggggcgctgggctggccctagagaatgaaacctgtgtcccaggtgcagacgggctcgaagcccccgttactgagggccctgggtctgtggacgaaaaattgcccgccccagagccctgtgtgggaatgtcctgcccacccgggtgggggcatcttgatgccacttccgcgggggagaaagcccccagtccctggggttctatccggaccggcgctcaggccgcccatgtatggactccagcagcaggttcctgctcagtgagctgcgggcggggtctgatggagttgagattcttgtgcatggactccgctctcagagtgccagttcaggaggagctctgcggcctagcctctaaacccggcagcaggcgggaagtctgccaagccgtgccctgtccggccaggtggcagtataagttagccgcctgttccgtttcctgtgggcggggcgttgtgcgccgaattctgtattgcgcccgggcacacggagaggatgacggcgaggaaatccttctcgatacacagtgccaaggccttccacggccagagccccaggaggcctgctccctcgaaccatgtcccccccgttggaaggtgatgagtctcgggccttgttcagccagttgcggcctgggcacggctcgcaggagtgttgcctgcgttcaactcgatcaggggcaggatgtggaggtggacgaagccgcctgcgccgccctagtgcggccagaggcctctgtgccatgcctcatcgctgattgtacttacagatggcatgttggcacctggatggagtgctccgtttcctgtggagatgggattcaacgaagacgggacacatgtctcgggccccaggctcaggccccagtgcccgctgatttttgtcaacatctcccaaaaccggttacagtgaggggctgctgggcaggaccatgcgtaggacaagggaccccatctctggttccacatgaggaggctgccgctcccggccgcacaaccgctacgcccgcgggtgcaagcctcgaatggagccaggctcgaggcctattgttcagccccgccccacaaccacgccgattactgcccggtccgcaagaaaatagcgtgcagtcatccgcatgcggccggcagcaccttgagcctacaggaactattgacatgagaggacccggacaggcagactgcgcagtggcgatcggaagaccacttggtgaggttgtgaccctccgtgtgttggagagttccctcaactgctccgcgggagatatgttattactgtggggtcggctgacctggcgcaagatgtgccgcaagttactggatatgaccttttcttctaaaaccaacaccctggtcgttcggcagaggtgcggccggcctggcggaggagtgctgctcaggtatggaagtcagcttgcccccgagacattctatcgtgagtgcgacatgcaactgttcggtccctggggtgagatcgtgtcgccatctctttcccctgcgacctctaacgccggagggtgtcgtttgtttatcaatgtggcaccacacgctcggatcgcaatacacgctcttgcaacgaacatgggcgctggcactgagggagcaaacgcttcctatatcctgattcgagacacccattcattacggaccaccgcatttcatggccaacaggtgctgtattgggagtctgaatcaagtcaggcagaaatggagttcagcgagggctttctgaaggcgcaggcttcacttcgaggccagtattggaccttgcagagttgggtgcccgaaatgcaggatccccagtcatggaagggtaaagaggggact

SEQ ID NO: 237904 - DNA, 4281 bp, Artificial Sequence
  derived and/or modified sequence
atgcatcaacggcaccctcgagcacgttgtcctccactgtgtgttgccggaatattggcgtgcgggttcctgcttggatgttggggaccatcgcatttccagcagtcctgccttcaagcactcgagccccaggctgtgtcgtcgtacctgtcgcctggtgcaccccttaaaggtcgccctccatcccctggatttcaacgtcagcgccagagacaacggcgggcagcaggaggaattctccatcttgagctgcttgtcgccgtgggacccgacgtgtttcaggcacatcaagaagataccgaaagatacgtgttgacgaacttgaatataggagccgaacttctccgcgacccatcattgggagcccaattccgggtgcatctcgtgaagatggtgattctgaccgaacctgaaggcgcacctaacatcactgcgaacctcacctcgagcctgctctcggtctgcggctggtcccagaccataaatcctgaagatgataccgacccaggacacgcagatctggtgctgtacattactagatttgatctggagttgccagacggtaatcgacaagtgcggggtgtgacccaacttggtggggcatgctcacctacgtggtcgtgcctgattactgaagataccggttttgatcttggagtgactatcgctcatgaaataggacattctttcggccttgaacacgatggtgcacctggcagcggttgtggacctagcggacatgtcatggcttcggatggggcagcaccacgggcaggacttgcatggtcgccttgttccagaaggcagctgctgtcattgctctcggcaggaagggctagatgtgtgtgggatccacctcggcctcaaccgggttcggcaggccaccctccagacgcgcagcctggcctttactatagcgcaaacgaacaatgccgggtcgctttcggcccaaaagcagtggcgtgcacgtttgcaagggaacatctggacatgtgtcaagcactcagctgccacaccgatcctctggatcagtcaagctgttctcgacttctggttcctttgctggacggaaccgagtgtggcgtcgaaaagtggtgttcgaagggacggtgtagatcgctggtcgagctcactccgatcgccgcggtgcatgggcggtggagctcctggggacctcgatctccatgttccagatcgtgcgggggtggagtggtgacccgacgcaggcaatgtaacaatccccgcccagcatttggtgggagagcctgcgtgggggcagatcttcaggcagaaatgtgcaacactcaggcttgtgaaaagacgcaactcgagtttatgtcccagcaatgcgcccgcacggatggtcagcctttgcgctcaagtcctgggggcgccagcttttaccattggggtgctgcagtgccacattcacagggagatgcactgtgtcggcatatgtgcagggctatcggagaatcgtttatcatgaaaagaggcgattccttcttggatggaaccagatgcatgcccagtggacctcgggaggacggaactctttcgctgtgcgtgtcaggatcgtgcaggactttcggttgcgacggccgcatggactcccaacaggtgtgggacagatgccaagtctgtggcggagataactcaacctgttcccctcgcaaggggtcgtttactgctggacgggcgagagaatacgtgactttcctgactgtcacccctaacctgacttcggtgtacattgcgaaccacagacctctttttacccatctggccgtccgtattggaggccggtacgtcgtggcaggaaaaatgtccatttcccctaacaccacctacccttcactgctggaggacggacgcgtcgaatacagagtggcgctgactgaagatcgtctcccgcgacttgaagaaatccgcatttgggggcctttgcaggaggacgccgatatccaggtgtacagaagatatggggaggaatacggaaatcttacgcggcctgatatcacttttacttacttccaacccaagccacgccaagcatgggtgtgggcagcagtgcgtggcccctgctcagtgtcctgcggtgcgggactgcgctgggtgaattactcctgtctggatcaggcgcgaaaggagctggtggagactgtgcagtgtcagggatcccagcagccaccagcttggcccgaagcgtgtgtccttgaaccttgccccccgtactgggcagtgggtgactttgggccgtgttcggcaagctgtggtgggggactccgggaacgccctgtgagatgtgtggaagcccagggctcgctgctcaaaaccctcccacccgcaagatgcagagcgggagcacaacagcccgcggtcgctctggaaacctgtaatccacagccctgccctgcacggtgggaagtgtccgagccatcgagctgtactagcgccggaggtgcaggattggcactggagaacgagacttgcgtccctggtgcagacggtcttgaggcacctgtgactgagggtccaggatccgtggacgaaaagctgccagctccagaaccttgtgtcggaatgtcctgtccgccagggtgggggcatctggatgctacttcggcaggtgaaaaggcaccatccccgtggggtagcattagaactggagcacaagccgcccacgtgtggacccctgcagcaggatcgtgttcggtgagctgtggacgcggtctgatggaacttagatttctgtgtatggattcggcactcagggttcctgtgcaagaagaactttgtggcttggcatccaaacctggctcccgacgcgaagtgtgtcaggcagtgccctgtcctgccagatggcagtacaagctggctgcctgctctgtgtcctgtggtaggggagtcgtgcggagaatcctctactgcgcaagggcccacggggaagatgacggagaagaaattctgctggatacccaatgtcaaggccttcctcggcccgaaccccaagaggcctgctccctcgagccttgtcctcctaggtggaaagtgatgtccctcggcccttgttctgcatcctgtggacttggaacggcaaggagatccgtggcgtgtgtgcagctcgaccagggtcaggatgtcgaagtggatgaagctgcatgtgcggcacttgtgcggccagaagcctcagtgccttgtcttattgccgactgcacttaccggtggcatgtgggaacttggatggaatgctcggtcagctgcggagacggcatccaacgtcggcgggatacttgcctgggcccacaagcgcaagcacccgtgcctgccgatttttgtcagcatctgccaaagcctgtgactgtcaggggttgctgggcaggaccttgtgtaggccagggaaccccttctctcgtccctcatgaagaagcggcagcaccaggaaggaccaccgccactccagctggtgcttcgctggaatggtcccaagcgcggggacttctgttttcccccgccccacaaccgagacggcttctccctggcccccaagagaacagcgtgcagagctcggcatgcggccggcaacatctcgagccaaccggtactatcgatatgagggggcctggccaagccgattgtgcggtggccatcggtagaccactgggtgaagtcgtcacgcttagagtgcttgagagctcccttaattgttccgcaggagatatgcttttgctttggggtcgactgacttggagaaaaatgtgcaggaagctgttggacatgactttctcctcaaagactaataccctggtggtgcgacaaagatgtgggaggccgggtggtggtgtgctgttgcgttacggtagccagcttgcacctgaaaccttttacagggaatgcgatatgcagctgtttggaccctggggagaaatcgtgagcccttcactctcacccgcaacttcgaacgccgggggttgtcgcctcttcattaatgtcgctcctcacgcaaggatcgcgatacacgcacttgctaccaatatgggggctggaaccgagggagcaaacgcatcgtacattctgattcgggatactcattcacttaggacgactgcatttcacgggcaacaggtgctttactgggaatcggaaagcagccaagctgagatggaattttccgaaggttttcttaaggcccaggcatcccttcgaggacaatactggaccctccagtcgtgggtgcctgagatgcaggatccccagtcctggaagggtaaggaaggtacc

SEQ ID NO: 237905 - DNA, 4281 bp, Artificial Sequence
  derived and/or modified sequence
atgcaccagaggcatccaagagcccggtgtccacccttgtgcgtggctggaatcctcgcctgcgggtttctcctggggtgttggggaccctctcatttccagcagtcatgtttacaggccctcgaaccacaggcagtatcatcttacctctctcccggggcacccctgaaagggagacccccctctccaggattccagagacagcgccagcgccagcggagggctgctggagggatcctgcacctggaactgctggtcgctgtcggacctgatgtgtttcaggctcaccaggaggatacagaacggtatgtactcactaacctcaatataggagccgaactgctcagggatccctctcttggagcacagtttcgagtccatctcgtaaaaatggtcatcctcactgaacctgaaggagcccctaatatcacagctaacctgacatcttctctcctcagtgtatgtggatggtctcaaacgataaacccagaagatgatacagatcccgggcacgcagatcttgtgctatatataactcgattcgatctggaactccctgatgggaatcggcaggtcagaggggtgacacagctaggaggagcatgttctcccacatggtcttgtctcataactgaagatactgggttcgatctgggagtgactatcgcccacgaaatcggacactcattcgggctcgaacatgatggagcccctggatccggatgcggaccatcaggacacgtgatggcttccgatggagctgcaccccgggcagggctggcctggtcaccttgttcacgacggcagctactctctttgctctcagccggaagagccaggtgtgtgtgggatccccctagaccccagcccggatctgcaggacacccccctgatgcccagccagggttatattattccgcaaatgaacagtgccgagtagcgtttggacccaaggccgtcgcatgtacattcgcaagggaacatctggatatgtgccaggctctgtcatgtcatacagacccactagaccaatctagttgttctcgtctgctagtccctctgctcgatgggactgaatgtggagttgagaaatggtgttccaaggggcggtgccgatcattagttgaactcacaccaatcgcagctgtgcacgggcgctggtcttcttggggaccccggtctccctgttcccgcagttgcgggggaggggtggtaactagacggcgacaatgcaacaatcctcggcccgcttttggaggaagagcttgtgtgggagcagatctccaggccgaaatgtgtaacacacaggcttgcgaaaagacacaactagaattcatgtcgcaacagtgtgctagaactgatgggcagcctctgcggtcttctccaggaggagctagtttctatcactggggagcagccgtcccacactctcagggagatgctctctgccgtcacatgtgtagggcaataggggaatcctttataatgaaacgtggggattcattcctcgatggaacacggtgcatgccatctggacctcgcgaagatgggactctatccctctgtgtctccgggtcttgtagaacttttggatgtgatggaagaatggattctcagcaagtctgggataggtgtcaggtgtgtggaggagataactctacttgctctccgcgcaaagggtccttcacagcaggacgcgcacgggagtatgttacatttctcactgtgacacctaacctcacttctgtttatattgctaaccataggcccttattcacacatctagccgttcggatcggagggcgttatgtcgtagcagggaaaatgagtatctcccccaatacaacttatccatcgcttctagaggatggacgggtggagtacagggtggctctcactgaagaccgcctcccacgactagaagaaattagaatttgggggcctcttcaggaagatgccgatatccaggtgtatcggcgatacggggaagagtatggaaatctgacacggcccgatattacatttacttacttccagccaaagccccggcaggcctgggtgtgggctgcagtcagagggccctgttccgtctcatgtggggcaggactgaggtgggtaaactactcctgtctcgatcaggccagaaaagaacttgtcgaaacagtacagtgccagggatctcagcagccacccgcatggcctgaagcttgcgtgcttgaaccatgcccaccttattgggcagtaggagattttggaccttgttcagcctcctgcggaggggggctgagggaacggcctgttcgctgcgtcgaagcgcagggatccctactgaaaacgctcccccccgcaaggtgccgggcaggggcacaacagcccgccgtagcccttgaaacttgcaacccccagccctgtcccgctcggtgggaagtttcagaaccctcatcatgcacaagtgcagggggggctgggctggctttagaaaacgaaacatgtgttccgggagctgatgggctcgaagctcccgtcactgaaggacccgggtctgtcgatgaaaaacttccagctcccgaaccttgtgtagggatgagttgcccacctggatgggggcacttggatgcaacatctgccggagagaaagcaccctctccctgggggtctataagaactggggctcaggctgcacacgtatggactcccgcagcagggtcatgctccgtatcatgtgggaggggactcatggaattacgctttctatgtatggatagtgctttaagggtccctgtacaggaagaactttgtggactcgcctcaaaaccaggatcaaggcgggaagtctgtcaggcagttccatgccccgctaggtggcagtataaattagcagcctgttctgtgtcatgcgggcgaggggtcgttcgccgaatcctctactgtgctagagctcatggagaggatgatggggaagaaatccttctcgatacacagtgtcagggactgcctcgaccagaaccccaggaagcctgttctcttgaaccctgtccccctcgctggaaagtcatgtcactcggaccatgctccgcctcttgtggactggggactgcgagaagatccgtggcctgtgtgcagctcgatcaggggcaggatgttgaggtagacgaggctgcctgtgccgcactggtgagaccagaagccagtgtgccatgtctcatagctgattgcacatatcggtggcatgtaggaacatggatggagtgcagtgtttcctgcggggatgggatacaacggcgcagggacacttgtctaggaccacaggcccaggcacccgttcctgcggatttctgccagcacctaccaaagccagttacagtgagggggtgctgggcaggaccttgcgtagggcagggaacaccaagtctcgtacctcacgaagaagccgccgctcccggacggactactgccactccggctggagcatctctcgaatggtctcaggcgagaggactgcttttttctccagcaccccagccacgaaggctcctgccaggacctcaagaaaattccgtccagtcttcagcttgcggaaggcagcatctcgaacccacagggacaatagatatgagggggccaggacaggctgattgtgccgtggcaatcgggcgcccactgggagaagtcgtgacactgcgggtactggaatcttctcttaattgttccgccggagatatgctgcttctatggggaagactaacatggcgcaagatgtgtagaaagctacttgatatgacgttttcctcaaaaactaacacattagtagttaggcaacgctgcgggagaccagggggaggagtcctgctgaggtatgggagtcagctcgcacccgaaacattctacagggaatgcgatatgcaactttttggaccatggggggaaatcgtttccccatcgcttagtcctgccacatccaacgcgggaggatgtcgcctgttcataaacgtcgctccacatgcaaggatcgccatccacgctttggctacaaacatgggagccgggacagagggggcaaacgcctcctatatattgatacgagacacacactctctgcggacaacagcctttcatgggcagcaggtactctattgggaatctgaatcttctcaggccgaaatggaattttccgaggggtttctgaaagctcaggcttctctccgggggcagtattggacactccagtcctgggtccccgaaatgcaggatcctcagagttggaagggaaaagaaggaact

SEQ ID NO: 237906 - DNA, 4281 bp, Artificial Sequence
  derived and/or modified sequence
atgcatcaacgccacccccgggcgcgatgcccacctctgtgcgttgcgggtatcctggcgtgcgggttcctgttgggttgttggggcccgagccattttcaacaatcctgtctgcaggccctcgagccgcaggcagtgagcagctacttgtcacctggcgcaccactgaaaggtcgccctccgagcccaggctttcagaggcagcgccagcggcagcgtcgcgccgccggcggcattctgcatctggaattgctggtcgctgtgggtccggacgtgttccaagcacaccaagaggataccgaaagatacgtcctgaccaatttaaacataggtgccgagttattgcgggaccctagccttggcgcgcaattccgtgtccacctggttaaaatggtcattctgactgagcctgagggcgcgcctaatatcacggccaatctcactagcagtctgctctctgtctgcggttggagccagacaatcaatccagaagacgacacagatccgggccacgccgatctcgttctgtacattacgcgcttcgacctggaattgccagatgggaatcgccaggtgcgcggtgtaacgcagctgggtggagcctgcagccctacgtggagctgcctcattaccgaggatactggttttgatctcggagttaccatcgcgcacgaaatcggacacagcttcggcttagaacatgatggcgcaccggggtccgggtgtggtccatccggtcacgttatggcgtccgatggtgccgctccaagagctggtctggcttggagcccgtgttcccgtcgacagctgctgtcattattgagtgcaggccgcgcgcgatgcgtgtgggacccgccacgcccacaacctggctccgcgggccaccctccggacgcgcagcctggcctgtactactccgcgaacgaacagtgtcgagtggcattcggcccgaaggcagtagcgtgcaccttcgctcgcgaacacttggacatgtgccaagcattgagctgccatactgacccgttggatcagagctcatgctcccgcctgctcgtgccgctgctcgatggtacggagtgtggggtcgaaaaatggtgtagcaagggtagatgccggagcctggtggagctgacaccgatcgcagcagtgcacggtaggtggtcctcctggggtccacgcagtccgtgctctaggagctgcggtggtggagtcgtgacccgccgacgccagtgtaacaacccgcggccagcatttggtggtagggcgtgcgtcggagcagacctgcaggcagagatgtgcaatacgcaggcgtgcgaaaagacccagctggaattcatgagccagcagtgtgcccgaactgacggccagccgctacgcagctcgccgggaggcgcgtccttttatcactggggtgcggcagtgcctcatagccagggagacgccctgtgtcgccacatgtgccgcgccattggtgaatcttttataatgaaacgcggcgactcatttctggacggtacccggtgcatgccatccggtccacgtgaagacggtacgttgagcctgtgtgtgagcggttcctgccgtacgttcggctgcgacggtcgcatggattctcagcaagtgtgggacagatgccaagtttgcggtggtgacaatagcacttgtagtcctcgcaaaggctcattcaccgcgggccgcgcccgcgagtacgtgacctttttgactgtgactccaaatttgacctctgtgtacatcgcaaaccataggccgctgttcacccacctcgcagttcgcataggtggtcgttacgtggtcgctggtaagatgtcgatctcccccaacaccacgtatccttcgctgcttgaagatggacgtgtcgaataccgcgtggcgctgactgaggatcggctacctcgtcttgaggaaattcgcatctggggaccccttcaggaagatgcggacattcaggtttatcgccgctacggcgaagagtatggcaacctgacccgcccagacattacttttacatactttcagcctaagccgcgacaggcctgggtttgggccgcagtgcgcgggccgtgcagcgtgtcctgtggagcgggtctcagatgggttaattacagctgcctggatcaagcgcgcaaagagctggtagagacggttcaatgccagggttctcaacagcctcctgcttggccggaggcttgcgttttggagccgtgccctccgtattgggctgttggtgacttcggcccgtgtagcgctagctgtggcgggggcctccgagagcgccctgttcggtgtgtcgaggcccagggaagccttctgaagacgctcccgccggcacgttgcagagcgggtgcccagcagcctgcagttgcactggagacatgtaatccacaaccttgcccagcacggtgggaggtctcggaaccatcttcctgtactagcgcaggtggtgcggggttggcgctggagaacgaaacttgtgtgccaggagcagatggcctggaggctccggtgaccgagggccccggtagcgttgacgagaaactgccagcgcccgaaccgtgtgtcggtatgagctgccccccggggtggggacacctggatgccaccagcgcgggcgagaaagctccgtcgccttggggcagcatccgaacgggcgcgcaagcagcccacgtgtggacgccggctgcgggttcctgcagcgtgagctgtggacgcggtctgatggagcttcgctttctctgtatggattcggctctgcgagtccccgttcaggaagagctgtgcggtctggcctccaagccaggctcgcgtcgggaggtgtgtcaagcggtgccgtgcccggcccgttggcagtacaaactggcagcgtgctctgtgagctgcggccgcggggtggttaggcgcatcctgtattgtgccagggctcatggggaagatgacggagaagaaatcttactcgatacccagtgccagggtttgccgcgcccagaaccgcaggaggcgtgttcactggagccatgcccgccgcgatggaaggtgatgagcctgggtccctgcagcgcctcgtgtggactcggtacggcgcgcagatctgttgcctgcgtgcagctggaccaaggtcaagatgttgaggtcgatgaggccgcctgtgctgccttggtgaggcctgaggcctctgtgccgtgtttgatcgcagactgcacctatcgctggcacgtcgggacctggatggaatgctctgtgagctgcggtgatggaattcaacgccgccgtgatacctgcctgggaccgcaagcacaagcaccagtgccggccgacttttgtcaacacttgcctaagcccgttaccgttaggggctgctgggccggtccttgcgtgggccaaggtaccccatctctggtgccacatgaagaggcggcagcacctgggcgcacgactgccaccccggctggcgcgtctctggaatggagccaagcacgtggactgctgtttagcccagctccccaacctcgtcgtctgctgccaggccctcaagaaaatagcgtgcagagctcagcgtgtggccgccagcacctggagccgaccggtacaatcgatatgagaggtccaggtcaagcggactgtgcagttgcgattggtcgtccgttaggggaagttgttaccctcagagtcctggaatcaagcctgaactgcagcgctggtgacatgctcctgctatggggccgcctgacctggcggaagatgtgccgtaaactgctggatatgacctttagtagcaaaacaaacaccttagtggttcgccagcgttgtgggcggccaggaggcggggttttgctccgctatggttcgcagttggcaccggagactttctatcgtgagtgtgacatgcaactgtttggcccatggggcgagatagtcagcccgtctctcagccctgcaacctccaacgcgggcgggtgccgcctgttcattaatgtggccccgcacgccaggattgcgattcatgcactggcaacaaatatgggcgcaggtactgaaggtgcgaatgcttcatatatccttatccgcgacacccacagcctgcgtacaacggcgttccacggtcagcaggtgctgtactgggaaagtgagagctcacaggcagaaatggagtttagcgagggatttttgaaggcgcaggcgagcctgcgtggccagtactggacgctgcagtcctgggttccagagatgcaggaccctcaaagctggaaaggcaaagagggtacg

SEQ ID NO: 237907 - DNA, 4281 bp, Artificial Sequence
  derived and/or modified sequence
atgcatcaacgccacccgagggcgagatgccctccgctgtgcgtcgctggcattctggcatgtggcttcttgctcgggtgttggggcccgtcgcattttcagcaatcatgtctccaggcactggagccacaagcagtgagcagctacttgagcccaggagcgcctctgaagggtcgcccgccgtcccctggctttcagcgacagcgccagaggcaaagacgcgccgccggcggtatcctccatttggagcttctggtggctgtgggacctgatgtctttcaggcccaccaagaggacaccgagaggtacgtgctgaccaacctgaatatcggtgcggagctcctccgggacccgtccctcggtgcgcaatttagagttcacctggtgaagatggtgatcctgaccgaaccggaaggagcaccaaacataaccgccaacctgacctcttcgctgctctcggtgtgcggatggtcccagaccatcaacccggaggacgacactgacccgggacatgcggacctggtgctgtacattacccggttcgacctcgagctcccggacggaaatagacaggtgagaggagttacgcaactgggaggagcctgctccccgacctggagctgcctgatcaccgaggacaccggattcgacctgggagtgaccatcgcccatgagattggtcattcgtttggactcgaacacgatggagccccgggatcgggctgtggaccctcaggacatgtgatggcttcagacggagccgccccaagagcgggacttgcctggtccccgtgttcacggagacagctgctcagcctcctctcagcaggacgggcgcgctgcgtgtgggacccacctcgcccgcagccagggtccgccggacatccgcctgacgctcaaccgggactctactactccgcaaacgaacaatgtcgcgtggctttcggaccgaaggctgtggcgtgtactttcgcacgcgaacaccttgatatgtgccaagccctctcgtgccacactgacccgctggaccaaagctcatgctcccggttgctggtgcccctgctggatggaactgaatgtggagttgaaaagtggtgctccaaaggacgctgccgcagcctggtggagctgaccccgattgccgccgtgcacggacgctggtcatcctggggaccacgctcaccgtgctctcgcagctgtggcggaggagtggtgactcgcagacgccaatgcaacaatccccgcccggcctttggcggtcgcgcctgcgtgggcgccgatctgcaagctgaaatgtgcaacacgcaggcatgcgaaaagacgcagttggagttcatgtcgcagcaatgcgcccgcaccgacggacagccgctcagatcctccccgggaggagcgtccttctaccactggggggccgccgtgccgcactcccagggagatgcgctttgtcgccatatgtgccgggctatcggcgagtccttcatcatgaagcggggagattcgttcctggacggtaccagatgcatgccgagcggaccacgggaagatggcactctgagcctgtgcgtgtcgggctcttgccgcacgttcggatgcgacggaagaatggactcccagcaagtgtgggacagatgtcaggtctgtggaggtgacaattccacttgctccccgcgcaagggctccttcaccgctggacgcgctcgcgagtacgtcaccttcttgaccgtgaccccgaaccttacctcagtctacatcgccaatcacaggcctctgttcacgcatctggccgtccgaatcggaggtaggtacgtggtggcaggcaagatgtccatctcaccgaacacgacctacccatcgctcctggaagacggccgcgtggagtaccgtgtggcattgactgaggatagactgccgcggctggaagaaattcggatctgggggccgctgcaagaagacgcagacatccaggtgtaccgccggtacggagaagaatacggcaatctgactcggcccgacatcacgttcacctactttcaaccgaaacctcgacaagcatgggtttgggccgcggtgcgcggaccgtgctcggtgagctgcggggccgggctgcgctgggtgaactattcctgccttgaccaagctcgaaaggaactcgtggagactgtgcagtgccaaggatctcagcaaccaccggcctggcccgaggcgtgtgtcctggagccgtgcccgccgtactgggccgtgggggacttcggaccatgctcagcgagttgcggcgggggcttgcgggaacggcccgtgcggtgcgtagaagctcagggttccctcctgaagacccttcctccggcgaggtgcagagccggagcccagcaacctgctgtggctctggagacttgcaacccacagccgtgtcctgctagatgggaagtctcagaaccgtcgtcctgcaccagcgcaggaggggccggcctcgctctggagaatgagacttgcgtcccgggagcagacggactggaggccccggtcacggaaggcccggggtcggtggatgaaaagctgccggcacctgagccatgcgtgggcatgtcatgtcctccaggatggggacatctggatgcgacctcagcaggtgagaaagcgccatcgccatggggtagtatcagaactggagctcaagccgctcacgtctggaccccagccgccggtagctgctcagtctcgtgcggccggggactgatggaactgcggttcctgtgtatggattcggcactcagagtgcccgttcaggaagaactttgcggactcgcctcgaagcccgggtcacgcagagaagtctgccaggcagtgccatgccccgcgcgctggcaatacaagctggctgcctgttcagtgtcgtgcggacgcggtgttgtccgacggatcctgtactgcgcaagagcccacggagaagacgacggagaagaaatcctgttggacacccagtgtcagggactgcccaggcctgagccgcaggaagcatgctccctcgagccgtgccctccgaggtggaaggtgatgagcctgggcccgtgtagcgccagctgtggccttggaactgctcggcggtccgtcgcatgcgtccagcttgaccaggggcaagacgtcgaagtggacgaagccgcgtgtgcagcacttgtgcggcctgaggctagcgtcccttgcctgatcgctgactgcacgtaccgctggcacgtgggaacctggatggagtgctcggtgtcctgcggagacggaatccagcggaggagagatacctgcctcggaccgcaagcacaagccccggtcccggccgacttctgccagcaccttccgaagcccgtgactgtgcgcggatgctgggcgggcccgtgcgttggacagggaacgccatcactggtgccccacgaggaagcagcggcaccaggaaggaccactgcaactccagctggcgcgagcctggaatggtcccaggcccgggggctgctgttctcgcctgccccccaaccgcgccgattgctgccgggtccgcaagagaactcagtccagagctcggcttgcggtcggcagcatctggaaccgaccggcacgatcgatatgcgcgggccagggcaagcggactgtgcggtggccattggtcggcctcttggagaagtggtcactctccgcgtgctggagtcctccctcaactgctcagcaggagacatgctgctgctctggggtcggttgacctggaggaagatgtgccgcaaattgctggacatgaccttctcctcaaaaaccaacactctggtcgtcagacaacggtgcggacgcccgggaggaggagtgctcctgcggtatgggtcgcagctggcaccggaaaccttctatcgcgaatgcgacatgcagctgtttggcccttggggagagatcgtgagcccgagcctgtcacctgcaacctccaacgccggcggttgcagactgttcatcaacgttgctccgcatgcccgcatcgctattcacgcactcgctactaacatgggagctggcaccgaaggagcgaacgcgtcatacatcctcatcagagatactcacagtcttcggaccaccgcgttccacggccagcaggtgctgtactgggaatctgagtcctcacaagcggagatggaattctcggaaggattccttaaggcacaggcttccttgcggggccagtactggaccctgcaatcctgggtgccggaaatgcaagacccgcaatcgtggaagggaaaagagggaacc

SEQ ID NO: 237908 - DNA, 4281 bp, Artificial Sequence
  derived and/or modified sequence
atgcaccagaggcacccgcgggctcgctgcccgcctctgtgtgtggcaggaatcctcgcctgcggatttctgctgggatgttggggtccgtctcatttccagcaatcatgcctccaggcattggagcctcaggcagtgtccagctatctctcaccgggagctcctctgaaggggcggccaccgtcaccgggttttcaacgccagagacagaggcaacggcgggccgctggaggaatacttcatctggaactgctggtggctgtcgggcctgacgtgttccaggcgcatcaggaagatactgagcgatacgtgctgaccaacctcaacataggagcagagctcttgagggaccctagcctgggagcacaatttcgggtccacctggtcaagatggtcatcctgactgagcccgagggagccccgaacatcaccgccaacctgacttcatcgctgctgtcggtttgtggttggtcccagacgatcaaccctgaggacgataccgaccctggtcatgctgacctggtcctctacattactcggttcgaccttgagctgccggacggcaatcgccaagtgaggggtgtgacccagctgggaggagcgtgctctccgacttggtcgtgtttgatcaccgaagatactgggttcgacctcggagtgactatcgcgcatgagatcggacactccttcggcttggagcacgacggcgctcccggctccggatgcggaccttcgggtcacgtgatggcaagcgacggagcggcgccgcgcgctggcctcgcctggtcgccctgctcgagacgtcagctcctttcactcctgtccgcaggaagagcccgttgcgtgtgggacccgccgaggccacaaccggggtcagctggacacccaccagatgcgcaacctggactgtactattcagcgaacgaacagtgccgggtggccttcggaccaaaggcagtggcttgcacctttgcccgcgagcatctcgatatgtgccaagccctctcttgtcataccgatccgctggaccagtctagctgttcgcgcctgctcgtgccgctgctggatggaactgaatgtggggtggaaaagtggtgctccaaagggcgctgcaggtccctggtggaactgaccccaattgccgccgtgcacgggagatggtcaagctggggcccgagatcaccatgttccaggtcctgcggtggaggcgtggttacccgccggcgacagtgcaacaaccccagaccggcgtttggagggcgcgcttgtgtcggagccgacctgcaagctgaaatgtgtaacacccaggcgtgcgaaaagactcagctggagttcatgagccaacagtgtgcccggaccgacggacagccgctccgatcctcaccggggggtgcctccttctatcactggggagcggcagtgccacactcccaaggcgatgccctctgtagacatatgtgccgcgccatcggagaatcgtttatcatgaaaagaggggactccttcctggacggcacgcgctgcatgccgtccggaccgcgcgaggacggcaccctctcgctgtgcgtgtccggttcctgtagaaccttcggatgtgatgggcggatggactcccaacaggtgtgggaccggtgccaagtctgcggtggggataactcgacctgcagcccccgcaaaggatcattcaccgccgggagagctagggaatacgtcactttcctcaccgtgacccctaacctgacctcggtgtacatcgcgaaccacagaccgctgttcactcacctcgcagtccgcattggtggacggtatgtggtcgccggaaaaatgtcgatttccccgaacactacttatccttcgctgctcgaggacggaagagtggaataccgggtcgcgctgaccgaagatcggctccctagactggaagaaatccgcatctggggaccactccaagaggatgccgatatccaggtgtaccggaggtacggagaggaatacgggaacctgactagacctgacattaccttcacttactttcaacccaaacctagacaggcttgggtctgggccgccgtgcgcgggccctgctcagtgtcttgcggagctggactgagatgggtgaactattcctgcctggatcaagcccgaaaggaactggtggaaactgtgcagtgccagggatcgcaacagccgccggcgtggcctgaggcatgcgtgctggagccgtgtcctccttactgggccgtcggggactttgggccgtgttcggcttcgtgtggtggagggctgcgggaacgcccggtcagatgtgtcgaggcccagggcagcctgctgaaaaccctgccgcccgcgcggtgccgggccggagcacagcaaccagccgtcgccctggagacttgcaacccgcaaccttgtccggcaagatgggaagtctccgagccttcgtcctgcacgtccgcgggtggcgccggcttggctctggaaaatgaaacttgcgtgccgggagccgacgggctggaggccccagtgaccgaaggtcctggctccgtggacgaaaaactgcccgcgcctgaaccttgcgtcggaatgtcatgtccgccggggtggggacatcttgatgctacctcggccggcgagaaagcaccgtcgccatggggaagcattcggaccggcgctcaggcagcccacgtgtggactccggcagcggggagctgctcggtgtcatgtggacggggactcatggaacttcgcttcctctgcatggactcggcgctccgggtgccagttcaggaggaactttgcggactggcctcaaagccgggctctcgccgggaagtgtgtcaggccgtgccttgcccggcacggtggcagtacaaactggccgcttgcagcgtctcgtgcggaaggggagtggttcggaggatcctgtactgtgcacgcgcccatggggaggatgatggcgaagaaatcctgttggacacccagtgtcagggtttgccgcgccctgaaccccaggaagcatgctccctcgagccgtgcccgcctcgctggaaagtgatgtctctgggaccatgctcggcaagttgtggtctgggtactgcgaggcggtcggtggcatgcgtccaactggatcagggacaggatgtggaagtggacgaagccgcctgtgctgctctggtcaggcctgaggcttccgtcccatgcttgatcgccgactgcacctaccgctggcatgtgggaacttggatggaatgctccgtgagctgtggtgatgggatccaacgccggcgcgacacctgtctggggccgcaggcgcaggccccagtgccggcagatttctgtcagcacctgcctaaaccggtgactgtccggggatgctgggccggaccgtgcgtgggccagggcacgccaagcctggtcccgcacgaagaggccgcagcgccagggcgcactactgccactcccgcaggagcctcactcgaatggagccaggcgcggggactcctcttctcaccagcgcctcagccccgcagacttcttccgggtccgcaagagaactcagtgcagagcagcgcatgcgggcgtcagcacctggaaccgactggaaccattgacatgagaggaccgggacaggcggactgcgctgtcgccattggccgcccattgggggaggttgtcactctcagggtccttgaaagctcgctcaactgttcggctggggacatgcttctcctgtggggtcgcctgacttggcgtaagatgtgccgaaagctcctcgacatgacttttagtagcaagaccaacacccttgtggtccgccagagatgcggaaggcccggcggaggcgtgctgctgcggtacggatcacagcttgctccagagactttttaccgcgagtgcgacatgcagctcttcggaccgtggggtgaaatcgtgtcgccgtccttgtccccggccacttcgaatgccggaggttgccgcctgttcattaatgtggcaccacatgcgcgcatcgccatccacgctcttgcaacgaatatgggagcaggaactgaaggagcgaacgcgtcatacatcctgatccgggatacgcattcccttcgcaccaccgctttccatggacagcaagtgctgtactgggaatcggagtcgtcccaagccgaaatggaattcagcgagggattcctcaaggcgcaggccagcctccggggacaatactggaccctgcagagctgggtccctgagatgcaagatccacaatcgtggaagggaaaggagggcact

SEQ ID NO: 237909 - DNA, 4281 bp, Artificial Sequence
  derived and/or modified sequence
atgcatcagaggcatcccagagctaggtgcccacccctgtgtgtcgctgggatcctggcatgcgggtttttacttgggtgctggggaccctctcactttcagcagagttgtctgcaggcactggagccccaagccgttagtagctacctgtcaccgggagcgcccctgaagggtcgacctccaagccccggttttcaacgtcagagacagaggcagagaagagctgctggtgggatcttgcacctggagttgctagtggccgtgggtccagacgtgtttcaggcccaccaggaggatactgagagatatgtcttgactaacctgaacattggcgccgaactgctccgagatccctccctgggggcccaattcagagtacacttggtaaagatggtaatacttactgagcctgagggggcgcccaacatcacagccaacctgacttccagcctgctgagtgtttgcgggtggtcccagaccattaaccctgaggatgacaccgatcctggtcacgcggacctggtcctgtacatcacccgatttgacttggagttaccagatgggaatcggcaagtccgaggggtgacacagttgggtggggcctgctcccccacctggtcctgcctgatcaccgaggacacgggctttgacctgggcgtgaccattgctcatgaaattggacactcttttgggctcgaacatgatggggctcctgggtcaggctgcgggccgtctggacatgtgatggcgtctgatggcgctgccccccgtgcaggcctcgcttggagcccgtgcagcagaaggcagcttctgtcactgctgagcgccggacgtgctcggtgtgtgtgggacccccctaggcctcagcccggctctgccggccatccacccgacgctcaacccggactgtactatagcgcaaacgagcagtgtcgtgtggccttcggaccaaaggctgttgcctgtactttcgcaagagaacatctggacatgtgccaggccctcagctgtcataccgaccctttggatcagtctagctgtagcaggcttcttgttccccttttagatggcaccgaatgtggcgtggaaaaatggtgcagcaaaggccggtgccgctccctggtcgagctgacaccaatcgctgccgtgcacggtagatggtcttcctggggtccccgctccccttgctccaggtcctgcggagggggcgtggttacgcgcagacgtcagtgtaacaatccgcgacccgcctttggcggaagggcctgcgtgggggccgacctccaagcagaaatgtgcaacacccaggcttgtgagaagacacagctggagtttatgtcccagcaatgtgctagaactgacggacagcccctacgttcctcacctgggggcgcgtctttttaccactggggcgccgcagtccctcactcccaaggcgatgctctgtgtaggcatatgtgtagagcgatcggggaaagttttattatgaagcgaggggactcattcctggatggcacccgttgtatgccgtccggacctcgcgaggacgggaccctgtctctttgcgtgtccggatcttgccgaacgtttggttgcgatggaagaatggacagccagcaggtgtgggaccggtgccaggtctgcgggggcgataactccacatgctctcctagaaaagggtcttttaccgcgggtcgcgcgcgggagtacgttacgtttctaactgtcactcctaaccttacatccgtctacattgccaatcatcggcccctgttcacacacctcgctgtccgcataggtggacgctacgtggtggccggcaagatgagcatctctccaaatacaacctaccccagccttttagaggacggaagggtagaatacagagtggcccttaccgaggatagacttccaagactcgaggaaataaggatttggggccctttgcaggaagatgctgacattcaagtgtatagaagatacggagaggaatacgggaacttaacccgacccgacatcacattcacatactttcaacccaaaccccgacaagcttgggtgtgggcagccgtgagaggaccttgctcggtctcatgcggcgcaggcctccgctgggttaactacagctgtctggatcaggcgaggaaggagttagtagagacagtgcagtgccagggtagccaacaacctcccgcatggcctgaggcatgcgtcttagaaccatgtccaccttattgggccgtgggggattttggcccgtgcagcgcctcttgcggcggcggactcagggaaagacccgtgcgatgtgtagaagcccaaggctctcttcttaaaacactgcccccagctagatgccgtgcaggcgcacagcagccggccgttgccctggagacatgtaacccacagccctgccccgctcgctgggaggtgagcgagccttctagttgtacctccgccggcggcgccgggctcgccctggagaacgagacttgcgtacctggagctgacggcctggaggctccggtaactgaggggcctggctctgtggacgagaaactgcctgcccccgaaccctgcgtgggcatgtcttgtcccccgggctggggccacctggacgcaacttccgcgggcgagaaagcacctagcccttgggggagcattcggaccggcgcgcaagcagctcatgtatggacccctgccgcaggctcctgcagcgtctcatgcggacgaggtctaatggaattgagattcctatgcatggacagcgcactgcgggtgcctgtgcaggaagaactgtgtggcctcgcttcaaaacccgggtcgcgccgggaggtctgtcaggcagtcccatgccctgccagatggcagtacaagctggcagcatgctcagtgagttgtggacgcggtgtggtgcggcggatactgtactgtgccagggcccatggagaggatgatggagaagagatcctgctggatacccaatgtcaggggttaccaagaccggaaccgcaggaggcttgctctctcgagccatgtcccccaagatggaaagtcatgagtctcggaccctgttccgcctcttgtggactgggaaccgcacggcgcagtgtggcctgcgtgcaacttgatcagggtcaggacgtggaagtcgacgaggctgcttgcgcagccctcgttcggcctgaagctagcgtgccctgtctgatcgcagattgcacttaccggtggcacgttggcacgtggatggagtgttccgtatcttgcggggacgggatacagcgtcgcagggacacgtgtctcggcccacaagctcaggcaccggtgccggccgacttctgtcagcatcttcctaagccagtgaccgttcgagggtgttgggctggcccatgcgtcggacaggggacccccagcctggttccccacgaagaagctgccgcccctggacgcacaacagcgactccggccggcgcgagcctggagtggtcccaggcacgtggattgctttttagccctgcgccccagccgcgccggctgctccccggtccccaggagaattctgtgcagtctagcgcctgcgggcgtcagcatcttgagcctaccggcactatagacatgagaggccctggacaggcagactgcgccgtcgcaatcgggagaccgcttggtgaggtagtcacgctcagagtgctggagagctctcttaactgttccgcaggcgacatgctgctgctttggggtcgcctcacctggagaaagatgtgtcgaaagctgttagatatgaccttcagcagtaagaccaatactttagtggtccgacagcggtgtggccggccagggggaggtgtgctgcttagatatggatcccagctagcccctgaaacattttatagggagtgcgacatgcagctgtttggcccatggggagagatagtcagcccctccctgagtccagcaacgtcaaacgcgggaggatgtcgactctttatcaacgtggccccccacgcccgcatagcaatccatgcgctggcaactaatatgggtgccggaacggagggggccaacgccagctacatcctcatacgggacacacacagcctccgtacaactgctttccacggacagcaagtcttatattgggagtctgagtcatcccaggcggaaatggagttttccgagggtttccttaaagcacaggcaagcctgcggggtcagtattggacacttcagtcttgggtgcctgaaatgcaagacccacagtcttggaaagggaaagaagggacg

SEQ ID NO: 237910 - DNA, 4281 bp, Artificial Sequence
  derived and/or modified sequence
atgcaccaacggcatccaagagcgcggtgtcctccgctttgcgtggccggaatactcgcctgtggctttcttcttggttgttggggtccatcccatttccagcaatcatgtctgcaggcactggagccacaagcagtgtcatcctatctttcaccgggggcacctcttaaaggtagaccaccctcgcccgggtttcagcgtcagagacagcgacagagaagggcggccggagggatcctgcatctggaacttttggtggcggtcggacctgacgtgttccaagcgcaccaggaggatactgaacgctacgtgctgaccaacctgaacatcggagcagagcttcttagggatcccagcttgggcgcacaatttcgggtgcatctggtgaagatggtgatccttaccgaaccagaaggtgcacccaacattacggcaaaccttaccagctcacttctctccgtctgtggttggtcccagactattaaccctgaagatgatactgatccgggtcatgccgacctcgtcctgtacatcactcgcttcgatctggagcttcctgatggaaacagacaagtgcgcggtgtgacccagcttggtggcgcttgctccccaacctggtcgtgccttataaccgaggacactgggttcgatctcggagtgacgattgcgcatgagattggtcactcctttgggcttgagcatgatggcgctccaggaagcggatgtggaccttcaggacacgtgatggcatcagacggtgcagcgccgagagcaggcttggcatggtccccgtgttcccgtagacagttgctgagccttctttccgcaggtcgagctaggtgcgtgtgggaccctccaagaccgcaacccggatctgcaggacatccccctgatgcacagccaggactgtactactcggcaaatgagcagtgccgcgtggccttcggaccaaaagcagtcgcatgtacttttgcaagagaacatcttgatatgtgtcaggcattgagctgtcatactgaccccttggaccaaagctcatgttcaagactcctcgtccccctgcttgacggaaccgaatgcggagtggaaaaatggtgctccaaaggtcgctgccgctcgctggtcgaactcacccctatcgcagcagtccacgggcgttggtcgtcctggggacctcgcagcccctgttcaagatcctgtggcggaggagtggtcactcgcagacggcaatgcaataaccctcggcctgcgtttggaggtcgcgcatgcgtcggagcggatttgcaagcagaaatgtgtaatacccaagcgtgtgagaaaacccaacttgaattcatgagccagcagtgtgcccgcactgatggacaaccactcaggtcgtcgcccggcggtgcgtcgttttaccactggggagcagcagtgcctcattcccaaggcgacgccctctgccgccatatgtgtcgcgcgataggagagagcttcatcatgaaaagaggtgactcgtttcttgacggtacccgttgcatgccatccggacccagagaagatggaactctgtccctctgtgttagcggatcgtgtagaacctttgggtgtgatggacggatggactcgcagcaagtgtgggacagatgtcaagtgtgtggtggtgataactcaacgtgttcacctaggaagggatcatttaccgcaggccgcgctagagagtacgtcacgtttctgactgtgactcctaaccttacgtccgtgtatatcgccaaccataggcctctctttacccaccttgcagtgagaatcggtggacggtacgtggtggcaggaaagatgagcatttccccaaacaccacttacccatcgctgcttgaagatggacgcgtggagtacagagtggctcttacggaagatcggctcccccgcctggaggaaataaggatttggggaccacttcaagaagatgcagatattcaagtctaccgtaggtatggcgaggaatacggaaatcttacccgacctgatattaccttcacctactttcaaccaaaaccacgccaagcatgggtttgggccgcagtccggggtccctgctccgtctcgtgtggagccggactgcgatgggtgaattactcgtgtctggatcaagccaggaaggaactggtcgagactgtccagtgtcaaggatcccaacagcccccagcatggccggaagcgtgtgtactggagccctgtccaccttactgggcggtgggagattttggcccttgtagcgcaagctgcggcggaggtctgagagagcgacctgtgcgttgcgtggaagcccaaggttcactgcttaagaccctcccccctgctcgatgcagggcaggtgcccagcagccagccgtggcacttgaaacgtgcaacccgcagccatgtccagcgagatgggaagtctctgaaccttcaagctgtaccagcgcggggggagcaggacttgcacttgaaaatgagacttgcgtgccaggtgccgacgggctggaagcacctgtcactgagggacctggatctgtcgacgagaaactgcccgcaccagagccatgtgtgggaatgtcctgtccacccggatggggacacctcgatgcaacctcagctggagagaaagccccaagcccttggggatcgatccgtactggagcacaggcagctcatgtgtggacccccgcagcaggcagctgttcggtcagttgtggtcgcggactgatggaacttcggttcctgtgcatggactccgcccttagagtgccagtccaagaagaactctgcggtctggcctccaagcctggatctaggagagaagtctgtcaagccgttccctgtcctgcaaggtggcagtacaagctggcagcttgttccgtgagttgcgggcgaggtgtcgtgcgcagaattctgtactgtgcaagagcacatggagaggacgatggagaagaaattcttctcgatactcaatgtcagggacttccaagacctgaaccccaagaggcctgtagcctcgaaccctgtcctccccggtggaaggtgatgagcttgggtccttgctccgcctcatgcggactgggaaccgcaagacgctcggtggcatgtgtgcaacttgatcaaggtcaggacgtggaagtggatgaggcagcatgtgcggcacttgtccgccccgaagccagcgtgccttgtcttattgctgactgtacctaccgctggcatgtgggaacttggatggaatgctctgtgtcctgtggagatggaattcagagacgacgtgatacctgtcttggtccacaggcacaagcgcccgtcccggccgacttttgtcagcatcttccaaaacctgtgaccgtgcgtggatgttgggcgggtccttgcgtcggacaaggcaccccttcccttgtgcctcacgaagaagcggcagcacctggtagaactactgcaacgccagcgggcgcaagccttgaatggtcacaggccagagggctgctgttttccccggcacctcaaccaaggagactcctgccgggaccacaagaaaactcggtgcagtcgtcggcgtgtggacgacagcatcttgaacccacggggactattgacatgagaggtcctggacaggcggattgcgccgtggcaattgggcgaccactcggggaagtggtgactcttcgcgtgctggaatcgtccctgaattgttcggccggagatatgctgcttttgtggggaaggcttacctggcggaaaatgtgtagaaagttgctcgatatgaccttcagcagcaagaccaataccctggtcgtgagacaaaggtgtggtaggcctgggggaggcgtgctcctcagatacggttcccagctcgctccagaaaccttttaccgtgaatgtgacatgcaactctttggcccatggggggagatcgtgtcaccttccctgagccctgccacctcaaacgccggagggtgtaggctgttcattaacgttgctccacatgcaaggattgcgattcacgcactcgccaccaacatgggtgccggaactgaaggtgccaacgcgtcttacatcctgatcagggatactcattcgcttcgtaccactgcatttcatggacaacaggtgctgtattgggaatcggaaagttcgcaagcagagatggaattttcagagggatttcttaaagcacaggcttccctgcgcggacagtactggacgctgcaatcgtgggtgcctgaaatgcaggatccacaaagctggaagggaaaagaaggtacc

SEQ ID NO: 237911 - DNA, 4281 bp, Artificial Sequence
  derived and/or modified sequence
atgcatcagcggcatccacgcgcgcggtgtcctcccctctgtgtcgcgggcatccttgcgtgcgggtttttgctggggtgttgggggccctcccattttcagcagagctgcctgcaagcgcttgagccgcaggccgtgtcatcatacctttcaccgggagcccctctgaaaggtcgcccgccatcccctggcttccaaaggcaacggcaacgccagcggcgggctgctggcggcatccttcacctggagctgcttgttgcagtggggccggacgtgtttcaagcccaccaggaagatacggaaagatatgtgctgaccaacctcaacatcggggccgaactgcttcgggaccctagcctcggagcccaattcagagtgcatcttgtgaagatggtgatcctgaccgaacccgagggagcgccaaatatcaccgccaacttgacctcatcccttctgtccgtctgcggatggtcccaaaccatcaacccggaagatgatactgatccaggtcatgctgacctcgtcctctacatcacccgatttgatttggaactgcccgacggaaacagacaggtccgcggcgtcacccaactgggcggagcctgtagtccgacgtggagctgcctgattacggaggacaccgggttcgatctcggagtgaccatcgcgcatgagattggacactcgtttggtctggaacatgacggtgcaccgggatcggggtgcgggccatcagggcacgtgatggcgtcggatggcgcagcccctcgcgccggactcgcctggagtccgtgctcgcggcgacagctcctctccctgctcagcgccggtcgggcccgctgcgtgtgggaccctcctcgaccacagccgggttcggcaggacacccgcctgacgcccaaccgggactgtactactccgcgaatgaacagtgccgtgtggcattcggtccaaaggccgtcgcctgcactttcgcccgtgagcacctcgacatgtgccaggcgctttcctgccacaccgacccactggatcaaagctcgtgctcgaggctgctggtacccctgctggacggaaccgaatgtggagtggagaagtggtgctccaagggtcgatgccggagcttggtcgagctgactcccatcgcggcagtgcacggacggtggtcatcctggggaccaagatccccatgctcgaggtcttgtggcgggggagtggtcactcggcgacggcaatgcaacaacccaagaccggccttcggaggacgggcatgcgtgggagcagatctgcaagccgaaatgtgtaatactcaggcctgcgagaaaactcagctggagtttatgagccagcagtgtgcgcggaccgacggacagcccctgagatcatccccgggaggcgcctcattctaccactggggtgcggccgtgccgcactcgcaaggcgacgcactgtgccggcatatgtgccgagcgatcggagaatctttcatcatgaagcggggtgatagcttcctggatggaaccagatgtatgccgtcggggccgagagaggacggtaccctgtcgctttgtgtgagcggctcatgcagaaccttcggatgcgacggtcgcatggactcacagcaggtgtgggacagatgccaagtgtgcggaggtgacaattcaacctgctcgcctcgcaaggggtcgtttaccgccggccgcgcgcgggaatatgtcactttcctgacggtgacccccaaccttactagcgtctacatcgcaaaccaccgcccacttttcacccacctggccgtccggattggtggacgttacgtggtggcagggaagatgtctatcagcccaaatactacctacccatccctgctggaggatggtcgggtcgaataccgagtggcactgacggaggaccgcctcccccgcttggaggaaatcaggatctggggtccccttcaagaagatgcagatattcaggtgtacagacgctacggagaggagtacggaaatctcacgcgcccggacatcaccttcacctacttccagcctaaaccacggcaggcttgggtgtgggcagccgtccgaggcccgtgcagcgtgtcctgcggagcaggtttgcgctgggtgaactactcgtgccttgaccaagcacgcaaggaactggtggaaactgtccagtgccagggctcgcagcagccacccgcctggccggaagcctgtgtccttgagccctgcccaccttactgggctgtgggcgattttggaccttgctccgcctcctgtggaggaggtctgcgcgaacgcccagtacgctgtgtcgaggctcagggatccctcttgaaaactttgccgccagctaggtgcagggcgggagcccagcaaccagccgtcgcgctggagacttgcaatccccagccttgccctgcccggtgggaagtctcggaaccaagctcttgcacctcagccggcggagcgggcctggcgttggaaaacgagacgtgcgtgccgggcgcggacggactcgaggccccggtcacggaggggcccggttcggtcgacgaaaagctgccggcccctgaaccatgtgtgggcatgtcgtgtccgcctgggtggggccatctggatgccacttcggcgggcgaaaaagcgccgtctccgtgggggtcgatacgcactggagcgcaggccgcccacgtctggactccggctgcgggctcttgctcggtgagctgtggtaggggtctgatggaactccgctttctgtgcatggactcagctctcagagtgcccgtgcaggaggaactctgcggactcgcgtccaaacctggttcccgccgggaagtctgccaggcagtgccttgtcccgcgcggtggcagtacaaactcgcagcttgttccgtgtcatgcgggcggggcgtggtccgtagaatcctctactgcgcacgcgcacacggagaggacgacggcgaagagatcctgctggacacccagtgtcaaggactcccacggccggaaccgcaagaggcatgttccctggaaccgtgtccgccaaggtggaaagtcatgtcgctcggaccgtgcagcgcttcctgcggccttggcactgctcgccgcagcgtcgcgtgcgtgcaactggaccagggtcaagacgtcgaagtggacgaggccgcgtgtgcagccctggtcagaccggaagcgtccgtcccgtgtctgattgcagactgcacttaccgctggcacgtgggaacctggatggagtgctccgtgagctgcggagacggaatccagaggcgccgcgatacttgtctgggccctcaggcgcaagcccctgtccctgccgacttctgtcagcacctcccaaagcctgtcaccgtgcgcggatgctgggccggaccgtgcgtcggccaagggaccccttctctcgtgccgcatgaggaagccgcagcgcccggacggacgaccgccaccccggcgggcgcgtcgctggagtggagccaggcccggggactcctcttctcaccggctccgcaaccaaggcggctgctgcccgggccacaggagaatagcgtgcagagctccgcgtgcgggcggcaacacctcgagcccaccggtactatcgacatgaggggcccaggccaagcggactgcgcagtggctatcggtcgcccactgggggaagtggtcactctcagagtcttggagtcctccctgaattgtagcgccggagatatgttgctcctttgggggagactgacgtggagaaaaatgtgcagaaagttgctggatatgaccttctcgagcaagactaatactctcgtcgtcaggcagcgctgcggacggcccggtggaggagtgctgttgcgctacggatcccaacttgccccggagactttctatagagagtgtgatatgcaactgtttggcccgtggggagagatcgtttccccgtcgctgtccccagcgacttcgaacgcgggcggatgccggctgttcattaacgtggcgccgcatgccaggatcgccatccacgcccttgcgaccaacatgggtgctggcactgaaggcgctaacgcatcgtacatcctcattagagatacccactcgctgcgaaccaccgctttccatggacagcaggtcctttactgggaaagcgagtcgtcgcaggctgagatggagttttcagaggggtttctgaaggctcaagcctccctgagaggtcaatactggactctgcagtcatgggtgccagaaatgcaggacccccaatcctggaagggcaaggaaggaacc

SEQ ID NO: 237912 - DNA, 4281 bp, Artificial Sequence
  derived and/or modified sequence
atgcaccagcgccacccgcgggctcgctgcccgccactgtgtgtcgcgggaatcctggcctgcggcttcctgctcggatgctggggaccaagccatttccagcaatcatgtctgcaagctctggaaccacaagctgtgtcgtcgtacctgtcaccgggggccccgctgaagggacgaccaccgagccctgggtttcagagacagcggcagcgccagcgccgcgccgccggtgggattctccacctcgagctcctggtcgccgtgggccccgacgtctttcaagcgcaccaagaggataccgagagatacgtcttgaccaatctcaacatcggagcggagctgctgcgagatccatctttgggtgcccagttcagagtgcatctggtcaagatggtcattctgacggagcccgagggggcaccgaatatcaccgcgaaccttacctccagcctgctctcagtctgcggctggtcgcagactattaacccggaggacgacaccgacccaggccacgccgatctcgtgctttacatcacgaggttcgatctcgagcttccggacgggaatagacaggtgcgcggcgtgacgcagcttgggggcgcctgctctccgacctggtcttgcctgatcaccgaagatacgggattcgaccttggagtgaccatcgcgcatgagatcggccactccttcgggcttgaacacgacggagcacctgggtcaggatgtggcccgtcaggacatgtcatggcatccgatggagccgcaccaagggccggcctggcctggagcccatgctccagacggcagctgctctcccttctctcagcaggtagagcacgctgcgtgtgggacccgccaagaccgcagccgggaagcgccgggcacccaccagacgcacagcctggactgtactactctgccaacgagcagtgccgggtcgccttcggacctaaggccgtggcgtgcacgttcgcccgcgagcatctggacatgtgtcaagccctgtcctgccacactgacccacttgaccagagctcgtgctcccgccttctggtgccactgctcgacggcaccgagtgcggagtggaaaagtggtgcagcaaaggacgctgcagatcgctggtcgaactgaccccgatcgctgcagttcatggaaggtggagctcatggggaccgcggtcgccttgttcaagatcttgtggaggcggcgtcgttactagacgacggcagtgtaataacccacgacccgcctttggaggacgcgcttgtgttggagcggaccttcaagctgaaatgtgtaatacccaggcttgtgagaaaacgcagctggaattcatgtcacagcagtgtgctcgcaccgatggccagcctctgagatcctccccgggaggcgcttctttttaccactggggagccgcagtgcctcattcccaaggtgacgcgctctgtaggcacatgtgcagagcgatcggtgaatcgttcatcatgaagcgcggggactcgttcctggacgggacccgctgcatgccttcgggaccgcgcgaggacggaactctctccttgtgcgtgtccggatcctgccgcaccttcggatgcgatggacggatggattcccagcaagtgtgggatcggtgccaggtgtgcggcggagataactccacgtgctcccctcgcaaaggatccttcaccgcgggacgcgcgcgggaatacgtgaccttcctgactgtgactccgaatctgacttcggtctacattgctaatcatcgccctctcttcactcatctcgctgtcaggatcggaggccgttacgtggtcgctgggaaaatgtccatctcgcctaacactacctacccaagcctccttgaagatggacgggtcgagtaccgggtcgctctgaccgaggacaggctcccgcgcttggaagagattagaatatggggaccgctgcaggaagatgcggatatccaggtctaccggcgctacggcgaagagtatggaaacctgactcgcccggatatcactttcacgtacttccagcctaagccacgccaggcatgggtgtgggccgcggtccgggggccttgctccgtgagctgcggggcaggactgcggtgggtgaactacagctgtttggaccaggcgcggaaagaacttgtcgaaaccgtgcaatgccaaggatcgcaacaaccgcccgcgtggccggaggcatgcgtccttgaaccttgtcccccttactgggcagtgggagatttcggtccctgttcggcttcctgcggcggaggactgcgcgagcgcccagtgcggtgtgtggaggcccaaggatcgttgctgaaaacgctgccaccggccagatgccgcgcaggggcccagcaaccggccgtggcccttgaaacctgcaatccccagccgtgcccagcgagatgggaagtgagcgaaccctcatcgtgcactagcgcaggaggagcaggcctggctctggagaacgaaacttgtgtgccaggtgcggatggtctggaggcccccgtcaccgaaggacctggctcagtggatgaaaagctgcccgccccggagccctgcgtcggaatgagctgcccgccgggatggggacacctggatgcaaccagcgcgggtgagaaggccccgtccccgtggggctccatccgcactggtgcccaagcggcccacgtgtggaccccagcggcgggaagctgttcggtttcttgcggaagaggcctcatggagctcagattcctgtgcatggactcagccctgcgcgtgcctgtgcaagaagaactgtgcggactggcaagcaaacctggatcgcgccgggaggtgtgccaagccgtcccctgccccgcccgctggcaatacaaactggcggcctgcagcgtgtcctgtggccggggagtggtgcgcaggattctctactgcgcacgcgcccacggtgaggatgatggggaggagatattgcttgacacccaatgccagggactcccccgcccggaaccacaagaagcctgctcgctggagccatgcccgccacggtggaaggtgatgtcgctcggtccatgcagcgcttcatgcggactgggaaccgccaggcgctccgtggcctgcgtgcagctggatcagggacaggacgtggaagtggacgaagccgcttgcgctgccctcgtcaggcccgaagcctccgtgccgtgcctgatcgccgattgtacctaccgctggcacgtgggaacttggatggaatgcagcgtctcatgcggagacggaatccaaaggagacgcgacacctgcctcggcccccaagcacaagcgccagtgccggcggatttctgccaacatttgcctaagccggtgaccgtgaggggttgctgggcgggaccatgcgttggacagggaaccccatcactggtgccgcacgaggaagcagccgcccctggtcggactactgcaactccagcaggcgccagcctggaatggtcgcaggcaagaggcctcctgttctccccggccccgcagccgaggagattgctgcccgggccacaggaaaactccgtgcagtcgtccgcctgcggccggcagcacctggaaccgaccgggactatcgacatgaggggcccaggtcaggcagactgtgccgttgcgatcggacgtccgctgggagaagtcgtgactctgcgcgtgctcgaatcgagcctgaattgctctgctggagacatgctgctgctttggggccgcctcacctggcggaagatgtgccgcaaactccttgacatgacgttttcatcaaaaaccaatactctggtggtgagacagaggtgcggccgaccaggtggaggcgtgctcctgcggtatggcagccagctcgctcctgaaaccttttaccgagaatgtgatatgcaactcttcgggccgtggggggaaatcgtctccccttccctgtcgccggctacctcaaatgccggaggatgccgccttttcatcaacgtggcaccgcacgccaggatcgcaatccatgctctggccaccaatatgggagcggggaccgaaggagccaacgcctcctacatcctcattagggatactcattcgctgagaaccactgctttccacggacaacaggtcctgtactgggagagcgagtcctcgcaagccgaaatggagttctcggaagggtttctcaaggcacaggcctctttgcggggacagtactggaccttgcagagctgggtgccggagatgcaggacccgcaatcgtggaagggaaaggaaggaact

SEQ ID NO: 237913 - DNA, 4281 bp, Artificial Sequence
  derived and/or modified sequence
atgcatcagaggcacccacgcgcacgttgtcctccactgtgtgtggcagggattttggcgtgtggcttcttgctaggctgttggggaccatctcactttcagcagtcctgcctccaggccctagagccccaggcggtttcatcgtacttgtctcccggtgcgccactgaaaggcagaccgccttctccaggattccaacgccagaggcagaggcagcggcgggcagccgggggcattctccaccttgagttactggtcgccgtaggtccggacgtattccaggctcatcaggaggacacagaaaggtacgtcctcacaaatctaaacattggcgctgagttgctgagggacccttcacttggcgcacagtttagagtccacctcgtgaaaatggtcatcctcaccgaacccgagggggcgcctaacattacagccaatctcaccagtagcctgctcagcgtgtgcggatggtctcagaccataaaccctgaggatgatacagacccggggcacgcagatctggttttatacattactcgctttgatctagaactgccggacggaaatcgccaggtgcggggcgtcacacagctcgggggagcctgctctcccacatggtcctgcttgatcaccgaggatacaggcttcgatctgggcgtaacaatagcacacgaaatcggacattcctttggtctggagcatgacggagcacccggctccggatgtggacctagcggccacgtgatggcatcagatggggcagcaccccgggccggcttagcttggagcccatgttcaaggcgtcagctcctaagccttctctccgccgggcgggcacgctgcgtgtgggaccctcctcggcctcagccgggctccgccggacaccctccggacgcgcaaccaggcctgtactatagcgccaatgaacagtgccgggtcgcatttggccccaaggctgtggcatgtactttcgcgagagagcacttggatatgtgtcaggcgctctcctgtcacactgacccacttgaccagagctcctgttccagactgctggtgcccctgcttgatggaacagagtgtggggtcgagaaatggtgctctaagggacgttgtcgaagcctggtagagttaacccctatcgcagccgttcatggccggtggagttcatggggacctagaagtccctgctcgcgatcatgtggagggggcgtcgtgacacgcagacgccagtgcaacaacccgaggcccgcgtttggagggcgggcctgtgtgggagcagacctgcaggcagagatgtgcaacacacaggcatgcgaaaaaactcagcttgagtttatgagtcagcagtgcgcgaggaccgacgggcagcctctgcgctcttcaccaggcggggcaagtttctatcactggggcgcagcagtcccacatagccagggcgatgccctgtgccggcacatgtgccgcgccatcggcgagtctttcatcatgaagcggggggacagcttcctagacgggactagatgcatgccaagcggcccacgggaagacggtacattaagtctgtgcgtgagtggtagttgtaggaccttcgggtgtgacgggcgtatggactcccaacaggtgtgggatcgttgccaggtttgtgggggggataacagtacctgttctcccagaaagggttcctttaccgctggtcgagcaagagaatatgtgaccttcctaaccgtgactccgaacctgactagcgtgtatatagccaaccacaggcctcttttcacacatctggcagtgcggatcggaggtaggtacgtcgtagctgggaaaatgtccatcagtcctaacaccacctacccatcacttttggaggacggacgggtcgagtatcgggttgcactcactgaggataggctgcccaggctggaggaaatcagaatctgggggcccctgcaggaggacgcagacatacaggtgtatcgccgctacggggaagagtacggcaacctgactcgccctgacataacttttacatacttccagcctaagcctcggcaggcctgggtatgggctgctgtgagggggccctgcagtgtctcttgcggagccggcttaaggtgggtgaactactcgtgcttggaccaggcccgaaaggagcttgtcgagactgttcagtgccaggggagccagcagcctcccgcctggccggaagcttgcgttctggagccctgtcctccatattgggccgtgggggactttggaccttgttctgcatcttgcggtggcggattgagggaaagaccagttcgttgcgtggaagcacagggttctctgctgaaaaccctgcccccagctaggtgtcgtgcaggagctcagcaaccagccgtcgcactagagacctgcaacccacagccttgccctgcacgatgggaggtttcagagccctcctcttgtacttccgccgggggtgctggcctggcactcgaaaatgagacttgcgttcccggcgctgacgggttagaggcacccgttactgaaggcccgggcagcgtcgacgagaagttgccggcgcctgagccctgcgtgggtatgtcttgtcctcccggctggggccacttagatgccaccagtgcaggggaaaaggcaccgagtccctggggaagtattagaactggcgcccaggcagcccatgtttggactccggccgccgggtcctgctccgttagctgtggacgtggcctgatggaattacgattcctgtgtatggatagtgcactccgagtccctgtgcaggaggagctgtgtggtctggccagtaagcctggcagtcgacgcgaggtgtgccaggcagtcccatgccccgccaggtggcagtacaaacttgccgcctgctccgttagttgtgggagaggtgtcgtacgccgaatcctgtactgtgcccgagcgcatggtgaagatgacggcgaagaaatactccttgacacccaatgccaggggttaccccgaccagagccgcaagaggcctgtagcctcgagccctgccctccacgctggaaagtcatgtccctgggcccttgcagcgctagctgcggcctcggaaccgccagacgatctgtggcttgtgtccagctggaccaaggccaggacgttgaggtggatgaggccgcatgcgccgccctcgtccgacctgaggcatctgttccttgcttaattgcagactgtacctatcggtggcacgtcggcacctggatggagtgtagtgtgtcatgcggagacggtatccagcggaggcgggacacctgcctaggtccgcaagcgcaagcaccagtgcccgcagatttctgtcagcacctgcccaagccagtgacagtgcgcggctgttgggccggaccgtgtgtgggccaggggacccctagtttagtaccacacgaggaggccgccgctcccggccgtacaacagctactccggcaggagccagcctggaatggtcacaggcccgcgggcttttattcagtccagcccctcaacctcgtcgtcttctgccagggcctcaagagaactccgtacagtcaagtgcgtgcggccgtcaacacttggaacctactggaaccatcgatatgcgggggcccggacaggccgattgcgcagtagcaattggacgccccctcggtgaggttgtaacactccgggtactggagtccagtctgaattgttcggctggtgacatgctgctcctgtgggggcggttaacctggcggaagatgtgtcggaaactcttagatatgactttttcatctaagacaaacacactcgtcgtaagacaaagatgcgggcggcccggtgggggggtcctgctgcgctacggaagtcagctcgcccccgagactttttatagagaatgcgatatgcaactcttcgggccatggggcgagatcgtctccccatccctgtccccggctacgagcaacgccggaggctgccgcctcttcattaacgtagccccacatgcacgcatcgccattcacgccctggctactaatatgggagccggaaccgagggcgccaacgcttcgtacatcttgataagggacacccatagcctgagaacgaccgcatttcacgggcagcaggtcctgtattgggaaagcgagtcatcgcaggctgaaatggagttctccgaagggtttcttaaggcccaggcctcccttaggggtcagtattggactctgcagagttgggtgcccgaaatgcaagaccctcaatcttggaaggggaaagagggtaca

SEQ ID NO: 237914 - DNA, 4281 bp, Artificial Sequence
  derived and/or modified sequence
atgcaccaacgtcatcctagagcaagatgtccaccactttgtgtagctggaattttagcatgtggatttcttcttggttgttggggaccatcacattttcaacaatcatgtcttcaagctttagaaccacaagctgtatcatcttatttgtctccaggagcacctttaaaaggtagaccaccatctcctggatttcaacgacaaagacaaagacaaagaagagctgctggaggaatattacatttagaacttttagttgcagttggacctgatgtttttcaggctcatcaagaagatactgaaagatatgtattgactaatttaaacataggggctgaattacttcgagatccaagtttaggagctcaatttcgtgttcatttggttaagatggtcattcttacagaacctgaaggagcacctaatataactgcaaatttaacttcatcacttctatcagtttgtggatggagtcaaactattaatccagaagatgatacagatccaggacatgctgatttggttctttatattacaagatttgatcttgaacttccagatggtaatagacaagttagaggagtaactcaattaggaggagcatgttcacctacttggtcatgtcttattactgaagatacaggattcgatttaggagtaacaatagctcatgagattggacatagttttggtcttgaacatgatggagcaccaggttcaggatgtggaccatctggacatgtcatggcaagtgatggggctgcaccacgtgctggtctagcatggtcaccatgttcaagaagacaacttttgtcattattaagtgcaggtcgagctagatgtgtttgggatcctccaagaccacaaccagggtcagctggacatcctcctgatgcacaaccaggactttattatagtgctaatgaacaatgtcgagttgcctttggtccaaaagcagttgcttgtacatttgctagagaacatttagatatgtgtcaagcattatcatgccataccgatccattagatcaatctagttgttctcgtttacttgttccattattggatggaactgaatgtggagttgaaaaatggtgttctaaaggaagatgcagatcattagttgaattaacaccaatcgctgcagtccatggaagatggagtagttggggacctcgtagtccatgtagtagatcatgtggtggtggagtagttacacgtagaagacaatgtaataatccaagaccagcttttgggggaagagcttgcgtaggtgctgatttacaagctgaaatgtgtaatacccaagcttgtgaaaaaacacaacttgaattcatgtctcaacaatgtgcaagaactgacggacaacctcttagatcatcccctggtggagcatcattttatcattggggtgctgctgttccacattcacaaggagatgctctttgtagacatatgtgtagagctattggtgaaagttttattatgaaaagaggagattcatttttagatggaactagatgtatgccttctggaccaagagaagatggaactttaagtttatgtgtttcaggatcctgtagaacttttggatgtgacggacgaatggattctcaacaagtttgggatagatgtcaggtatgtggtggggataatagtacatgtagtccacgtaaaggttcatttactgcaggaagagctagagaatatgttacatttcttactgttacacctaatcttacttcagtatatattgctaatcatagaccattattcacacatttagctgtcagaattggtggtagatatgttgttgctgggaaaatgagtattagtccaaatacaacatatcctagcttattagaagatggaagagttgaatatagagtggcacttactgaagatagattaccaagattagaagaaataagaatttggggacctcttcaagaagatgcagatattcaagtttataggagatatggagaggaatatggaaatttaactagaccagacataacttttacttattttcaaccaaagccaagacaagcatgggtttgggcagctgtacgaggtccatgtagtgtttcatgtggagctggattaagatgggttaattacagttgtttagatcaagctagaaaagaacttgtagaaacagttcaatgtcaaggatctcaacaaccaccagcttggccagaagcttgtgttctcgaaccttgtccaccatattgggctgttggtgatttcggaccatgtagtgcatcttgtggaggaggactaagagagagaccagttagatgtgttgaagcacaaggatctttacttaaaaccttaccaccagcaagatgtagagctggtgctcaacaaccagctgtagctttagaaacatgtaatccacaaccatgtcctgcacgatgggaagtatctgaaccatcttcatgtacatcagctggaggagctggacttgccttagaaaatgaaacatgtgttccaggggcagatggacttgaagcaccagttactgaaggaccaggttctgtggatgaaaaattacctgctcctgaaccatgtgttggaatgtcatgtcctccaggatggggtcatttagatgctacaagtgcaggtgaaaaagctccttcaccatggggttcaatacgtacaggagctcaggcagctcatgtatggactccagctgcaggatcttgtagtgttagttgcggtagaggacttatggaacttagatttttgtgcatggatagtgctttaagggttcctgttcaagaggaactttgtggtttagcatctaaaccaggttctagaagagaagtttgtcaagcagttccatgtccagctagatggcagtataaacttgcagcttgttctgttagttgtggacgtggagttgttcgtcgtattttatattgtgctagagctcatggtgaagatgacggagaggaaattcttttagatactcaatgtcaaggacttccaagacctgaaccacaagaagcttgttcacttgaaccatgtccaccaagatggaaagtcatgtctcttggaccatgttcagcttcttgcggacttggtacagcaagacgttcagtagcttgtgttcaacttgatcaaggacaagatgtagaagttgatgaagctgcttgtgctgctttagtccgtcctgaagcttctgttccatgtttaattgcagattgtacttatagatggcatgtaggtacttggatggaatgtagtgttagttgtggtgatggaattcaaagaagaagagatacttgtcttggacctcaagcacaagcaccagtacctgcagatttctgtcaacatttaccaaaaccagttacagtcagaggatgttgggctggaccatgcgttggtcaaggtactcctagtttagtaccacatgaagaagcagctgctccaggaagaacaacagcaacaccagcaggagcatctttagaatggtcacaagctagagggcttttatttagcccagcaccacaaccaaggcgtttgttaccaggaccacaagaaaattctgttcaaagttctgcatgtggacgacaacatttagaaccaacaggtacaattgatatgagaggaccaggacaagcagattgcgctgttgctattggaagaccattaggtgaggttgttacacttagagttttggaatcatctttaaattgttcagcaggagatatgttacttctttggggaagattaacttggagaaaaatgtgtagaaagcttttggatatgacattttcatcaaagactaatactcttgttgttagacagagatgtggtagaccaggggggggagtgttattacgatacggatcacaattggcaccagagactttttatagagaatgtgacatgcaactttttggaccatggggagaaattgttagtccaagtttgtcaccagctacttcaaatgctggtggatgtaggttatttattaatgtagcaccacatgcaagaatagctattcatgccttagcaactaatatgggtgcaggaacagaaggtgcaaatgcaagttatattcttattagagatacacattctttacgaactacagctttccatggtcaacaagttttatattgggaatcagagagttctcaagctgaaatggaattttcagaaggatttttaaaagctcaagcttctttaagaggacaatattggactttacaatcttgggttcctgaaatgcaagatccacaatcatggaaaggtaaagaagggaca

SEQ ID NO: 237915 - DNA, 4281 bp, Artificial Sequence
  derived and/or modified sequence
atgcatcaaagacatcctcgtgctagatgtcctccgctgtgcgtggccggaattctcgcgtgtgggttcctgctgggctgttgggggccatctcacttccaacagagttgtcttcaggcactagaaccccaagcagtgtcttcctacctttcacccggagctcccctaaaaggccgaccgccctcgcctggtttccagcgtcaaagacagcgacagaggcgcgcggctggcggcattctgcacctggagttgctcgtcgccgtgggcccggatgtgtttcaagcacatcaggaggacaccgagcgatatgttctgacaaatctgaacatcggggctgagctactccgggaccccagcctcggcgcacaattccgggtgcatctggtgaagatggtaatcctaaccgagccagagggcgctcctaacattactgccaatttgacgagcagtttattgagcgtgtgtggttggtcacagaccatcaatcccgaagacgacactgaccccgggcacgctgatctggtgttgtatatcacccggtttgatctcgagctgccagacggaaaccgtcaggttaggggcgtgactcagctcgggggtgcctgctctccgacctggtcttgcctcatcaccgaggacaccggcttcgatctgggcgtgaccatcgcacacgagatcgggcactccttcgggttagagcacgacggagcaccgggaagcggatgcggacctagcggccacgtgatggcatccgatggggcggctccgcgtgcgggcctggcgtggagcccctgctcaagacggcagttgctgagtttgctgagcgccggtcgtgcgaggtgcgtgtgggacccaccccgccctcagccagggtctgctgggcacccccccgacgcccagcccgggctttactactcagcgaacgagcagtgccgtgttgccttcgggcctaaagccgtggcttgcacctttgccagagaacacttggatatgtgccaggcactgtcgtgccacaccgatcccctggatcagagctcatgcagtaggctgctggtgcctctcctggacggtaccgaatgtggggtcgaaaagtggtgctctaaaggacgatgtcggagtctcgtggaactgactccaattgcagctgtccatgggaggtggagtagctggggacctcggagcccatgtagtcgctcctgcgggggaggagtggtaacgaggcgcaggcagtgcaacaaccccagaccggctttcggtggacgcgcttgcgtgggagccgatcttcaagcagagatgtgtaatactcaggcctgcgaaaaaacacagttagaattcatgtcacagcagtgcgcaaggaccgatggccagcctttgaggtcttcacccgggggcgccagcttttaccactggggagctgccgttccccattctcagggggacgccctgtgtcgacacatgtgtagggcaatcggcgaaagctttattatgaaacgtggcgattcgttcctggatggcacgcggtgtatgccatcagggccccgcgaggacgggactctgagtctgtgcgtgagtgggtcttgcagaaccttcggatgtgatggccgcatggattctcagcaggtgtgggatcgctgccaggtgtgtggcggagacaattccacctgcagcccacgcaagggctcctttacagcaggcagggctcgggagtatgtcactttcctgaccgtgactccgaatctgacgtctgtctatatcgccaaccataggcccctcttcactcatctagctgttagaattggcgggcgatacgtggtggccgggaagatgagtatttctcccaatacaacataccccagcctgctggaagacggccgggttgagtaccgcgtagccctcactgaggatcgactcccccggttggaagaaatccggatctggggaccattgcaggaggacgccgacatccaggtgtaccggcgctacggtgaggagtacggcaatctgactagaccggacataaccttcacgtacttccagccgaagccacggcaggcatgggtgtgggctgcagttcgcggaccctgtagtgttagctgcggagccggcttacgctgggtgaattactcctgccttgaccaagccaggaaagagctggtggagaccgttcagtgccagggctctcagcagccacctgcttggccggaagcgtgcgtcttggagccatgtcccccatactgggcagtgggcgattttggaccatgcagcgccagctgcggcggcggtctgagagaaaggcccgtacgttgtgtggaggcccagggatccctgctcaaaaccctcccacctgcgaggtgccgagcaggagcccaacaacctgccgtggccctcgagacctgtaacccacagccctgtccagccagatgggaggtttcggagcccagttcatgtacctcagctggcggcgctggcctagctctggagaatgaaacctgtgtgcccggagcagatggcctggaagccccagttaccgaaggaccaggctccgtggatgaaaagttacctgccccagaaccatgcgtggggatgagctgcccacctggttggggccatctcgacgctacttccgctggggaaaaggctccctccccctggggctctatcaggaccggggctcaggccgcgcacgtgtggacaccggctgctggctcttgctccgtgtcctgtggcaggggcctgatggagctaaggtttctgtgcatggatagtgctttacgtgtcccagtgcaggaggagctgtgtgggctcgcctccaaacccgggtctcgtagagaggtatgtcaggctgtgccctgtccggccaggtggcagtacaagctggccgcctgcagcgtgtcttgcggccgcggcgtagtcagaaggatcttatactgcgcccgtgcgcacggggaagatgatggggaagagatactgctggatacacaatgtcagggcctaccaagacctgagcctcaggaagcttgctctctcgaaccgtgtccaccaaggtggaaggtgatgagcctgggaccatgctctgcaagctgcggcttaggaactgctcgcaggagtgtcgcctgcgtccagctggatcagggccaggacgtggaggttgatgaggcagcttgcgctgccctagtcagaccagaggcttccgtgccgtgcctcatcgctgactgtacctacaggtggcacgtaggaacgtggatggaatgtagcgtatcttgtggggacggcatccagcgacgacgagacacctgtctcgggccccaggctcaagcacccgtcccggccgacttctgtcagcacctcccgaagccagtgacagtacgcgggtgctgggctggcccctgcgtgggccaggggaccccttcgctggttccccatgaggaggccgccgcacctggccgtacaactgctacaccagcaggagctagtctggaatggagtcaagctagaggcctgctctttagtccagcccctcagcctcggcggctcctgcccggtccacaggagaattccgttcaatccagcgcctgtggtcgccagcacctcgaacccacgggaactattgatatgcgagggccgggtcaggcagattgtgcagtggcaattggtcggcccctgggcgaggtggtcacccttcgtgttttggaatccagcttgaactgttcggcgggcgacatgcttttactgtggggtaggcttacatggcgtaagatgtgcagaaagctgctcgacatgacatttagttctaagaccaacacgttagtggtccgacagagatgcggcagaccagggggcggggtcctgctgagatatggatcacaattggccccagagacgttctaccgggagtgtgatatgcagctgttcggcccttggggcgagatagttagcccctccctaagccccgctacgtccaacgctggcggatgtcgcttatttataaacgtggcgcctcacgcacgcatagccatccatgctctggcgactaatatgggagccggaacagagggagcaaatgcttcctatatcctcatcagagatacccattcactccgtaccacggccttccatggacagcaagtgttatactgggagagcgagagcagtcaagctgagatggagtttagcgaaggcttcctgaaggcacaggccagcctccgaggccagtactggactctccagtcatgggtgccagagatgcaggacccccagtcttggaaggggaaggaaggcacc

SEQ ID NO: 237916 - DNA, 4281 bp, Artificial Sequence
  derived and/or modified sequence
atgcaccaacgccatccgagagcaagatgcccaccactctgcgtcgcaggaatactggcatgtggttttctgctggggtgttggggtccctcgcacttccagcagagctgcctccaagcactggaaccacaggccgtgtcatcgtacctttcccctggtgcccctctcaaaggcaggccgccatcaccaggcttccagcggcaaaggcagaggcaaaggcgtgccgcaggggggattcttcaccttgaacttctggtggcagtgggacctgacgtgttccaggctcaccaggaggacactgaacgttatgtcctcactaacctcaacatcggggcagagctgctcagagatccgagcctgggtgcccaatttcgagtgcatctggtgaagatggtgattctgaccgaaccggagggcgcacctaatatcactgcaaaccttacttcatctctgctcagcgtgtgtggatggtcgcagaccataaaccccgaggacgatacggacccaggccacgccgatctcgtcctgtacattacccgcttcgacttggagctgcctgatggcaatcggcaagttcgaggggtgacccaacttggaggggcatgttctcctacttggagctgtcttatcaccgaggacactggctttgacctcggggtgaccatcgcacatgagattggacactcatttggtctggaacatgatggggcccccgggtcgggatgtggaccttctggtcacgttatggcatcagacggagccgcgcctcgggcgggactcgcatggtccccttgctccagacgacagcttctctctctgctttccgcgggccgagcacgttgtgtgtgggatccaccaaggccacagcctggttcggcaggacatccacccgatgcacaaccaggactctactactccgcgaatgagcaatgtcgcgtggcgtttggtcctaaggcagttgcatgcactttcgcccgggagcatcttgatatgtgtcaagcgctgagctgccatactgaccctctggatcaatcgagctgctcgcgcctgcttgtcccacttctggatggtaccgaatgcggagtcgaaaaatggtgttccaagggtaggtgtcgatcactggtggagctcacccctatagctgctgtgcatggccggtggtcgtcgtggggaccccgtagcccatgttcgagatcatgcggtggaggagtcgtgaccagacgacgacagtgtaacaacccaagacctgcattcggaggacgggcctgtgtgggtgcggaccttcaagcagagatgtgcaacactcaggcatgcgaaaaaactcagcttgaattcatgagccaacagtgcgcaagaaccgacggtcaacctttgcgctcctcgccaggcggtgcatcattttaccattggggtgcggcagtccctcattcgcaaggagacgccctttgtagacatatgtgtagagcgattggcgagtcattcatcatgaagcgtggagatagctttcttgatggaactcgatgtatgccttccggacccagagaggacggaaccttgtccctttgcgtctccgggtcctgtcggacgtttggatgtgacggtcgaatggattcgcagcaggtgtgggatcgttgtcaggtctgtggaggagacaactcgacctgtagcccaagaaagggctcgttcactgcagggcgggcaagggagtacgtcacttttcttaccgtgaccccaaacctcacgagcgtgtacattgccaaccacaggcccctttttactcatctggctgtgcggattggcggccgatacgtcgtggccggaaagatgagcatctcgcctaatactacctacccttccctgctggaagatggacgggtggaataccgggtcgcacttactgaagatcggcttccacgtctggaagaaattagaatttggggaccactgcaggaagatgcagatatacaggtctaccgccggtacggagaggaatacggaaaccttactcggccagatattaccttcacttactttcagcctaagcctcgacaggcctgggtgtgggcagccgtgcgcggaccttgctcagtgtcgtgcggtgctggtttgcgatgggttaactacagctgtctggatcaagcacgaaaggaactggtggaaacggttcaatgtcagggctcgcaacaacctccggcctggccagaggcttgtgtccttgaaccatgccccccttactgggcagttggggacttcggcccttgttccgcctcatgtggtggtggtctgcgcgagcgtcccgtgcgctgtgtcgaagcccaaggatcgctgcttaagactctgccccctgcacgttgtagggcgggagcacaacaacctgcggtggcgctggaaacgtgtaatcctcagccctgccccgcccgttgggaagtttcagaaccttcgtcgtgtacttcagcaggaggcgcaggtcttgcccttgaaaacgaaacctgtgtgcctggggcagatggactggaagcacctgtgactgaggggccgggatcagttgatgagaaacttcccgcacctgaaccttgtgtcggcatgtcctgccctcctggatggggccacctggatgcaacctcagctggtgagaaagcaccatcaccgtgggggtcaatacggaccggagcacaagctgcgcacgtgtggactcctgccgccggatcgtgttcggtgtcctgtggtaggggtctgatggaactgcgcttcctgtgtatggattcggctctgcgggttccagtgcaagaagaattgtgcggactggcaagcaaaccgggctcgagacgcgaggtgtgtcaagcagtcccatgtcctgccagatggcaatacaaattggcagcctgttcggtgtcgtgtggaagaggagtggtgcgccggattctttactgcgcgcgggcacatggggaagatgatggtgaagaaatccttcttgatactcagtgtcaaggccttccccggcctgaaccgcaggaagcatgtagcctggaaccctgtcctccccggtggaaagtgatgtcgctcgggccttgctccgcgtcatgcggtctgggcaccgctagaagatcggtggcgtgtgtccaactcgaccagggacaagatgtggaggtggacgaggccgcttgtgcagcgctggtgcgacccgaggcttcagtcccatgccttattgcagattgcacctatagatggcatgtgggaacctggatggaatgctccgtcagctgcggagacgggatccagcgacggcgggatacctgcttgggacctcaggcccaagcaccagtgcctgccgacttttgtcagcaccttccaaaacctgtgaccgttcgtggatgttgggcaggaccctgcgtggggcaaggaaccccttccctcgtcccccacgaggaagcagcggcaccgggccggaccacggcaacgccggcaggtgcctcgcttgagtggtcccaagcaaggggactgctctttagccccgctccacagccaagacgcctcctgccaggaccgcaagagaatagcgtgcagtctagcgcctgtggtcgccagcatcttgagccaaccggaactattgatatgcggggacctgggcaggcggactgtgcagtggctattgggaggccactcggagaagtcgtgactcttcgtgtgttggaatcatcgctcaactgctcagccggtgatatgctcctgctttggggtagacttacttggcgaaagatgtgtaggaaattgctcgatatgactttctcttcaaagacgaatactctcgtggtgagacaaagatgtggaaggcctggtggcggtgtgcttcttagatatggaagccagcttgctcctgaaaccttttaccgagaatgcgatatgcagctctttggcccttggggtgagatcgtgagcccttcactttccccagcaacttcaaacgcagggggatgccgtctgttcataaatgtggcacctcatgcaagaattgcgatccatgccctcgctactaacatgggtgcaggtaccgagggtgcaaatgcgtcctacatccttattagagacacccattcccttcggactacggcctttcatggtcaacaagtgctgtactgggagtctgaatcatcccaagctgaaatggaattttccgaaggctttctcaaggctcaagcatcgctgagaggacaatactggacgcttcaatcctgggtcccggagatgcaggacccccagtcatggaagggaaaggagggaacc

SEQ ID NO: 237917 - DNA, 4281 bp, Artificial Sequence
  derived and/or modified sequence
atgcaccagcgacatcccagagcccgctgcccccctctttgtgtagccggtattctggcttgcggttttctgctgggctgttggggcccatctcattttcagcaaagttgccttcaagcccttgaacctcaagctgtgagttcttacctgagtcccggggccccactgaaaggaagacccccttcacccggcttccagagacagcgccaacgccaaaggagggcggctggagggatcctccatctggaactcctggttgccgtcggccctgatgtttttcaggctcatcaggaggacacagaacggtacgttttgaccaacttgaatattggcgccgaactgctgcgcgacccctccttgggggcacagtttcgcgtgcacttggtgaagatggtgatcctgacggaaccagagggagcgccaaacattaccgctaacctgacttcttccttgctgtcagtatgcggttggtctcagactatcaaccccgaagatgatactgaccccgggcatgcggaccttgtgctgtatatcacgagatttgatctggagctgcctgacggtaacagacaagttaggggggtcactcagcttggaggagcatgtagtccaacttggtcttgcctcatcacagaagacaccggattcgacctgggggtaaccattgcgcacgagatcggccatagtttcggactggaacacgacggagcacctggctccgggtgcggaccaagcggccacgtaatggcctccgatggggcagctcctcgggctggcctggcatggagcccttgttccaggcggcagcttctctcactgctcagcgctggcagagcccggtgcgtttgggatcctccaagaccacagcccggctcagcaggccaccctccagatgctcagcctggactgtactattctgcaaacgaacaatgtcgagtggccttcgggcccaaggcagtagcgtgtactttcgccagggagcacttggatatgtgccaagctctgagctgccatactgatccgttagatcaaagttcctgttctcgcctcttagtgccactcttggacggcaccgaatgtggcgtggagaaatggtgcagcaaaggcaggtgcagatctttggtggaactgactccaatcgctgccgttcacggaaggtggagctcttggggacctcgtagcccatgtagtagatcttgtggcgggggggtcgtaacccgcagaagacaatgcaacaacccaaggcctgcttttggcggacgcgcttgcgtaggcgctgacctgcaagctgagatgtgcaacacccaagcttgcgaaaaaacacagcttgagtttatgtcacagcaatgcgctcggaccgacggccagccacttaggagtagccccggtggagccagcttttaccactggggcgctgccgtgcctcatagccagggagacgctctctgcaggcacatgtgcagagctatcggggagagttttatcatgaagaggggagacagcttcttggatgggaccaggtgtatgccgtccggccctagagaagatggaactctgagcctgtgcgtcagcggctcctgcagaacatttggttgcgatggaagaatggatagtcaacaggtgtgggaccgctgccaggtttgtggaggggataatagcacctgtagcccaagaaagggctctttcaccgcagggagggcccgggagtacgtgactttcttgaccgtgacccccaaccttacttctgtgtatattgctaaccatcggcctctctttacccatctggccgtccgaatcggaggacgatacgtagtagctggcaaaatgtccattagtcctaacactacatacccctctctgctggaggatggcagggttgagtaccgcgtggccctcactgaggatagactgcccagacttgaggaaatccggatctggggacctcttcaggaggatgcggacatccaggtttataggagatatggagaagaatacgggaacctaacaaggcccgacattacgttcacctacttccagccaaagcccagacaggcttgggtctgggcagccgtcagagggccctgtagcgtcagctgtggagcgggattgagatgggtgaattactcttgtctggaccaggctagaaaagaattggtggagactgtacagtgccagggaagtcagcaaccacccgcttggcccgaagcttgcgtcctcgagccgtgtccgccttactgggccgtgggagatttcggtccctgcagcgcttcttgtggcggaggcctgcgggaacgaccagtgagatgtgtggaagcccagggaagcttgctgaagaccctccctcccgcaaggtgccgtgctggtgctcagcagccagccgttgccctggagacctgcaaccctcaaccttgccccgctaggtgggaggtttcagagccttcctcttgtacatctgcaggtggggcgggtttagctctcgagaacgaaacctgcgtccccggcgctgacggattggaggctccagtcaccgaaggcccaggctctgtcgacgagaagttgcccgcacccgaaccctgcgtgggaatgagctgtccacccggctggggtcatctggacgctacaagtgctggcgagaaggctccgtccccgtggggcagcattaggacaggagcacaggccgcacacgtgtggactcccgcagctggcagctgctctgttagctgcgggcgagggctaatggagctccgtttcctgtgcatggactctgcacttagggtcccggtgcaagaggaactttgcggtctggcgagcaaacccggctcacggagagaagtctgtcaagctgttccttgccctgcaaggtggcaatataaactggcagcatgcagcgtgagctgcggaagaggagttgtgaggcgcatcctctactgtgcacgggctcatggggaggacgatggagaggagatacttctggatacacaatgccaagggttgcctagacccgagcctcaggaagcctgtagtttggaaccctgccctccacgatggaaagtcatgtctttgggtccttgttctgcctcttgtgggctgggtactgcaagacggagtgtagcttgcgtgcaactcgaccaagggcaggatgtggaagtggatgaggcagcttgtgcggctcttgtacgtccagaggcgagtgtgccctgcctgatcgctgattgcacctaccgttggcatgtgggaacttggatggagtgtagcgtgtcttgtggggacggcatccaacggagacgtgatacatgcttaggtccacaagctcaggcgccagtccctgcagacttttgtcagcatcttccgaaacccgtgactgtcaggggatgctgggcaggaccatgtgttggccagggaacaccttcactcgtcccccatgaggaagcagctgcccccggcagaaccactgctacacccgccggagcttcactcgagtggagccaggcgcgcggcttgctgtttagtcccgcgccccaaccacgcagactgcttccaggcccacaagagaatagcgtccaatccagcgcttgtggccgccagcacctggaacccaccggaaccatagatatgaggggtccaggacaggccgattgtgctgtcgcaatcggcaggcctctcggggaagtagttactttgcgcgttcttgagtcttccctgaactgctccgccggtgatatgctcctgctgtggggaaggctgacttggaggaaaatgtgcaggaagcttctggatatgaccttctcgagcaaaactaacaccctggtcgtgcggcagcgttgcggacgtcccggggggggagtacttttgcgctacggaagccaacttgcacctgaaacattttacagggaatgcgatatgcaactgtttggcccatggggcgagatcgtgagccccagccttagtccagccacatcgaacgcaggaggttgccggctttttattaatgttgctcctcacgctagaatcgcaatccacgccttggctaccaacatgggagcaggcaccgaaggcgctaacgcgtcatatattctaatcagagatacacatagcctcagaactaccgcctttcacggccaacaagtgctttactgggagtccgagtcttcacaagcagaaatggagttcagcgaaggattcttgaaagcacaggcatctctgaggggacagtactggaccctgcaaagttgggtaccagaaatgcaagatccacaatcatggaagggcaaggagggaacc

SEQ ID NO: 237918 - DNA, 4281 bp, Artificial Sequence
  derived and/or modified sequence
atgcaccagcgccaccccagagcccggtgtccccccctctgcgtagccggcattttggcatgtggtttcctgttgggctgctggggaccctcccattttcagcaatcctgcctgcaagctctagagccccaggcagtctccagctacttaagccccggcgctcctctaaaggggcggcccccctcacccggattccagcgccagagacagaggcagcgccgagctgccggcggcatacttcacctggagctgcttgtggcggtgggccccgatgtgtttcaagcccaccaagaggatacagaacgttatgtgttgaccaacctaaacattggagccgaactgctaagagacccctccctgggggcccagttccgggtacatcttgtgaagatggtcatcctgactgagccagaaggggctcctaatattacagccaatctcactagctctttactatcagtgtgtgggtggagtcaaacaataaacccagaggacgacacagatcccggccacgcggacttggtgctgtacatcacccggtttgatctggaactcccagacggcaatagacaagtcaggggagtgactcagttgggaggggcatgctccccaacgtggagctgcctcatcaccgaagatacaggtttcgacctgggcgtaaccatcgcccatgagatcggtcatagcttcggactggagcacgacggggcccccgggtctggatgtggaccaagtggacacgtaatggctagcgacggggccgcacctcgtgccggacttgcttggtccccctgttctcggcgtcagctgctaagcctgctgtcagccggacgtgcacgttgcgtgtgggatccgccacgaccccagcccggatctgccgggcatcctcccgatgcacagcccggactgtattactcagccaatgagcagtgtcgggttgcctttggtcctaaggcagtggcttgcacctttgcgagggagcacctcgatatgtgccaggctctgtcttgtcatacggatcccctggatcagagcagctgctcaaggcttctggtgcctttgctggacggaactgagtgtggtgtcgagaagtggtgctccaaggggcggtgtcggagtttggtcgaactcaccccaattgccgctgtccatggtcggtggtccagctggggccctcgctcgccttgcagccgcagttgcggcggcggcgtggtgacaagaagaaggcagtgcaacaacccgcggccggcattcggcggcagggcgtgcgtcggagctgatttgcaggcagaaatgtgcaatacgcaggcttgcgagaagactcagctcgagtttatgagtcagcaatgcgcacgcacagatggccaaccgctccgatcttcacctggaggcgcatcattttaccattggggcgctgcggtccctcattctcaaggtgatgcactgtgtcgccacatgtgtcgcgcaattggagagagcttcataatgaaaagaggtgacagttttctggatggcacaagatgtatgccttccggaccaagggaggacggtactctctctttatgcgtgtcagggagctgcagaacctttggttgtgatggccgaatggacagccaacaggtctgggaccggtgccaggtatgtggaggggacaattcaacctgttcacctaggaaagggtcattcaccgctggcagagcgagggagtacgtgacattcctgacagtaacacccaacctgacttccgtgtacatcgcaaaccacagacccctgtttacacacttggccgtgcgcatcggcggtcgttatgtggtcgcaggcaaaatgtccatctctcccaacacaacttacccgagcctccttgaagacggccgggtcgaatatcgcgtcgcactaactgaggataggttgcccaggctggaggagatacgtatctggggacctctccaagaggacgctgatattcaggtctaccggcgatatggggaagaatacgggaatctgactcgcccagatataacgttcacttactttcagcccaagcctagacaggcctgggtatgggcagcggtccgaggaccatgttccgtgagctgcggggccggtcttaggtgggtaaactactcatgcctggaccaggcccggaaagagttggtggagaccgtacagtgtcagggtagtcaacaacctccagcttggcccgaggcctgtgttctagaaccttgtcctccctactgggccgtaggcgattttggtccctgtagcgcatcatgcgggggtgggctcagggagaggccagtacgttgcgtagaggcccaagggtccctgctgaaaaccctgcctcccgccaggtgccgcgccggcgcgcaacagccagccgtggcactcgaaacatgcaacccccaaccatgccccgctcggtgggaagtgtctgagccttcttcttgcaccagtgctggtggggctggtctggcactggagaatgaaacatgcgtgcccggtgctgatggtttagaagctcctgtcaccgaaggtcccggcagcgtcgacgaaaaactccctgcccccgagccctgcgtgggcatgtcctgcccgcctggttgggggcacttagacgctacctctgcaggggagaaagcccccagcccatgggggtccatacgcactggtgcccaggccgcccacgtgtggaccccagcggctggttcgtgctccgtgagttgtgggaggggcttgatggaactgcgttttctgtgtatggactctgcgttacgtgtacctgtgcaggaggagctgtgcgggctggcctcaaagcccggatcacgacgtgaggtctgccaggcagtgccttgtcctgcccgatggcagtataagctggcagcttgctcagtaagctgcggccgcggagtggtccggagaattttatactgtgcgcgcgcccacggagaggatgacggggaggagattctcctggacactcagtgccagggcctgcctcgccccgaaccccaggaggcctgctcactggagccttgtccaccaaggtggaaagtcatgtctctgggtccttgctcggcatcgtgtgggctcggtaccgcccgaaggagtgttgcctgcgttcaactggatcagggacaggatgtggaggtggacgaagccgcatgcgctgctttggtgcggcccgaggcttccgtcccttgccttatcgctgattgtacataccgatggcacgtaggaacttggatggaatgctcagtgtcctgtggggatgggatccagagacgccgtgacacttgtcttggtccacaggcgcaagctcccgtgcccgcagatttttgtcagcatctgcctaagcccgtcacggtgaggggctgttgggccgggccatgcgttggccaggggaccccttctctcgtgccccacgaggaggcagcagcacccggcaggacgacggcaacaccagcaggagcttcacttgaatggtctcaagcccgggggttacttttttcccccgctccacagcctcgaaggttgctgccgggacctcaggaaaactccgtgcagtcgtccgcatgcgggcgccaacatctcgaacccaccggcacaattgatatgcggggaccaggacaagccgattgtgctgtggctattggccgcccacttggagaggtggtgaccctgagagttctcgagtccagtttgaactgctcggcgggagacatgctcctactctggggcaggttgacctggcgtaagatgtgtaggaaactcctggatatgaccttctcctcaaagactaacacccttgtggtgagacagcgatgcggacggcccggtggtggcgtcctcctgagatatggctctcagctggctcccgagactttttacagggagtgcgatatgcagctttttggcccctggggagaaattgtttcgcctagcctgtcaccggcgacttcaaatgctggcggttgtcggctctttataaatgtggcaccgcacgcccggatcgcaatccatgcacttgcaacaaacatgggggctggtaccgagggagccaacgccagttacattcttattagagacactcacagcctccgaaccaccgctttccacggacagcaggtcctgtactgggagtcggaatcgtctcaagcagaaatggaattctcagagggatttttgaaagcccaggcatcacttcgtggtcaatactggacgctccagtcctgggtgcccgagatgcaggatccacagtcttggaaaggtaaggagggcact

SEQ ID NO: 237919 - DNA, 4281 bp, Artificial Sequence
  derived and/or modified sequence
atgcaccagcggcacccccgcgcccggtgtccccccctgtgcgttgcggggattctcgcctgtggatttttgctgggatgctggggcccatcacattttcagcagagttgcctacaggctcttgagccccaggcggtgtctagctacctctcacctggggcacctcttaaaggccgaccaccttcccctggctttcaaagacagaggcagcgtcagaggagggccgcggggggtattttacatctggagttgcttgtggccgtaggacccgacgtctttcaagcccatcaggaggatacagagcgctatgtgctgaccaacctgaacatcggggccgaactgctcagggatccaagtctgggagcccaattcagagttcacctcgttaaaatggtgattctgactgagcccgaaggcgccccaaacattaccgccaatctgacttcgagtcttctgtccgtgtgcggctggtcacagactataaatcctgaggatgatacagaccctggccacgctgatctggtgctttatataactcgcttcgacttggaactccccgatggcaatagacaggtgcggggtgttactcagttagggggcgcttgtagcccgacgtggagttgtctcattaccgaagatactggtttcgatcttggagtgaccatagcgcacgaaattggtcactcctttggcctcgaacacgacggagctccagggtcaggctgtggaccctctggacacgttatggcgtctgacggcgcggccccgagggccggactggcttggagcccctgcagcagacgtcagctcctctcactcctatccgccggcagagcaagatgtgtctgggatccaccccgaccccaaccaggatctgcaggacacccccctgacgcgcagccagggctctactactccgccaatgaacagtgtcgcgtggcattcggacccaaagctgttgcatgtacattcgctcgcgagcatctggacatgtgtcaggctttgagctgccatacggaccccctcgatcaatcttcatgctcgagactcctggtgcccctgctagacgggacagaatgcggcgtggagaaatggtgctccaagggccgttgccggtctctcgtggaactgacaccaattgcagcggtgcacggcagatggagcagttggggacctcgaagtccctgcagcagatcctgtgggggaggcgtggtcacaaggcgcaggcagtgcaacaatcctcgtcctgccttcggtggaagagcctgtgtgggggcagacttgcaggcggaaatgtgtaacacacaagcttgtgagaaaacccaactggagttcatgtctcagcagtgtgcaagaaccgacggtcaaccactccggagcagccccggcggggcgtctttctaccactggggggctgccgtgcctcactctcaaggagacgcattatgccggcacatgtgtcgcgcaattggcgagtccttcataatgaagagaggggactccttccttgacgggacgcgctgcatgccatccggcccaagggaggacgggactctcagtctgtgcgtcagcggctcatgtagaacctttggttgtgacggaagaatggactctcaacaggtgtgggaccggtgccaagtctgcgggggcgataacagcacctgctcacccaggaaggggtcgtttaccgctggacgagcgcgggagtacgttaccttcctgacagtgaccccaaatctcacgtctgtgtacattgccaaccataggcctctttttacgcaccttgccgtgaggatcggggggagatacgtggtcgcgggtaagatgagtatcagcccaaatacaacatacccgagcctccttgaggatggcagagtggagtacagggtcgcattaactgaggacaggctgccccgacttgaggagatacgcatttggggccccctccaggaggatgcggacatccaggtgtatcggcgctacggcgaggaatacgggaatctgactcgtcccgacatcacctttacgtacttccaaccaaagcctcgacaggcgtgggtgtgggccgcagttagggggccttgtagcgtttcttgtggggcaggattaaggtgggtcaactacagttgtctggaccaggccaggaaagagctcgtggagactgtccagtgccagggatcccagcagccaccagcttggccagaggcatgcgttcttgaaccatgtcctccttattgggccgtaggggatttcggcccgtgctcggcctcctgcgggggggggctgagagaacgacccgtcagatgtgtggaagctcaaggctctcttttaaagacacttccacctgctaggtgccgagctggagcccagcaaccagcagtagctttagaaacgtgcaacccccagccctgtcctgcccgctgggaagttagcgagccctcttcttgcacaagcgcaggtggcgcaggcctcgccttggaaaatgagacctgtgtgccaggcgcggacggcctggaggcaccagtgaccgagggccctgggtccgtggacgagaagctaccagcccctgaaccatgcgtggggatgtcctgcccgccaggttggggacacctcgacgcaacgtctgcaggcgaaaaggccccctccccctggggctccatacgtacaggagcacaggccgctcacgtgtggacacctgccgcagggtcctgtagcgtcagctgcggccgcggcctcatggagcttcgcttcctgtgcatggatagtgccctgagagtgccagtgcaggaagaactgtgtggccttgcatcaaagccgggctcacgacgggaagtctgtcaggccgtgccatgccctgcccgatggcagtataagctggctgcctgcagcgtttcgtgtggtcgaggggtggtgcgacggatcctgtactgtgcacgtgcacatggagaggacgacggggaggagatcctgctggacacccagtgtcaaggcttacccagaccagagccacaggaagcatgctcactggaaccttgtccccctcgctggaaggtgatgagcctgggaccttgttctgcgagctgtgggctcggaacagctcggcggtccgtcgcctgtgtgcagttggaccaaggacaggacgtagaggtggatgaggccgcttgtgccgctttggtcaggccagaagcctcagtcccatgtctgattgcagactgcacatacagatggcatgtcggcacttggatggagtgttccgtctcctgcggcgatggaatccagcgcagaagagacacctgcctcggcccccaagcccaagcccccgtgccagcagacttctgccagcacctgccgaagcccgtcacagttcggggttgctgggctggaccctgtgttggacaagggactccttcgttggtcccccatgaagaggccgctgcacccgggcgcacaactgctacgccggcgggtgcctccttagagtggtctcaagcgagaggactcctgttttctccagcaccgcagcctcgcagattgctacccggcccacaggagaacagtgttcaatcctctgcctgtggacgccagcatctagagccaacgggtaccattgacatgagaggccctggccaggctgattgtgcagtcgcaattggaagacccctcggggaagtggtaacgctgcgcgtgctcgagtcttctctcaactgctcggcgggcgacatgctcctgctgtggggtagactgacgtggcgaaagatgtgtaggaaactgcttgacatgaccttctcctcaaagacaaacaccctcgtcgtcaggcagcgctgcggccgtccaggtggcggggtgctgcttagatacggctcccagcttgcacctgagaccttctatcgcgagtgtgacatgcagttgtttgggccctggggagagatcgttagcccatcattgtcacctgctacttccaacgccgggggctgtcggctgttcattaatgtggcccctcacgcacgaatcgccattcacgctttagccactaacatgggcgccgggactgagggagccaacgccagttacattctgatcagggacacccattccctgcggaccacagcttttcatggccagcaggttctctactgggagtctgagtcttctcaggcagagatggagttctctgaggggttccttaaggcccaggcatcactcagaggccagtattggacactgcagagctgggttccagagatgcaggatcctcaatcttggaaggggaaggaagggacc

SEQ ID NO: 237920 - DNA, 4281 bp, Artificial Sequence
  derived and/or modified sequence
atgcatcagagacacccacgggctagatgcccccccctgtgtgtggctgggatcctggcctgtgggtttttactcggatgttgggggccctctcatttccagcaatcttgcctccaggccttagagccacaggccgtctcctcttatctgtctccaggggcccctcttaaaggaaggcccccctctcccggattccagcggcagcgacagagacagagacgggccgctggggggatcctgcatcttgagctgctcgtggcagtgggacctgatgtgttccaggctcaccaggaagatactgaaaggtatgttctgactaacttaaacatcggggcggagctgttacgggatcccagtctaggggcgcagtttcgggttcatctggtgaaaatggtgatactcacagaacccgaaggagctccaaatatcactgcaaacctaacatctagtctcctgtccgtgtgtgggtggagtcagactatcaatcccgaagatgatacagatcctgggcatgctgatctagttctctatataacacggttcgatctggaattacccgacggaaaccgacaggttagaggggttactcagctcggaggggcatgttctccaacttggtcatgtctcatcactgaagatactggatttgatctgggggttactatagcccatgaaataggacactcttttgggctcgaacatgatggagctcctgggagtggatgtgggccctccggacacgtcatggcctctgatggagccgcacctagggctgggcttgcatggtcaccctgttctcgacggcagctgctgtctctattgtctgctggaagggcgaggtgtgtgtgggaccctcctcgacctcagccaggatctgcggggcacccacctgatgcccagcctgggctctattattctgccaacgaacagtgtcgggtggcctttggacctaaagctgtagcttgcactttcgctagagaacacctcgacatgtgtcaggctctgtcttgccatacagatcctctggaccagagttcatgctctcgcctacttgtgccactgctcgatggaactgagtgcggggtggagaaatggtgttctaaagggcgttgcagatctctggtggagctcactcctatagccgctgtccacgggcgatggtccagttggggacctaggtctccctgctcgcgaagttgcggaggaggagtcgtcacacggcggcgacagtgtaataaccctcggcctgcatttggagggagggcatgtgtcggggctgatttgcaggctgaaatgtgtaacacacaggcatgtgagaaaacacagcttgaatttatgtctcagcagtgtgcccgaacagatgggcagcccctgaggtcttcccctgggggagcatctttctatcactggggagccgccgtgccacacagtcagggagatgctctatgtagacatatgtgccgcgcaatcggggagtccttcatcatgaaacgaggggacagttttctggatggaacgcgctgtatgccctcagggcccagagaggatggaacactgagtctttgtgtctccgggagttgtaggactttcggatgcgacggacgcatggattctcagcaggtgtgggatcgttgccaggtatgcgggggagataactcaacatgttctccccgaaaaggatctttcacagccggacgggctagagagtatgtgacattcttgactgtgactcctaatctgacatccgtatatatagctaaccatcgacctctgttcacacatttagccgtaagaataggagggagatacgtggtggccgggaaaatgtccatatcaccaaacacaacgtatccctcactcctcgaggatgggagggtagaataccgtgttgccctaactgaagataggctacccagactagaggaaataagaatctggggaccccttcaggaagatgcggatatccaggtctataggaggtatggggaagaatatgggaatctaactagacccgacattacttttacttatttccagcccaagcccagacaggcttgggtctgggccgctgttcgaggaccctgttccgtaagttgtggagctggactccgctgggtgaactatagttgtctggatcaggcccggaaagaattagttgaaactgtgcagtgccaggggtcccagcagccccccgcctggcccgaagcgtgtgttctcgaaccatgccccccctattgggccgtcggagattttggaccctgctccgcatcttgcggaggaggacttcgggaacgacctgtgaggtgtgtcgaagcacaggggagtctgttgaaaacactcccacccgccagatgtcgagctggagcacagcagcctgctgtagcactcgaaacgtgcaacccacagccctgcccagctcggtgggaagtgtccgaaccttcttcatgcacttccgctgggggagctgggctcgccctcgaaaacgaaacatgcgtaccaggggccgatggattggaagctcccgttacagaagggcccgggtccgtggatgaaaagctccccgctcctgaaccttgtgtggggatgtcttgccccccgggatgggggcatctggatgctactagtgccggagaaaaagctcccagtccttggggatccatacggactggggcacaggccgcacacgtctggacaccagccgcagggtcttgttctgtgtcatgcgggcggggacttatggaactgaggttcctttgtatggactctgccctcagagttccagtccaggaagagctctgtgggttagcctctaaacctggatcaaggagagaagtgtgccaggccgtcccttgtcctgctagatggcagtataaactggcagcttgttccgtgagttgtggaagaggggtggttcggcgtatcctttactgtgcaagagcccatggagaagatgatggagaagaaattcttcttgatactcaatgccagggactacccaggcctgagccccaggaagcctgctcattagagccttgtcccccccggtggaaagtgatgtcactcgggccctgttccgctagttgcggacttgggacagctcgtagatcagttgcttgtgtacagcttgatcaggggcaagacgttgaagtagatgaagccgcctgtgctgccttggtgcgcccagaagcctcagtaccttgtctgatcgccgattgcacatataggtggcatgtggggacttggatggagtgctcggtgtcatgcggggacgggatccagcgcaggagagatacatgcctggggccccaggctcaggctcccgtgcctgcagatttctgtcagcacctaccaaaacccgtcacagtccgcggatgctgggctggaccatgtgtggggcaaggaacaccttctctcgtacctcacgaagaagcggctgccccaggacggactacagcaactccagcaggggcctctttggagtggtcacaggccagggggctgttattcagtcccgcaccacagcctaggcggctcctgcctggaccacaggagaactccgtgcagagttcggcctgtgggcggcagcatctggaacccactgggacaatagatatgagggggcctggacaggcagattgcgccgtggctatcgggcggcctctcggagaagtggtgactctcagggtgcttgaatcttcccttaattgtagtgccggggacatgcttttactctggggacgccttacatggaggaaaatgtgtagaaaattgctcgatatgactttttcatccaaaactaatacactcgtggtgaggcagaggtgcggacgccccggaggaggggtgctgctgcgatatggatctcagctcgcccccgaaacattctatcgcgaatgtgacatgcagctgttcgggccttggggggaaattgtgtcgccttcattatcccccgctacttcaaatgccgggggatgtcgactcttcatcaacgtggcccctcatgctcggatagctatccacgcccttgctactaacatgggggctggaacagaaggagctaatgcctcttatatactcatccgcgatactcactccctgcgaacaacagcttttcatgggcagcaggtgctatattgggaatcagaatcctcacaggccgaaatggagttttcagaagggtttcttaaagctcaggcttcactccgagggcagtactggacactccagtcttgggtgcctgagatgcaggatccacagagttggaagggaaaagaagggaca

SEQ ID NO: 237921 - DNA, 4281 bp, Artificial Sequence
  derived and/or modified sequence
atgcatcaaagacacccgcgggcgaggtgccctccattgtgtgtcgctggaattctggcatgcggattcctgctgggatgttgggggccgtcacactttcagcagtcatgcctgcaggctctggagccgcaggccgtgtcgtcctacctgagccctggcgcccccctgaagggccggcctcctagcccagggttccaacgccaacgccaaaggcaaagacgtgctgcaggaggaatcctgcacctggagctgctggtcgccgtcggtccagatgtattccaggctcaccaggaggacaccgaacgctacgttctcactaacctgaatattggagcggagctcctgcgggatccttccctcggagcccagttccgggtgcaccttgtcaaaatggtgatcctcaccgaaccggagggagcgccaaatatcacggccaacttgacgagctcgctcctgtcagtctgcggatggtcccaaacgatcaacccagaggacgataccgatccagggcacgccgaccttgttctctacatcactcggttcgacctggaactgcccgatggcaatcgccaggtccgtggagtgacccagctcgggggagcctgtagcccgacctggtcctgtctgataacggaggacaccggttttgacctcggcgtgactatcgcccacgaaattggacattcattcggcttggagcacgacggagctcctggaagcggttgcggaccgtcgggacacgtgatggcttccgatggagcggcaccgcgcgcaggactggcctggtcgccctgcagtcggcgccaactgctgtcactcctttcggccggtcgggcccggtgcgtctgggacccgccgcgcccccaaccaggcagtgcgggacatccgcctgatgcccaacccggcttgtactactcggctaatgagcagtgtcgagtggctttcggaccgaaggcggtggcctgcaccttcgcgcgcgagcacctggatatgtgtcaggcgctgagctgccacacggatccgctggaccagtcgtcctgttcccggctcctggtcccgctgctggacggtactgaatgcggcgtcgagaagtggtgctctaagggaagatgccgctcgttggtggaactgactcctatcgccgccgtgcatggtcgctggagctcttggggacctcggtcgccttgcagtaggagctgcgggggaggcgtggtgactcgccggcgacagtgcaataacccaaggccggcattcggaggacgcgcctgcgttggtgcggatttgcaggcggaaatgtgcaacactcaagcatgcgaaaagacccagcttgagtttatgtcgcagcaatgcgcacgcactgacggccaaccccttcgctccagccccggcggcgcatcgttctaccattggggcgctgcggtgccgcactcccagggggacgccttgtgccggcatatgtgccgcgcgatcggagaatccttcatcatgaaacgcggagattcgttcctggacggaacccgctgcatgccgtcaggcccaagggaagatggaaccctgtcattgtgcgtgtccggctcatgtcggacttttggatgcgacggaagaatggactcacagcaggtctgggaccgctgccaggtctgtggaggagacaattcgacgtgttccccgcggaagggatcgttcaccgccggcagagcaagagaatacgtcacctttctgaccgtgactccgaaccttactagcgtctacattgcgaatcaccgccccctcttcactcacctcgctgtgcggatcggaggaaggtacgtggtggcggggaagatgtctatcagcccaaacaccacttacccgtcccttctcgaagatgggcgggtggaataccgagtcgcactgactgaggaccgcctcccgagactggaggagattcggatctggggtccactccaggaggatgcggacatccaggtttatcgtcggtatggcgaggagtacggaaatctgaccagaccagatatcacttttacctacttccagccgaagcctcgacaggcttgggtgtgggcggcggtgagaggcccatgctctgtaagctgtggggctggtctgcggtgggtgaactactcctgcctcgaccaagcccgtaaggagctggtggaaacggtgcagtgtcaaggatcgcagcagccgccggcctggccagaggcctgtgtcttggaaccatgtccaccgtactgggcggtgggcgacttcggcccttgttccgccagctgcggcgggggacttagagaacgcccagtgaggtgcgtggaggcgcaggggtcactcctcaaaaccctgccgcctgcgcggtgccgggcgggtgcacagcagccagcagtcgctctggaaacctgtaacccgcaaccatgccctgcacggtgggaggtcagcgagccgtcgtcatgcacttcagcaggcggagctggactggcactcgagaacgagacttgcgtcccgggagcagacggactggaagcgccggttactgaaggaccgggctccgtggatgaaaaacttcctgctccggaaccgtgcgtgggtatgtcctgccctcctggatggggccacctcgacgccacctcggcaggagaaaaggccccaagcccgtggggttcgataagaaccggagctcaagctgcccacgtgtggaccccggctgccggatcgtgctccgtgagctgcgggcgcgggctgatggaactccgcttcttgtgcatggacagtgccttgcgcgtgccggtccaagaagaactgtgcggccttgcctctaagccaggctctcggagagaagtgtgccaggcagttccatgtcctgcacgctggcagtacaaactggccgcctgctctgtgtcctgcggcagaggcgtggtgcggcggatcctttactgcgcacgggcacatggcgaggatgacggcgaagaaatcctccttgacactcaatgtcaagggctgccaaggcccgaacctcaggaggcttgctccctcgagccctgccctccaagatggaaggtgatgtctctgggcccatgctcagcttcatgtgggctgggtactgccagacggtcagtggcctgcgtgcagctggatcagggacaagacgtagaagtggatgaggcggcgtgcgctgctctcgtcagaccggaggcttccgtcccgtgcctgatcgccgactgcacgtacaggtggcatgtcggaacctggatggaatgttcagtgtcgtgtggggacggaatccagagacgtcgggatacctgtctgggaccacaggcccaggcgcctgtcccggccgacttctgccaacatctgccaaaaccggtgaccgtgagaggctgctgggccggtccttgcgtaggacagggaactcctagtctggtgccgcatgaggaggccgccgcccccggacgcaccaccgccactccagctggcgcgtcactcgaatggtcgcaggccagggggctcttgttttcgccggccccacaaccacgccggctcctgccgggaccccaggagaattccgtgcaaagcagcgcctgcggaaggcagcatctggaacctaccggcacgatcgacatgagagggcctggacaagcggattgcgcagtggccattggtcgcccgcttggtgaagtggttactctgcgcgttttggagtcgtcactcaactgctcggcgggtgacatgctgctgctctgggggcgccttacctggcgcaagatgtgtcgtaagctcctggatatgacttttagctccaagaccaacaccctggtggtgagacaacgctgcgggaggccgggtggcggagtgctcctgcggtacggatcgcagctcgccccggagactttctatcgggaatgtgacatgcaactgttcggaccatggggggaaatcgtgtcaccgtcgctgtccccagccacctcgaacgccggaggatgccgacttttcatcaatgtcgccccccatgcccgcatagcgatccacgccctcgcgactaacatgggagcagggaccgaaggtgctaacgcctcgtacatcctgattcgcgacacccactcgctgcgcaccactgcatttcacggacagcaagtcctgtactgggaatcggaatcctcccaggccgaaatggagttctccgaaggtttcctcaaagcccaggcgtcgctccgcggccagtattggacccttcaatcgtgggtgccggaaatgcaagacccgcagtcgtggaagggaaaagaaggcact

SEQ ID NO: 237922 - DNA, 4281 bp, Artificial Sequence
  derived and/or modified sequence
atgcatcagcggcatcctcgcgcgcggtgccccccgctttgcgttgccggaatcctcgcttgcggcttcttgctcggctgttgggggccttcccatttccagcaaagttgcctgcaagcactggagccgcaagccgtgtcttcctatctatcgccaggcgccccgcttaaaggccgacctccctccccgggatttcaacggcagcgacaacgccagcgccgtgcagcgggagggatcctgcatttagagcttctcgtcgctgtaggcccagacgtcttccaggcccaccaagaagataccgagcggtatgttctcactaacctcaatataggtgctgagctcctgcgggacccctccctcggagctcagttccgcgtccacctcgtcaaaatggttatactcaccgagcccgagggtgcgcctaatattacggctaacttgaccagcagcctgctctccgtgtgcggatggtcccaaaccattaaccccgaggatgatacagaccccggccatgctgacttggtcttgtacattacacggtttgacctggagttgccggatggcaatagacaagttcggggagtgactcaactaggaggcgcttgctccccaacttggtcgtgcctcattacagaagatactggcttcgaccttggggtcactattgcccacgaaattggacactcgtttggactggaacatgatggagccccaggctccggttgcggccccagcggccatgtgatggcatcggatggggcagctccgagggctggactcgcgtggtcgccatgcagcagaagacaattacttagtctgcttagtgcaggacgcgcgcggtgtgtgtgggacccccctcgtcctcagcccgggtcagccggacacccgccggacgctcagccgggtctctattactcggctaacgagcagtgccgtgtggcgttcggccccaaagcggttgcctgtacttttgcacgagagcatctggatatgtgccaagccttatcgtgtcacactgacccgctcgatcaaagctcatgcagtcggctcctggtgccccttcttgacggtacggaatgtggagtggaaaagtggtgctctaagggacgctgcagatcgctagtagaacttactccgattgcggcggtgcacggacgatggtcctcttgggggccccgttcgccttgctctcggtcatgcggaggcggggtggtaacgcgcagacgccaatgcaataaccctcgaccggccttcgggggtcgggcgtgtgtgggcgcagatttgcaggcagagatgtgcaatacgcaagcatgcgagaagactcaactggagtttatgtctcaacaatgcgctcggacggatggtcaacctctgcgaagctcccctgggggtgctagcttctatcattggggtgccgctgttccacacagtcaaggggatgcgttgtgtcgtcatatgtgtcgtgccatcggtgagtcattcatcatgaagcgaggagactcatttcttgacggaactcggtgcatgccctccggcccccgtgaagatggcacactttcgttgtgcgtcagtggtagctgtcgcacattcggctgcgacgggcgcatggatagtcagcaggtctgggacagatgccaggtatgtgggggcgataacagtacatgttcgcctcgaaaaggtagttttacggctggccgggcccgggaatacgttacgtttctgactgtaactccaaacctgacgtccgtctatattgccaatcaccggccactatttacccatcttgctgtgcgcatcggtggccggtacgtggtagccggcaaaatgtccatcagtcctaatactacctacccttccctgttggaggatggacgagttgagtatagagttgccctcaccgaagatcgtttacctcgactagaagagatccgcatctgggggcctctgcaagaggatgcggacatccaagtttatcgtcgctacggtgaggagtatggcaacctaacgcgtcctgatatcacttttacgtattttcagcccaaaccgcgacaagcctgggtctgggcggctgttcgcgggccgtgctcggtcagctgtggcgctggacttcggtgggtgaactattcatgcctcgatcaagctcggaaggagctagtcgagacagtgcaatgtcagggctctcaacaacctcctgcatggccggaggcttgtgtcctagagccatgtccgccgtattgggcggttggagatttcggaccttgcagtgccagttgtggagggggactaagggaacgtcctgtgcgatgcgtagaggcccaggggtcactgctaaaaacgctccctccagcacgatgccgagcgggggcacagcagcctgcggtagcgctcgagacttgtaatcctcaaccctgcccggcccggtgggaggttagcgaacctagttcttgtacgtcggcaggtggggccggcctagcactcgaaaatgagacctgtgttccgggtgcagatggtctggaggcccccgtcactgaaggccccggctcagtcgatgaaaagcttcccgcacccgagccatgtgtgggtatgtcttgccccccgggatggggacacctggacgcaacatccgctggcgaaaaagccccttcgccgtggggatccattcgtactggtgctcaggcggcgcacgtctggacaccagcagctggttcctgttctgtttcatgtggaagaggtctcatggaacttcgcttcctctgtatggacagtgctctccgcgtgccagtccaagaagagctttgcggcctagcgagcaagcccggatcgaggcgagaagtttgtcaggcggttccttgtcccgctcggtggcaatataaattagcagcttgtagcgtgtcctgcggcaggggagtagtccggcgtattctttactgcgctagggcacatggcgaggatgatggagaggaaatactacttgatacccagtgccagggactgcctcgtccggaaccgcaggaagcatgcagcctcgaaccttgtcctcccagatggaaagtgatgtctctgggcccttgttcggcttcttgcggacttggcaccgcaaggcgctcggtcgcatgcgtccagctcgaccagggccaggacgttgaggtggacgaggccgcctgcgccgccctcgttcgccctgaggcatccgtcccatgtctaatcgccgattgtacgtatagatggcacgttggtacgtggatggagtgtagtgtctcctgtggtgatgggattcagcgtcgccgcgatacgtgcttgggccctcaagcacaggctccagtccccgccgacttctgccaacatctaccaaaaccagtcaccgtgcgcggttgctgggcaggtccatgcgttgggcaaggaacgccctcacttgtgccgcacgaggaggcagctgctccaggaaggacgactgccacaccggcaggcgcttctctggagtggtcccaggcccgtggtttgctgttctcgccagcgccccagccacgcaggctgttacctggcccgcaggagaatagtgtccaatcgtctgcatgcgggcgccaacaccttgagcccacggggacgatagatatgcgagggccgggccaagctgattgcgcggtggctataggtcggcctctcggtgaggtagtcaccttacgcgttttagagtcttctctaaattgtagtgccggagatatgttgctcttatggggtcgcctaacctggcgaaagatgtgtagaaagcttttggatatgacattcagttcgaaaaccaatacattggttgtccgccagcggtgtggtcgacccggtgggggagtgctattacgctacggttcccagttggcgccggagacattttatcgtgaatgtgacatgcagttgtttggcccttggggtgaaatcgtcagtccgtctctttcacccgcgactagcaacgctggcggatgtaggttgtttatcaatgtggcaccgcatgcccggattgcgatccacgctctcgcgacaaatatgggtgctgggactgaaggcgcaaatgcgtcctatattctgattcgcgatacccactctcttcgtaccaccgcctttcacggtcagcaggtgttgtattgggagtccgagtcgagccaggcagagatggaattcagcgagggttttctaaaagcgcaggctagccttcgaggacaatactggaccctccagagctgggttcctgagatgcaggatccccaaagctggaaagggaaagaaggtacg

SEQ ID NO: 237923 - DNA, 4281 bp, Artificial Sequence
  derived and/or modified sequence
atgcaccagcgccatccaagagcccgatgcccacctctgtgcgtggctggaatcctggcttgcggtttccttctcggatgttggggaccatcgcatttccagcaatcctgcctgcaagccctggagccgcaggcagtgtcatcttacctgagcccgggggctccgttgaagggacgcccaccatcacccggattccagagacagagacagaggcaaaggcgcgcagcgggcggaatcctgcacctggaacttcttgtggcagtgggacctgacgtatttcaggcacaccaagaggacactgaacgctacgtcctcactaaccttaacattggcgcagaactcctccgcgatccatccttgggtgcccaattccgtgtgcatcttgtcaaaatggtcatcctgacggaaccagaaggcgcccccaacataaccgccaacctgacctcgtcgctgctgagcgtgtgcgggtggtcacagactattaacccggaggatgatactgaccctggacacgccgacctcgtcctctacattacccgattcgacctcgagctgccggacggtaaccgccaagtccggggagtcactcaactcgggggtgcctgttcgccgacttggagttgcctgatcactgaggacaccgggtttgaccttggagtcaccatcgcccacgaaatcggccatagcttcggccttgagcacgatggagcccctggttcaggctgcgggccgtcagggcacgtgatggcatcagacggtgcagccccgagggctgggcttgcttggtcgccctgttccagaaggcagctgctgtctctcctgtcagccgggagggctcggtgcgtgtgggatccgcctcggccacaacctggatcggccgggcatccacccgacgcccagccgggactttactactcggcgaatgaacaatgccgcgtggcattcggacctaaggccgtggcttgcaccttcgcccgggaacatctcgatatgtgccaggctctgtcgtgccacaccgacccgctggatcaatcctcgtgctcgcgcttgctggtgcctttgctggacgggaccgagtgcggtgtggagaagtggtgctccaagggccgttgccgctcgctcgtcgaattgactcctatcgctgcggtgcatggccggtggtcctcatggggaccacggtcaccatgctcccggtcgtgtggagggggcgtggtgacccgccgacggcagtgcaacaacccgaggccggccttcggcggacgcgcctgcgttggcgctgacctgcaggcggagatgtgcaatactcaagcgtgtgaaaagacccaattggaattcatgtcgcagcaatgcgctaggaccgatggtcagcctctcaggagctcgccagggggagcctcattctaccactggggagcggccgtgccacatagccagggcgacgccctctgcagacatatgtgccgtgctatcggggaatcattcatcatgaagagaggagattcgttcctcgatggcacgaggtgcatgccatcgggcccgagggaggacggtaccttgtccctctgcgtgtccggatcgtgtcgcactttcggatgcgacggacgcatggattcgcaacaggtctgggataggtgccaagtgtgtggcggtgataattccacctgctcaccccgcaagggatcgttcaccgccggacgggctcgggaatacgtcactttcttgaccgtgactcctaatcttacttccgtgtacatagcgaaccacaggcccctgttcactcacctcgccgtccggatcggtggacggtacgtggtggcgggcaaaatgtcgatttccccgaataccacctacccgtcgctgctggaagatggccgcgtcgaataccgagtggcgctgactgaggaccggttgccacggctggaagagatcaggatctggggaccgctccaggaggatgcagatatccaggtctatcggcggtacggggaagaatacgggaatcttacgcgcccagacattactttcacctactttcaacctaagcctcgccaggcgtgggtgtgggctgccgtgagggggccatgctcagtgagctgcggagccgggcttcgatgggtgaactactcgtgcctggatcaggcccgcaaggagctcgtggaaaccgtccagtgccagggatcacagcagccacctgcctggccagaggcctgtgtcctggaaccatgtccgccatattgggcagtgggtgatttcggaccgtgctcagcgtcgtgcggaggcggattgcgcgaaaggccggtgagatgtgtggaggcccagggctcgcttcttaagacgctccctccggctcggtgccgggccggggcccaacagccggcggtggccttggaaacctgtaacccacagccatgcccggcgcgctgggaagtgtcggaaccttcgtcctgcacctcagccggaggcgcaggcctggcactcgaaaacgaaacctgtgtgcccggagcagacggactggaggccccagtcaccgagggtcccggctcggtggacgagaaactgccagcaccggagccgtgcgtgggtatgagctgccccccggggtggggacacctggatgccaccagcgcgggcgaaaaggctccatcaccgtggggcagcatccggaccggagcccaggccgcacatgtgtggactcctgcagccggttcgtgttcagtcagctgtgggaggggactcatggagctgagatttctctgcatggactccgccctcagagtgccggtgcaggaggaattgtgcgggctcgcatccaagcccggctcgcgcagagaagtctgccaggctgtgccttgccccgcgcggtggcagtacaagctcgccgcctgttcggtgtcctgcggccgcggggtcgtgcgccgcatcctctattgtgcgcgggcgcacggggaggatgatggagaagagatcctgttggacacgcaatgccagggactccctaggccggaaccgcaggaagcctgctcactcgaaccctgcccacctcggtggaaagtgatgtcgctgggtccgtgctcggcgtcgtgcggtctgggtacggcacgtcgcagcgtggcctgtgtccagctcgaccagggacaggatgtcgaggtggacgaagcggcttgcgcagccctcgtacgcccggaagcgtcggtcccatgcctcatcgcagattgcacctacagatggcatgttggaacctggatggagtgctccgtgtcatgcggagacggaatccaacgcaggagggacacctgtctgggaccacaggcacaagcccccgtccctgctgacttttgccaacacctgcctaagcctgtgaccgtccgcggatgttgggcgggaccatgcgttggccaaggaactccgtcattggtgccccacgaggaagcggcggcccctggaagaaccactgcaacccccgcgggagcatcgcttgaatggtcacaggctagaggcctgcttttctcgcccgcaccacaaccaagacggctgctcccgggaccgcaggagaacagcgtgcagagcagcgcctgcgggagacagcacctggagccgactggaactatcgacatgcgcggcccagggcaggcggactgcgcggtggcaatcggacgcccgctcggagaggtggtgactctccgcgtccttgagagctcactgaactgtagcgccggagacatgttgcttctgtggggacggctgacctggaggaagatgtgcaggaagctgcttgatatgaccttctcctcgaaaactaatactctggtggttcggcagagatgcggccgcccaggaggtggggtgctgctgaggtacggatcccaactggccccggagactttttaccgcgagtgcgatatgcagctgtttggaccttggggagagatcgtgagtccgtcactcagcccagcgacctcaaatgccggagggtgtagactgttcattaacgtggccccacatgcacgtatcgcaatccacgcccttgcaacgaacatgggagctggaaccgagggcgctaatgcgagctacattctgatccgggacactcattccctccgcaccactgcatttcacggacagcaagtcctgtactgggagagcgaatcgtcccaagcagagatggaattctccgagggatttctgaaagcccaggcgtccctgagaggccagtactggactctgcagagctgggtgccggaaatgcaggatccacagtcgtggaaaggaaaagagggaacg

SEQ ID NO: 237924 - DNA, 4281 bp, Artificial Sequence
  derived and/or modified sequence
atgcatcagagacacccaagagcgagatgtcctccgctttgcgtggcgggtatcctggcgtgcggtttccttttggggtgctggggaccttcgcactttcagcaatcatgcctgcaagcactggaaccgcaggcagtgtcgtcgtacctttcgccaggtgcacctctgaaggggcgtcctcctagccctggatttcagcgtcagaggcagcgacaaagaagggcagctggaggaattcttcacctggaactgctggtcgcagtgggaccggacgtgtttcaagcacatcaggaagataccgagagatacgtgctgacgaaccttaacattggggccgaactccttcgtgatcccagcctgggagctcagttcagagtgcatcttgtgaagatggtgatactgaccgaaccagagggagcgcctaacatcaccgcaaacttgacctcatcactcctttccgtctgtggctggtcgcagactatcaaccctgaagatgacactgatcctggacatgcggatctcgtgctgtacattacccggtttgacctggaactccctgatgggaatagacaggtgagaggtgtcacccaacttggtggtgcgtgttccccaacttggagctgcctgatcactgaagatacgggctttgacctcggagtcactattgcccacgaaattggccactcgtttggtcttgagcacgatggagcgcctggttcaggttgtgggccttcggggcatgtgatggctagcgatggggcagccccaagagccggactggcctggagcccatgttcccgtaggcaacttctttcactgctgtccgctgggcgcgcaagatgtgtgtgggaccctccaagaccccaaccaggtagcgcaggacatccccccgatgcacaacctggtctttactacagcgcaaacgaacaatgccgcgtggcatttggaccgaaggcagtggcgtgtacctttgcgcgcgaacatctggatatgtgccaagcattgtcctgccacactgacccgcttgaccagtccagttgtagccgacttcttgtccctcttcttgacggcactgaatgtggtgtcgaaaagtggtgtagcaagggaaggtgccggagccttgtggaattgactcccatagctgcagtccatggaagatggtcctcgtggggaccacgcagcccttgcagtcggtcgtgtggaggaggtgtggtcacccgccgtaggcagtgtaataacccacggcctgcattcggtggtcgggcatgcgtgggtgcagacctgcaggcagagatgtgtaatactcaggcatgtgaaaaaactcaactggagtttatgagccaacaatgtgctaggacggatggacagccacttagatcctcaccaggtggcgcatccttctaccattggggggcggcagtcccacatagccaaggggacgcactgtgccgccatatgtgccgcgcgatcggagaatcgttcataatgaaacggggtgattcctttctggacggaacccggtgcatgccgagcggtcctcgagaggacggaaccctgtctttgtgtgtgagcggatcctgtagaacttttgggtgtgatggtcggatggatagccaacaagtgtgggacaggtgccaagtctgcggaggcgataattcaacctgttcgcccagaaagggatccttcaccgcaggccgggcccgcgaatacgtaacgtttcttaccgtgacgcctaacctgacctccgtgtacatcgccaatcacaggccgctgttcactcatcttgcagtgagaataggaggacgttacgtggtggcaggcaagatgtcgatctcaccaaatactacctacccttcgctgctcgaagatgggcgtgtggagtaccgcgttgctctgactgaggatcgactgcctcggcttgaagagattcgaatttggggacctcttcaggaagatgctgatatccaggtctatagaagatacggtgaagagtacgggaacttgacccggcctgatattaccttcacctacttccaacctaagcctagacaggcttgggtgtgggcagccgttcgcggaccatgttccgtgtcctgtggagcaggtctgagatgggtcaactactcatgcctggaccaagccaggaaagaactcgtggaaactgtgcagtgccaaggttcccagcaacctcccgcatggccagaagcctgcgtgctcgagccttgcccaccctactgggcagtgggagattttggaccttgctcggcatcctgtggcggaggcttgagagagcgccctgtgcggtgtgtggaggcacaaggttcgctgctcaagaccctcccccctgccagatgccgggccggtgcacaacagccagcagtggcgctcgaaacctgcaatccacagccatgtcccgcgcgctgggaagtctccgaacctagctcgtgcacgtccgccggtggcgcagggctggcactggagaatgaaacctgtgtgcctggagctgacggactcgaggcgccagtgacggaagggcctggtagcgtggatgaaaagctgcctgcacctgaaccctgcgtcgggatgtcgtgcccacccggatggggtcaccttgacgcgacctccgcaggtgagaaggcaccatccccctgggggtctatcagaaccggggcgcaggcagcccacgtgtggacccctgcagcgggttcctgctccgtctcctgtggccgtggacttatggaacttcggtttctttgtatggacagcgctcttcgtgtgccagtgcaagaggagctctgcggactggcaagcaaacctggcagccgccgcgaggtgtgtcaagcagtgccgtgtccagcgcggtggcaatacaagctggcagcctgcagcgtgagctgcggccgcggggtcgtcagaaggatcctctactgcgcgcgcgcccatggcgaggacgatggggaagagattttgctggatacccagtgtcaaggactcccgcgccccgagcctcaagaagcatgctccctcgagccttgtcccccacggtggaaggtgatgtctctcggaccttgttcagctagctgcggtctggggaccgcccgtcggagcgttgcatgtgtgcagctggaccaaggacaagacgtcgaagtcgacgaagccgcatgtgcggcgctcgtgcgccctgaagcgtcggtaccatgtctcatcgcagattgtacctaccgttggcatgtgggaacgtggatggagtgttcggtgagctgtggcgatggtattcagcgtcggagggacacctgtctggggccccaagcccaagcaccagtgcctgctgatttctgtcaacatctgccgaaacctgtcactgtccggggttgctgggcaggtccctgtgtggggcaaggtacgccttcccttgtgcctcatgaagaggccgcagccccaggaagaaccactgcaacgccagcaggggcgtcactggaatggtcacaggcaagaggactgctttttagtcctgcacctcaacccagacgcctgctgcccgggccgcaggaaaactccgtgcaatcctccgcatgtggtaggcagcaccttgaacctacgggtactattgatatgcgcggtccagggcaggcagactgtgcggtggcaattggtaggcccctgggcgaagttgtcaccctgagggtgctggaaagctcgttgaactgttcagcaggcgatatgcttctgctttgggggagattgacctggcgtaaaatgtgtagaaagctgttggacatgacgttttccagcaagactaacaccctggtggtccgccagaggtgtggcagacccggaggtggcgtgctgctcagatatggctcccaactcgcaccagaaaccttttacagagagtgcgatatgcagctgttcggtccgtggggagagatcgtctcaccctcgctgtcccccgccaccagcaatgcaggaggatgtcggctcttcataaatgtcgcacctcacgcccgaattgccatccatgctctggccaccaatatgggtgcgggaaccgagggagcgaacgcgagctacatacttattcgggatacccattcccttcgtaccactgcattccatggacagcaggtgctttactgggaatcagaatcctcccaagcagagatggaattttccgaaggtttcctgaaagcccaagcaagcctcagaggccaatactggacccttcagtcctgggtgcctgaaatgcaagacccccaaagctggaagggaaaagaaggtact

SEQ ID NO: 237925 - DNA, 4281 bp, Artificial Sequence
  derived and/or modified sequence
atgcatcaaagacacccgcgcgcgcgctgtccgccgttgtgcgtggccgggatcctggcctgcgggttcctgctgggatgttggggaccatcacacttccagcaatcgtgtctccaggccctggagccccaggcggtgtcgtcctacctgtctcctggtgcgccgctgaaggggaggcccccgtcacctggattccagagacagcggcagagacagagacgcgctgcgggagggatccttcatctggaacttctggtggccgtcggtccagacgtgttccaggcccatcaggaggacactgagagatacgtgctcaccaacctgaatatcggagccgaacttctgagggacccatccctgggagcccagttcagagtgcacctcgtgaagatggttatcttgactgaacctgaaggtgctcccaacatcactgctaacctgacttcctccctcctgtcggtgtgtggctggagccagacgatcaatccggaagatgacaccgacccgggacacgcggatctcgtgttgtacatcacccggttcgacctggagttgcccgacggaaacagacaggtgcggggcgtgacccagctcggaggcgcttgctcccctacttggtcctgtttgatcaccgaggatactggattcgatctgggagtcaccatcgcccacgaaatcggccactcattcggtctggaacacgacggagccccagggtcgggatgcggaccgtccggtcacgtgatggcatctgatggagccgcaccgagggcgggcctcgcttggtcgccgtgcagccggaggcaattgctctcactcctgtcggctggacgcgcgcggtgcgtgtgggacccaccccgaccccaaccgggatccgcaggacacccaccagatgcccaacctggcctttactactccgccaatgaacagtgccgggtggcgttcggcccgaaggcagtggcttgcaccttcgcaagagaacatctggatatgtgccaagccctgtcatgccatactgacccccttgatcagtcatcctgctcgcggctgcttgtgccgctgctcgatggaactgagtgcggagtggagaaatggtgcagcaagggtagatgccgcagcctcgtggaactgactccgatcgccgccgtccacgggagatggtcatcctggggaccccgatcaccatgttcaagatcgtgcggcggaggtgtggttacgaggaggaggcagtgcaataacccccgacccgcgtttgggggccgggcttgcgtcggagcagatcttcaggccgagatgtgcaacacccaagcctgtgagaaaacccagctcgaattcatgtcccagcagtgcgccaggactgacggacagcctctcaggagctcgcctggaggagcctcattttaccattggggggccgccgtgccccactcgcagggagacgccctgtgtaggcatatgtgccgcgccatcggagaaagtttcatcatgaaaaggggagactcattcctcgacggaactcggtgcatgccatcaggtccccgcgaagatggcactctcagcctgtgcgtctcaggcagctgtcggacgttcgggtgtgacggacgcatggacagccagcaggtgtgggatcgctgccaagtttgtggcggggacaactcaacttgctcaccgagaaaggggagcttcactgcaggacgtgcacgggaatacgtgactttcttgactgtgactccaaaccttactagcgtgtacattgcgaaccaccgccctctttttacgcacctggcagtccggatcggaggacgctatgtggtggccggaaagatgtcgatttcgcccaacaccacctacccgtcgctgctggaggacggacgggtggagtaccgggtcgccctcaccgaggaccgcctgccaagactcgaagaaatccgcatttggggccctctccaagaggatgcggatatccaggtgtaccgccggtacggtgaagaatacggcaatctcaccagacctgacatcactttcacttacttccagccgaagccgcggcaggcctgggtctgggccgccgtccggggaccatgctcagtgtcgtgcggagcaggacttcggtgggtcaattacagctgtctggaccaggcccgcaaggaactcgtggagactgtgcagtgccagggttcccagcagccgcctgcgtggccggaggcgtgcgtgctggaaccgtgccccccgtactgggccgtgggtgacttcgggccgtgctccgcctcatgcggaggaggactgagagaaaggcccgtgcgctgtgtcgaagcgcagggatcgctcctgaaaaccctgccgccggcacggtgcagggccggcgcgcagcagccagccgtcgctctcgaaacttgcaatccacaaccgtgcccggcgcgctgggaagtgtccgaacctagcagctgtaccagcgcgggaggcgcgggccttgcgttggaaaacgaaacttgcgtgcctggagctgatggactggaggccccagtcaccgaaggccctggatcggtggacgagaagctcccggctccggaaccttgcgtgggcatgtcgtgcccgccaggatggggacacctcgatgccacttccgcaggagagaaggctccgtcaccgtggggctccatccgaaccggtgcccaagcggcgcatgtctggactcccgcagcaggatcgtgctcagtgtcctgcgggaggggacttatggaattgagattcttgtgcatggactcggctctcagagtgcctgtccaggaagagctgtgcggactggcatctaagcctggatcgcgccgcgaggtctgccaagccgtcccctgcccggccagatggcagtataagctggctgcctgtagcgtgagctgcgggcgcggcgttgtgagacgcattctgtattgtgcccgagcgcacggagaagatgatggcgaagagatccttttggacacccagtgccaaggcctgcccagacctgaaccgcaggaggcatgctccctggaaccatgcccgcccagatggaaagtgatgagcctgggaccgtgcagcgctagctgtggcctcggaactgcacggaggtcagtggcgtgtgttcagctggatcaaggacaggatgtcgaggtggacgaagcagcctgcgccgcgctggtgaggcctgaggcatcagtgccgtgtctgatcgctgactgcacctaccggtggcacgtgggtacctggatggaatgcagcgtgtcatgcggggatggaatccagaggcggcgggacacttgtctcggaccacaggctcaggccccggttccggcagacttctgccagcatcttcccaaaccggtgactgtgcggggatgctgggcagggccgtgcgtggggcagggaactccgtcacttgtgccacatgaagaagccgcagcgcctggacggacgaccgcaaccccggctggcgcctcgctggaatggagccaagcccgcggtctgctcttctcgccggcacctcagccgagacgtctccttccgggaccgcaagagaattccgtgcagtccagcgcctgcggccgtcaacacctcgaaccgaccggtacgatcgacatgagaggtccgggccaggcagattgcgctgttgctatcgggcgcccgctcggagaggtagtgactctgagagtgcttgagagctccctgaactgctcagcgggcgatatgctcctgctttggggacgtctcacctggcgcaagatgtgccggaaactgctggacatgaccttcagctctaagactaatacgctggtcgtccgccagcgctgcgggcgacctgggggcggagtgctgctgcggtacggctcccagctggcgccagaaaccttttatcgcgagtgcgacatgcagctgttcggaccatggggagagatagtttcaccttcgctgagcccagccacgtccaacgcgggcgggtgtcggttgttcatcaacgtggccccgcatgctcgcattgcgatccatgccctcgcgactaacatgggggcaggaaccgaaggcgcgaacgcttcgtacatcctcatccgggatactcactccctgcgaactactgcatttcatggacagcaggtgctgtactgggagagcgaatcaagtcaggcggaaatggaattctcggaaggattcctgaaagcccaagcatccttgcggggccaatactggaccttgcagtcctgggtgcctgagatgcaagacccacaatcatggaagggtaaagaaggaacc

SEQ ID NO: 237926 - DNA, 4281 bp, Artificial Sequence
  derived and/or modified sequence
atgcatcaaaggcaccctcgagcaaggtgtccaccactctgcgtagccgggatcctggcgtgcggatttctcttagggtgttggggaccatcacattttcaacagagctgcttacaggccctcgagccgcaggccgtttccagctacttgagtcccggagctccgttgaaaggtcgaccacccagccctggtttccagagacagagacagcgacagaggcgagccgcaggcggcatcctacatcttgagctcttggttgctgtggggccagatgtattccaggcacatcaagaggacacagagcgctacgtgcttacgaacctcaacattggcgcagaactgctcagggatccgagcctcggcgctcagtttagggtgcatctggttaagatggtgatcctcacagagcctgaaggagcaccaaatatcactgctaacctcacctcatcgctgctgtcagtgtgtggctggagccaaaccattaatcctgaagatgacaccgatccaggccacgccgacttggtgctctacataacacgcttcgatttggaactgcccgacgggaatcgccaagttagaggcgtgactcagctggggggtgcctgtagtcccacgtggagttgcctgattaccgaagatacagggttcgatcttggggttacaatcgcccacgagattggccactccttcggtctcgaacatgatggcgctcctggatcaggatgtggaccttccggccatgtcatggcttcagatggtgctgcgccacgcgccggtctggcttggtcgccctgttcacggcgccagctcctgagcttgctgagcgccggcagggccaggtgtgtgtgggacccacccagaccccagcctgggtcagcaggccacccccccgacgcccagccaggcctgtattatagcgcgaatgagcaatgtcgcgtcgcgttcgggccaaaagccgtggcatgcactttcgcacgcgaacacctggatatgtgccaagcattgtcgtgtcatacagacccactggatcagtcctcttgtagtcgcctcctcgttccattgctagatggaactgagtgcggcgtagaaaaatggtgctctaagggacgatgtaggtcattagtggaactgacacctatagcagctgttcacggcagatggtcctcgtggggtcccaggtccccctgctctcgaagctgtggcggtggagtagtgactcgtagacgacagtgcaataatccaaggcccgcctttggtggccgggcttgcgtgggcgccgatttgcaggctgaaatgtgcaacacccaggcctgtgagaagacccagttggagttcatgtcacaacagtgcgctcgcactgatggtcagcctttaagatcttcgcccggcggtgcctccttttaccattggggagcggcggtgccacattcccagggggacgcgctctgccgtcatatgtgcagagccatcggcgaaagttttattatgaagagaggcgatagtttcttagacggcacgaggtgcatgccatctggccccagggaggatggaaccttgtcgttgtgtgtttcaggatcctgccggactttcgggtgtgacggacgaatggactcccagcaagtgtgggaccgctgccaggtttgcggtggggataattcaacctgttcccctcggaaaggtagcttcactgcaggtcgagcccgagagtatgtgaccttcctgactgtcacccctaatctgacatctgtctatatcgcaaaccaccgtcctctgttcacacacctcgccgtgaggataggcggtaggtatgtcgtcgccggcaagatgagtatttcccccaataccacctatccctcacttcttgaggatggcagggtcgagtaccgggtagcccttactgaggataggcttccccggctggaggaaatacgtatatggggccctctgcaggaggacgccgatattcaagtttatcgtagatacggcgaagagtatggaaatctcacaagaccggacattacctttacctatttccaaccaaagccacgtcaagcgtgggtctgggcagccgtgaggggcccgtgctcagtcagctgcggagcagggttacgatgggtcaactactcctgtttagaccaagctcgcaaggagctcgttgaaaccgtacagtgccagggctcccagcaaccccccgcgtggccggaggcctgtgtgcttgaaccatgccctccatattgggcggtgggtgattttggaccttgttcagcatcttgtggtgggggactgagagagcggcccgttaggtgtgtggaggctcaggggtctctcttgaaaacactcccacctgctagatgtcgggctggagctcagcagccagccgttgccctggagacttgtaatcctcagccgtgtcccgccagatgggaggtttcggagccatcctcatgcacatctgctggtggagctggcctggcgcttgaaaatgagacctgcgtgcctggagccgatggactggaggcccctgtgacagaagggcccggatctgtggacgaaaaacttcccgctccagaaccatgcgttgggatgtcctgcccccctggctggggacatctggatgccacctcagctggagagaaggcaccaagcccatgggggagcatcagaactggagcccaagctgcacacgtgtggactccagccgctggaagctgcagtgtgagctgtgggagaggtctgatggagctgagatttctttgcatggactcggcactgagagtacccgtgcaggaggagctgtgcgggctggcctcaaagcctggctctaggagagaggtctgtcaggccgtcccgtgccccgcccggtggcagtataagctggctgcctgctcggtttcctgtggtcggggggttgtcagaagaatcctatactgcgccagagcccatggagaagacgatggagaggaaatactcctcgacactcagtgccagggcctcccacggcctgaacctcaggaggcgtgttccctggagccctgtcccccaagatggaaggtaatgagtctgggtccatgttctgcgtcctgcggtttgggcaccgcacgaagaagtgtcgcttgcgtgcagctggaccagggccaagatgtggaggttgatgaggcggcatgtgcggcactcgtgaggccagaagcttctgtcccctgtctgatcgctgactgtacttatcggtggcacgttggtacttggatggagtgcagtgtcagctgcggtgacggcattcagagacgccgggacacttgccttggcccacaagctcaggcacccgttcctgctgatttctgtcagcatttgcccaaacctgtgacagtgagaggatgttgggcgggcccttgtgtcggccaggggaccccctcacttgtgccgcatgaggaggccgccgctcctggtcgcactactgctacacccgccggtgcaagcctggaatggagtcaagccaggggcttgctgttttctcctgctccccagcctcgccgactgttgcctggcccgcaggaaaatagcgttcagtcctctgcatgcgggcggcaacaccttgagcccacggggaccattgacatgagggggccggggcaggccgattgcgccgtggccattggaaggcctctcggagaagtagtcactctgcgcgtgctggaaagttccctgaattgctctgctggggacatgcttctgctctgggggaggctgacctggagaaagatgtgcagaaagctcctggacatgacattttcgtctaaaaccaatactctggtcgtacggcagaggtgtggaagacccgggggaggtgtcctgctccggtatggctcacaattagcgcccgagaccttctacagagaatgcgatatgcagctttttggtccctggggggagattgtgtcaccatcccttagccccgctactagcaacgccggcggctgccgccttttcatcaatgtggccccccacgcacgcatcgcgattcatgccttggccaccaatatgggcgccgggaccgaaggtgccaatgcatcttacattctaatacgtgacacccatagcctgcgaacgacggcttttcacggccaacaggtgctgtattgggagagcgagtcatcacaggctgaaatggaattcagcgaaggttttttaaaagctcaggcttctttacggggccaatactggacacttcagtcttgggtgcctgaaatgcaagatccccagagttggaagggaaaggaggggacc

SEQ ID NO: 237927 - DNA, 4281 bp, Artificial Sequence
  derived and/or modified sequence
atgcaccaacgccatcctagggctagatgtccgccactgtgtgtggccggcattctggcctgtgggttcctgcttggatgctggggaccctcccatttccagcagagctgcttgcaagcactggagccacaggcggtcagctcatacctcagccctggcgcccccctgaaaggaagacctccctcacccgggtttcagcgacagcgacagcgccagaggagagccgccggcggaattctgcacctcgagttacttgtcgctgtgggccccgacgtcttccaggcccaccaggaggacacggaacgatatgttttaaccaacctgaacataggggctgaactgctccgagacccgtccctcggcgcccagttcagagtccacctagtgaagatggtgatcctcacggaacccgagggagctcctaacataacggcgaacctgacttcctctttgctgtcggtatgtggctggagccaaaccataaaccccgaagatgatactgatcctgggcacgctgacctagtgctttatattacaaggttcgacctcgaactccccgatgggaacaggcaggtgcgtggtgtgactcagctggggggagcctgtagtcccacctggtcctgcctcattaccgaggataccggatttgatctgggggtgaccattgctcacgagataggccatagcttcgggctcgagcatgacggagcaccagggtcaggctgcggtcccagcggccacgtcatggcctcagacggggcggccccaagggccggcttggcgtggtccccctgcagtcgacgacagcttctgagcctcctatccgccggcagggcacggtgcgtatgggatcctcccagaccacagcctggttccgctggccatcctcctgatgcgcagcccgggctttactattccgctaatgaacagtgtagagtagccttcgggccgaaggccgtggcttgcactttcgccagagagcacctggacatgtgtcaggccctcagttgccacactgaccccctggaccaaagctcttgctcacgattgctcgtccctctactggacggtaccgagtgtggggtcgaaaagtggtgtagcaaaggccgctgccgatctctggtggagctgacacctatcgcagccgtgcatggaaggtggtcaagctggggaccgaggtctccttgttccagatcatgcggcggaggtgtcgttacacgacgacgccagtgcaataacccgagacccgcgttcggggggcgcgcctgcgtcggtgcggacctccaggcagaaatgtgcaatactcaagcatgcgagaaaacccaacttgagttcatgagtcagcagtgcgctcggactgatggtcagccgctgcgcagctcgcctggcggggcatcgttctatcattggggggctgccgtgcctcatagccaaggcgatgccctctgtcgacacatgtgccgagcaatcggagagagttttattatgaaaaggggagactccttcctggatggtaccaggtgtatgccatccggacctagagaggacggcaccctttcattgtgcgtgagtggtagttgcaggacatttgggtgtgatgggaggatggattcccaacaggtctgggaccgatgtcaagtgtgtggcggggacaactccacctgttcacccaggaaaggaagttttacggcaggtcgtgcacgagagtacgtgaccttcctgacagtcactcccaatctgacctcggtctatattgccaaccatcgaccactgtttactcacttggcagttcgaatcggcggccgttacgtagtggctggcaaaatgtcaatatcccctaacacaacctatccctcattgcttgaggatggtagggtggaatatagagtagctctcactgaggatcgcctcccacggctggaggaaatccgtatttggggaccactgcaagaggatgcagatattcaggtgtacagacgatacggcgaggaatatgggaacctcactagaccggatataacctttacttacttccagcccaaaccaagacaggcatgggtatgggccgctgtgagaggtccttgcagtgtaagctgtggcgcgggacttagatgggtaaactattcttgcctggatcaagccaggaaggagctcgtggaaacagtgcaatgccagggtagccaacagcctccggcttggcctgaagcttgtgttctggaaccttgtcctccatattgggccgtgggtgacttcggtccttgttctgcctcttgtgggggtggactccgagagcgcccagtgcgatgtgtggaagcccagggcagcctcctgaagaccctgcctccggcgcggtgtcgggctggcgcacaacagccagccgtagctttagagacttgcaatccccagccctgccccgctaggtgggaagtgtccgagccatcttcctgtacttccgccggcggggcaggcctggctctggaaaatgagacatgcgtgccaggggccgatggcttggaggcccccgtgacagaaggaccagggagtgtcgacgaaaaactgccagccccagaaccttgtgtcgggatgtcttgccccccaggatggggacacttggatgctacttcagccggcgagaaggccccctctccatggggcagtattagaaccggcgcgcaggcagctcatgtttggacacctgctgctggatcctgtagtgtgtcctgcgggcgaggcctaatggaactgagattcctgtgtatggattccgccctaagggtgcctgtgcaggaggagctctgcgggctagctagtaagccaggatcgcggcgagaagtctgccaagctgtgccctgcccagcaagatggcaatacaaacttgccgcatgctcagtaagttgtggaaggggagtagtgagacggattttgtactgtgctcgagcccatggcgaagacgacggtgaagaaatcctcctcgatacacagtgtcaaggactgccaaggccagaaccacaagaagcatgctctctggaaccatgcccaccaagatggaaagttatgtcactcggaccgtgcagcgcctcatgcggactaggcacagcccgacgcagtgtagcatgtgtccagttggaccaaggccaggatgtcgaggttgatgaggcagcgtgcgccgcactggtgcgaccggaggctagtgtcccctgcttgatcgccgactgcacatatcgctggcatgtcgggacgtggatggagtgttctgttagctgcggagacggaatacaacgtcggcgagatacatgtctgggacctcaagcgcaggcaccggtacctgccgacttctgccagcatttgcccaaaccggttacagttagaggctgttgggcaggcccatgcgttgggcaaggcaccccttccctagtgccccacgaagaagccgccgcgcctggacgaacgacagcgacacctgctggggccagcttagaatggagtcaagcaagaggtctgttgttctcccccgccccacagccacgtcgattattaccaggacctcaggagaactcggtccagtccagcgcttgcgggcgacagcacttggaacctacaggaacaattgacatgcggggcccaggccaagccgactgcgctgtcgctattggccgacccttgggtgaggtggtcacacttcgcgttttagagagctcactgaattgctctgctggcgacatgctgctgctctggggccgactaacgtggcgtaagatgtgtaggaaactgctcgatatgactttttcatctaagacaaatactctcgtggttaggcagcggtgcgggaggcctggtggtggagtactgctgcgatacggcagccaactggcccccgaaacattttatcgggaatgtgacatgcagttgtttggtccctggggagaaattgtgtccccgtcactgtctccagccactagcaacgccggcggatgtagactcttcataaacgtggctccccacgcccggatcgccatccacgccctggcgaccaatatgggcgcaggcaccgagggagctaacgcatcctacatactcatcagggatactcatagcctgagaactactgcatttcatggccagcaggttctttattgggaaagcgagtcttctcaggccgagatggaatttagcgaaggatttctcaaggcacaagcctccctcagggggcagtattggacattgcagtcctgggtgccagagatgcaggaccctcagtcttggaagggaaaagaagggact

SEQ ID NO: 237928 - DNA, 4281 bp, Artificial Sequence
  derived and/or modified sequence
atgcaccagagacacccgcgcgcccgctgcccgccactgtgtgtggcaggcatcctcgcgtgcggcttcctgctcggctgctggggaccatcgcatttccaacagagctgcttgcaagcgttggaaccgcaggcggtgtcctcctacctttcgcctggtgctcccttgaaaggacggccgccctccccggggttccagaggcagagacagcggcagcgccgagcagcggggggaatccttcacctcgagctcctggtggcagtgggcccggacgtgtttcaggcgcatcaagaagataccgagcgctatgtgctgactaatttgaatatcggagctgaactcctgcgcgacccttcgctgggggcacagtttcgcgtgcacctcgtgaagatggtgatcttgactgaaccggagggagccccaaacattaccgctaacctgacgtcctcgctcctgtcagtctgtgggtggtcacaaaccatcaatccagaggacgacacggacccgggacacgcggacctcgtgctttacattaccagatttgatctggaacttccagatgggaaccgacaagtgcgcggggtgacccaactgggaggcgcctgctcgcctacttggtcgtgcctgatcactgaggacactggattcgacctcggcgtgaccatcgcccatgagatcggtcactcattcggactggaacatgacggagcacctggttctggatgtggcccttcggggcacgtgatggcatcggacggagccgcaccgagagcaggcttggcctggtcaccttgctcgaggcgccagcttcttagcctgctcagcgcggggcgcgcgcgttgtgtctgggacccaccccgccctcaaccgggttccgccggacacccaccggatgcacaaccaggcctctactactcggcgaacgaacagtgccgggtggcgttcggtccgaaagcagtggcctgcaccttcgcacgggagcacctggacatgtgccaagccctgtcgtgccataccgaccctctggaccagagctcgtgctcccggcttctggtccctctgctcgatggcaccgagtgtggtgtggaaaagtggtgcagcaaaggtagatgccggagcttggtggaactcactccgatcgccgccgtgcatggaaggtggtcatcgtggggcccgagaagcccctgttcgcgctcctgcggcggaggcgtcgtgaccagaaggcgccagtgcaacaacccgcgcccggccttcggcggacgggcctgcgttggagccgatctgcaagcggaaatgtgcaatacccaggcgtgtgagaaaactcagctcgaattcatgagccagcaatgcgcacgtactgatggccaaccgttgcgctcgtcaccgggaggcgcctcattctaccactggggagcggctgtgccgcacagccagggcgacgcgctgtgccgacatatgtgccgggccattggagaatcgtttatcatgaaacggggcgactcctttttggatggcacgaggtgcatgccatccggcccacgggaggacggtaccctcagcctctgtgtgtcggggagctgtcggacctttgggtgcgacggacggatggattcgcaacaggtgtgggataggtgccaagtctgcggcggagacaattcaacgtgctcgccacgcaaaggttccttcactgcaggacgggcacgcgagtacgttactttcctcactgttaccccaaacctgactagcgtttacatcgccaaccaccgcccgctcttcacccacctggcggtgcgcatcggcggtcgctatgtggtggcaggcaaaatgtcgatcagcccgaacactacctacccgtcactcctcgaggacggccgcgtggaataccgggtcgcactgaccgaggaccgcctgccacgactggaggagatcagaatctggggaccgctgcaggaagatgcggatatccaggtgtaccgaaggtacggtgaagagtacggaaatctcaccagacctgatattaccttcacttacttccagccgaagcctcggcaggcatgggtctgggcggcggtccgggggccctgctcagtgtcgtgcggagccggactgagatgggtgaattactcctgtctggaccaagcgcgcaaggaactggtggaaaccgtgcagtgccaaggttcacagcaacctccggcgtggccggaagcatgcgtgctggagccgtgcccgccgtactgggctgtgggagactttggaccatgtagcgcttcgtgcggaggtggccttagagagcgcccggtgcgctgtgtggaagcacaaggttcgttgctgaaaactctgccaccggcccgctgccgcgccggtgcccaacagccagcggtcgcacttgaaacctgtaatcctcaaccgtgtcccgctagatgggaagtctcggagccttcatcgtgcacctccgcgggtggtgccggacttgctctggaaaacgaaacctgcgtgcccggcgcggatggactggaggccccagtgaccgaaggaccggggtcggtggatgagaagctcccagctccagagccgtgtgtcggaatgagctgtcctcccggatgggggcacctggatgcgacctcagcgggagaaaaggctccgtcaccttggggaagcatccgcaccggagctcaggcagcacatgtctggaccccggccgccggatcctgctcggtgtcgtgcggcagaggcctcatggaactgcggtttctgtgtatggattcagccttgagagtgccagtgcaggaagaactctgcgggctggcctccaagcccggctccaggcgcgaggtttgccaagcggtgccttgtccggcccgctggcagtataagctggccgcatgctccgtctcctgcggtcggggagtcgttagacggatcctttactgcgcccgcgcacatggagaggacgacggcgaggaaattctgctggacactcaatgccagggattgcccaggcccgaaccacaagaggcttgctcgctcgaaccgtgtcccccaaggtggaaggttatgtcgctcggaccatgctcggcgagctgcgggctgggaacggcccgccggagcgtggcgtgtgtccagcttgaccagggacaggacgtggaagtggacgaagcggcgtgcgccgccctggtcaggccagaagcgtccgtcccgtgcctcatagcagactgcacctacagatggcacgtgggaacttggatggaatgctccgtcagctgcggagacggtatccagcggcgccgggacacttgcctcggaccgcaggcacaggctccggtgccagccgacttctgtcaacacctgccaaaaccggtgaccgtgcggggctgttgggcgggaccttgcgtcggacaaggaaccccgagccttgtgccacacgaggaagcggccgcaccagggcgcacgactgccactccggctggcgcctcactggagtggtcccaggccagaggccttctgttttccccagctccccagcccaggcggctgctccccggccctcaagaaaacagcgtgcaaagcagcgcctgcggtcggcagcacctggaacctactgggactatcgatatgcgcggaccaggacaggcggattgcgcggtggccatcggccggccgcttggggaagtggtgacccttcgcgtcctcgaaagctcactgaactgctccgctggagacatgctcttgctttggggaaggctgacgtggcgcaagatgtgccgcaaattgcttgacatgacgttcagctcaaagaccaatacgctggtcgtcagacagagatgcggaaggccggggggcggggtccttctccggtatggatcgcagctggccccggagactttctaccgggagtgcgacatgcaactgttcgggccttggggtgagatcgtctcaccttccctctcccctgctaccagcaatgcgggtggatgccggctgttcatcaacgtcgcgcctcatgcacgaatcgccatccatgcactcgccactaacatgggagccgggaccgaaggcgcaaatgccagctacatcctgatccgagacacccattcccttagaaccaccgcctttcatggacaacaggtgctttactgggaatcggagtcgtcacaagctgagatggagttctctgagggcttcttgaaggcccaggctagccttagaggccagtactggaccctccaaagctgggtcccggagatgcaggacccacagtcgtggaaagggaaggaaggaacc

SEQ ID NO: 237929 - DNA, 4281 bp, Artificial Sequence
  derived and/or modified sequence
atgcatcaacgccacccacgcgcaagatgcccacctctgtgcgtagctggtatcctggcgtgtggctttcttctgggatgctggggaccatcccattttcaacagtcgtgtctgcaggcgttggagcctcaggcagtgtcgtcctacctttccccaggagcaccccttaagggcagacctccatcacctggtttccaacgccaacgtcaaagacaacggagggccgcaggaggaattcttcacctggagctgcttgttgccgtgggcccagatgtgtttcaagcacatcaggaagatactgaaagatacgtgttgactaatcttaacattggagcggaactgcttagggacccatcgcttggagcccagtttcgggtccatttggtcaagatggtgatcctgaccgaaccagaaggagctcctaatatcactgcaaatttgacttcctcccttctttcagtgtgtggatggagccaaactataaaccctgaggacgatactgatccaggtcacgcagatctggtcttgtacataactagattcgaccttgagctgcctgatggtaaccggcaagtgaggggagtgacccaactgggtggtgcgtgtagccctacttggtcctgtcttattaccgaggatacgggatttgatctgggggtgaccattgcacatgagatcggacattcgtttggactggaacacgacggagcgcccgggtcaggttgtgggccatcgggtcatgtcatggcatccgatggagccgcgccacgggctggtctggcatggtcgccatgctccagacgtcaacttttgagcctcctgtccgcaggtagggcacgatgcgtctgggatccacctaggcctcagccaggttcggcagggcatcctcccgacgcacagccaggcctgtattactccgcaaacgaacaatgtcgcgtcgctttcggccctaaagcagttgcttgcactttcgcacgcgagcatctggatatgtgccaagcactctcctgtcataccgatccccttgatcagtcctcatgttcccgtctgctggtgcctctgctggatggaaccgaatgcggagtcgaaaaatggtgtagcaagggtaggtgccgaagtcttgtcgaactgactcctatagcagcagtgcacggcaggtggtcctcgtggggaccacggagcccatgtagcagatcctgtggcggaggcgtcgtgacccgaaggcgtcagtgtaataaccctcgacctgcatttggaggacgtgcctgcgtaggagccgatcttcaagcagagatgtgcaacacccaagcctgtgagaaaactcaactcgagtttatgtcgcagcaatgtgcaaggactgacggccagcctcttagaagctcccctggaggggcctccttttatcattggggcgccgcagtgccacacagccaaggggatgcactttgtagacatatgtgtagagcaattggagaatccttcattatgaaacgtggcgatagtttccttgatggcacgcggtgcatgccgtccggtccgagggaagatgggactctgtcgctgtgcgtgagcggttcgtgtagaacttttggttgtgatggtcgcatggattcccagcaagtgtgggaccgatgtcaagtgtgcgggggtgataattccacttgttcgccccgcaaagggtcatttactgccggacgtgcaagggaatacgtcaccttccttaccgtgactcctaatctgacctcagtgtacattgctaatcaccgcccactttttacccatctggcagtgagaattggtggaagatatgtggtggcaggcaagatgtcgatatcacctaatacgacctacccatcgctgttggaagatggcagagtcgaatacagggtggcattgacggaagatcgccttccaagactggaagagatccgcatttggggtcccctgcaggaagatgcggacattcaggtctacagacgctacggagaagaatacggaaatcttaccagacctgatatcacttttacgtactttcagcctaagccacggcaagcctgggtgtgggccgcagtccgcgggccctgtagcgtctcgtgtggtgcaggactgagatgggtcaactacagctgccttgaccaggcccgtaaagagctggtcgagactgtgcagtgtcagggttcacagcagcctcccgcatggcccgaggcttgtgtcctggagccgtgtcctccttactgggcagtgggagacttcggtccttgtagcgcatcctgcggaggaggactgagagaaaggccagttagatgtgtggaagcccagggaagcctgcttaagacccttcctcctgcaagatgccgcgcaggagctcaacaaccggcagtggcgctggagacttgtaacccacaaccctgccccgcacgttgggaagtttccgagccctcgtcgtgtacttcagccggcggcgcaggactcgcccttgagaacgaaacttgtgtccctggtgcagacgggctcgaggcaccagtgaccgaaggtccaggttcagtggatgagaagttgcctgctcccgaaccgtgcgtgggtatgtcatgcccccctggatggggtcatctggacgcaactagcgcaggagaaaaggcaccgtcgccttggggttccattcggaccggagcccaagcagcacatgtgtggactcctgccgctgggtcgtgttccgtgtcatgcggaaggggcctgatggaacttcgctttctttgtatggatagcgccctgagggtgccggtgcaagaagaactgtgtggtctggcgagtaagcccggatcccgccgggaggtctgtcaggctgtcccctgcccagcaagatggcagtacaaacttgcagcctgctcagtgagctgtggtcggggagtggtgagacgtattctttactgcgcacgtgctcatggtgaggacgatggcgaggagatactgctggacacccagtgtcaaggtctgcccaggccggaacctcaagaggcatgtagccttgaaccatgtcctccaaggtggaaggtcatgtcactgggtccatgcagcgcatcctgtggacttgggaccgctcgacgaagtgtggcctgtgtgcaactggaccaaggtcaggacgtggaagtcgatgaagcagcgtgcgcggctttggttagaccagaggcaagcgtcccctgtttgattgcggattgcacctacagatggcacgtggggacgtggatggaatgtagcgtgtcgtgtggtgacggtattcaaaggcgacgcgacacttgtctcggaccacaagcccaagcacccgtcccagcagacttctgtcaacatttgccgaagcccgtcactgtcaggggctgctgggccggtccatgtgtgggtcaaggaacccctagcttggtcccacacgaagaagccgcggcgccaggacgtaccacggctactcctgcaggcgcatcactggaatggtcacaggcacgtggcctgctgttttcacctgcaccacagccacggcgacttctgccgggaccgcaagaaaactcggtgcaatcatccgcttgcggacgacagcacctggagcctaccgggaccattgacatgcgaggcccaggacaagccgattgtgccgttgccatcggtagaccgctcggagaagtggtgaccctccgggtgcttgagtctagcttgaactgttctgctggtgacatgctcctgctgtgggggcgcctcacgtggagaaagatgtgtcgcaaacttctggacatgactttctcgtcgaaaactaacaccttggttgtccggcaacggtgcggtcggcccggaggaggcgtgctgcttcgctacggctcacaattggcacctgaaaccttttaccgagaatgtgatatgcaactgtttggcccctggggggaaatcgtgagcccaagcctttcacctgctacctcgaatgccggtggatgccggttgtttatcaatgttgcacctcacgcgagaattgccattcacgcgctggcaaccaatatgggtgctggtaccgaaggagcaaacgcctcgtacattctgattagagatacccactcgcttcgcaccaccgcgtttcacggccagcaggtgctttactgggaatcagagtcctcacaggcagaaatggagttctcggagggattcctcaaggcgcaagcgtcgcttagaggccaatactggaccttgcagagctgggtgccggaaatgcaggatccacaatcgtggaaggggaaggaaggaact

SEQ ID NO: 237930 - DNA, 4281 bp, Artificial Sequence
  derived and/or modified sequence
atgcaccagcgccaccctcgagctaggtgtcctccactctgtgtggccggcatcctggcatgcgggtttctccttggatgttggggtccttcccactttcaacagtcctgccttcaagcacttgaaccccaagcagtgagctcctaccttagcccaggcgcacctctgaagggtcgccctccttctcccggatttcagagacaacggcagcggcaaagacgggctgcaggcggaattctccatctggaactgctcgtggccgttggacctgatgtgttccaggcgcatcaggaagataccgagaggtacgtgcttaccaacttgaatattggcgcagaacttctccgcgaccctagcctgggggctcagttccgagtgcaccttgtcaaaatggtcattcttacggagcctgaaggcgcacctaacataaccgccaacctgacttcgtccctgctttcggtgtgcggatggtcacagactataaacccagaagatgataccgatcctgggcatgccgacctggtgctctacataactagatttgaccttgagctgccagatggaaacagacaggttcgcggggtgacgcaactgggtggagcatgtagcccaacctggagctgcctgatcactgaagatactgggtttgacctgggcgtgaccatagcccatgaaatcggtcattcttttggtctggagcatgatggggcacctggttccggctgcggtccatccgggcatgtcatggcctctgacggtgcggcgcccagagcaggattggcgtggtccccctgctcgcgccggcaactcctttcattgctgtcggccgggcgggcaaggtgtgtgtgggatcctccccgtccacaacctggatcggccggacatccaccagatgcacaacccggtctttactactcggctaacgagcaatgcagagtggcctttggaccaaaggctgtcgcatgtaccttcgcccgggagcacctggacatgtgtcaagctctgtcctgccacactgatcctctggatcagtcgagctgttcgaggctgcttgtgcccctgctcgatgggactgagtgcggagtggagaaatggtgctcaaaaggacgttgtaggtcactggtggagcttactcccattgccgcagtgcatgggaggtggtcctcttggggaccccggtcaccttgttctcgatcctgtggaggcggtgttgtcacccggagacgccaatgcaacaatccccgcccagcgtttggtggacgggcctgtgtgggggcagatcttcaagccgaaatgtgtaatacgcaagcgtgcgaaaagactcagttggagtttatgtcgcaacagtgtgccaggactgacggtcaaccgctgcgctcgtcccctggtggggcgagcttctaccactggggtgcagcagtccctcattcgcaaggtgatgcactctgtaggcatatgtgtcgcgcaatcggcgaatcgtttatcatgaagagaggagatagcttcctggatggaacccggtgcatgccttcagggcctagagaagatggaactctgtccttgtgtgtgtcgggatcgtgtagaacctttggttgtgatggaaggatggattcgcagcaagtgtgggatcgttgccaagtgtgtgggggcgacaactccacgtgtagccctcgtaagggttcgttcaccgccggaagagcacgcgaatacgtcacttttctcaccgtgacccccaacctgacctcagtgtacatcgcgaatcaccgtccgttgtttacccatctggcagtacggattggtggacggtatgtggtggcgggcaaaatgagcatttcccccaatactacctaccctagcctgctggaagatggtagagtcgagtaccgggtggcactcactgaggatcgcttgcctcgcctcgaggaaattagaatctggggaccattgcaagaagatgcagatatccaggtctatagaagatacggagaggagtacggcaacctcactaggcctgacattaccttcacctattttcagccaaagccacgccaagcctgggtttgggcggcagtgagaggaccctgttcggtgtcttgtggagcaggtctgaggtgggtcaactactcgtgccttgatcaggcgagaaaggaactcgtggaaaccgtgcagtgccaaggatcgcagcaacctcccgcatggcctgaagcgtgcgtgctcgaaccatgtcccccttactgggcggtcggagacttcggcccttgttctgcaagctgtggaggaggcctgagagaacgtcccgtgaggtgtgtggaggcacaaggctccctgcttaagacgctgccacccgccagatgcagagcaggagcacaacaaccagcagtggcactcgaaacctgcaacccacagccttgtccagcacgatgggaagtgtcagagccgtcctcttgtacttcagcaggaggtgcaggacttgcactcgaaaatgagacttgtgtgcctggtgctgacggcctcgaagcacctgtcactgaaggacctggatccgtggatgaaaaactccccgcacctgaaccgtgcgtggggatgtcctgccctccaggatggggacacctggacgcaacttctgctggagaaaaggccccatccccttgggggtcaattcgaactggagcacaggccgcacatgtgtggactcctgctgccggatcatgtagcgtcagctgcgggcgagggctcatggagctcagatttctctgtatggattctgcgctccgggtgcctgtgcaggaggaactttgtggccttgcatcaaagccgggatccagaagggaagtgtgtcaggccgtcccttgcccggcgaggtggcagtacaagctggctgcttgttcagtctcatgtggcagaggggtggtgcgtagaattctctactgcgcgcgggcacatggcgaggatgacggagaagaaattctgcttgatactcagtgccaaggcctgccccgacccgagccccaggaagcgtgttctttggagccctgtccaccacggtggaaagtgatgtcactgggtccatgcagcgcatcatgcggcctcggaactgcccgacgttcggtggcctgcgttcagctggaccagggccaggatgtcgaagtggacgaagcagcatgtgcagctctggtccgcccggaggcatcggtgccatgcctgattgcagactgcacttacagatggcacgtagggacctggatggaatgttctgtctcatgcggagacggaattcagcggcgccgcgatacttgtcttggcccgcaagcacaagcacctgtccctgcggatttttgccaacatctgcctaagccagtgaccgtcaggggctgctgggctggcccttgtgtgggccagggaacgccttccttggtgcctcacgaagaagcagcggcaccaggcagaacgacggcaacccctgcaggagcaagccttgaatggtcccaagcgcgcggactcctcttctcccctgctcctcagcctcggaggctgcttcctggtccgcaagaaaatagcgtgcaatcgtcggcctgcggacgccaacatctggagccgactgggactatagatatgagaggcccaggccaggcagattgtgccgtggcaattggacgaccgctcggcgaagttgtgacccttcgtgtccttgagtcctcgctcaattgttcggcaggcgatatgcttctcctttggggtagactgacctggcgcaagatgtgccggaagctcctcgatatgaccttcagctctaagaccaataccctggtggtgcgccaaaggtgcggacgcccaggtggaggcgtgctgctgcgctacggttcacaattggcacccgaaacgttttaccgtgagtgtgatatgcaacttttcgggccgtggggagaaatcgtttcgccttccctttcgcctgcaacctcgaacgcaggagggtgtaggctcttcatcaatgtcgcacctcatgccagaatcgcaattcatgcgcttgcaactaacatgggtgcaggtactgagggtgccaatgcatcgtacatcttgattagagacactcactcacttagaaccaccgcatttcatggtcaacaagttctttattgggaatccgaaagctcccaggccgaaatggagttcagcgaggggttcctgaaagcgcaagcaagcctgcgcgggcaatactggaccttgcagtcgtgggtcccagaaatgcaagaccctcaaagctggaagggcaaggagggaact

SEQ ID NO: 237931 - DNA, 4281 bp, Artificial Sequence
  derived and/or modified sequence
atgcatcaacggcatcctcgagcgcgctgtcccccactttgcgtggctgggatcctggcatgcggctttctgctgggttgttggggcccttcacatttccagcagagctgcctccaagccctggaaccacaggcagtctcgtcctacttgagccccggagcaccactgaagggacgccccccttcgccaggatttcaacggcaacgccagcgccaaagacgtgccgcaggagggattcttcatctggagctcctggtggcggtgggacctgatgtctttcaagcacaccaagaggacaccgaacggtatgttttgactaacttgaacattggcgcagagctgctcagggatccttcccttggagcacaatttcgggtccacctcgtgaagatggtgatcctgaccgaaccggagggtgcccctaacattactgccaaccttacgtcatctctgctttcagtgtgtggatggtcccaaactatcaatccggaagatgatactgatcctggccatgcagacctggtgctgtacataacgagatttgatctcgaactccccgacggaaacagacaagtcaggggtgtgacccaactgggtggcgcatgttcgcctacctggagctgtctgattaccgaagataccgggtttgatctcggcgtgacgatagcacatgaaatcggacactcgttcgggctggaacatgatggtgcaccagggtcgggttgtggacctagcggtcatgtgatggcatccgacggtgcagcaccaagggcggggctcgcgtggtcgccatgttcgcgcagacaactgttgtccctccttagcgctggacgcgcgagatgtgtctgggatccaccgcgacctcagccaggatccgctggacatcctcccgacgcacagcctggtctgtactactcagcaaacgagcagtgtagggtggcatttggtccgaaggcggttgcttgtaccttcgctagagaacacctcgatatgtgtcaggcactgagctgccacacggatcccctggatcagtcctcgtgttcgcgcctgctggttccccttttggacggaactgagtgtggggtcgagaagtggtgttcgaagggccgttgtaggtcactggtcgagctgactcccatagcagcagtgcacggaagatggagctcatgggggccacggtccccatgctcacgttcgtgcggtggcggagtcgtgactaggcgccgccaatgcaataatcctaggccagcattcgggggaagagcatgtgtgggagccgatctccaagcagagatgtgtaacacccaggcatgtgagaaaactcagctggagtttatgtcccagcaatgtgccagaactgatggccagcctttgcgatcctcacccggaggagcctcgttttaccattggggcgcagctgtccctcactcacaaggagatgcactgtgtaggcatatgtgtagggcaattggggagtcattcatcatgaaaagaggcgactcatttcttgacgggactagatgtatgccgagcggaccccgtgaagatggaactctgagcctgtgtgtgagcgggtcgtgtagaacctttggatgtgacggacgtatggactcacagcaagtgtgggatcgctgtcaagtttgcggtggtgataacagcacttgctcaccacggaagggctcctttactgcaggtagggcacgtgaatacgtgacgtttctgactgtgactccaaacctgactagcgtgtacatcgccaaccacagacctctgttcacccacctggccgtgcgcataggagggagatacgtcgtcgcaggaaagatgtcgatctcccccaatactacgtatcccagcctgctcgaagatgggcgggtggaataccgtgtggctcttaccgaggatcgcctccctcggctggaagaaataagaatttggggtccactgcaggaagatgcagacatacaggtgtacaggagatacggagaagaatacgggaacctgaccagacctgacattaccttcacctactttcagcctaagccacggcaggcctgggtctgggcggcggtgcgcggaccgtgctcggtgtcgtgcggtgcgggtctgcgctgggttaactactcctgccttgatcaagcacgtaaggaacttgtggaaactgtgcagtgccaaggttcccaacagcctcctgcctggcctgaagcatgcgtgctcgaaccgtgcccgccttactgggcagtcggagactttggtccctgttcggcctcgtgtggcggggggctgcgagaacgccctgtgcgatgtgtcgaagcacaaggtagcttgctcaaaaccctgccccccgccagatgtagagcaggtgcgcaacaacctgctgttgccttggaaacctgcaatccgcaaccctgtcctgcgcgctgggaagtgtcggaaccaagctcctgtactagcgcaggaggtgcggggcttgcactggaaaacgaaacctgtgtgcccggcgctgatggacttgaggcccctgtgactgaaggacctggatcagtggatgagaagttgccagcacccgaaccttgtgtcggaatgagctgtccacctggttggggacaccttgatgcaactagcgcgggcgagaaggcaccatcgccgtggggttccattagaactggcgcacaggcagcgcatgtctggactccagcagcaggaagctgttccgtgtcgtgcggcagaggactcatggagctcagatttctttgtatggattcggcactgagggtccctgtccaagaggaactttgtggactcgcctcaaaacctggatcgaggcgtgaggtgtgtcaggcggtgccatgtccagcaagatggcaatacaagttggcggcctgtagcgtcagctgtggtagaggtgtcgttcgtcggattctttactgtgcaagagcacatggcgaggacgatggagaggaaatcctgcttgatacccagtgccaggggcttccaagacctgaaccccaggaggcatgttccctggagccgtgcccaccccggtggaaggtgatgagcttgggtccctgttcagcatcgtgtggacttggaaccgcacgaagatcagtcgcttgcgtccagcttgatcagggtcaggatgttgaggtggatgaagccgcctgtgctgcactggtgcgccctgaagcaagcgtcccttgcctgatcgcggactgcacttacagatggcacgtgggaacctggatggaatgttcggtgtcatgcggagacggtatccaacggagacgggacacctgtctgggaccacaagcccaagccccagtgccagcagatttttgccaacatcttcctaaacctgttactgtgcgaggatgctgggcgggtccatgcgtcggacaaggcaccccctcacttgtgccccatgaagaagccgcagcaccaggacgaactactgccacccctgccggcgcctcccttgaatggtcgcaggcacgtggactgctgttctcccctgcacctcagccaagacggctgctgcctggtccccaagaaaactcagtgcagagctcagcctgtggtagacaacatcttgaacccactggaaccattgatatgagaggaccagggcaagccgattgtgcagtggccattggtagaccactcggcgaagtcgtgactcttcgtgtgcttgaatcatcccttaattgctcagcaggggatatgctgctgctgtggggacgcctgacttggagaaagatgtgccgtaaactgctcgatatgacctttagctcaaagacgaacactctcgtggtgcgccagaggtgtggccggccgggcggcggagttctgctgaggtacggttcgcaacttgcccctgaaaccttttacagagaatgcgacatgcaattgttcgggccttggggagagattgtgagcccatccctctccccggcaacttcgaatgccgggggatgcagactgtttatcaatgtggcaccgcatgctagaattgccattcatgccctggccaccaacatgggcgcaggcaccgagggagctaatgcatcgtacatcctgattagagatacccattctctgaggactactgcgtttcatggacaacaagtcctttactgggaatcggaatcctcgcaagccgagatggaatttagcgagggctttcttaaagcccaggcgagccttaggggacagtattggaccctgcagtcatgggtgccagagatgcaagacccccagtcgtggaaggggaaggaaggaact

SEQ ID NO: 237932 - DNA, 4281 bp, Artificial Sequence
  derived and/or modified sequence
atgcatcaaaggcacccaagggcacggtgtcctccgctatgtgtagcagggatcttggcctgcggcttcctcctcggatgttggggaccaagccattttcagcagtcttgtctgcaggccctggaaccacaagcagtgtcctcatacctctccccgggcgctcctctcaaagggaggcccccttctcctggtttccagcggcagcggcagcggcaaaggagagccgcagggggtatcctgcatctggagctgcttgtcgccgtaggaccagacgtctttcaggcccaccaagaagacacagaaagatacgtgctgacgaacctcaatatcggagctgagctgctgagagatccaagtttaggagctcagtttcgcgttcatctggtgaaaatggtcattttaaccgagcccgagggggccccgaacataactgcgaacctaacaagcagcttgttgtcggtctgcggctggtcacaaactataaatcccgaagatgataccgaccccggacacgctgatctggtgctctacattacccgctttgaccttgagctaccggacggcaatcggcaggtgaggggcgtgacacagctgggaggagcatgctccccaacctggtcctgcctgattaccgaagacaccggatttgacttgggagtgaccatagcacacgagataggacactcgtttgggcttgagcatgacggcgcacccggttcaggctgtggtccctctggtcatgtgatggcatcagacggcgctgcaccccgggctggcttagcgtggtccccatgcagcaggagacaactgctctccctgcttagcgcgggacgggcaaggtgcgtctgggacccaccaagacctcagcctgggtccgctgggcacccccccgatgcccagcccggcctatactatagcgcaaatgaacagtgtagagtggcgtttggcccaaaggcagtggcctgcaccttcgctagggagcacctcgacatgtgccaagctctgtcttgtcataccgacccacttgatcagtcaagttgctcccgcctacttgtgccgctgctggacgggaccgagtgtggcgttgagaaatggtgctctaagggccgctgtaggtctcttgtcgagctgaccccaattgctgcagttcatggacgttggtcttcatggggcccacgctcaccctgcagtagatcatgtgggggcggggtggtgactaggagacgccagtgtaacaaccctcgcccggcgttcggcgggagggcttgcgtcggggcggacctacaggcggaaatgtgtaacacacaggcctgcgaaaaaacacaactggagttcatgagccaacagtgcgcacgcaccgacggtcagccgctccggtctagtcctggaggagcctcattctaccactggggggctgctgtgccccacagccaaggggatgccctctgccgacacatgtgtagagccatcggggagagcttcattatgaaacgcggagatagcttcttagacggcactcgctgtatgccttccgggcctcgcgaggatgggacactctccctctgcgtatctggcagctgtagaacattcgggtgcgacgggagaatggacagccagcaggtgtgggatcgatgccaagtctgcggaggcgacaatagtacctgttcaccacggaagggatcctttactgccgggagagcaagagagtacgtaacattcttgaccgtgaccccgaatctaacatcagtgtacattgccaatcacagacctctgttcacacacctggccgtccgcataggcggcagatatgtggttgcagggaagatgagtataagcccgaacactacttacccaagcctgctcgaggatgggagagtcgagtacagagtggccttgacggaagaccgcctaccaaggctggaggagattcggatctggggtccactccaggaagacgccgatatccaggtctaccggcgatacggcgaggagtatggtaaccttacgcggcccgacatcaccttcacctatttccagccaaaacctcgtcaggcctgggtgtgggcagccgtgaggggcccttgctcagtcagttgcggtgcagggctccgttgggtcaattattcctgtctggaccaagcacgcaaagaactggtggagactgtacagtgtcagggaagccagcagcctcccgcttggcccgaagcatgcgtattagagccctgcccaccatattgggcggtgggtgactttggaccttgcagtgcttcctgtggcggcggcctgagagaacggccggtccggtgtgtcgaggcacagggaagtctcctcaagactctaccacctgccaggtgtagggcaggggctcagcaacctgcagtagcgctggaaacttgtaatccacagccttgcccggctagatgggaggtgtcggagccttcttcctgcacgagcgcagggggagcgggtcttgctcttgaaaacgagacttgcgtccccggagccgatgggctcgaagctccagtcaccgaagggcccgggagcgtcgatgaaaaactgccagcccccgagccctgcgtgggtatgtcatgtccgccgggctggggacacttggatgcaacctcagcgggggagaaagcgccatcaccatgggggagtattcggacaggcgcacaggctgcccacgtatggacaccagccgccggctcctgcagcgtctcttgcgggaggggcttaatggagttgcggtttctatgtatggacagcgctcttcgcgttcccgtccaggaggaactgtgtggcttggcttccaaacccggcagcaggcgcgaggtttgccaggcagttccttgtccagcccgatggcagtataagctggccgcatgcagcgtatcttgtggccggggtgtggtcaggcgcatactttattgtgccagggcccacggggaagacgatggagaagaaattctgcttgacacccagtgccagggactgcctcgcccagaaccccaggaagcctgctctttggagccgtgcccacccagatggaaggttatgtccttagggccatgttctgccagctgtggcctcggtaccgcgagaaggtctgtggcttgcgtccaattggatcagggacaagacgtggaggtggatgaggctgcgtgtgccgccctggtgcggccagaagcctcggtgccatgtctgatcgctgactgcacctatcggtggcacgtcggcacttggatggagtgtagtgtgtcatgtggggacggtatccagagacggagggacacatgtttggggccgcaagctcaagcacctgtgcccgcggacttctgccagcacctgcccaagccggttaccgtgcggggatgttgggcaggcccttgtgtcggccaaggtacacccagtttggttccgcacgaggaggcggccgcacctggacggacaactgctacccctgccggagcgagcttagagtggagtcaagcacgaggactactgttttctccagccccacagcctcggcgcttgctgccgggtccccaggaaaactccgttcagtctagtgcgtgtgggagacagcatcttgaacccacaggtaccattgatatgcgaggtcctggacaggcggactgcgcagtggccattggaaggccactaggtgaggttgtgacgctcagagtcctcgaatcttctctgaattgcagtgccggggacatgcttctactgtggggcaggttgacttggcgcaaaatgtgtagaaagctcctggatatgaccttttccagtaagacaaataccctggtcgtgcgccaacgctgcggtcgacccggaggcggagtactgctgcggtacgggtcccagctggcgccagaaaccttctatagagagtgcgatatgcagttgtttggcccatggggcgagatcgtatccccttccctctctcctgcaacgtcaaatgctggcggctgccgtcttttcatcaacgttgcccctcacgctagaatcgccatccacgccctggcaacaaatatgggcgctgggacagagggtgctaacgcttcctacattctcatcagagacacccatagccttcgcacaactgctttccacggccagcaagtgctgtactgggagtcggagtcttcacaggcagagatggagtttagcgaaggcttcctcaaagcacaggccagcttacggggccagtactggacgttgcaatcctgggtacctgagatgcaggacccacagagctggaagggaaaagagggtacc

SEQ ID NO: 237933 - DNA, 4281 bp, Artificial Sequence
  derived and/or modified sequence
atgcaccagcgccatccccgcgcaagatgcccccccttgtgcgtcgctgggattctggcatgcggtttcctccttggttgttgggggccctcgcactttcagcagtcttgtctgcaagctctagaaccccaagctgtgtcctcatacctatcacctggagcacctctgaagggacgacctccgagccctggattccagcggcaacgacagagacagcggagggcagcaggaggcatcttgcacctggaactgctggtggccgtcgggcccgacgttttccaggcacaccaggaagataccgagaggtacgtgctcactaacttgaatatcggagcagaacttctccgcgatcctagtctgggtgcccagtttagggtgcatctggtcaagatggtgattctgacagaaccagagggagcacccaacataaccgccaacttgaccagctccctgctctcagtgtgtggatggtctcagacgatcaatccagaggatgacacagacccggggcacgcagacctggtgttatacatcaccaggttcgatttagaactgcccgacggcaatcgacaggtgaggggggttacccaactaggtggcgcttgcagcccaacatggagctgcctgattaccgaggacacaggatttgatctgggtgtgacaatagcccatgagatcggccactctttcggactagagcatgatggcgctcccgggagtggctgcggtccatccgggcacgtcatggcgagcgatggagcagctccgagggcaggactcgcctggtcaccgtgctctaggagacagctgctatccttgctgagcgccgggcgggccaggtgtgtttgggacccgcccagacctcaaccagggtcagccgggcatccgcctgatgctcagcctggcctgtactattccgcgaacgagcagtgccgagtcgcattcgggcccaaggccgtcgcctgtacatttgctcgagaacatctggacatgtgccaagccctcagctgccacaccgacccgctggatcagtcttcatgctcacggttgcttgttccactcttggacggtaccgaatgcggggttgaaaaatggtgctccaaaggacggtgcagaagcttggtggagcttacgcctatcgcggccgttcacggtagatggagttcttgggggccacggagtccctgctcccgttcatgcggcgggggcgtggtcacgcgacgcagacaatgcaacaatccccggcccgcctttggcggtagagcttgcgtcggagcagatctgcaggcagagatgtgtaatacccaagcgtgtgaaaagacgcagctcgaattcatgtcccaacagtgcgcccggacagacggtcagcccctgaggtcctcacccgggggggcaagcttctatcactggggcgctgccgtcccacactcacaaggcgatgctttgtgcaggcatatgtgtagggcaatcggcgagtcattcataatgaagaggggcgactcatttctggacggaaccagatgcatgccatcaggcccacgcgaggacgggacactgtcattgtgtgtctcgggatcctgcaggaccttcggttgtgatggacgtatggactcgcaacaggtgtgggaccgctgccaggtttgcggcggtgataattcaacttgtagtccccgtaaaggcagttttactgcaggccgcgcgcgcgaatatgtgacattcctgacagtaacaccaaatctgacaagcgtttatatagcgaatcaccggcctctgttcacacatcttgccgtccgaattggcgggcgatacgtcgtggcagggaagatgagtatctccccaaacacgacttacccatcgttgctggaagacggtagagtggaataccgtgttgcactcaccgaggatcggcttcctaggctggaagaaattagaatctggggtcctctccaggaagatgctgatattcaggtctacaggcggtatggcgaagagtacggcaatctgaccagacctgacataacgttcacttacttccagcccaaaccacgacaagcatgggtgtgggccgccgttcgggggccttgttctgtgtcctgcggcgccggtctccgatgggtaaactattcctgtctggaccaggccagaaaggagctggtggaaaccgtgcagtgccagggttctcagcagccccccgcctggcccgaggcctgtgtcttggagccctgtccgccttattgggcagtgggggacttcggtccttgttctgcttcctgcgggggcgggcttagagagagacccgttcggtgcgtcgaggctcagggaagtctgctgaagacgctgcccccggcacgttgcagggccggcgcacagcagccagctgtagcactggaaacctgcaatccacaaccatgcccagctcggtgggaggtatctgaaccatcatcatgcactagcgccgggggtgctggtttggccctcgaaaacgagacctgtgttccaggagctgacggtctcgaggcgcctgttacggagggtcctggatccgttgacgaaaaacttcccgctcccgaaccttgtgtaggcatgagctgtcccccaggctggggccatcttgacgcaaccagcgccggggaaaaagctccctccccttgggggtctattagaacaggggcacaggctgcccacgtctggacacccgcagccggatcctgcagcgtgtcatgtggcagaggactgatggagctgaggtttttgtgcatggattccgccctgagggtgcccgtgcaagaggagttatgtggcctggcttcaaagcccgggagtcgaagagaggtttgtcaggcggtgccgtgtccagcgcggtggcaatacaaattagcggcctgcagtgtgagctgtggccggggcgtagtgcgccggatcctatattgtgccagagcccatggagaggacgacggcgaagaaatcctattagacacacagtgccagggcctgccgaggccagagccccaggaggcctgctctcttgagccgtgccctcccagatggaaggtgatgtcgcttggaccatgtagtgcctcgtgcgggctaggtacggcccgacggagtgtagcatgtgtccagctggaccaggggcaggacgtggaggtcgacgaggccgcgtgtgccgcgctggtccgacccgaggctagcgtcccttgcttaatcgccgactgtacctatcgctggcatgtgggcacatggatggagtgttcggtcagctgcggcgatgggatccagcgcaggagggatacctgtctgggcccacaggctcaggcccccgtccccgctgacttctgccagcacctgcctaagcccgtgaccgtcagagggtgctgggccggtccctgtgttggacaaggaaccccttctcttgtgcctcatgaggaggccgccgctcccggacgcacaaccgcaacaccggctggcgccagcctggaatggtctcaggctaggggtctattattttcacccgccccacagccacgacggcttctgcctggcccgcaagaaaatagcgtgcaatcttctgcctgtggtaggcagcacctggagcctaccggtactatcgacatgcgagggcctggacaggctgattgtgccgtggccatcgggagaccccttggcgaagttgttacccttcgagtcctggagtcgagtctgaactgtagtgccggggacatgctgttactctggggtaggctcacttggcgcaaaatgtgccggaagttgttggatatgactttcagttcaaaaactaacacccttgttgtgagacagcgatgtggccgccctggaggaggtgtccttctccgctacggatcacagctcgcacccgaaaccttctacagagagtgcgatatgcaactttttgggccatggggcgaaatcgtgagcccctctctgtcccccgctacgtccaacgcggggggctgccggttgttcatcaatgtcgctccccacgcgcgaatcgcgatccatgcgctggctactaacatgggagcaggtaccgaaggtgcaaacgcctcttatattcttatacgagacacccacagtctaagaactactgcctttcatggccagcaggtgctatactgggaatccgagtccagccaggcagagatggagttcagcgagggatttttgaaggcccaggcatcattgaggggtcagtactggactttgcagtcgtgggttccggaaatgcaggaccctcagtcatggaaaggaaaggaggggaca

SEQ ID NO: 237934 - DNA, 4281 bp, Artificial Sequence
  derived and/or modified sequence
atgcatcagcgccacccccgcgcaagatgtcccccgctatgtgtcgccgggatcctggcctgcggcttccttctggggtgctgggggccgtcccacttccagcagagttgcctccaagcgctggagccgcaagctgtcagcagctacctgtcgccgggggcccccctaaagggtcggcctccctctccgggctttcaacgtcagagacagagacagagaagggctgccggtgggatcttgcatttggaactgctggtggccgtggggcctgatgtctttcaggctcaccaggaagacacggagagatatgttctgacaaacctcaacattggggcggagctcctgcgtgatccatctctgggggcgcagttcagggtccacctggtgaagatggtgatcctcacggaacctgagggcgctccaaacatcaccgccaatctgacctccagtcttctgtctgtttgcggatggagtcagaccataaaccctgaggacgacacggatccagggcacgcagatttggtactgtacattacacgtttcgatctggaacttcccgatggcaacagacaggttaggggagtgacacagcttggcggggcttgtagtcccacctggagttgcctcatcacagaggacacaggattcgaccttggcgtgacaatagcccatgagataggtcactccttcggactggagcacgacggtgctcctggaagtggctgcgggccgagcggccacgtgatggccagcgacggggcggctcccagagcgggcctggcctggtcaccgtgctctcggaggcagctgctttccctgctgtctgccggtcgggcgcggtgtgtgtgggatccccctcggccgcagcctggatcagctggacacccccctgatgcacagcccggactgtattattccgctaatgagcagtgtcgggtggccttcggacctaaagcagtggcctgtacgttcgccagagaacacctggacatgtgccaagcgctgtcctgtcacacagacccccttgaccagagctcctgcagtagacttcttgtcccgcttctcgacgggactgagtgcggcgtcgaaaaatggtgttccaagggaagatgcaggtcactggtggaactgaccccaatcgcagcagtgcacgggaggtggagctcctggggaccccgttcaccttgctcccggtcttgcggagggggcgtcgtgacgaggcgccggcagtgtaataatcctcggccggcgtttgggggcagggcctgtgttggcgctgacctccaggcggagatgtgcaatacccaggcttgtgaaaaaactcagcttgaattcatgtctcagcaatgtgcacggacagatggacagcccttaagaagttcccccgggggggctagcttctatcactggggtgcagccgtgccccatagccaaggggacgcactttgcagacatatgtgcagggccatcggcgagagctttattatgaaacgcggggacagcttcctggacggaacgcgctgcatgccatccgggccacgagaggatggaacgctgtccttatgcgtcagcggctcttgtcggacattcggatgtgacgggagaatggattctcaacaggtctgggacaggtgccaggtgtgtggtggggataacagcacctgttccccacgcaaaggaagctttacagccgggagggcgcgagagtacgtgacgttcctcactgtaacacccaatcttacctctgtgtatatcgcgaatcacaggcctctcttcactcacctggctgtccgcatcggaggaaggtacgtggtggcagggaaaatgagtatctccccaaacactacctatccctcgctgttggaggatggaagggtggaatatcgcgtcgccctgaccgaagaccggctgccccggctagaagaaattcgaatctgggggcccctgcaagaggacgccgacatccaagtgtatagaaggtacggggaggagtacgggaaccttacccggccagacattaccttcacctatttccagccaaagcccaggcaagcctgggtctgggctgcagtgaggggcccttgttctgtcagctgcggggccggcctccggtgggtaaattattcctgtttggaccaggcgcggaaggaacttgttgagaccgtccagtgtcagggatctcagcaaccccccgcctggcctgaggcttgcgtgctggagccttgcccgccatactgggccgtgggggatttcgggccgtgttccgcgtcttgcggcggcggcctgagggagcggccggtgcgctgcgtcgaggcacagggctccctcctgaagaccctccctcccgcccgatgcagggccggagcgcagcagcccgcagtggcccttgaaacatgcaatccccagccttgtcccgccagatgggaagtgtctgaaccctcctcctgcacgagcgcgggcggggcaggacttgctttggagaatgagacctgtgtccccggcgccgacgggctagaagcccctgtgactgaaggccccgggtccgtggatgaaaagctaccggcccctgagccctgcgtcggaatgtcgtgcccccccggatggggccatctagatgccacctcagctggagagaaggcaccgagtccctgggggagtatcagaacgggggctcaggctgctcacgtgtggacccccgccgccgggtcctgtagcgtgtcctgtggcaggggtctgatggagctcaggttcctgtgtatggacagcgcactccgggttccggtgcaagaggaactttgcggactggcttccaagcctgggtcacgccgcgaagtctgccaggctgtgccctgccccgcaagatggcaatataagctcgccgcctgttccgtaagctgcggccggggggtcgtgaggaggattctgtattgcgcccgcgcccacggggaggatgacggggaggagatcctcctcgatacccagtgtcaaggcctgccaaggccggagccacaggaggcctgcagcctggaaccttgtcctccacggtggaaagtgatgtccctaggaccgtgcagcgccagctgcggcttaggcacagcaaggcgctcggtggcctgcgtgcagttggatcagggacaggatgttgaggtggatgaagctgcatgtgctgccttagtccggcctgaggcctcagtcccttgcttaatcgccgactgtacctacagatggcatgttggcacatggatggagtgttccgtgtcgtgtggcgatggtatccagcgtcgacgcgacacctgcctgggtccccaggcccaagctccagtcccagcggacttttgccagcacttacccaagcccgtcaccgtgcggggatgctgggctggaccatgtgtcggacaaggtacccctagtctggtgcctcatgaagaggccgccgcacccggcagaactacggccacacccgctggggcatctctcgaatggtctcaggcccggggactcctgttcagcccggcccctcagcctcgtaggctgctgcccggcccccaggaaaattcagtgcagtccagcgcctgcgggagacagcacctggagcctaccggcactattgacatgcgtggtcctgggcaggccgactgtgctgtggctatcggtagaccccttggcgaggtggttaccctcagagtcctggaatccagcctcaactgtagcgcaggagacatgcttctgttgtgggggcggttaacctggaggaaaatgtgtcgcaagctgttggatatgacattttcaagcaagactaacacgctggtcgtcagacagcgctgcggccgccccggcggcggagtactgctacgttacggtagccagcttgcccctgaaactttctaccgcgagtgcgacatgcaactgttcggcccttggggggagatagtgtctccatccctgtctccagctacctctaatgcaggcggttgcagactgttcatcaatgtcgctccccatgcccgcatagccatccatgcgctcgctacaaatatgggcgccggcaccgaaggcgccaatgcttcctacatccttattcgagacacacacagtttacgcactacagcattccacggacagcaggtgctgtattgggagtctgagagctctcaggccgagatggagtttagcgaagggtttctgaaggcccaggcgtcgctaagaggtcagtattggaccctccagagctgggtgcccgagatgcaggacccacagagctggaagggcaaagagggaacc

SEQ ID NO: 237935 - DNA, 4281 bp, Artificial Sequence
  derived and/or modified sequence
atgcatcaacgccatcccagggcaagatgccccccactttgtgtagcaggaattcttgcatgtggattcttgctgggttgctggggacctagtcactttcagcaatcctgcctgcaagctcttgagccgcaagccgtatcatcctacctgtcgcccggggccccgttgaagggacgtcctccgtcgccgggattccagaggcaaaggcaaaggcaacggcgtgccgctggaggtattctgcatcttgaacttctcgtggccgtgggaccagatgtatttcaagctcatcaggaggacactgagcgttatgtactgactaaccttaatataggtgccgaacttctacgagatccatccttgggcgctcagtttagagttcatcttgtgaaaatggtgatcctaacggagcccgaaggggcaccgaacattaccgcaaatctgacttcaagtttgttgtcagtgtgtggatggtcgcagacaattaatcctgaagatgatacagatcctggacacgctgatttggttctttatattacacgtttcgatttggaacttccagacggaaaccgccaagtgagaggagtgacgcagcttggaggcgcttgttctccaacgtggtcttgtttaattaccgaggataccggttttgatcttggagtgacaatcgcacatgaaattggtcattcttttggattggaacatgacggggcaccaggaagtggatgcggaccatctggacatgtcatggcttcagatggggcagcaccacgggcaggtctcgcttggtcaccatgcagtcgaagacagttgctctctcttcttagtgctgggcgcgcacgttgcgtctgggacccaccaaggccacagcctggatcagctggccatccccctgacgcccagcctggtctctactatagtgctaatgaacagtgcagggttgcctttgggcctaaggctgtggcatgcactttcgcccgtgagcaccttgatatgtgtcaggcactgtcttgccacacagatcctttagatcagtcatcgtgcagccggttactcgtgcctcttctggacggtactgaatgcggtgtagagaagtggtgtagcaaggggaggtgtagatctctcgttgaattgacacctatcgcagctgttcatggacggtggtcttcatggggcccgcgtagtccatgttctcgttcttgtggggggggtgttgtgacgagaaggaggcaatgcaacaatccaagaccagcatttggtggcagagcttgcgtgggtgcagatttacaggcggaaatgtgcaatactcaagcctgtgagaaaactcaactggagtttatgtcgcaacaatgtgctcggaccgacggtcagccactaaggtcttcccccgggggagcctccttctatcactggggagccgcagttccacattctcagggggatgcactctgccgacacatgtgtagagcaataggtgagagtttcatcatgaaaagaggtgactccttcttagacgggactagatgtatgcctagcggtccaagggaagacgggactttgagtctttgcgtgtctggttcctgtaggacatttggttgcgatggtagaatggattcgcaacaagtatgggaccgttgccaagtttgtggtggcgataatagcacgtgctccccccggaagggttccttcaccgctgggagggcccgcgaatatgtcacattcttgactgttactccaaatctaacatcggtgtatatagccaaccatagacctctattcacacatcttgctgttagaattggaggtcgctatgttgttgcaggaaaaatgtccatttctcctaatactacctatccatccctcttggaggacggacgggtggagtatcgggttgcattaaccgaagatcgtcttcccaggcttgaagagattagaatatgggggccattacaagaagatgctgatatccaggtctatcgtcgttacggggaggagtatgggaacttaactaggcctgatattacctttacttacttccagcccaagcctaggcaggcctgggtatgggccgctgtacgtggaccatgctctgtgtcgtgcggtgcaggacttcggtgggtaaactactcatgcctcgaccaagcccgaaaggagttggtggagactgttcagtgtcaaggctcgcaacaacctccagcatggcctgaggcttgcgtgttagaaccttgtccgccatattgggcggttggcgattttggaccttgctccgcatcctgtggcggtgggttaagagagcgacccgtgagatgcgtagaagcacaaggttcactgctaaaaactttgccacctgctcgatgtagagctggggcacagcagcctgctgttgctcttgagacttgtaatcctcagccatgcccagcccgctgggaggtttccgagccaagcagttgcacaagtgccgggggagctggacttgccttagaaaatgaaacttgtgtccctggtgctgacggtcttgaggctccagtgaccgaaggccctggatctgttgatgaaaaacttccagcacctgaaccttgcgtggggatgtcctgtcctcctggttggggtcatttagacgcaaccagtgcaggggagaaagcaccatctccctggggttcgatcaggaccggggctcaggctgctcatgtttggactcccgctgctggatcctgctcagtgtcttgcggaagggggctgatggagcttcgattcctttgcatggattctgcgcttagagtcccagttcaggaagaactgtgcgggcttgctagcaagccgggttcacgtcgagaggtttgccaggctgtcccttgtccggctagatggcagtataagttggctgcctgtagcgtgagctgtgggaggggggttgtgcgtcgtattctctattgtgcgagggctcacggtgaagatgatggtgaagagattttgctcgatactcaatgccaaggattgcctcgccccgagcctcaggaggcctgttctttggaaccatgcccgccccgatggaaggtaatgtcactcgggccatgttctgcaagttgcggtttgggtactgctaggcgtagcgtggcctgtgtacaactggatcagggacaagacgtcgaggttgatgaggctgcatgtgctgcactcgttcgacccgaggcaagcgtgccgtgtttgatagctgactgtacttatcgctggcatgttggtacctggatggaatgcagcgtttcttgcggtgatgggattcaaagaagaagagatacatgcttgggtccacaggcccaagctcctgttccagcagatttttgccagcatttgccaaaacctgtaacagtcagggggtgctgggccggcccttgtgtcggtcagggtactccgtcgttggtgccacacgaggaagccgctgctcctggccgaactacagcaacccctgctggagctagtctggagtggtctcaggctagaggccttcttttctccccagccccccagcccagacggctcttgccaggtcctcaggagaacagcgtgcaaagtagtgcctgtggaaggcagcatttagaacccaccggtactatcgacatgcgcggaccaggtcaggctgactgcgctgtcgctattggaagacctctcggtgaagttgttaccctgcgagttcttgaaagcagcctaaattgtagtgcaggagatatgttgcttctgtggggtaggctgacatggaggaaaatgtgtcgtaagctactggatatgacgtttagttctaaaacgaatacgctcgtggtccgtcagaggtgcggtagacctggaggtggagttcttttgaggtatgggtcccaactcgctccggaaacgttttatagagaatgtgatatgcaactttttggcccatggggtgaaatcgtttcaccctctttatctccagctacatccaatgcaggaggttgcaggctctttatcaacgttgcccctcatgcgcgcattgcaatacatgcacttgccacaaacatgggcgcgggcacagaaggagccaacgcctcttatatactaatacgtgatacccattcccttcggactaccgcctttcacggacagcaagtactctactgggaatcagaatcctctcaggctgagatggagttcagcgaaggatttctgaaggcccaggctagcctgaggggtcagtattggacattacagtcctgggttcccgaaatgcaggaccctcagtcctggaaggggaaggagggtaca

SEQ ID NO: 237936 - DNA, 4281 bp, Artificial Sequence
  derived and/or modified sequence
atgcaccaacgtcatccgcgggcgcggtgtccccccttgtgcgtagcaggcatcttagcttgcggtttcctgctgggatgctggggaccctcgcatttccaacagtcttgcctccaggccctggagcctcaggccgtttcaagctacttatccccaggcgccccactgaaaggcagaccccccagcccaggctttcaacgtcagcggcagagacagcggagagctgctggagggatcctccacctggaactcctggtggcagtcggtcctgatgtttttcaggcccatcaggaggatacggagcggtacgtcctcaccaacctgaacattggggccgagctgctcagggatccgagcttaggagctcagttcagggtccacctggtcaaaatggtaatactgacggaaccagagggggccccaaatatcacagcaaatctgacatcttccttgttatccgtatgcggttggagccagaccatcaaccctgaagacgacaccgatccgggacacgctgaccttgtcctgtatatcactaggtttgacctggagctccccgatggaaatcgacaggtgagaggcgtgacacagctgggcggggcttgttcgcccacatggagctgcttaataaccgaagataccggatttgatcttggggtgacgatcgctcacgaaataggacattccttcggtctggagcatgacggcgcccctggttcaggctgcggccccagcgggcatgtcatggcaagtgatggagctgccccccgagcaggtttggcctggtctccctgttcaaggcggcagcttctaagtctgttgtccgccgggagagcacgctgcgtgtgggaccctccacggccacaacccggctcggccgggcatccaccggatgcacaaccaggattatactacagtgcgaatgagcagtgccgggtcgcgttcggtcccaaggccgtggcatgtacctttgctcgggaacacctggacatgtgccaggccctgtcgtgtcacacagaccctttggaccagtccagctgcagccggctgctggtacccttgctggatggaacggagtgcggagttgagaaatggtgtagtaagggacggtgccggagcctggtggagctgactcccattgccgcggtgcacgggcggtggagttcctggggccccaggtcaccgtgctctaggtcatgtggcgggggagttgtgacaagacgaagacaatgtaacaatccaaggcctgcgttcggcggaagggcgtgtgtgggcgcagatctgcaggctgagatgtgcaatacccaggcctgtgaaaagactcaactggaattcatgagtcaacagtgtgccagaacggacggccaacctctgcgctcctctccgggcggtgccagcttttatcactggggggctgctgtaccacattcacaaggtgatgccctgtgtaggcacatgtgtagagctatcggggagagctttattatgaaaagaggagattcgttcttggacggcaccagatgcatgccaagtggtccaagagaggatggaactctgagcctatgcgtaagcggttcttgtcggaccttcggatgcgacggccggatggattctcagcaggtttgggaccgctgccaggtgtgcggcggcgacaactctacgtgttcaccaaggaagggaagcttcacggcgggacgtgcacgcgagtacgtcacttttctcacggtgactcccaacctgacctcagtgtatattgccaaccataggcctctgtttacccatctcgccgtccgaattggggggaggtacgtggtggcaggaaagatgtcaatttcccctaatactacatatccctccctgctggaggacggcagggtagagtaccgggtggcactcaccgaagatcgattgcctcgtctggaggagattagaatctggggtcctctgcaggaggatgccgacatccaggtctataggcgctatggggaggagtacggcaatctcaccaggcctgacataacttttacttactttcagcccaaaccacggcaggcttgggtgtgggcagccgtgcgcggaccctgttcagtctcgtgtggggccgggcttcggtgggtaaactattcttgtttagatcaagcccgcaaggaattggtggaaacagtgcagtgccagggaagtcaacagccccccgcctggccagaggcttgcgtcttggagccatgtcccccctattgggccgtgggagacttcggcccatgttccgcgtcatgtggtgggggtttgcgcgaacgacccgttaggtgtgtggaagcccaggggtctcttctcaaaaccctgcccccagctcgctgtcgcgcgggcgcgcagcagcccgcggtggcactcgagacctgcaaccctcagccctgccccgctagatgggaagtttcagagccgtcatcatgtacctccgccggaggtgctggtttagcactagagaatgaaacatgtgtgccgggggccgacgggcttgaggctcctgtgaccgaagggcctggctccgtcgatgagaaacttcctgctcccgaaccatgtgtaggtatgagctgcccgccagggtggggtcacctagacgcaacttcggcaggtgagaaagctcccagcccctggggctccattaggaccggggcacaagccgcccacgtatggacccccgccgccgggtcctgttctgttagttgtgggcgcgggctgatggagttacgcttcttgtgcatggactctgctctgcgagtcccagtgcaggaagaactatgtggactggcctccaaacccggttctagacgcgaagtatgtcaggctgttccatgtccagcaagatggcagtacaaactggctgcatgtagcgtgagctgtggccgtggcgtagtgaggaggatactgtattgcgctcgtgctcacggagaagatgacggggaagagattctgctagatacgcagtgtcagggactgccccgccctgaaccacaggaggcctgttccctcgagccatgcccccctcggtggaaggtcatgtcattgggaccttgcagtgccagctgcgggttgggaactgctaggcgctccgtggcttgcgttcaactagaccaggggcaagacgtagaggttgacgaagccgcttgcgcagccctcgtccggcccgaggctagtgtcccatgcttgattgctgattgtacataccggtggcacgttgggacttggatggaatgttcagtgagttgcggcgatggcattcaacgtcgccgggacacctgccttgggccacaagcccaagcaccagtccctgcggacttctgtcagcacctgccaaagcctgtcaccgtgcgagggtgttgggccggaccctgtgtgggccagggaaccccgagtctcgtgccacacgaggaagctgcagcacccggcagaaccactgctaccccggccggcgcctcactggagtggtcacaagccagaggtctcctcttctcccctgcccctcagccccgacgcctgcttccaggacctcaggagaattctgttcaaagctcagcctgcggccggcagcacttggagcctacaggcactatcgacatgcgcggccctggccaggccgactgcgccgtagcgattggacgacccttgggcgaggtcgttaccctgcgagtgttggagagttctctgaactgctctgcgggggatatgctgctgctatggggacgacttacatggcggaagatgtgtcgtaaactgctggacatgacatttagctctaagaccaataccctagtggttagacagcgctgtggtcgccccggggggggcgtcttactgagatacggcagtcagctcgctcctgagacattctatcgggaatgcgacatgcagctgtttggaccatggggagaaatagtgagcccgagcttgtcacccgctacttccaatgccggtgggtgtcggctgtttatcaacgtggcacctcacgcaagaatcgcaatacacgccctggccacaaacatgggtgcggggaccgaaggggcaaacgctagctacattctgatcagagacacacattctctgcgaaccactgcgttccatggccagcaagtcctgtactgggaatccgaatcgtcgcaagccgaaatggaattctccgaaggcttcctgaaggcccaagctagcctgaggggacagtattggacacttcagagttgggttccggagatgcaggacccccaatcttggaaaggcaaggagggaaca
